United States Patent Application Publication US 2011/0183924 A1 - sequence listing, part 273

SEQ ID NO: 814050 - protein, 129 aa, Homo sapiens
KINVNGVYGQLDLIEITWEEDFMKPVISIVDELLEAGINVTVYNGQLDLIVDTMGQEAWVRKLKWPELPKFSQLKWKALYSDPKSLETSAFVKSYKNLAFYWILKAGHMVPSDQGDMALKMMRLVTQQE

SEQ ID NO: 814051 - protein, 293 aa, Homo sapiens [sequence omitted]

SEQ ID NO: 814052 - protein, 328 aa, Homo sapiens
PTRPAAHCGICRLVRWWRKRRSVMGIQTSPVLLASLGVGLVTLLGLAVGSYLVRRSRRPQVTLLDPNEKYLLRLLDKTTVSHNTKRFRFALPTAHHTLGLPVGKHIYLSTRIDGSLVIRPYTPVTSDEDQGYVDLVIKVYLKGVHPKFPEGGKMSQYLDSLKVGDVVEFRGPSGLLTYTGKGHFNIQPNKKSPPEPRVAKKLGMIAGGTGITPMLQLIRAILKVPEDPTQCFLLFANQTEKDIILREDLEELQARYPNRFKLWFTLDHPPKDWAYSKGFVTADMIREHLPAPGDDVLVLLCGPPPMVQLACHPNLDKLGYSQKMRFTY

SEQ ID NO: 814053 - protein, 332 aa, Homo sapiens
PTRPAAHCGICRLVRWWRKRRSVMGIQTSPVLLASLGVGLVTLLGLAVGSYLVRRSRRPQVTLLDPNEKYLLRLLDKTTVSHNTKRFRFALPTAHHTLGLPVGKHIYLSTRIDGSLVIRPYTPVTSDEDQGYVDLVIKVYLKGVHPKFPEGGKMSQYLDSLKVGDVVEFRGPSGLLTYTGKGHFNIQPNKKSPPEPRVAKKLGMIAGGTGITPMLQLIRAILKVPEDPTQCFLLFANQTEKDIILREDLEELQARYPNRFKLWFTLDHPPKDWAYSKGFVTADMIREHLPAPGDDVLVLLCGPPPMVQLACHPNLDKLGYSLQLFPISTQAL

SEQ ID NO: 814054 - protein, 328 aa, Homo sapiens; identical to SEQ ID NO: 814052

SEQ ID NO: 814055 - protein, 175 aa, Homo sapiens
MSQYLDSLKVGDVVEFRGPSGLLTYTGKGHFNIQPNKKSPPEPRVAKKLGMIAGGTGITPMLQLIRAILKVPEDPTQCFLLFANQTEKDIILREDLEELQARYPNRFKLWFTLDHPPKDWAYSKGFVTADMIREHLPAPGDDVLVLLCGPPPMVQLACHPNLDKLGYSQKMRFTY

SEQ ID NO: 814056 - protein, 317 aa, Homo sapiens
SSTHASGKRRSVMGIQTSPVLLASLGVGLVTLLGLAVGSYLVRRSRRPQVTLLDPNEKYLLRLLDKTTVSHNTKRFRFALPTAHHTLGLPVGKHIYLSTRIDGSLVIRPYTPVTSDEDQGYVDLVIKVYLKGVHPKFPEGGKMSQYLDSLKVGDVVEFRGPSGLLTYTGKGHFNIQPNKKSPPEPRVAKKLGMIAGGTGITPMLQLIRAILKVPEDPTQCFLLFANQTEKDIILREDLEELQARYPNRFKLWFTLDHPPKDWAYSKGFVTADMIREHLPAPGDDVLVLLCGPPPMVQLACHPNLDKLGYSQKMRFTY

SEQ ID NO: 814057 - protein, 175 aa, Homo sapiens; identical to SEQ ID NO: 814055

SEQ ID NO: 814058 - protein, 367 aa, Homo sapiens
PTRPAAHCGICRLVRWWRKRRSVMGIQTSPVLLASLGVGLVTLLGLAVGSYLVRRSRRPQVTLLDPNEKYLLRLLDKTTVSHNTKRFRFALPTAHHTLGLPVAPWDHSRKQDILFSQISLSILRDAAHHRQPLCELSARSPGKHIYLSTRIDGSLVIRPYTPVTSDEDQGYVDLVIKVYLKGVHPKFPEGGKMSQYLDSLKVGDVVEFRGPSGLLTYTGKGHFNIQPNKKSPPEPRVAKKLGMIAGGTGITPMLQLIRAILKVPEDPTQCFLLFANQTEKDIILREDLEELQARYPNRFKLWFTLDHPPKDWAYSKGFVTADMIREHLPAPGDDVLVLLCGPPPMVQLACHPNLDKLGYSQKMRFTY

SEQ ID NO: 814059 - protein, 364 aa, Homo sapiens
TRLVRPRGYGLRWWRHRRSVMGIQTSPVLLASLGVGLVTLLGLAVGSYLVRRSRRPQVTLLDPNEKYLLRLLDKTTVSHNTKRFRFALPTAHHTLGLPVAPWDHSRKQDILFSQISLSILRDAAHHRQPLCELSARSPGKHIYLSTRIDGSLVIRPYTPVTSDEDQGYVDLVIKVYLKGVHPKFPEGGKMSQYLDSLKVGDVVEFRGPSGLLTYTGKGHFNIQPNKKSPPEPRVAKKLGMIAGGTGITPMLQLIRAILKVPEDPTQCFLLFANQTEKDIILREDLEELQARYPNRFKLWFTLDHPPKDWAYSKGFVTADMIREHLPAPGDDVLVLLCGPPPMVQLACHPNLDKLGYSQKMRFTY

SEQ ID NO: 814060 - protein, 317 aa, Homo sapiens
PTRPAAHCGICRLVRWWRKRRSVMGIQTSPVLLASLGVGLVTLLGLAVGSYLVRRSRRPQVTLLDPNEKYLLRLLDKTTVSHNTKRFRFALPTAHHTLGLPVGKHIYLSTRIDGSLVIRPYTPVTSDEDQGYVDLVIKVYLKGVHPKFPEGGKMSQYLDSLKVGDVVEFRGPSGLLTYTGKGHFNIQPNKKSPPEPRVAKKLGMIAGGTGITPMLQLIRAILKVPEDPTQCFLLFANQTEKDIILREDLEELQARYPNRFKLWFTLDHPPKGILPISGHPTIPSSSKSKPCPFVNSGFIEINLASHCQLGSLSAQTQ

SEQ ID NO: 814061 - protein, 83 aa, Homo sapiens
PTRPAAHCGICRLVRWWRKRRSVMGIQTSPVLLASLGVGLVTLLGLAVGSYLVRRSRRPQVTLLDPNEKYCSCSPSVLKHYKP

SEQ ID NO: 814062 - protein, 216 aa, Homo sapiens
SDPPRGALWDLSACQVVEEKALRHGDPDGKTLIQYPPLGDPSPSGSGHSAPDQGLSLPTPPRRALGPPWMLGSRSRYIRARDSARLPLCPWHASALELGIATPGTVTTQAPGSYPAWRSRCLLYPQSPVLLASLGVGLVTLLGLAVGSYLVRRSRRPQVTLLDPNEKYLLRLLDKTVSWGRKGQGEGGDQSAPGMEGTAPTVVGMSKGRGSARRAW

SEQ ID NO: 814063 - protein, 213 aa, Homo sapiens
PTRPAAHCGICRLVRWWRKRRSVMGIQTSPVLLASLGVGLVTLLGLAVGSYLVRRSRRPQVTLLDPNEKYLLRLLDKTTVSHNTKRFRFALPTAHHTLGLPVGKHIYLSTRIDGSLVIRPYTPVTSDEDQGYVDLVIKVYLKGVHPKFPEGGKMSQYLDSLKVGDVVEFRGPSGLLTYTGKGHFNIQPNKKSPPEPRVAKKLGMIAGGTGALH

SEQ ID NO: 814064 - protein, 335 aa, Homo sapiens
LDCRGGFWAKMAAMRKALPRRLVGLASLRAVSTSSMGTLPKRVKIVEVGPRDGLQNEKNIVSTPVKIKLIDMLSEAGLSVIETTSFVSPKWVPQMGDHTEVLKGIQKFPGINYPVLTPNLKGFEAAVAAGAKEVVIFGAASELFTKKNINCSIEESFQRFDAILKAAQSANISVRGYVSCALGCPYEGKISPAKVAEVTKKFYSMGCYEISLGDTIGVGTPGIMKDMLSAVMQEVPLAALAVHCHDTYGQALANTLMALQMGVSVVDSSVAGLGGCPYAQGASGNLATEDLVYMLEGLGIHTGVNLQKLLEAGNFICQALNRKTSSKVAQATCKL

SEQ ID NO: 814065 - protein, 216 aa, Homo sapiens
LDCRGGFWAKMAAMRKALPRRLVGLASLRAVSTSSMGTLPKRVKIVEVGPRDGLQNEKNIVSTPVKIKLIDMLSEAGLSVIETTSFVSPKWVPQMGDHTEVLKGIQKFPGINYPVLTPNLKGFEAAVAAGAKEVVIFGAASELFTKKNINCSIEESFQRFDAILKAAQSANISVRGYVSCALGCPYEGKISPAKVAEVCACVRAGGLVRVGHLVCP

SEQ ID NO: 814066 - protein, 112 aa, Homo sapiens
MGIEFDQPKNLCHLVLKTTVQIWYYYSLLQLRKLTLNNLPHRLQMVKSGIKPHFFSLQSPLLPRILCGIQIGGMVTVQLFLESSCPAPGLSLSCHNPCHMTKGSSPFFRSRN

SEQ ID NO: 814067 - protein, 136 aa, Homo sapiens
LDCRGGFWAKMAAMRKALPRRLVGLASLRAVSTSSMGTLPKRVKIVEVGPRDGLQNEKNIVSTPVKIKLIDMLSEAGLSVIETTSFVSPKWVPQMGDHTEVLKGIQKFPGINYPVLTPNLKGFEAAVRLLCSWLPL

SEQ ID NO: 814068 - protein, 264 aa, Homo sapiens
LDCRGGFWAKMAAMRKALPRRLVGLASLRAVSTSSMGTLPKRVKIVEVGPRDGLQNEKNIVSTPVKIKLIDMLSEAGLSVIETTSFVSPKWVPQMGDHTEVLKGIQKFPGINYPVLTPNLKGFEAAVTKKFYSMGCYEISLGDTIGVGTPGIMKDMLSAVMQEVPLAALAVHCHDTYGQALANTLMALQMGVSVVDSSVAGLGGCPYAQGASGNLATEDLVYMLEGLGIHTGVNLQKLLEAGNFICQALNRKTSSKVAQATCKL

SEQ ID NO: 814069 - protein, 335 aa, Homo sapiens; identical to SEQ ID NO: 814064

SEQ ID NO: 814070 - protein, 307 aa, Homo sapiens
LDCRGGFWAKMAAMRKALPRRLVGLASLRAVSTSSMGTLPKRVKIVEVGPRDGLQNEKNIVSTPVKIKLIDMLSEAGLSVIETTSFVSPKWVPQMGDHTEVLKGIQKFPGINYPVLTPNLKGFEAAVAAGAKEVVIFGAASELFTKKNINCSIEESFQRFDAILKAAQSANISVRGYVSCALGCPYEGKISPAKVAEVTKKFYSMGCYEISLGDTIGVGTPGIMKDMLSAVMQEVPLAALAVHCHDTYGQALANTLMALQLTVIPCPGSWAFLQLMRFPARQTGRVTSSPMPCQAGKGEFCTAEGTG

SEQ ID NO: 814071 - protein, 129 aa, Homo sapiens
LDCRGGFWAKMAAMRKALPRRLVGLASLRAVSTSSMGTLPKRVKIVEVGPRDGLQNEKNIVSTPVKIKLIDMLSEAGLSVIETTSFVSPKWVPQMGDHTEVLKGIQKFPGINYPVLTPNLKGFEAAVRG

SEQ ID NO: 814072 - protein, 123 aa, Homo sapiens
LDCRGGFWAKMAAMRKALPRRLVGLASLRAVSTSSMGTLPKRVKIVEVGPRDGLQNEKNIVSTPVKIKLIDMLSEAGLSVIETTSFVSPKWVPQMGDHTEVLKGIQKFPGINYPVLALPLTAL

SEQ ID NO: 814073 - protein, 82 aa, Homo sapiens
GGFWAKMAAMRKALPRRLVGLASLRAVSAPSRRGGGPAGTLTVRVGGLARGDCSLRGEAGQLSGQSREGVGVLDPPFSPQIL

SEQ ID NO: 814074 - protein, 640 aa, Homo sapiens
MESVVRRCPFLSRVPQAFLQKAGKSLLFYAQNCPKMMEVGAKPAPRALSTAAVHYQQIKETPPASEKDKTAKAKVQQTPDGSQQSPDGTQLPSGHPLPATSQGTASKCPFLAAQMNQRGSSVFCKASLELQEDVQEMNAVRKEVAETSAGPSVVSVKTDGGDPSGLLKNFQDIMQKQRPERVSHLLQDNLPKSVSTFQYDRFFEKKIDEKKNDHTYRVFKTVNRRAHIFPMADDYSDSLITKKQVSVWCSNDYLGMSRHPRVCGAVMDTLKQHGAGAGGTRNISGTSKFHVDLERELADLHGKDAALLFSSCFVANDSTLFTLAKMMPGCEIYSDSGNHASMIQGIRNSRVPKYIFRHNDVSHLRELLQRSDPSVPKIVAFETVHSMDGAVCPLEELCDVAHEFGAITFVDEVHAVGLYGARGGGIGDRDGVMPKMDIISGTLGKAFGCVGGYIASTSSLIDTVRSYAAGFIFTTSLPPMLLAGALESVRILKSAEGRVLRRQHQRNVKLMRQMLMDAGLPVVHCPSHIIPVRVADAAKNTEVCDELMSRHNIYVQAINYPTVPRGEELLRIAPTPHHTPQMMNYFLENLLVTWKQVGLELKPHSSAECNFCRRPLHFEVMSEREKSYFSGLSKLVSAQA

SEQ ID NO: 814075 - protein, 640 aa, Homo sapiens; identical to SEQ ID NO: 814074

SEQ ID NO: 814076 - protein, 640 aa, Homo sapiens; identical to SEQ ID NO: 814074

SEQ ID NO: 814077 - protein, 640 aa, Homo sapiens; identical to SEQ ID NO: 814074

SEQ ID NO: 814078 - protein, 640 aa, Homo sapiens; identical to SEQ ID NO: 814074

SEQ ID NO: 814079 - protein, 622 aa, Homo sapiens
MESVVRRCPFLSRVPQAFLQKAGKSLLFYAQNCPKMMEVGAKPAPRALSTAAVHYQQIKETPPASEKDKTAKAKVQQTPDGSQQSPDGTQLPSGHPLPATSQGTASKCPFLAAQMNQRGSSVFCKASLELQEDVQEMNAVRKEVAETSAGPSVVSVKTDGGDPSGLLKNFQDIMQKQRPERVSHLLQDNLPKSVSTFQYDRFFEKKIDEKKNDHTYRVFKTVNRRAHIFPMADDYSDSLITKKQVSVWCSNDYLGMSRHPRVCGAVMDTLKQHGAGAGGTRNISGTSKFHVDLERELADLHGKDAALLFSSCFVANDSTLFTLAKMMPGCEIYSDSGNHASMIQGIRNSRVPKYIFRHNDVSHLRELLQRSDPSVPKIVAFETVHSMDGAVCPLEELCDVAHEFGAITFVDEVHAVGLYGARGGGIGDRDGVMPYIASTSSLIDTVRSYAAGFIFTTSLPPMLLAGALESVRILKSAEGRVLRRQHQRNVKLMRQMLMDAGLPVVHCPSHIIPVRVADAAKNTEVCDELMSRHNIYVQAINYPTVPRGEELLRIAPTPHHTPQMMNYFLENLLVTWKQVGLELKPHSSAECNFCRRPLHFEVMSEREKSYFSGLSKLVSAQA

SEQ ID NO: 814080 - protein, 659 aa, Homo sapiens
STLFTLAKMMPGCEIYFLNMESVVRRCPFLSRVPQAFLQKAGKSLLFYAQNCPKMMEVGAKPAPRALSTAAVHYQQIKETPPASEKDKTAKAKVQQTPDGSQQSPDGTQLPSGHPLPATSQGTASKCPFLAAQMNQRGSSVFCKASLELQEDVQEMNAVRKEVAETSAGPSVVSVKTDGGDPSGLLKNFQDIMQKQRPERVSHLLQDNLPKSVSTFQYDRFFEKKIDEKKNDHTYRVFKTVNRRAHIFPMADDYSDSLITKKQVSVWCSNDYLGMSRHPRVCGAVMDTLKQHGAGAGGTRNISGTSKFHVDLERELADLHGKDAALLFSSCFVANDSTLFTLAKMMPGCEIYSDSGNHASMIQGIRNSRVPKYIFRHNDVSHLRELLQRSDPSVPKIVAFETVHSMDGAVCPLEELCDVAHEFGAITFVDEVHAVGLYGARGGGIGDRDGVMPKMDIISGTLGKAFGCVGGYIASTSSLIDTVRSYAAGFIFTTSLPPMLLAGALESVRILKSAEGRVLRRQHQRNVKLMRQMLMDAGLPVVHCPSHIIPVRVADAAKNTEVCDELMSRHNIYVQAINYPTVPRGEELLRIAPTPHHTPQMMNYFLENLLVTWKQVGLELKPHSSAECNFCRRPLHFEVMSEREKSYFSGLSKLVSAQA

SEQ ID NO: 814081 - protein, 640 aa, Homo sapiens; identical to SEQ ID NO: 814074

SEQ ID NO: 814082 - protein, 526 aa, Homo sapiens
MNQRGSSVFCKASLELQEDVQEMNAVRKEVAETSAGPSVVSVKTDGGDPSGLLKNFQDIMQKQRPERVSHLLQDNLPKSVSTFQYDRFFEKKIDEKKNDHTYRVFKTVNRRAHIFPMADDYSDSLITKKQVSVWCSNDYLGMSRHPRVCGAVMDTLKQHGAGAGGTRNISGTSKFHVDLERELADLHGKDAALLFSSCFVANDSTLFTLAKMMPGCEIYSDSGNHASMIQGIRNSRVPKYIFRHNDVSHLRELLQRSDPSVPKIVAFETVHSMDGAVCPLEELCDVAHEFGAITFVDEVHAVGLYGARGGGIGDRDGVMPKMDIISGTLGKAFGCVGGYIASTSSLIDTVRSYAAGFIFTTSLPPMLLAGALESVRILKSAEGRVLRRQHQRNVKLMRQMLMDAGLPVVHCPSHIIPVRVADAAKNTEVCDELMSRHNIYVQAINYPTVPRGEELLRIAPTPHHTPQMMNYFLENLLVTWKQVGLELKPHSSAECNFCRRPLHFEVMSEREKSYFSGLSKLVSAQA

SEQ ID NO: 814083 - protein, 504 aa, Homo sapiens
MESVVRRCPFLSRVPQAFLQKAGKSLLFYAQNCPKMMEVGAKPAPRALSTAAVHYQQIKETPPASEKDKTAKAKVQQTPDGSQQSPDGTQLPSGHPLPATSQGTASKCPFLAAQMNQRGSSVFCKASLELQEDVQEMNAVRKEVAETSAGPSVVSVKTDGGDPSGLLKNFQDIMQKQRPERVSHLLQDNLPKCCEIYSDSGNHASMIQGIRNSRVPKYIFRHNDVSHLRELLQRSDPSVPKIVAFETVHSMDGAVCPLEELCDVAHEFGAITFVDEVHAVGLYGARGGGIGDRDGVMPKMDIISGTLGKAFGCVGGYIASTSSLIDTVRSYAAGFIFTTSLPPMLLAGALESVRILKSAEGRVLRRQHQRNVKLMRQMLMDAGLPVVHCPSHIIPVRVADAAKNTEVCDELMSRHNIYVQAINYPTVPRGEELLRIAPTPHHTPQMMNYFLENLLVTWKQVGLELKPHSSAECNFCRRPLHFEVMSEREKSYFSGLSKLVSAQA

SEQ ID NO: 814084 - protein, 580 aa, Homo sapiens
  misc_feature (15)..(15): Xaa can be any naturally occurring amino acid
PRASSIKQCLERERXWRTPDGSQQSPDGTQLPSGHPLPATSQGTASKCPFLAAQMNQRGSSVFCKASLELQEDVQEMNAVRKEVAETSAGPSVVSVKTDGGDPSGLLKNFQDIMQKQRPERVSHLLQDNLPKSVSTFQYDRFFEKKIDEKKNDHTYRVFKTVNRRAHIFPMADDYSDSLITKKQVSVWCSNDYLGMSRHPRVCGAVMDTLKQHGAGAGGTRNISGTSKFHVDLERELADLHGKDAALLFSSCFVANDSTLFTLAKMMPGCEIYSDSGNHASMIQGIRNSRVPKYIFRHNDVSHLRELLQRSDPSVPKIVAFETVHSMDGAVCPLEELCDVAHEFGAITFVDEVHAVGLYGARGGGIGDRDGVMPKMDIISGTLGKAFGCVGGYIASTSSLIDTVRSYAAGFIFTTSLPPMLLAGALESVRILKSAEGRVLRRQHQRNVKLMRQMLMDAGLPVVHCPSHIIPVRVADAAKNTEVCDELMSRHNIYVQAINYPTVPRGEELLRIAPTPHHTPQMMNYFLENLLVTWKQVGLELKPHSSAECNFCRRPLHFEVMSEREKSYFSGLSKLVSAQA

SEQ ID NO: 814085 - protein, 564 aa, Homo sapiens
MESVVRRCPFLSRVPQAFLQKAGKSLLFYAQNCPKMMEVGAKPAPRALSTAAVHYQQIKETPPASEKDKTAKAKVQQTPDGSQQSPDGTQLPSGHPLPATSQGTASKCPFLAAQMNQRGSSVFCKASLELQEDVQEMNAVRKEVAETSAGPSVVSVKTDGGDPSGLLKNFQDIMQKQRPERVSHLLQDNLPKSVSTFQYDRFFEKKIDEKKNDHTYRVFKTVNRRAHIFPMADDYSDSLITKKQVSVWCSNDYLGMSRHPRVCGAVMDTLKQHGAGAGGTRNISGTSKFHVDLERELADLHGKDAALLFSSCFVANDSTLFTLAKMMPGCEIYSDSGNHASMIQGIRNSRVPKYIFRHNDVSHLRELLQRSDPSVPKIVAFETVHSMDGAVCPLEELCDVAHEFGAITFVDEVHAVGLYGARGGGIGDRDGVMPKMDIISGTLGKAFGCVGGYIASTSSLIDTVRSYAAGFIFTTSLPPMLLAGALESVRILKSAEGRVLRRQHQRNVKLMRQMLMDAGLPVVHCPSHIIPVRITSTCKQSITLRCPGEKSSYGLPPPLTTHPR

SEQ ID NO: 814086 - protein, 526 aa, Homo sapiens
GVRGPRGGKVFARQSELQEDGRKEAGGEEVAETSAGPSVVSVKTDGGDPSGLLKNFQDIMQKQRPERVSHLLQDNLPKSVSTFQYDRFFEKKIDEKKNDHTYRVFKTVNRRAHIFPMADDYSDSLITKKQVSVWCSNDYLGMSRHPRVCGAVMDTLKQHGAGAGGTRNISGTSKFHVDLERELADLHGKDAALLFSSCFVANDSTLFTLAKMMPGCEIYSDSGNHASMIQGIRNSRVPKYIFRHNDVSHLRELLQRSDPSVPKIVAFETVHSMDGAVCPLEELCDVAHEFGAITFVDEVHAVGLYGARGGGIGDRDGVMPKMDIISGTLGKAFGCVGGYIASTSSLIDTVRSYAAGFIFTTSLPPMLLAGALESVRILKSAEGRVLRRQHQRNVKLMRQMLMDAGLPVVHCPSHIIPVRVADAAKNTEVCDELMSRHNIYVQAINYPTVPRGEELLRIAPTPHHTPQMMNYFLENLLVTWKQVGLELKPHSSAECNFCRRPLHFEVMSEREKSYFSGLSKLVSAQA

SEQ ID NO: 814087 - protein, 423 aa, Homo sapiens
FERPPGYVNNEGPMADDYSDSLITKKQVSVWCSNDYLGMSRHPRVCGAVMDTLKQHGAGAGGTRNISGTSKFHVDLERELADLHGKDAALLFSSCFVANDSTLFTLAKMMPGCEIYSDSGNHASMIQGIRNSRVPKYIFRHNDVSHLRELLQRSDPSVPKIVAFETVHSMDGAVCPLEELCDVAHEFGAITFVDEVHAVGLYGARGGGIGDRDGVMPKMDIISGTLGKAFGCVGGYIASTSSLIDTVRSYAAGFIFTTSLPPMLLAGALESVRILKSAEGRVLRRQHQRNVKLMRQMLMDAGLPVVHCPSHIIPVRVADAAKNTEVCDELMSRHNIYVQAINYPTVPRGEELLRIAPTPHHTPQMMNYFLENLLVTWKQVGLELKPHSSAECNFCRRPLHFEVMSEREKSYFSGLSKLVSAQA

SEQ ID NO: 814088 - protein, 616 aa, Homo sapiens
MESVVRRCPFLSRVPQAFLQKAGKSLLFYAQNCPKMMEVGAKPAPRALSTAAVHYQQIKETPPASEKDKTAKAKVQQTPDGSQQSPDGTQLPSGHPLPATSQGTASKCPFLAAQMNQRGSSVFCKASLELQEDVQEMNAVRKEVAETSAGPSVVSVKTDGGDPSGLLKNFQDIMQKQRPERVSHLLQDNLPKSVSTFQYDRFFEKKIDEKKNDHTYRVFKTVNRRAHIFPMADDYSDSLITKKQVSVWCSNDYLGMSRHPRVCGAVMDTLKQHGAGAGGTRNISGTSKFHVDLERELADLHGKDAALLFSSCFVANDSTLFTLAKMMPGCEIYSDSGNHASMIQGIRNSRVPKYIFRHNDVSHLRELLQRSDPSVPKIVAFETVHSMDGAVCPLEELCDVAHEFGAITFVDEVHAVGLYGARGGGIGDRDGVMPKMDIISGTLGKAFGCVGGYIASTSSLIDTVRSYAAGFIFTTSLPPMLLAGALESVRILKSAEGRVLRRQHQRNVKLMRQMLMDAGLPVVHCPSHIIPVRVADAAKNTEVCDELMSRHNIYVQAINYPTVPRGEELLRIAPTPHHTPQMMNYFLGEYLGSCWCLTEELHKAVFAVFIIEALQR

SEQ ID NO: 814089 - protein, 343 aa, Homo sapiens
MESVVRRCPFLSRVPQAFLQKAGKSLLFYAQNCPKMMEVGAKPAPRALSTAAVHYQQIKETPPASEKDKTAKAKVQQTPDGSQQSPDGTQLPSGHPLPATSQGTASKCPFLAAQMNQRGSSVFCKASLELQEDVQEMNAVRKEVAETSAGPSVVSVKTDGGDPSGLLKNFQDIMQKQRPERVSHLLQDNLPKSVSTFQYDRFFEKKIDEKKNDHTYRVFKTVNRRAHIFPMADDYSDSLITKKQVSVWCSNDYLGMSRHPRVCGAVMDTLKQHGAGAGGTRNISGTSKFHVDLERELADLHGKDAALLFSSCFVANDSTLFTLAKMMPGKEAWHECLRVFGVS

SEQ ID NO: 814090 - protein, 271 aa, Homo sapiens
MESVVRRCPFLSRVPQAFLQKAGKSLLFYAQNCPKMMEVGAKPAPRALSTAAVHYQQIKETPPASEKDKTAKAKVQQTPDGSQQSPDGTQLPSGHPLPATSQGTASKCPFLAAQMNQRGSSVFCKASLELQEDVQEMNAVRKEVAETSAGPSVVSVKTDGGDPSGLLKNFQDIMQKQRPERVSHLLQDNLPKSVSTFQYDRFFEKKIDEKKNDHTYRVFKTVNRRAHIFPMADDYSDSLITKKQVSVWCSNDYLGMSRHPSPHTPDDELLP

SEQ ID NO: 814091 - protein, 271 aa, Homo sapiens; identical to SEQ ID NO: 814090

SEQ ID NO: 814092 - protein, 161 aa, Homo sapiens [sequence omitted]

SEQ ID NO: 814093 - protein, 272 aa, Homo sapiens
MESVVRRCPFLSRVPQAFLQKAGKSLLFYAQNCPKMMEVGAKPAPRALSTAAVHYQQIKETPPASEKDKTAKAKVQQTPDGSQQSPDGTQLPSGHPLPATSQGTASKCPFLAAQMNQRGSSVFCKASLELQEDVQEMNAVRKEVAETSAGPSVVSVKTDGGDPSGLLKNFQDIMQKQRPERVSHLLQDNLPKSVSTFQYDRFFEKKIDEKKNDHTYRVFKTVNRRAHIFPMADDYSDSLITKKQVSVWCSNDYLGMSRHPSPHTPDDELLPW

SEQ ID NO: 814094 - protein, 176 aa, Homo sapiens
MESVVRRCPFLSRVPQAFLQKAGKSLLFYAQNCPKMMEVGAKPAPRALSTAAVHYQQIKETPPASEKDKTAKAKVQQTPDGSQQSPDGTQLPSGHPLPATSQGTASKCPFLAAQMNQRGSSVFCKASLELQEDVQEMNAVRKEVAETSAGPSVVSVKTDGGDPSGLLKNFQEATAF

SEQ ID NO: 814095 - protein, 116 aa, Homo sapiens
RFVWTSRLECPPPSPPPLQSSAQVRARAVGAAPAEEAPGCPASRGTAAPGAGTPSPTVPVTRRLEVSVYPPDLLPRRPPQFPPFGPFRLFPVEPAALEFPSHTPPVILETSTAGHL

SEQ ID NO: 814096 - protein, 1098 aa, Homo sapiens
MPPRQPPRQAGGGLSREFGKLLPALSHSPLGGLGSGSGSVAPGQGRAGAMGSRTPESPLHAVQLRWGPRRRPPLLPLLLLLLPPPPRVGGFNLDAEAPAVLSGPPGSFFGFSVEFYRPGTDGVSVLVGAPKANTSQPGVLQGGAVYLCPWGASPTQCTPIEFDSKGSRLLESSLSSSEGEEPVEYKSLQWFGATVRAHGSSILACAPLYSWRTEKEPLSDPVGTCYLSTDNFTRILEYAPCRSDFSWAAGQGYCQGGFSAEFTKTGRVVLGGPGSYFWQGQILSATQEQIAESYYPEYLINLVQGQLQTRQASSIYDDSYLGYSVAVGEFSGDDTEDFVAGVPKGNLTYGYVTILNGSDIRSLYNFSGEQMASYFGYAVAATDVNGDGLDDLLVGAPLLMDRTPDGRPQEVGRVYVYLQHPAGIEPTPTLTLTGHDEFGRFGSSLTPLGDLDQDGYNDVAIGAPFGGETQQGVVFVFPGGPGGLGSKPSQVLQPLWAASHTPDFFGSALRGGRDLDGNGYPDLIVGSFGVDKAVVYRGRPIVSASASLTIFPAMFNPEERSCSLEGNPVACINLSFCLNASGKHVADSIGFTVELQLDWQKQKGGVRRALFLASRQATLTQTLLIQNGAREDCREMKIYLRNESEFRDKLSPIHIALNFSLDPQAPVDSHGLRPALHYQSKSRIEDKAQILLDCGEDNICVPDLQLEVFGEQNHVYLGDKNALNLTFHAQNVGEGGAYEAELRVTAPPEAEYSGLVRHPGNFSSLSCDYFAVNQSRLLVCDLGNPMKAGASLWGGLRFTVPHLRDTKKTIQFDFQILSKNLNNSQSDVVSFRLSVEAQAQVTLNGVSKPEAVLFPVSDWHPRDQPQKEEDLGPAVHHVYELINQGPSSISQGVLELSCPQALEGQQLLYVTRVTGLNCTTNHPINPKGLELDPEGSLHHQQKREAPSRSSASSGPQILKCPEAECFRLRCELGPLHQQESQSLQLHFRVWAKTFLQREHQPFSLQCEAVYKALKMPYRILPRQLPQKERQVATAVQWTKAEGSYGVPLWIIILAILFGLLLLGLLIYILYKLGFFKRSLPYGTAMEKAQLKPPATSDA

SEQ ID NO: 814097 - protein, 1174 aa, Homo sapiens
MPPRQPPRQAGGGLSREFGKLLPALSHSPLGGLGSGSGSVAPGQGRAGAMGSRTPESPLHAVQLRWGPRRRPPLLPLLLLLLPPPPRVGGFNLDAEAPAVLSGPPGSFFGFSVEFYRPGTDGVSVLVGAPKANTSQPGVLQGGAVYLCPWGASPTQCTPIEFDSKGSRLLESSLSSSEGEEPVEYKSLQWFGATVRAHGSSILACAPLYSWRTEKEPLSDPVGTCYLSTDNFTRILEYAPCRSDFSWAAGQGYCQGGFSAEFTKTGRVVLGGPGSYFWQGQILSATQEQIAESYYPEYLINLVQGQLQTRQASSIYDDSYLGYSVAVGEFSGDDTEDFVAGVPKGNLTYGYVTILNGSDIRSLYNFSGEQMASYFGYAVAATDVNGDGLDDLLVGAPLLMDRTPDGRPQEVGRVYVYLQHPAGIEPTPTLTLTGHDEFGRFGSSLTPLGDLDQDGYNDVAIGAPFGGETQQGVVFVFPGGPGGLGSKPSQVLQPLWAASHTPDFFGSALRGGRDLDGNGYPGELCLRPLFTLKFPGPLTPTLSSAPFLKFLGAVLANSNRGRCLLTSTSLSVETRRGYGRKDPDLGLAVRGDFLTSSDLIVGSFGVDKAVVYRGRPIVSASASLTIFPAMFNPEERSCSLEGNPVACINLSFCLNASGKHVADSIGFTVELQLDWQKQKGGVRRALFLASRQATLTQTLLIQNGAREDCREMKIYLRNESEFRDKLSPIHIALNFSLDPQAPVDSHGLRPALHYQSKSRIEDKAQILLDCGEDNICVPDLQLEVFGEQNHVYLGDKNALNLTFHAQNVGEGGAYEAELRVTAPPEAEYSGLVRHPGNFSSLSCDYFAVNQSRLLVCDLGNPMKAGASLWGGLRFTVPHLRDTKKTIQFDFQILSKNLNNSQSDVVSFRLSVEAQAQVTLNGVSKPEAVLFPVSDWHPRDQPQKEEDLGPAVHHVYELINQGPSSISQGVLELSCPQALEGQQLLYVTRVTGLNCTTNHPINPKGLELDPEGSLHHQQKREAPSRSSASSGPQILKCPEAECFRLRCELGPLHQQESQSLQLHFRVWAKTFLQREHQPFSLQCEAVYKALKMPYRILPRQLPQKERQVATAVQWTKAEGSYGVPLWIIILAILFGLLLLGLLIYILYKLGFFKRSLPYGTAMEKAQLKPPATSDA

SEQ ID NO: 814098 - protein, 714 aa, Homo sapiens
MPPRQPPRQAGGGLSREFGKLLPALSHSPLGGLGSGSGSVAPGQGRAGAMGSRTPESPLHAVQLRWGPRRRPPLLPLLLLLLPPPPRVGGFNLDAEAPAVLSGPPGSFFGFSVEFYRPGTDGVSVLVGAPKANTSQPGVLQGGAVYLCPWGASPTQCTPIEFDSKGSRLLESSLSSSEGEEPVEYKSLQWFGATVRAHGSSILACAPLYSWRTEKEPLSDPVGTCYLSTDNFTRILEYAPCRSDFSWAAGQGYCQGGFSAEFTKTGRVVLGGPGSYFWQGQILSATQEQIAESYYPEYLINLVQGQLQTRQASSIYDDSYLGYSVAVGEFSGDDTEDFVAGVPKGNLTYGYVTILNGSDIRSLYNFSGEQMASYFGYAVAATDVNGDGLDDLLVGAPLLMDRTPDGRPQEVGRVYVYLQHPAGIEPTPTLTLTGHDEFGRFGSSLTPLGDLDQDGYNDVAIGAPFGGETQQGVVFVFPGGPGGLGSKPSQVLQPLWAASHTPDFFGSALRGGRDLDGNGYPDLIVGSFGVDKAVVYRGRPIVSASASLTIFPAMFNPEERSCSLEGNPVACINLSFCLNASGKHVADSIGFTVELQLDWQKQKGGVRRALFLASRQATLTQTLLIQNGAREDCREMKIYLRNESEFRDKLSPIHIALNFSLDPQAPVDSHGLRPALHYQSKSRIEDKAQILLDCGEDNICVPDLQLEVFGTSPA

SEQ ID NO: 814099 - protein, 741 aa, Homo sapiens
SSSDPALPLCPPQMASYFGYAVAATDVNGDGLDDLLVGAPLLMDRTPDGRPQEVGRVYVYLQHPAGIEPTPTLTLTGHDEFGRFGSSLTPLGDLDQDGYNDVAIGAPFGGETQQGVVFVFPGGPGGLGSKPSQVLQPLWAASHTPDFFGSALRGGRDLDGNGYPDLIVGSFGVDKAVVYRGRPIVSASASLTIFPAMFNPEERSCSLEGNPVACINLSFCLNASGKHVADSIGFTVELQLDWQKQKGGVRRALFLASRQATLTQTLLIQNGAREDCREMKIYLRNESEFRDKLSPIHIALNFSLDPQAPVDSHGLRPALHYQSKSRIEDKAQILLDCGEDNICVPDLQLEVFGEQNHVYLGDKNALNLTFHAQNVGEGGAYEAELRVTAPPEAEYSGLVRHPGNFSSLSCDYFAVNQSRLLVCDLGNPMKAGASLWGGLRFTVPHLRDTKKTIQFDFQILSKNLNNSQSDVVSFRLSVEAQAQVTLNGVSKPEAVLFPVSDWHPRDQPQKEEDLGPAVHHVYELINQGPSSISQGVLELSCPQALEGQQLLYVTRVTGLNCTTNHPINPKGLELDPEGSLHHQQKREAPSRSSASSGPQILKCPEAECFRLRCELGPLHQQESQSLQLHFRVWAKTFLQREHQPFSLQCEAVYKALKMPYRILPRQLPQKERQVATAVQWTKAEGSYGVPLWIIILAILFGLLLLGLLIYILYKLGFFKRSLPYGTAMEKAQLKPPATSDA

SEQ ID NO: 814100 - protein, 604 aa, Homo sapiens
SQRVLRLGKSMQRTHILALGHQFPVSRLQRSPNSIDPTFTLGRGRPIVSASASLTIFPAMFNPEERSCSLEGNPVACINLSFCLNASGKHVADSIGFTVELQLDWQKQKGGVRRALFLASRQATLTQTLLIQNGAREDCREMKIYLRNESEFRDKLSPIHIALNFSLDPQAPVDSHGLRPALHYQSKSRIEDKAQILLDCGEDNICVPDLQLEVFGEQNHVYLGDKNALNLTFHAQNVGEGGAYEAELRVTAPPEAEYSGLVRHPGNFSSLSCDYFAVNQSRLLVCDLGNPMKAGASLWGGLRFTVPHLRDTKKTIQFDFQILSKNLNNSQSDVVSFRLSVEAQAQVTLNGVSKPEAVLFPVSDWHPRDQPQKEEDLGPAVHHVYELINQGPSSISQGVLELSCPQALEGQQLLYVTRVTGLNCTTNHPINPKGLELDPEGSLHHQQKREAPSRSSASSGPQILKCPEAECFRLRCELGPLHQQESQSLQLHFRVWAKTFLQREHQPFSLQCEAVYKALKMPYRILPRQLPQKERQVATAVQWTKAEGSYGVPLWIIILAILFGLLLLGLLIYILYKLGFFKRSLPYGTAMEKAQLKPPATSDA

SEQ ID NO: 814101 - protein, 398 aa, Homo sapiens
DLTTRLEVFGEQNHVYLGDKNALNLTFHAQNVGEGGAYEAELRVTAPPEAEYSGLVRHPGNFSSLSCDYFAVNQSRLLVCDLGNPMKAGASLWGGLRFTVPHLRDTKKTIQFDFQILSKNLNNSQSDVVSFRLSVEAQAQVTLNGVSKPEAVLFPVSDWHPRDQPQKEEDLGPAVHHVYELINQGPSSISQGVLELSCPQALEGQQLLYVTRVTGLNCTTNHPINPKGLELDPEGSLHHQQKREAPSRSSASSGPQILKCPEAECFRLRCELGPLHQQESQSLQLHFRVWAKTFLQREHQPFSLQCEAVYKALKMPYRILPRQLPQKERQVATAVQWTKAEGSYGVPLWIIILAILFGLLLLGLLIYILYKLGFFKRSLPYGTAMEKAQLKPPATSDA

SEQ ID NO: 814102 - protein, 1098 aa, Homo sapiens; identical to SEQ ID NO: 814096

SEQ ID NO: 814103 - protein, 1098 aa, Homo sapiens; identical to SEQ ID NO: 814096

SEQ ID NO: 814104 - protein, 1098 aa, Homo sapiens; identical to SEQ ID NO: 814096

SEQ ID NO: 814105 - protein, 1098 aa, Homo sapiens; identical to SEQ ID NO: 814096

SEQ ID NO: 814106 - protein, 1086 aa, Homo sapiens
MPPRQPPRQAGGGLSREFGKLLPALSHSPLGGLGSGSGSVAPGQGRAGAMGSRTPESPLHAVQLRWGPRRRPPLLPLLLLLLPPPPRVGGFNLDAEAPAVLSGPPGSFFGFSVEFYRPGTDGVSVLVGAPKANTSQPGVLQGGAVYLCPWGASPTQCTPIEFDSKGSRLLESSLSSSEGEEPVEYKSLQWFGATVRAHGSSILACAPLYSWRTEKEPLSDPVGTCYLSTDNFTRILEYAPCRSDFSWAAGQGYCQGGFSAEFTKTGRVVLGGPGSYFWQGQILSATQEQIAESYYPEYLINLVQGQLQTRQASSIYDDSYLGYSVAVGEFSGDDTEDFVAGVPKGNLTYGYVTILNGSDIRSLYNFSGEQMASYFGYAVAATDVNGDGLDDLLVGAPLLMDRTPDGRPQEVGRVYVYLQHPAGIEPTPTLTLTGHDEFGRFGSSLTPLGDLDQDGYNDVAIGAPFGGETQQGVVFVFPGGPGGLGSKPSQVLQPLWAASHTPDFFGSALRGGRDLDGNGYPDLIVGSFGVDKAVVYRGRPIVSASASLTIFPAMFNPEERSCSLEGNPVACINLSFCLNASGKHVADSIGFTVELQLDWQKQKGGVRRALFLASRQATLTQTLLIQNGAREDCREMKIYLRNESEFRDKLSPIHIALNFSLDPQAPVDSHGLRPALHYQSKSRIEDKAQILLDCGEDNICVPDLQLEVFGEQNHVYLGDKNALNLTFHAQNVGEGGAYEAELRVTAPPEAEYSGLVRHPGNFSSLSCDYFAVNQSRLLVCDLGNPMKAGASLWGGLRFTVPHLRDTKKTIQFDFQILSKNLNNSQSDVVSFRLSVEAQAQVTLNGVSKPEAVLFPVSDWHPRDQPQKEEDLGPAVHHVYELINQGPSSISQGVLELSCPQALEGQQLLYVTRVTGLNCTTNHPINPKGLELDPEGSLHHQQKREAPSRSSASSGPQILKCPEAECFRLRCELGPLHQQESQSLQLHFRVWAKTFLQREHQPFSLQCEAVYKALKMPYRILPRQLPQKERQVATAVQWTKAEGSYGVPLWIIILAILFGLLLLGLLIYILYKLGFFKRSLPYGTAME

SEQ ID NO: 814107 - protein, 933 aa, Homo sapiens
MPPRQPPRQAGGGLSREFGKLLPALSHSPLGGLGSGSGSVAPGQGRAGAMGSRTPESPLHAVQLRWGPRRRPPLLPLLLLLLPPPPRVGGFNLDAEAPAVLSGPPGSFFGFSVEFYRPGTDGVSVLVGAPKANTSQPGVLQGGAVYLCPWGASPTQCTPIEFDSKGSRLLESSLSSSEGEEPVEYKSLQWFGATVRAHGSSILACAPLYSWRTEKEPLSDPVGTCYLSTDNFTRILEYAPCRSDFSWAAGQGYCQGGFSAEFTKTGRVVLGGPGSYFWQGQILSATQEQIAESYYPEYLINLVQGQLQTRQASSIYDDSYLGYSVAVGEFSGDDTEDFVAGVPKGNLTYGYVTILNGSDIRSLYNFSGEQMASYFGYAVAATDVNGDGLDDLLVGAPLLMDRTPDGRPQEVGRVYVYLQHPAGIEPTPTLTLTGHDEFGRFGSSLTPLGDLDQDGYNDVAIGAPFGGETQQGVVFVFPGGPGGLGSKPSQVLQPLWAASHTPDFFGSALRGGRDLDGNGYPDLIVGSFGVDKAVVYRGRPIVSASASLTIFPAMFNPEERSCSLEGNPVACINLSFCLNASGKHVADSIGFTVELQLDWQKQKGGVRRALFLASRQATLTQTLLIQNGAREDCREMKIYLRNESEFRDKLSPIHIALNFSLDPQAPVDSHGLRPALHYQSKSRIEDKAQILLDCGEDNICVPDLQLEVFGEQNHVYLGDKNALNLTFHAQNVGEGGAYEAELRVTAPPEAEYSGLVRHPGNFSSLSCDYFAVNQSRLLVCDLGNPMKAGASLWGGLRFTVPHLRDTKKTIQFDFQILSKNLNNSQSDVVSFRLSVEAQAQVTLNGVSKPEAVLFPVSDWHPRDQPQKEEDLGPAVHHVYELINQGPSSISQGVLELSCPQALEGQQLLYVTRVTGLNCTTNHPINPKGLEVRS

SEQ ID NO: 814108 - protein, 762 aa, Homo sapiens
MPPRQPPRQAGGGLSREFGKLLPALSHSPLGGLGSGSGSVAPGQGRAGAMGSRTPESPLHAVQLRWGPRRRPPLLPLLLLLLPPPPRVGGFNLDAEAPAVLSGPPGSFFGFSVEFYRPGTDGVSVLVGAPKANTSQPGVLQGGAVYLCPWGASPTQCTPIEFDSKGSRLLESSLSSSEGEEPVEYKSLQWFGATVRAHGSSILACAPLYSWRTEKEPLSDPVGTCYLSTDNFTRILEYAPCRSDFSWAAGQGYCQGGFSAEFTKTGRVVLGGPGSYFWQGQILSATQEQIAESYYPEYLINLVQGQLQTRQASSIYDDSYLGYSVAVGEFSGDDTEDFVAGVPKGNLTYGYVTILNGSDIRSLYNFSGEQMASYFGYAVAATDVNGDGLDDLLVGAPLLMDRTPDGRPQEVGRVYVYLQHPAGIEPTPTLTLTGHDEFGRFGSSLTPLGDLDQDGYNDVAIGAPFGGETQQGVVFVFPGGPGGLGSKPSQVLQPLWAASHTPDFFGSALRGGRDLDGNGYPDLIVGSFGVDKAVVYRGRPIVSASASLTIFPAMFNPEERSCSLEGNPVACINLSFCLNASGKHVADSIGFTVELQLDWQKQKGGVRRALFLASRQATLTQTLLIQNGAREDCREMKIYLRNESEFRDKLSPIHIALNFSLDPQAPVDSHGLRPALHYQSKSRIEDKAQILLDCGEDNICVPDLQLEVFGEQNHVYLGDKNALNLTFHAQNVGEGGAYEAELRVTAPPEAEYSGLVRHPGVR

SEQ ID NO: 814109 - protein, 73 aa, Homo sapiens
MPGFALPLRLDDLLVGAPLLMDRTPDGRPQEVGRVYVYLQHPAGIEPTPTLTLTGHDEFGRFGSSLTPLGDLD

SEQ ID NO: 814110 - protein, 218 aa, Homo sapiens
ALAEEVVFRPPSRSKRGTGVAASKCFRWIPRDCRRCGLCLPTWSGKMFYHISLEHEILLHPRYFGPNLLNTVKQKLFTEVEGTCTGKYGFVIAVTTIDNIGAGVIQPGRGFVLYPVKYKAIVFRPFKGEVVDAVVTQVNKVGLFTEIGPMSCFISRHSIPSEMEFDPNSNPPCYKTMDEDIVIQQDDEIRLKIVGTRVDKNDIFAIGSLMDDYLGLVS

SEQ ID NO: 814111 - protein, 218 aa, Homo sapiens; identical to SEQ ID NO: 814110

SEQ ID NO: 814112 - protein, 869 aa, Homo sapiens
MLYFSLFWAARPLQRCGQLVRMAIRAQHSNAAQTQTGEANRGWTGQESLSDSDPEMWELLQREKDRQCRGLELIASENFCSRAALEALGSCLNNKYSEGYPGKRYYGGAEVVDEIELLCQRRALEAFDLDPAQWGVNVQPYSGSPANLAVYTALLQPHDRIMGLDLPDGGHLTHGYMSDVKRISATSIFFESMPYKLNPKTGLIDYNQLALTARLFRPRLIIAGTSAYARLIDYARMREVCDEVKAHLLADMAHISGLVAAKVIPSPFKHADIVTTTTHKTLRGARSGLIFYRKGVKAVDPKTGREIPYTFEDRINFAVFPSLQGGPHNHAIAAVAVALKQACTPMFREYSLQVLKNARAMADALLERGYSLVSGGTDNHLVLVDLRPKGLDGARAERVLELVSITANKNTCPGDRSAITPGGLRLGAPALTSRQFREDDFRRVVDFIDEGVNIGLEVKSKTAKLQDFKSFLLKDSETSQRLANLRQRVEQFARAFPMPGFDEHGRHLGNEAHRLKVTLLPPTWASEIESLSIFWCGREDLSLRARARYESPFPEFVTEKIFSFSFFWYQDLEGGPRHFLFEPLSSSQCQRRVLFLGEVEECPSEPVAGRGGEAPSFLFLSNKMLTCKKKKKKKKNQTMSEVWTLPAYLVWEDVLPCEQGSGWRQGLGGKEEQGQAPARDSPCRPITCQRLAWSPSHFSPQISLEHEILLHPRYFGPNLLNTVKQKLFTEVEGTCTGKYGFVIAVTTIDNIGAGVIQPGRGFVLYPVKYKAIVFRPFKGEVVDAVVTQVNKVGLFTEIGPMSCFISRHSIPSEMEFDPNSNPPCYKTMDEDIVIQQDDEIRLKIVGTRVDKNDIFAIGSLMDDYLGLVS

SEQ ID NO: 814113 - protein, 511 aa, Homo sapiens
GTRFRVAMLYFSLFWAARPLQRCGQLVRMAIRAQHSNAAQTQTGEANRGWTGQESLSDSDPEMWELLQREKDRQCRGLELIASENFCSRAALEALGSCLNNKYSEGYPGKRYYGGAEVVDEIELLCQRRALEAFDLDPAQWGVNVQPYSGSPANLAVYTALLQPHDRIMGLDLPDGGHLTHGYMSDVKRISATSIFFESMPYKLNPKTGLIDYNQLALTARLFRPRLIIAGTSAYARLIDYARMREVCDEVKAHLLADMAHISGLVAAKVIPSPFKHADIVTTTTHKTLRGARSGLIFYRKGVKAVDPKTGREIPYTFEDRINFAVFPSLQGGPHNHAIAAVAVALKQACTPMFREYSLQVLKNARAMADALLERGYSLVSGGTDNHLVLVDLRPKGLDGARAERVLELVSITANKNTCPGDRSAITPGGLRLGAPALTSRQFREDDFRRVVDFIDEGVNIGLEVKSKTAKLQDFKSFLLKDSETSQRLANLRQRVEQFARAFPMPGFDEH

SEQ ID NO: 814114 - protein, 511 aa, Homo sapiens; identical to SEQ ID NO: 814113

SEQ ID NO: 814115 - protein, 511 aa, Homo sapiens; identical to SEQ ID NO: 814113

SEQ ID NO: 814116 - protein, 511 aa, Homo sapiens; identical to SEQ ID NO: 814113

SEQ ID NO: 814117 - protein, 511 aa, Homo sapiens; identical to SEQ ID NO: 814113

SEQ ID NO: 814118 - protein, 511 aa, Homo sapiens; identical to SEQ ID NO: 814113

SEQ ID NO: 814119 - protein, 218 aa, Homo sapiens; identical to SEQ ID NO: 814110

SEQ ID NO: 814120 - protein, 511 aa, Homo sapiens; identical to SEQ ID NO: 814113

SEQ ID NO: 814121 - protein, 511 aa, Homo sapiens; identical to SEQ ID NO: 814113

SEQ ID NO: 814122 - protein, 425 aa, Homo sapiens
MGPRRLLLVAACFSLCGPLLSARTRARRPESKATNATLDPRSFLLRNPNDKYEPFWEDEEKNESGLTEYRLVSINKSSPLQKQLPAFISEDASGYLTSSWLTLFVPSVYTGVFVVSLPLNIMAIVVFILKMKVKKPAVVYMLHLATADVLFVSVLPFKISYYFSGSDWQFGSELCRFVTAAFYCNMYASILLMTVISIDRFLAVVYPMQSLSWRTLGRASFTCLAIWALAIAGVVPLLLKEQTIQVPGLNITTCHDVLNETLLEGYYAYYFSAFSAVFFFVPLIISTVCYVSIIRCLSSSAVANRSKKSRALFLSAAVFCIFIICFGPTNVLLIAHYSFLSHTSTTEAAYFAYLLCVCVSSISCCIDPLIYYYASSECQRYVYSILCCKESSDPSSYNSSGQLMASKMDTCSSNLNNSIYKKLLT

SEQ ID NO: 814123 - protein, 425 aa, Homo sapiens; identical to SEQ ID NO: 814122

SEQ ID NO: 814124 - protein, 425 aa, Homo sapiens; identical to SEQ ID NO: 814122

SEQ ID NO: 814125 - protein, 425 aa, Homo sapiens; identical to SEQ ID NO: 814122

SEQ ID NO: 814126 - protein, 425 aa, Homo sapiens; identical to SEQ ID NO: 814122

SEQ ID NO: 814127 - protein, 102 aa, Homo sapiens
MGPRRLLLVAACFSLCGPLLSARTRARRPVTFRWGVPPPSRAQPMPLWTRSWRVQPACHGVLDMEEDGAEAPWGSLQSCVALVIVFLPGPPPKRKALTLLHQ

SEQ ID NO: 814128 - protein, 114 aa, Homo sapiens
IDVPKGQYVAPAVPAESLVDGVKNENFYIQTPEECHVSLKEDVSISPGEFEHNFLGENKVSEVYSGKTNSNAITSWAQKLKQNQPKRAHVEDGGSRSKQGNEQSKKTPIEKVGD

SEQ ID NO: 814129 - protein, 840 aa, Homo sapiens
IDVPKGQYVAPAVPAESLVDGVKNENFYIQTPEECHVSLKEDVSISPGEFEHNFLGENKVSEVYSGKTNSNAITSWAQKLKQNQPKRAHVEDGGSRSKQGNEQSKKTPIEKSDFAAATHPRAFYLSKPDETPNAWMSDSGTGLTYWKLEEKDMHHSLPETLEKTFISLSSTDVSPNQSNTSNEMKLPSLKDIYYKKQRENKQLPERNLTSASNPNHPPEVLTLDPTLHMKPKQQISGIQPHGLPNALDDRISFSPDSVLEPSMSSPSDIDSFSQASNVTSQLPGFPKYPSHTKASPVDSWKNQTFQNESRTSSTFPSVYTITSNDISVNTVDEENTVMVASASVSQSQLPGTANSVPECISLTSLEDPVILSKIRQNLKEKHARHIADLRAYYESEINSLKQKLEAKEISGVEDWKITNQILVDRCGQLDSALHEATSRVRTLENKNNLLEIEVNDLRERFSAASSASKILQERIEEMRTSSKEKDNTIIRLKSRLQDLEEAFENAYKLSDDKEAQLKQENKMFQDLLGEYESLGKEHRRVKDALNTTENKLLDAYTQISDLKRMISKLEAQVKQVEHENMLSLRHNSRIHVRPSRANTLATSDVSRRKWLIPGAEYSIFTGQPLDTQDSNVDNQLEETCSLGHRSPLEKDSSPGSSSTSLLIKKQRETSDTPIMRALKELDEGKIFKNWGTQTEKEDTSNINPRQTETSVNASRSPEKCAQQRQKRLNSASQRSSSLPPSNRKSSTPTKREIMLTPVTVAYSPKRSPKENLSPGFSHLLSKNESSPIRFDILLDDLDTVPVSTLQRTNPRKQLQFLPLDDSEAITMLIIALALNRCQME

SEQ ID NO: 814130 - protein, 840 aa, Homo sapiens; identical to SEQ ID NO: 814129

SEQ ID NO: 814131 - protein, 840 aa, Homo sapiens; identical to SEQ ID NO: 814129

SEQ ID NO: 814132 - protein, 840 aa, Homo sapiens; identical to SEQ ID NO: 814129

SEQ ID NO: 814133 - protein, 962 aa, Homo sapiens
IDVPKGQYVAPAVPAESLVDGVKNENFYIQTPEECHVSLKEDVSISPGEFEHNFLGENKVSEVYSGKTNSNAITSWAQKLKQNQPKRAHVEDGGSRSKQGNEQSKKTPIEKSDFAAATHPRAFYLSKPDETPNAWMSDSGTGLTYWKLEEKDMHHSLPETLEKTFISLSSTDVSPNQSNTSNEMKLPSLKDIYYKKQRENKQLPERNLTSASNPNHPPEVLTLDPTLHMKPKQQISGIQPHGLPNALDDRISFSPDSVLEPSMSSPSDIDSFSQASNVTSQLPGFPKYPSHTKASPVDSWKNQTFQNESRTSSTFPSVYTITSNDISVNTVDEENTVMVASASVSQSQLPGTANSVPECISLTSLEDPVILSKIRQNLKEKHARHIADLRAYYESEINSLKQKLEAKEISGVEDWKITNQILVDRCGQLDSALHEATSRVRTLENKNNLLEIEVNDLRERFSAASSASKILQERIEEMRTSSKEKDNTIIRLKSRLQDLEEAFENAYKLSDDKEAQLKQENKMFQDLLGEYESLGKEHRRVKDALNTTENKLLDAYTQISDLKRMISKLEAQVKQVEHENMLSLRHNSRIHVRPSRANTLATSDVSRRKWLIPGAEYSIFTGQPLDTQDSNVDNQLEETCSLGHRSPLEKDSSPGSSSTSLLIKKQRETSDTPIMRALKELDEGKIFKNWGTQTEKEDTSNINPRQTETSVNASRSPEKCAQQRQKRLNSASQRSSSLPPSNRKSSTPTKREIMLTPVTVAYSPKRSPKENLSPGFSHLLSKNESSPIRFDILLDDLDTVPVSTLQRTNPRKQLQFLPLDDSEEKTYSEKATDNHVNHSSCPEPVPNGVKKVSVRTAWEKNKSVSYEQCKPVSVTPQGNDFEYTAKIRTLAETERFFDELTKEKDQIEAALSRMPSPGGRITLQTRLNQEALEDRLERINRELGSVRMTLKKFHVLRTSANL

SEQ ID NO: 814134 - protein, 940 aa, Homo sapiens
IDVPKGQYVAPAVPAESLVDGVKNENFYIQTPEECHVSLKEDVSISPGEFEHNFLGENKVSEVYSGKTNSNAITSWAQKLKQNQPKRAHVEDGGSRSKQGNEQSKKTPIEKSDFAAATHPRAFYLSKPDETPNAWMSDSGTGLTYWKLEEKDMHHSLPETLEKTFISLSSTDVSPNQSNTSNEMKLPSLKDIYYKKQRENKQLPERNLTSASNPNHPPEVLTLDPTLHMKPKQQISGIQPHGLPNALDDRISFSPDSVLEPSMSSPSDIDSFSQASNVTSQLPGFPKYPSHTKASPVDSWKNQTFQNESRTSSTFPSVYTITSNDISVNTVDEENTVMVASASVSQSQLPGLRQNLKEKHARHIADLRAYYESEINSLKQKLEAKEISGVEDWKITNQILVDRCGQLDSALHEATSRVRTLENKNNLLEIEVNDLRERFSAASSASKILQERIEEMRTSSKEKDNTIIRLKSRLQDLEEAFENAYKLSDDKEAQLKQENKMFQDLLGEYESLGKEHRRVKDALNTTENKLLDAYTQISDLKRMISKLEAQVKQVEHENMLSLRHNSRIHVRPSRANTLATSDVSRRKWLIPGAEYSIFTGQPLDTQDSNVDNQLEETCSLGHRSPLEKDSSPGSSSTSLLIKKQRETSDTPIMRALKELDEGKIFKNWGTQTEKEDTSNINPRQTETSVNASRSPEKCAQQRQKRLNSASQRSSSLPPSNRKSSTPTKREIMLTPVTVAYSPKRSPKENLSPGFSHLLSKNESSPIRFDILLDDLDTVPVSTLQRTNPRKQLQFLPLDDSEEKTYSEKATDNHVNHSSCPEPVPNGVKKVSVRTAWEKNKSVSYEQCKPVSVTPQGNDFEYTAKIRTLAETERFFDELTKEKDQIEAALSRMPSPGGRITLQTRLNQEALEDRLERINRELGSVRMTLKKFHVLRTSANL

SEQ ID NO: 814135 - protein, 288 aa, Homo sapiens [sequence omitted]

SEQ ID NO: 814136 - protein, 751 aa, Homo sapiens
IDVPKGQYVAPAVPAESLVDGVKNENFYIQTPEECHVSLKEDVSISPGEFEHNFLGENKVSEVYSGKTNSNAITSWAQKLKQNQPKRAHVEDGGSRSKQGNEQSKKTPIEKSDFAAATHPRAFYLSKPDETPNAWMSDSGTGLTYWKLEEKDMHHSLPETLEKTFISLSSTDVSPNQVLTLDPTLHMKPKQQISGIQPHGLPNALDDRISFSPDSVLEPSMSSPSDIDSFSQASNVTSQLPGFPKYPSHTKASPVDSWKNQTFQNESRTSSTFPSVYTITSNDISVNTVDEENTVMVASASVSQSQLPGTANSVPECISLTSLEDPVILSKIRQNLKEKHARHIADLRAYYESEINSLKQKLEAKEISGVEDWKITNQILVDRCGQLDSALHEATSRVRTLENKNNLLEIEVNDLRERFSAASSASKILQERIEEMRTSSKEKDNTIIRLKSRLQDLEEAFENAYKLSDDKEAQLKQENKMFQDLLGEYESLGKEHRRVKDALNTTENKLLDAYTQISDLKRMISKLEAQVKQVEHENMLSLRHNSRIHVRPSRANTLATSDVSRRKWLIPGAEYSIFTGQPLDTQDSNVDNQLEETCSLGHRSPLEKDSSPGSSSTSLLIKKQRETSDTPIMRALKELDEGKIFKNWGTQTEKEDTSNINPRQTETSVNASRSPEKCAQQRQKRLNSASQRSSSLPPSNRKSSTPTKREIMLTPVTVAYSPKRSPKENLSPGFSHLLSKNESSPIRKNLF

SEQ ID NO: 814137 - protein, 930 aa, Homo sapiens
IDVPKGQYVAPAVPAESLVDGVKNENFYIQTPEECHVSLKEDVSISPGEFEHNFLGENKVSEVYSGKTNSNAITSWAQKLKQNQPKRAHVEDGGSRSKQGNEQSKKTPIEKSDFAAATHPRAFYLSKPDETPNAWMSDSGTGLTYWKLEEKDMHHSLPETLEKTFISLSSTDVSPNQSNTSNEMKLPSLKDIYYKKQRENKQLPERNLTSASNPNHPPEVLTLDPTLHMKPKQQISGIQPHGLPNALDDRISFSPDSVLEPSMSSPSDIDSFSQASNVTSQLPGFPKYPSHTKASPVDSWKNQTFQNESRTSSTFPSVYTITSNDISVNTVDEENTVMVASASVSQSQLPGTANSVPECISLTSLEDPVILSKIRQNLKEKHARHIADLRAYYESEINSLKQKLEAKEISGVEDWKITNQILVDRCGQLDSALHEATSRVRTLENKNNLLEIEVNDLRERFSAASSASKILQERIEEMRTSSKEKDNTIIRLKSRLQDLEEAFENAYKLSDDKEAQLKQENKMFQDLLGEYESLGKEHRRVKDALNTTENKLLDAYTQISDLKRMISKLEAQVKQVEHENMLSLRHNSRIHVRPSRANTLATSDVSRRKWLIPGAEYSIFTGQPLDTQDSNVDNQLEETCSLGHRSPLEKDSSPGSSSTSLLIKKQRETSDTPIMRALKELDEGKIFKNWGTQTEKEDTSNINPRQTETSVNASRSPEKCAQQRQKRLNSASQRSSSLPPSNRKSSTPTKREIMLTPVTVAYSPKRSPKENLSPGFSHLLSKNESSPIRFDILLDDLDTVPVSTLQRTNPRKQLQFLPLDDSEEKTYSEKATDNHVNHSSCPEPVPNGVKKVSVRTAWEKNKSVSYEQCKPVSVTPQGNDFEYTAKIRTLAETERFFDELTKEKDQIEAALSRMPSPGGRITLQTRLNQL

SEQ ID NO: 814138 - protein, 959 aa, Homo sapiens
IDVPKGQYVAPAVPAESLVDGVKNENFYIQTPEECHVSLKEDVSISPGEFEHNFLGENKVSEVYSGKTNSNAITSWAQKLKQNQPKRAHVEDGGSRSKQGNEQSKKTPIEKSDFAAATHPRAFYLSKPDETPNAWMSDSGTGLTYWKLEEKDMHHSLPETLEKTFISLSSTDVSPNQSNTSNEMKLPSLKDIYYKKQRENKQLPERNLTSASNPNHPPEVLTLDPTLHMKPKQQISGIQPHGLPNALDDRISFSPDSVLEPSMSSPSDIDSFSQASNVTSQLPGFPKYPSHTKASPVDSWKNQTFQNESRTSSTFPSVYTITSNDISVNTVDEENTVMVASASVSQSQLPGTANSVPECISLTSLEDPVILSKIRQNLKEKHARHIADLRAYYESEINSLKQKLEAKEISGVEDWKITNQILVDRCGQLDSALHEATSRVRTLENKNNLLEIEVNDLRERFSAASSASKILQERIEEMRTSSKEKDNTIIRLKSRLQDLEEAFENAYKLSDDKEAQLKQENKMFQDLLGEYESLGKEHRRVKDALNTTENKLLDAYTQISDLKRMISKLEAQVKQVEHENMLSLRHNSRIHVRPSRANTLATSDVSRRKWLIPGAEYSIFTGQPLDTQDSNVDNQLEETCSLGHRSPLEKDSSPGSSSTSLLIKKQRETSDTPIMRALKELDEGKIFKNWGTQTEKEDTSNINPRQTETSVNASRSPEKCAQQRQKRLNSASQRSSSLPPSNRKSSTPTKREIMLTPVTVAYSPKRSPKENLSPGFSHLLSKNESSPIRFDILLDDLDTVPVSTLQRTNPRKQLQFLPLDDSEEKTYSEKATDNHVNHSSCPEPVPNGVKKVSVRTAWEKNKSVSYEQCKPVSVTPQGNDFEYTAKIRTLAETERFFDELTKEKDQIEAALSRMPSPGGRITLQTRLNQTPQICEESSHKCAFAGHYVPCHLYDYRFQG

SEQ ID NO: 814139 - protein, 938 aa, Homo sapiens
IDVPKGQYVAPAVPAESLVDGVKNENFYIQTPEECHVSLKEDVSISPGEFEHNFLGENKVSEVYSGKTNSNAITSWAQKLKQNQPKRAHVEDGGSRSKQGNEQSKKTPIEKSDFAAATHPRAFYLSKPDETPNAWMSDSGTGLTYWKLEEKDMHHSLPETLEKTFISLSSTDVSPNQSNTSNEMKLPSLKDIYYKKQRENKQLPERNLTSASNPNHPPEVLTLDPTLHMKPKQQISGIQPHGLPNALDDRISFSPDSVLEPSMSSPSDIDSFSQASNVTSQLPGFPKYPSHTKASPVDSWKNQTFQNESRTSSTFPSVYTITSNDISVNTVDEENTVMVASASVSQSQLPGTANSVPECISLTSLEDPVILSKIRQNLKEKHARHIADLRAYYESEINSLKQKLEAKEISGVEDWKITNQILVDRCGQLDSALHEATSRVRTLENKNNLLEIEVNDLRERFSAASSASKILQERIEEMRTSSKEKDNTIIRLKSRLQDLEEAFENAYKLSDDKEAQLKQENKMFQDLLGEYESLGKEHRRVKDALNTTENKLLDAYTQISDLKRMISKLEAQVKQVEHENMLSLRHNSRIHVRPSRANTLATSDVSRRKWLIPGAEYSIFTGQPLDTQDSNVDNQLEETCSLGHRSPLEKDSSPGSSSTSLLIKKQRETSDTPIMRALKELDEGKIFKNWGTQTEKEDTSNINPRQTETSVNASRSPEKCAQQRQKRLNSASQRSSSLPPSNRKSSTPTKREIMLTPVTVAYSPKRSPKENLSPGFSHLLSKNESSPIRFDILLDDLDTVPVSTLQRTNPRKQLQFLPLDDSEEKTYSEKATDNHVNHSSCPEPVPNGVKKVSVRTAWEKNKSVSYEQCKPVSVTPQGNDFEYTAKIRTLAETERFFDELTKEKDQIEAALSRMPSPGGRITLQTRLNQVRCLSLNLL

SEQ ID NO: 814140 - protein, 377 aa, Homo sapiens
IDVPKGQYVAPAVPAESLVDGVKNENFYIQTPEECHVSLKEDVSISPGEFEHNFLGENKVSEVYSGKTNSNAITSWAQKLKQNQPKRAHVEDGGSRSKQGNEQSKKTPIEKSDFAAATHPRAFYLSKPDETPNAWMSDSGTGLTYWKLEEKDMHHSLPETLEKTFISLSSTDVSPNQSNTSNEMKLPSLKDIYYKKQRENKQLPERNLTSASNPNHPPEVLTLDPTLHMKPKQQISGIQPHGLPNALDDRISFSPDSVLEPSMSSPSDIDSFSQASNVTSQLPGFPKYPSHTKASPVDSWKNQTFQNESRTSSTFPSVYTITSNDISVNTVDEENTVMVASASVSQSQLPGTANSVPECISLTSLEDPVILSKYVFQ

SEQ ID NO: 814141 - protein, 355 aa, Homo sapiens
IDVPKGQYVAPAVPAESLVDGVKNENFYIQTPEECHVSLKEDVSISPGEFEHNFLGENKVSEVYSGKTNSNAITSWAQKLKQNQPKRAHVEDGGSRSKQGNEQSKKTPIEKSDFAAATHPRAFYLSKPDETPNAWMSDSGTGLTYWKLEEKDMHHSLPETLEKTFISLSSTDVSPNQSNTSNEMKLPSLKDIYYKKQRENKQLPERNLTSASNPNHPPEVLTLDPTLHMKPKQQISGIQPHGLPNALDDRISFSPDSVLEPSMSSPSDIDSFSQASNVTSQLPGFPKYPSHTKASPVDSWKNQTFQNESRTSSTFPSVYTITSNDISVNTVDEENTVMVASASVSQSQLPGLGRI

SEQ ID NO: 814142 - protein, 234 aa, Homo sapiens
IDVPKGQYVAPAVPAESLVDGVKNENFYIQTPEECHVSLKEDVSISPGEFEHNFLGENKVSEVYSGKTNSNAITSWAQKLKQNQPKRAHVEDGGSRSKQGNEQSKKTPIEKSDFAAATHPRAFYLSKPDETPNAWMSDSGTGLTYWKLEEKDMHHSLPETLEKTFISLSSTDVSPNQSNTSNEMKLPSLKDIYYKKQRENKQLPERNLTSASNPNHPPEVKLSTFCRVNVNNAS

SEQ ID NO: 814143 - protein, 600 aa, Homo sapiens
HKSPSYQIKEGDTINVDVTCPGATLALAMIYLKTNNRSIADWLRAPDTMYLLDFVKPEFLLLRTLARCLILWDDILPNSKWVDSNVPQIIRENSISLSEIELPCSEDLNLETLSQAHVYIIAGACLSLGFRFAGSENLSAFNCLHKFAKDFMTYLSAPNASVTGPHNLETCLSVVLLSLAMVMAGSGNLKVLQLCRFLHMKTGGEMNYGFHLAHHMALGLLFLGGGRYSLSTSNSSIAALLCALYPHFPAHSTDNRYHLQALRHLYVLAAEPRLLVPVDVDTNTPCYALLEVTYKGTQWYEQTKEELMAPTLLPELHLLKQIKVKGPRYWELLIDLSKGTQHLKSILSKDGVLYVKLRAGQLSYKEDPMGWQSLLAQTVANRNSEARAFKPETISAFTSDPALLSFAEYFCKPTVNMGQKQEILDLFSSVLYECVTQETPEMLPAYIAMDQAIRRLGRREMSETSELWQIKLVLEFFSSRSHQERLQNHPKRGLFMNSEFLPVVKCTIDNTLDQWLQVGGDMCVHAYLSGQPLEESQLSMLACFLVYHSVPAPQHLPPIGLEGSTSFAELLFKFKQLKMPVRALLRLAPLLLGNPQPMVM

SEQ ID NO: 814144 - protein, 600 aa, Homo sapiens; identical to SEQ ID NO: 814143

SEQ ID NO: 814145 - protein, 420 aa, Homo sapiens
MVMAGSGNLKVLQLCRFLHMKTGGEMNYGFHLAHHMALGLLFLGGGRYSLSTSNSSIAALLCALYPHFPAHSTDNRYHLQALRHLYVLAAEPRLLVPVDVDTNTPCYALLEVTYKGTQWYEQTKEELMAPTLLPELHLLKQIKVKGPRYWELLIDLSKGTQHLKSILSKDGVLYVKLRAGQLSYKEDPMGWQSLLAQTVANRNSEARAFKPETISAFTSDPALLSFAEYFCKPTVNMGQKQEILDLFSSVLYECVTQETPEMLPAYIAMDQAIRRLGRREMSETSELWQIKLVLEFFSSRSHQERLQNHPKRGLFMNSEFLPVVKCTIDNTLDQWLQVGGDMCVHAYLSGQPLEESQLSMLACFLVYHSVPAPQHLPPIGLEGSTSFAELLFKFKQLKMPVRALLRLAPLLLGNPQPMVM

SEQ ID NO: 814146 - protein, 573 aa, Homo sapiens
HKSPSYQIKEGDTINVDVTCPGATLALAMIYLKTNNRSIADWLRAPDTMYLLDFVKPEFLLLRTLARCLILWDDILPNSKWVDSNVPQIIRENSISLSEIELPCSEDLNLETLSQAHVYIIAGACLSLGFRFAGSENLSAFNCLHKFAKDFMTYLSAPNASVTGPHNLETCLSVVLLSLAMVMAGSGNLKVLQLCRFLHMKTGGEMNYGFHLAHHMALGLLFLGGGRYSLSTSNSSIAALLCALYPHFPAHSTDNRYHLQALRHLYVLAAEPRLLVPVDVDTNTPCYALLEVTYKGTQWYEQTKEELMAPTLLPELHLLKQIKVKGPRYWELLIDLSKGTQHLKSILSKDGVLYVKLRAGQLSYKEDPMGWQSLLAQTVANRNSEARAFKPETISAFTSDPALLSFAEYFCKPTVNMGQKQEILDLFSSVLYECVTQETPEMLPAYIAMDQAIRRLGRREMSETSELWQIKLVLEFFSSRSHQERLQNHPKRGLFMNSEFLPVVKCTIDNTLDQWLQVGGDMCVHAYLSGQPLEESQLSMLACFLVYHSVPAPQHLPPIGLEGLLKDLAGDSG

SEQ ID NO: 814147 - protein, 900 aa, Homo sapiens
MATCAVEVFGLLEDEENSRIVRVRVIAGIGLAKKDILGASDPYVRVTLYDPMNGVLTSVQTKTIKKSLNPKWNEEILFRVHPQQHRLLFEVFDENRLTRDDFLGQVDVPLYPLPTENPRLERPYTFKDFVLHPRSHKSRVKGYLRLKMTYLPKTSGSEDDNAEQAEELEPGWVVLDQPDAACHLQQQQEPSPLPPGWEERQDILGRTYYVNHESRRTQWKRPTPQDNLTDAENGNIQLQAQRAFTTRRQISEETESVDNQESSENWEIIREDEATMYSSQAFPSPPPSSNLDVPTHLAEELNARLTIFGNSAVSQPASSSNHSSRRGSLQAYTFEEQPTLPVLLPTSSGLPPGWEEKQDERGRSYYVDHNSRTTTWTKPTVQATVETSQLTSSQSSAGPQSQASTSDSGQQVTQPSEIEQGFLPKGWEVRHAPNGRPFFIDHNTKTTTWEDPRLKIPAHLRGKTSLDTSNDLGPLPPGWEERTHTDGRIFYINHNIKRTQWEDPRLENVAITGPAVPYSRDYKRKYEFFRRKLKKQNDIPNKFEMKLRRATVLEDSYRRIMGVKRADFLKARLWIEFDGEKGLDYGGVAREWFFLISKEMFNPYYGLFEYSATDNYTLQINPNSGLCNEDHLSYFKFIGRVAGMAVYHGKLLDGFFIRPFYKMMLHKPITLHDMESVDSEYYNSLRWILENDPTELDLRFIIDEELFGQTHQHELKNGGSEIVVTNKNKKEYIYLVIQWRFVNRIQKQMAAFKEGFFELIPQDLIKIFDENELELLMCGLGDVDVNDWREHTKYKNGYSANHQVIQWFWKAVLMMDSEKRIRLLQFVTGTSRVPMNGFAELYGSNGPQSFTVEQWGTPEKLPRAHTCFNRLDLPPYESFEELWDKLQMAIENTQGFDGVD

SEQ ID NO: 814148 - protein, 286 aa, Homo sapiens
MATCAVEVFGLLEDEEALLIADFSSHRLPAEPVDLKENSAKELEKTTLKFIWNQKRARIAKSILSQKNKAGGITLPDFKLYYKATVTKTAWYWYQNRDIDQWNRTEPSEIMPHIYNYLIFDKPEKNKQWGKDSLFNKWCWENWLAICRKLKLDPFLTPYTKINSRWIKDLNVRPKTIKTLEENLGITIQDIGVGKDFMSKTPKAMATKAKIDKWDLIKLKSFCTAKETTIRVNRQPTTWEKIFATYSSDKGLISRIYNELKQIYKKKTNNPIKKWAKDMNRHFSKE

SEQ ID NO: 814149 - protein, 356 aa, Homo sapiens [sequence omitted]

SEQ ID NO: 814150 - protein, 883 aa, Homo sapiens
MATCAVEVFGLLEDEENSRIVRVRVIAGIGLAKKDILGASDPYVRVTLYDPMNGVLTSVQTKTIKKSLNPKWNEEILFRVHPQQHRLLFEVFDENRLTRDDFLGQVDVPLYPLPTENPRLERPYTFKDFVLHPRSHKSRVKGYLRLKMTYLPKTSGSEDDNAEQAEELEPGWVVLDQPDAACHLQQQQEPSPLPPGWEERQDILGRTYYVNHESRRTQWKRPTPQDNLTDAENGNIQLQAQRAFTTRRQISEETESVDNQESSENWEIIREDEATMYSSQAFPSPPPSSNLDVPTHLAEELNARLTIFGNSAVSQPASSSNHSSRRGSLQAYTFEEQPTLPVLLPTSSGLPPGWEEKQDERGRSYYVDHNSRTTTWTKPTVQATVETSQLTSSQSSAGPQSQASTSDSGQQVTQPSEIEQGFLPKGWEVRHAPNGRPFFIDHNTKTTTWEDPRLKIPAHLRGKTSLDTSNDLGPLPPGWEERTHTDGRIFYINHNIKRTQWEDPRLENVAITGPAVPYSRDYKRKYEFFRRKLKKQNDIPNKFEMKLRRATVLEDSYRRIMGVKRADFLKARLWIEFDGEKGLDYGGVAREWFFLISKEMFNPYYGLFEYSATDNYTLQINPNSGLCNEDHLSYFKFIGRVAGMAVYHGKLLDGFFIRPFYKMMLHKPITLHDMESVDSEYYNSLRWILENDPTELDLRFIIDEELFGQTHQHELKNGGSEIVVTNKNKKEYIYLVIQWRFVNRIQKQMAAFKEGFFELIPQDLIKIFDENELELLMCGLGDVDVNDWREHTKYKNGYSANHQVIQWFWKVQMDHSHLQLNSGVLLKSCQELIPVLIAWTCHLMNHLKNYGINFRWQLKTPRALMELIRLQITICSVFTAIVL

SEQ ID NO: 814151 - protein, 900 aa, Homo sapiens; identical to SEQ ID NO: 814147

SEQ ID NO: 814152 - protein, 118 aa, Homo sapiens
MATCAVEVFGLLEDEENSRIVRVRVIAGIGLAKKDILGASDPYVRVTLYDPMNGVLTSVQTKTIKKSLNPKWNEEILFRKIILEGPKKLFTVFALGVGQRFILSSTGFFLKCLTKTDW

SEQ ID NO: 814153 - protein, 67 aa, Homo sapiens
SRFSSSSSTVACPGRGRARPVCWKRSEMATCAVEVFGLLEDEENSRIVRVRVIAGIGLAKKDILGAR

SEQ ID NO: 814154 - protein, 662 aa, Homo sapiens
GVGSLSGQADGSSGGATGTTASGTGREVTTGADSNGEMSPAELLHFQQQQALQVARQFLLQQASGLSSPGNNDSKQSASAVQVPVSVAMMSPQMLTPQQMQQILSPPQLQALLQQQQALMLQQLQEYYKKQQEQLHLQLLTQQQAGKPQPKEALGNKQLAFQQQLLQMQQLQQQHLLNLQRQGLVSLQPNQASGPLQTLPQAAVCPTDLPQLWKGEGAPGQPAEDSVKQEGLDLTGTAATATSFAAPPKVSPPLSHHTLPNGQPTVLTSRRDSSSHEETPGSHPLYGHGECKWPGCETLCEDLGQFIKHLNTEHALDDRSTAQCRVQMQVVQQLEIQLAKESERLQAMMAHLHMRPSEPKPFSQPLNPVPGSSSFSKVTVSAADSFPDGLVHPPTSAAAPVTPLRPPGLGSASLHGGGPARRRSSDKFCSPISSELAQNHEFYKNADVRPPFTYASLIRQAILETPDRQLTLNEIYNWFTRMFAYFRRNTATWKNAVRHNLSLHKCFVRVENVKGAVWTVDEREYQKRRPPKMTGSPTLVKNMISGLSYGALNASYQAALAESSFPLLNSPGMLNPGSASSLLPLSHDDVGAPVEPLPSNGSSSPPRLSPPQYSHQVQVKEEPAEAEEDRQPGPPLGAPNPSASGPPEDRDLEEELPGEELS

SEQ ID NO: 814155 - protein, 628 aa, Homo sapiens
GVGSLSGQADGSSGGATGTTASGTGREVTTGADSNGEMSPAELLHFQQQQALQVARQFLLQQASGLSSPGNNDSKQSASAVQVPVSVAMMSPQMLTPQQMQQILSPPQLQALLQQQQALMLQQLQEYYKKQQEQLHLQLLTQQQAGKPQPKEALGNKQLAFQQQLLQMQQLQQQHLLNLQRQGLVSLQPNQASGPLQTLPQAAVCPTDLPQLWKGEGAPGQPAEDSVKQEGLDLTGTAATATSFAAPPKVSPPLSHHTLPNGQPTVLTSRRDSSSHEETPGSHPLYGHGECKWPGCETLCEDLGQFIKHLNTEHALDDRSTAQCRVQMQVVQQLEIQLAKESERLQAMMAHLHMRPSEPKPFSQPLNPVPGSSSFSKVTVSAADSFPDGLVHPPTSAAAPVTPLRPPGLGSASLHGGGPARRRSSDKFCSPISSELAQNHEFYKNADVRPPFTYASLIRQNAVRHNLSLHKCFVRVENVKGAVWTVDEREYQKRRPPKMTGSPTLVKNMISGLSYGALNASYQAALAESSFPLLNSPGMLNPGSASSLLPLSHDDVGAPVEPLPSNGSSSPPRLSPPQYSHQVQVKEEPAEAEEDRQPGPPLGAPNPSASGPPEDRDLEEELPGEELS

SEQ ID NO: 814156 - protein, 253 aa, Homo sapiens
RKDREGRAEPERAKQPTKCHAPAGLRRAAVGPARWEDARELRDAGRRGRAAPAGGGGPGLRPERAPCPARADGPEPARSGRAGQVNAVRHNLSLHKCFVRVENVKGAVWTVDEREYQKRRPPKMTGSPTLVKNMISGLSYGALNASYQAALAESSFPLLNSPGMLNPGSASSLLPLSHDDVGAPVEPLPSNGSSSPPRLSPPQYSHQVQVKEEPAEAEEDRQPGPPLGAPNPSASGPPEDRDLEEELPGEELS

SEQ ID NO: 814157 - protein, 662 aa, Homo sapiens; identical to SEQ ID NO: 814154

SEQ ID NO: 814158 - protein, 662 aa, Homo sapiens; identical to SEQ ID NO: 814154

SEQ ID NO: 814159 - protein, 130 aa, Homo sapiens [sequence omitted]

SEQ ID NO: 814160 - protein, 662 aa, Homo sapiens; identical to SEQ ID NO: 814154

SEQ ID NO: 814161 - protein, 662 aa, Homo sapiens; identical to SEQ ID NO: 814154

SEQ ID NO: 814162 - protein, 150 aa, Homo sapiens
RKDREGRAEPERAKQPTKCHAPAGLRRAAVGPARWEDARELRDAGRRGRAAPAGGGGPGLRPERAPCPARADGPEPARSGRAGQVALRPEAGPGPGAQGKARLDPGSTPTSSLQASLQSSHPPSAPLPLQSPSAPLPCPPLPPPPHQLNG

SEQ ID NO: 814163 - protein, 86 aa, Homo sapiens
KKKAFHVSKETWSVFFLALSEFPPKIKSTNPGIFIRDVAKKLCEVWDTLNVSEKQPCITKPVKLREKYEKDVGEVKSALCHPEKST

SEQ ID NO: 814164 - protein, 98 aa, Homo sapiens
ELRTPPTSPTVPDYARPSPTSPTAPTSPTAGPLSGFTSSCQWQKIMPHKLFTWFTLESISSRGLVWLQIIHKCPLFSAPKELLSLFLTKQVQISPRLC

SEQ ID NO: 814165 - protein, 381 aa, Homo sapiens
MESGSTAASEEARSLRECELYVQKHNIQALLKDSIVQLCTARPERPMAFLREYFERLEKEEAKQIQNLQKAGTRTDSREDEISPPPPNPVVKGRRRRGAISAEVYTEEDAASYVRKVIPKDYKTMAALAKAIEKNVLFSHLDDNERSDIFDAMFSVSFIAGETVIQQGDEGDNFYVIDQGETDVYVNNEWATSVGEGGSFGELALIYGTPRAATVKAKTNVKLWGIDRDSYRRILMGSTLRKRKMYEEFLSKVSILESLDKWERLTVADALEPVQFEDGQKIVVQGEPGDEFFIILEGSAAVLQRRSENEEFVEVGRLGPSDYFGEIALLMNRPRAATVVARGPLKCVKLDRPRFERVLGPCSDILKRNIQQYNSFVSLSV

SEQ ID NO: 814166 - protein, 301 aa, Homo sapiens
  misc_feature (301)..(301): Xaa can be any naturally occurring amino acid
REGVERREKRQRRQGRPEGEWGGQRSGGTRGKRTIAARRESEEQEEEQRRPKTPREGQRTMESGSTAASEEARSLRECELYVQKHNIQALLKDSIVQLCTARPERPMAFLREYFERLEKEEAKQIQNLQKAGTRTDSREDEISPPPPNPVVKGRRRRGAISAEVYTEEDAASYVRKVIPKDYKTMAALAKAIEKNVLFSHLDDNERSDIFDAMFSVSFIAGETVIQQGDEGDNFYVIDQGETDVYVNNEWATSVGEGGSFGELALIYGTPRAATVKAKTNVKLWGIDRDSYRRILMYGSPX

SEQ ID NO: 814167 - protein, 223 aa, Homo sapiens
MESGSTAASEEARSLRECELYVQKHNIQALLKDSIVQLCTARPERPMAFLREYFERLEKEEAKQIQNLQKAGTRTDSREDEISPPPPNPVVKGRRRRGAISAEVYTEEDAASYVRKVIPKDYKTMAALAKAIEKNVLFSHLDDNERSDIFDAMFSVSFIAGETVIQQGDEGDNFYVIDQGETDYVPEVSAWIRRLLSKILNLGNAELLDSESVNFRYQLKWDE

SEQ ID NO: 814168 - protein, 242 aa, Homo sapiens
MESGSTAASEEARSLRECELYVQKHNIQALLKDSIVQLCTARPERPMAFLREYFERLEKEEAKQIQNLQKAGTRTDSREDEISPPPPNPVVKGRRRRGAISAEVYTEEDAASYVRKVIPKDYKTMAALAKAIEKNVLFSHLDDNERSDILMHVSVSFIDGRCGSAVIKGYFCDESGKTDVMVTDGHRSGRGAGQRLDGTGTTLEKWIGLRHISSGRRENYNQYARISTHKEGKKKQKVEEIV

SEQ ID NO: 814169 - protein, 107 aa, Homo sapiens
MESGSTAASEEARSLRECELYVQKHNIQALLKDSIVQLCTARPERPMAFLREYFERLEKMRFLLLHPTQWLKVGGDEVLSALRSTRRKMRHPMLERLYHKITRLAAV

SEQ ID NO: 814170 - protein, 381 aa, Homo sapiens; identical to SEQ ID NO: 814165

SEQ ID NO: 814171 - protein, 381 aa, Homo sapiens; identical to SEQ ID NO: 814165

SEQ ID NO: 814172 - protein, 441 aa, Homo sapiens
REGVERREKRQRRQGRPEGEWGGQRSGGTRGKRTIAARRESEEQEEEQRRPKTPREGQRTMESGSTAASEEARSLRECELYVQKHNIQALLKDSIVQLCTARPERPMAFLREYFERLEKEEAKQIQNLQKAGTRTDSREDEISPPPPNPVVKGRRRRGAISAEVYTEEDAASYVRKVIPKDYKTMAALAKAIEKNVLFSHLDDNERSDIFDAMFSVSFIAGETVIQQGDEGDNFYVIDQGETDVYVNNEWATSVGEGGSFGELALIYGTPRAATVKAKTNVKLWGIDRDSYRRILMGSTLRKRKMYEEFLSKVSILESLDKWERLTVADALEPVQFEDGQKIVVQGEPGDEFFIILEGSAAVLQRRSENEEFVEVGRLGPSDYFGEIALLMNRPRAATVVARGPLKCVKLDRPRFERVLGPCSDILKRNIQQYNSFVSLSV

SEQ ID NO: 814173 - protein, 381 aa, Homo sapiens; identical to SEQ ID NO: 814165

SEQ ID NO: 814174 - protein, 381 aa, Homo sapiens; identical to SEQ ID NO: 814165

SEQ ID NO: 814175 - protein, 381 aa, Homo sapiens; identical to SEQ ID NO: 814165

SEQ ID NO: 814176 - protein, 381 aa, Homo sapiens; identical to SEQ ID NO: 814165

SEQ ID NO: 814177 - protein, 349 aa, Homo sapiens
MESGSTAASEEARSLRECELYVQKHNIQALLKDSIVQLCTARPERPMAFLREYFERLEKEEAKQIQNLQKAGTRTDSREDEISPPPPNPVVKGRRRRGAISAEVYTEEDAASYVRKVIPKDYKTMAALAKAIEKNVLFSHLDDNERSDIFDAMFSVSFIAGETVIQQGDEGDNFYVIDQGETDVYVNNEWATSVGEGGSFGELALIYGTPRAATVKAKTNVKLWGIDRDSYRRILMGSTLRKRKMYEEFLSKVSILESLDKWERLTVADALEPVQFEDGQKIVVQGEPGDEFFIILEGSAAVLQRRSENEEFVEVGRLGPSDYFGMYEFPHNKYMVSLSHLSVRYCSLP

SEQ ID NO: 814178 - protein, 229 aa, Homo sapiens
MFSVSFIAGETVIQQGDEGDNFYVIDQGETDVYVNNEWATSVGEGGSFGELALIYGTPRAATVKAKTNVKLWGIDRDSYRRILMGSTLRKRKMYEEFLSKVSILESLDKWERLTVADALEPVQFEDGQKIVVQGEPGDEFFIILEGSAAVLQRRSENEEFVEVGRLGPSDYFGEIALLMNRPRAATVVARGPLKCVKLDRPRFERVLGPCSDILKRNIQQYNSFVSLSV

SEQ ID NO: 814179 - protein, 336 aa, Homo sapiens
STLGGQGGWIISAQEFEITLRNVAKPCLYKNYKKLAGRGGACLWSQPRRRRRGAISAEVYTEEDAASYVRKVIPKDYKTMAALAKAIEKNVLFSHLDDNERSDIFDAMFSVSFIAGETVIQQGDEGDNFYVIDQGETDVYVNNEWATSVGEGGSFGELALIYGTPRAATVKAKTNVKLWGIDRDSYRRILMGSTLRKRKMYEEFLSKVSILESLDKWERLTVADALEPVQFEDGQKIVVQGEPGDEFFIILEGSAAVLQRRSENEEFVEVGRLGPSDYFGEIALLMNRPRAATVVARGPLKCVKLDRPRFERVLGPCSDILKRNIQQYNSFVSLSV

SEQ ID NO: 814180 - protein, 260 aa, Homo sapiens
MESGSTAASEEARSLRECELYVQKHNIQALLKDSIVQLCTARPERPMAFLREYFERLEKEEAKQIQNLQKAGTRTDSREDEISPPPPNPVVKGRRRRGAISAEVYTEEDAASYVRKVIPKDYKTMAALAKAIEKNVLFSHLDDNERSDIFDAMFSVSFIAGETVIQQGDEGDNFYVIDQGETDVYVNNEWATSVGEGGSFGELALIYGTPRAATVKAKTNVKLWGIDRDSYRRILMGSTLRKRKMYEEFLSKVSILVGIN

SEQ ID NO: 814181 - protein, 252 aa, Homo sapiens
MRITWKNVRFTSDDNERSDIFDAMFSVSFIAGETVIQQGDEGDNFYVIDQGETDVYVNNEWATSVGEGGSFGELALIYGTPRAATVKAKTNVKLWGIDRDSYRRILMGSTLRKRKMYEEFLSKVSILESLDKWERLTVADALEPVQFEDGQKIVVQGEPGDEFFIILEGSAAVLQRRSENEEFVEVGRLGPSDYFGEIALLMNRPRAATVVARGPLKCVKLDRPRFERVLGPCSDILKRNIQQYNSFVSLSV

SEQ ID NO: 814182 - protein, 381 aa, Homo sapiens; identical to SEQ ID NO: 814165

SEQ ID NO: 814183 - protein, 146 aa, Homo sapiens
MGSTLRKRKMYEEFLSKVSILESLDKWERLTVADALEPVQFEDGQKIVVQGEPGDEFFIILEGSAAVLQRRSENEEFVEVGRLGPSDYFGEIALLMNRPRAATVVARGPLKCVKLDRPRFERVLGPCSDILKRNIQQYNSFVSLSV

SEQ ID NO: 814184 - protein, 170 aa, Homo sapiens
TEHYDMFDSSSYPTDLGETPIENPHGSTLRKRKMYEEFLSKVSILESLDKWERLTVADALEPVQFEDGQKIVVQGEPGDEFFIILEGSAAVLQRRSENEEFVEVGRLGPSDYFGEIALLMNRPRAATVVARGPLKCVKLDRPRFERVLGPCSDILKRNIQQYNSFVSLSV

SEQ ID NO: 814185 - protein, 381 aa, Homo sapiens; identical to SEQ ID NO: 814165

SEQ ID NO: 814186 - protein, 381 aa, Homo sapiens; identical to SEQ ID NO: 814165

SEQ ID NO: 814187 - protein, 164 aa, Homo sapiens
GTSRTGQKNFQIPFKRLYNHGVSVKVGERDATHPERPVNVIHAVYMRIWYILTSCLSPRGDGQKIVVQGEPGDEFFIILEGSAAVLQRRSENEEFVEVGRLGPSDYFGEIALLMNRPRAATVVARGPLKCVKLDRPRFERVLGPCSDILKRNIQQYNSFVSLSV

SEQ ID NO: 814188 - protein, 381 aa, Homo sapiens; identical to SEQ ID NO: 814165

SEQ ID NO: 814189 - protein, 160 aa, Homo sapiens
PPGCRIRHEVSFIEEETVIQQGDEGDNFYVIDQGETDVYVNNEWATSVGEGGSFGELALIYGTPRAATVKAKTNVKLWGIDRDSYRRILMGSTLRKRKMYEEFLSKVSILESLDKWERLTVADALEPVQFEDGQKIVVQGEPGDEFFIILEGSAAVLQRR

SEQ ID NO: 814190 - protein, 369 aa, Homo sapiens
MESGSTAASEEARSLRECELYVQKHNIQALLKDSIVQLCTARPERPMAFLREYFERLEKEEAKQIQNLQKAGTRTDSREDEISPPPPNPVVKGRRRRGAISAEVYTEEDAASYVRKVIPKDYKTMAALAKAIEKNVLFSHLDDNERSDIFDAMFSVSFIAGETVIQQGDEGDNFYVIDQGETDVYVNNEWATSVGEGGSFGELALIYGTPRAATVKAKTNVKLWGIDRDSYRRILMGSTLRKRKMYEEFLSKVSILESLDKWERLTVADALEPVQFEDGQKIVVQGEPGDEFFIILEGSAAVLQRRSENEEFVEVGRLGPSDYFGEIALLMNRPRAATVVARGPLKCVKLDRPRFERVLGLAICKGYRA

SEQ ID NO: 814191 - protein, 349 aa, Homo sapiens; identical to SEQ ID NO: 814177

SEQ ID NO: 814192 - protein, 337 aa, Homo sapiens
MESGSTAASEEARSLRECELYVQKHNIQALLKDSIVQLCTARPERPMAFLREYFERLEKEEAKQIQNLQKAGTRTDSREDEISPPPPNPVVKGRRRRGAISAEVYTEEDAASYVRKVIPKDYKTMAALAKAIEKNVLFSHLDDNERSDIFDAMFSVSFIAGETVIQQGDEGDNFYVIDQGETDVYVNNEWATSVGEGGSFGELALIYGTPRAATVKAKTNVKLWGIDRDSYRRILMGSTLRKRKMYEEFLSKVSILESLDKWERLTVADALEPVQFEDGQKIVVQGEPGDEFFIILEGSAAVLQRRSENEEFVEVGRLGPSDYFGHLIISRRSIPLG

SEQ ID NO: 814193 - protein, 349 aa, Homo sapiens
MESGSTAASEEARSLRECELYVQKHNIQALLKDSIVQLCTARPERPMAFLREYFERLEKEEAKQIQNLQKAGTRTDSREDEISPPPPNPVVKGRRRRGAISAEVYTEEDAASYVRKVIPKDYKTMAALAKAIEKNVLFSHLDDNERSDIFDAMFSVSFIAGETVIQQGDEGDNFYVIDQGETDVYVNNEWATSVGEGGSFGELALIYGTPRAATVKAKTNVKLWGIDRDSYRRILMGSTLRKRKMYEEFLSKVSILESLDKWERLTVADALEPVQFEDGQKIVVQGEPGDEFFIILEGSAAVLQRRSENEEFVECVKLDRPRFERVLGPCSDILKRNIQQYNSFVSLSV

SEQ ID NO: 814194 - protein, 252 aa, Homo sapiens
MESGSTAASEEARSLRECELYVQKHNIQALLKDSIVQLCTARPERPMAFLREYFERLEKEEAKQIQNLQKAGTRTDSREDEISPPPPNPVVKGRRRRGAISAEVYTEEDAASYVRKVIPKDYKTMAALAKAIEKNVLFSHLDDNERSDIFDAMFSVSFIAGETVIQQGDEGDNFYVIDQGETDVYVNNEWATSVGEGGSFGELALIYGTPRAATIEKISWAWWHTPIIPALWEAEVGGSPEVESSRPAWPTR

SEQ ID NO: 814195 - protein, 205 aa, Homo sapiens
MESGSTAASEEARSLRECELYVQKHNIQALLKDSIVQLCTARPERPMAFLREYFERLEKEEAKQIQNLQKAGTRTDSREDEISPPPPNPVVKGRRRRGAISAEVYTEEDAASYVRKVIPKDYKTMAALAKAIEKNVLFSHLDDNERSDIFDAMFSVSFIAGETVIQQGDEGDNFYVIDQGETDVRFTNIKNMLILKANVLIASEQ

SEQ ID NO: 814196 - protein, 161 aa, Homo sapiens
MESGSTAASEEARSLRECELYVQKHNIQALLKDSIVQLCTARPERPMAFLREYFERLEKEEAKQIQNLQKAGTRTDSREDEISPPPPNPVVKGRRRRGAISAEVYTEEDAASYVRKVIPKDYKTMAALAKAIEKNVLFSHLDDNERSDIFDAIGPRGFAST

SEQ ID NO: 814197 - protein, 126 aa, Homo sapiens
MESGSTAASEEARSLRECELYVQKHNIQALLKDSIVQLCTARPERPMAFLREYFERLEKEEAKQIQNLQKAGTRTDSREDEISPPPPNPVVKGRRRRGAISAEVYTEEDAASYVRKVIPKDYRHAA

SEQ ID NO: 814198 - protein, 136 aa, Homo sapiens
MESGSTAASEEARSLRECELYVQKHNIQALLKDSIVQLCTARPERPMAFLREYFERLEKEEAKQIQNLQKAGTRTDSREDEISPPPPNPVVKGRRRRGAISAEVYTEEDAASYVRKVIPKHQETITHEVVTQIGQI

SEQ ID NO: 814199 - protein, 123 aa, Homo sapiens
VSSRNADWLRPGRFRWSCRLAAIAEWSGAGSKALRELGTPPPRTRSLAPAAARPQRTMESGSTAASEEARSLRECELYVQKHNIQALLKDSIVQLCTARPERPMAFLREYFERLEKVKINVGR

SEQ ID NO: 814200 - protein, 121 aa, Homo sapiens
MESGSTAASEEARSLRECELYVQKHNIQALLKDSIVQLCTARPERPMAFLREYFERLEKEEAKQIQNLQKAGTRTDSREDEISPPPPNPVVKVLHSCKLLYFPYLQRQVATGIAASCLFIY

SEQ ID NO: 814201 - protein, 161 aa, Homo sapiens; identical to SEQ ID NO: 814196

SEQ ID NO: 814202 - protein, 73 aa, Homo sapiens
PPSPPRAAASSLTLPHFLKDNGSILLGSAIVSSAGPGSSCKPVVFLSTFDDSSLLAVAFPLHSGVIFPPTRRS

SEQ ID NO: 814203 - protein, 73 aa, Homo sapiens
KQIQNLQKAGTRTDSREDEISPPPPNPVVKGRRRRGAISAEVYTEEDAASYVRKVVLIFEYRGDAFGTHLVVI

SEQ ID NO: 814204 - protein, 471 aa, Homo sapiens
MSDFDEFERQLNENKQERDKENRHRKRSHSRSRSRDRKRRSRSRDRRNRDQRSASRDRRRRSKPLTRGAKEEHGGLIRSPRHEKKKKVRKYWDVPPPGFEHITPMQYKAMQAAGQIPATALLPTMTPDGLAVTPTPVPVVGSQMTRQARRLYVGNIPFGITEEAMMDFFNAQMRLGGLTQAPGNPVLAVQINQDKNFAFLEFRSVDETTQAMAFDGIIFQGQSLKIRRPHDYQPLPGMSENPSVYVPGVVSTVVPDSAHKLFIGGLPNYLNDDQVKELLTSFGPLKAFNLVKDSATGLSKGYAFCEYVDINVTDQAIAGLNGMQLGDKKLLVQRASVGAKNATLSTINQTPVTLQVPGLMSSQVQMGGHPTEVLCLMNMVLPEELLDDEEYEEIVEDVRDECSKYGLVKSIEIPRPVDGVEVPGCGKIFVEFTSVFDCQKAMQGLTGRKFANRVVVTKYCDPDSYHRRDFW

SEQ ID NO: 814205 - protein, 471 aa, Homo sapiens; identical to SEQ ID NO: 814204

SEQ ID NO: 814206 - protein, 471 aa, Homo sapiens; identical to SEQ ID NO: 814204

SEQ ID NO: 814207 - protein, 471 aa, Homo sapiens; identical to SEQ ID NO: 814204

SEQ ID NO: 814208 - protein, 471 aa, Homo sapiens; identical to SEQ ID NO: 814204

SEQ ID NO: 814209 - protein, 465 aa, Homo sapiens
MSDFDEFERQLNENKQERDKENRHRKRSHSRSRSRDRKRRSRSRDRRNRDQRSASRDRRRRSKPLTRGAKEEHGGLIRSPRHEKKKKVRKYWDVPPPGFEHITPMQYKAMQAAGQIPATALLPTMTPDGLAVTPTPVPVVGSQMTRQARRLYVGNIPFGITEEAMMDFFNAQMRLGGLTQAPGNPVLAVQINQDKNFAFLEFRSVDETTQAMAFDGIIFQGQSLKIRRPHDYQPLPGMSENPSVYVPGVVSTVVPDSAHKLFIGGLPNYLNDDQVKELLTSFGPLKAFNLVKDSATGLSKGYAFCEYVDINVTDQAIAGLNGMQLGDKKLLVQRASVGAKNATLSTINQTPVTLQVPGLMSSQVQMGGHPTEVLCLMNMVLPEELLDDEEYEEIVEDVRDECSKYGLVKSIEIPRPVDGVEVPGCGKIFVEFTSVFDPALSLTRTTALFLRPLVLSGPLLGFLRS

SEQ ID NO: 814210 - protein, 371 aa, Homo sapiens
MSDFDEFERQLNENKQERDKENRHRKRSHSRSRSRDRKRRSRSRDRRNRDQRSASRDRRRRSKPLTRGAKEEHGGLIRSPRHEKKKKVRKYWDVPPPGFEHITPMQYKAMQAAGQIPATALLPTMTPDGLAVTPTPVPVVGSQMTRQARRLYVGNIPFGITEEAMMDFFNAQMRLGGLTQAPGNPVLAVQINQDKNFAFLEFRSVDETTQAMAFDGIIFQGQSLKIRRPHDYQPLPGMSENPSVYVPGVVSTVVPDSAHKLFIGGLPNYLNDDQVKELLTSFGPLKAFNLVKDSATGLSKGYAFCEYVDINVTDQAIAGLNGMQLGDKKLLVQRASVGAKNATLEHHQSDACDPASAGLDELPGADGRPPD

SEQ ID NO: 814211 - protein, 427 aa, Homo sapiens
MSDFDEFERQLNENKQERDKENRHRKRSHSRSRSRDRKRRSRSRDRRNRDQRSASRDRRRRSKPLTRGAKEEHGGLIRSPRHEKKKKVRKYWDVPPPGFEHITPMQYKAMQAAGQIPATALLPTMTPDGLAVTPTPVPVVGSQMTRQARRLYVGNIPFGITEEAMMDFFNAQMRLGGLTQAPGNPVLAVQINQDKNFAFLEFRSVDETTQAMAFDGIIFQGQSLKIRRPHDYQPLPGMSENPSVYVPGVVSTVVPDSAHKLFIGGLPNYLNDDQVKELLTSFGPLKAFNLVKDSATGLSKGYAFCEYVDINVTDQAIAGLNGMQLGDKKLLVQRASVGAKNATLEHHQSDACDPTSAWPGACWEDVCFLLHLKAGNLSELGKTGKKSERNGGTWGKRMEDGLGAVRAKSRQGLPQGRLRALHTLTAA

SEQ ID NO: 814212 - protein, 329 aa, Homo sapiens
MSDFDEFERQLNENKQERDKENRHRKRSHSRSRSRDRKRRSRSRDRRNRDQRSASRDRRRRSKPLTRGAKEEHGGLIRSPRHEKKKKVRKYWDVPPPGFEHITPMQYKAMQAAGQIPATALLPTMTPDGLAVTPTPVPVVGSQMTRQARRLYVGNIPFGITEEAMMDFFNAQMRLGGLTQAPGNPVLAVQINQDKNFAFLEFRSVDETTQAMAFDGIIFQGQSLKIRRPHDYQPLPGMSENPSVYVPGLCPWGPDSGPKLYSGGSKLDKTRSKGWHPGTRGQRAEGTGTKGAHGERDIQGQPGVEKWHNGQRRGKRDNNTTGNHRHDKE

SEQ ID NO: 814213 - protein, 491 aa, Homo sapiens
MSDFDEFERQLNENKQERDKENRHRKRSHSRSRSRDRKRRSRSRDRRNRDQRSASRDRRRRSKPLTRGAKEEHGGLIRSPRHEKKKKVRKYWDVPPPGFEHITPMQYKAMQAAGQIPATALLPTMTPDGLAVTPTPVPVVGSQMTRQARRLYVGNIPFGITEVKYCGAEIPRSNKKLLPSSKEAMMDFFNAQMRLGGLTQAPGNPVLAVQINQDKNFAFLEFRSVDETTQAMAFDGIIFQGQSLKIRRPHDYQPLPGMSENPSVYVPGVVSTVVPDSAHKLFIGGLPNYLNDDQVKELLTSFGPLKAFNLVKDSATGLSKGYAFCEYVDINVTDQAIAGLNGMQLGDKKLLVQRASVGAKNATLSTINQTPVTLQVPGLMSSQVQMGGHPTEVLCLMNMVLPEELLDDEEYEEIVEDVRDECSKYGLVKSIEIPRPVDGVEVPGCGKIFVEFTSVFDCQKAMQGLTGRKFANRVVVTKYCDPDSYHRRDFW

SEQ ID NO: 814214 - protein, 367 aa, Homo sapiens
MQYKAMQAAGQIPATALLPTMTPDGLAVTPTPVPVVGSQMTRQARRLYVGNIPFGITEEAMMDFFNAQMRLGGLTQAPGNPVLAVQINQDKNFAFLEFRSVDETTQAMAFDGIIFQGQSLKIRRPHDYQPLPGMSENPSVYVPGVVSTVVPDSAHKLFIGGLPNYLNDDQVKELLTSFGPLKAFNLVKDSATGLSKGYAFCEYVDINVTDQAIAGLNGMQLGDKKLLVQRASVGAKNATLSTINQTPVTLQVPGLMSSQVQMGGHPTEVLCLMNMVLPEELLDDEEYEEIVEDVRDECSKYGLVKSIEIPRPVDGVEVPGCGKIFVEFTSVFDCQKAMQGLTGRKFANRVVVTKYCDPDSYHRRDFW

SEQ ID NO: 814215 - protein, 387 aa, Homo sapiens
MQYKAMQAAGQIPATALLPTMTPDGLAVTPTPVPVVGSQMTRQARRLYVGNIPFGITEVKYCGAEIPRSNKKLLPSSKEAMMDFFNAQMRLGGLTQAPGNPVLAVQINQDKNFAFLEFRSVDETTQAMAFDGIIFQGQSLKIRRPHDYQPLPGMSENPSVYVPGVVSTVVPDSAHKLFIGGLPNYLNDDQVKELLTSFGPLKAFNLVKDSATGLSKGYAFCEYVDINVTDQAIAGLNGMQLGDKKLLVQRASVGAKNATLSTINQTPVTLQVPGLMSSQVQMGGHPTEVLCLMNMVLPEELLDDEEYEEIVEDVRDECSKYGLVKSIEIPRPVDGVEVPGCGKIFVEFTSVFDCQKAMQGLTGRKFANRVVVTKYCDPDSYHRRDFW

SEQ ID NO: 814216 - protein, 198 aa, Homo sapiens
MSDFDEFERQLNENKQERDKENRHRKRSHSRSRSRDRKRRSRSRDRRNRDQRSASRDRRRRSKPLTRGAKEEHGGLIRSPRHEKKKKVRKYWDVPPPGFEHITPMQYKAMQAAGQIPATALLPTMTPDGLAVTPTPVPVVGSQMTRQARRLYVGNIPFGITEEAMMDFFNAQMRLGGLTQAPGNPVLAVQINQPLLLP

SEQ ID NO: 814217 - protein, 393 aa, Homo sapiens
MSDFDEFERQLNENKQERDKENRHRKRSHSRSRSRDRKRRSRSRDRRNRDQRSASRDRRRRSKPLTRGAKEEHGGLIRSPRHEKKKKVRKYWDVPPPGFEHITPMQYKAMQAAGQIPATALLPTMTPDGLAVTPTPVPVVGSQMTRQARRLYVGNIPFGITEVKYCGAEIPRSNKKLLPSSKEAMMDFFNAQMRLGGLTQAPGNPVLAVQINQDKNFAFLEFRSVDETTQAMAFDGIIFQGQSLKIRRPHDYQPLPGMSENPSVYVPGVVSTVVPDSAHKLFIGGLPNYLNDDQVKELLTSFGPLKAFNLVKDSATGLSKGYAFCEYVDINVTDQVSPRSLAAAASVLPCPALLPSHGLPSSGDGAGGGQPEAVPCVWARPCPMVLAFSRLLI

SEQ ID NO: 814218 - protein, 184 aa, Homo sapiens
MSDFDEFERQLNENKQERDKENRHRKRSHSRSRSRDRKRRSRSRDRRNRDQRSASRDRRRRSKPLTRGAKEEHGGLIRSPRHEKKKKVRKYWDVPPPGFEHITPMQYKAMQAAGQIPATALLPTMTPDGLAVTPTPVPVVGSQMTRQARRLYVGNIPFGITEVKYCGAEIPRSNKKFATIVEGK

SEQ ID NO: 814219 - protein, 289 aa, Homo sapiens
VPRDPPPHHPNRTDICLFGFRSVDETTQAMAFDGIIFQGQSLKIRRPHDYQPLPGMSENPSVYVPGVVSTVVPDSAHKLFIGGLPNYLNDDQVKELLTSFGPLKAFNLVKDSATGLSKGYAFCEYVDINVTDQAIAGLNGMQLGDKKLLVQRASVGAKNATLSTINQTPVTLQVPGLMSSQVQMGGHPTEVLCLMNMVLPEELLDDEEYEEIVEDVRDECSKYGLVKSIEIPRPVDGVEVPGCGKIFVEFTSVFDCQKAMQGLTGRKFANRVVVTKYCDPDSYHRRDFW

SEQ ID NO: 814220 - protein, 192 aa, Homo sapiens
APFIPLAAFVWHNLLRPSARPALFFFHFPHPESQVPRTRTSSPSLSLPLIHLVSVLLPFSVPEAGRSRGTHGKSRSCPRRVRPSRSGGGRSRSSLIGGVSKWHLRKEPKHGLELNPRRGPRARSGNLRKEPKAGTVRIVGSGRLLGQGRRRRSEQVRGRSQRLGRIELLEEPELAEGTGRSGTRGHTETSER

SEQ ID NO: 814221 - protein, 135 aa, Homo sapiens [sequence omitted]

SEQ ID NO: 814222 - protein, 30 aa, Homo sapiens
MAFDGIIFQGQSLKIRRPHDYQPLPGMSEN

SEQ ID NO: 814223 - protein, 451 aa, Homo sapiens
MKTKLNIYNMQFLLFVFLVWDPARLVLANIQEDEAKNNITIFTRILDRLLDGYDNRLRPGLGDSITEVFTNIYVTSFGPVSDTDMEYTIDVFFRQKWKDERLKFKGPMNILRLNNLMASKIWTPDTFFHNGKKSVAHNMTMPNKLLRIQDDGTLLYTMRLTVQAECPMHLEDFPMDAHSCPLKFGSYAYTTSEVTYIWTYNASDSVQVAPDGSRLNQYDLLGQSIGKETIKSSTGEYTVMTAHFHLKRKIGYFVIQTYLPCIMTVILSQVSFWLNRESVPARTVFGVTTVLTMTTLSISARNSLPKVAYATAMDWFIAVCYAFVFSALIEFATVNYFTKRGWAWDGKSVVNDKKKEKASVMIQNNAYAVAVANYAPNLSKDPVLSTISKSATTPEPNKKPENKPAEAKKTFNSVSKIDRMSRIVFPVLFGTFNLVYWATYLNREPVLGVSP

SEQ ID NO: 814224 - protein, 503 aa, Homo sapiens
SKRPRGAARGCAWAPLLRRGVGEGSGAPSAPRRPTPPGSAPLLVPGGRRAAVMKTKLNIYNMQFLLFVFLVWDPARLVLANIQEDEAKNNITIFTRILDRLLDGYDNRLRPGLGDSITEVFTNIYVTSFGPVSDTDMEYTIDVFFRQKWKDERLKFKGPMNILRLNNLMASKIWTPDTFFHNGKKSVAHNMTMPNKLLRIQDDGTLLYTMRLTVQAECPMHLEDFPMDAHSCPLKFGSYAYTTSEVTYIWTYNASDSVQVAPDGSRLNQYDLLGQSIGKETIKSSTGEYTVMTAHFHLKRKIGYFVIQTYLPCIMTVILSQVSFWLNRESVPARTVFGVTTVLTMTTLSISARNSLPKVAYATAMDWFIAVCYAFVFSALIEFATVNYFTKRGWAWDGKSVVNDKKKEKASVMIQNNAYAVAVANYAPNLSKDPVLSTISKSATTPEPNKKPENKPAEAKKTFNSVSKIDRMSRIVFPVLFGTFNLVYWATYLNREPVLGVSP

SEQ ID NO: 814225 - protein, 503 aa, Homo sapiens
MSEARGEPGSGPEAGARFFCTAGRGLEPFVMREVRARLAATQVEYISGKVFFTTCSDLNMLKKLKSAERLFLLIKKQFPLIISSVSKGKIFNEMQRLINEDPGSWLNAISIWKNLLELDAKKEKLSQRDDNQLKRKVGENEIIAKKLKIEQMQKIEENRDCQLEKQIKEETLEQRDFTTKSEKFQEEEFQNDIEKAIDTHNQNDLTFRVSCRCSGTIGKAFTAQEVGKVIGIAIMKHFGWKADLRNPQLEIFIHLNDIYSVVGIPVFRVSLASRAYIKTAGLRSTIAWAMASLADIKAGAFVLDPMCGLGTILLEAAKEWPDVYYVGADVSDSQLLGTWDNLKAAGLEDKIELLKISVIELPLPSESVDIIISDIPFGKKFKLGKDIKSILQEMERVLHVGGTIVLLLSEDHHRRLTDCKESNIPFNSKDSHTDEPGIKKCLNPEEKTGAFKTASTSFEASNHKFLDRMSPFGSLVPVECYKVSLGKTDAFICKYKKSHSSGL

SEQ ID NO: 814226 - protein, 254 aa, Homo sapiens
MSEARGEPGSGPEAGARFFCTAGRGLEPFVMREVRARLAATQVEYISGKVFFTTCSDLNMLKKLKSAERLFLLIKKQFPLIISSVSKGKIFNEMQRLINEDPGSWLNAISIWKNLLELDAKKEKLSQRDDNQLKRKVGENEIIAKKLKIEQMQKIEENRDCQLEKQIKEETLEQRDFTTKSEKFQEEEFQNDIEKAIDTHNQNDLTFRVSCRCSGTIGKAFTAQEVGKVIGIAIMKHFGWKADLRNPQLEILLL

SEQ ID NO: 814227 - protein, 543 aa, Homo sapiens
MSEARGEPGSGPEAGARFFCTAGRGLEPFVMREVRARLAATQVEYISGKVFFTTCSDLNMLKKLKSAERLFLLIKKQFPLIISSVSKGKIFNEMQRLINEDPGSWLNAISIWKNLLELDAKKEKLSQRDDNQLKRKVGENEIIAKKLKIEQMQKIEENRDCQLEKQIKEETLEQRDFTTKSEKFQEEEFQNDIEKAIDTHNQNDLTFRVSCRCSGTIGKAFTAQEVGKVIGIAIMKHFGWKADLRNPQLEIFIHLNDIYSVVGIPVFRVSLASRAYIKTAGLRSTIAWAMASLADIKVPYGSDETWLCTEDSASSVDISSGGCLFSPISSTTGPDSGAGAFVLDPMCGLGTILLEAAKEWPDVYYVGADVSDSQLLGTWDNLKAAGLEDKIELLKISVIELPLPSESVDIIISDIPFGKKFKLGKDIKSILQEMERVLHVGGTIVLLLSEDHHRRLTDCKESNIPFNSKDSHTDEPGIKKCLNPEEKTGAFKTASTSFEASNHKFLDRMSPFGSLVPVECYKVSLGKTDAFICKYKKSHSSGL

SEQ ID NO: 814228 - protein, 244 aa, Homo sapiens
MALTETWLCTEDSASSVDISSGGCLFSPISSTTGPDSGAGAFVLDPMCGLGTILLEAAKEWPDVYYVGADVSDSQLLGTWDNLKAAGLEDKIELLKISVIELPLPSESVDIIISDIPFGKKFKLGKDIKSILQEMERVLHVGGTIVLLLSEDHHRRLTDCKESNIPFNSKDSHTDEPGIKKCLNPEEKTGAFKTASTSFEASNHKFLDRMSPFGSLVPVECYKVSLGKTDAFICKYKKSHSSGL

SEQ ID NO: 814229 - protein, 543 aa, Homo sapiens; identical to SEQ ID NO: 814227

SEQ ID NO: 814230 - protein, 543 aa, Homo sapiens; identical to SEQ ID NO: 814227

SEQ ID NO: 814231 - protein, 272 aa, Homo sapiens
MSEARGEPGSGPEAGARFFCTAGRGLEPFVMREVRARLAATQVEYISGKVFFTTCSDLNMLKKLKSAERLFLLIKKQFPLIISSVSKGKIFNEMQRLINEDPGSWLNAISIWKNLLELDAKKEKLSQRDDNQLKRKVGENEIIAKKLKIEQMQKIEENRDCQLEKQIKEETLEQRDFTTKSEKFQEEEFQNDIEKAIDTHNQNDLTFRVSCRCSGTIGKAFTAQMSFVFGNPDTIVLSFWGFSSVQLCAYSVATLHRSCTWDCHQDLDCKCT

SEQ ID NO: 814232 - protein, 244 aa, Homo sapiens
MSEARGEPGSGPEAGARFFCTAGRGLEPFVMREVRARLAATQVEYISGKVFFTTCSDLNMLKKLKSAERLFLLIKKQFPLIISSVSKGKIFNEMQRLINEDPGSWLNAISIWKNLLELDAKKEKLSQRDDNQLKRKVGENEIIAKKLKIEQMQKIEENRDCQLEKQIKEETLEQRDFTTKSEKFQEEEFQNDIEKAIDTHNQNDLTFRVSCRCSGTIGKAFTAQVCLHPKVESVAQAGMQLHNL

SEQ ID NO: 814233 - protein, 221 aa, Homo sapiens
  misc_feature (11)..(11): Xaa can be any naturally occurring amino acid
ATRYRSRYEAXWWQHLLASSRPEPANERKMADNFSLHDALSGSGNPNPQGWPGAWGNQPAGAGGYPGASYPGAYPGQAPPGAYPGQAPPGAYHGAPGAYPGAPAPGVYPGPPSGPGAYPSSGQPSAPGAYPATGPYGAPAGPLIVPYNLPLPGGVVPRMLITILGTVKPNANRIALDFQRGNDVAFHFNPRFNENNRRVIVCNTKLDNNWGRERKTVGFPI

SEQ ID NO: 814234 - protein, 221 aa, Homo sapiens; identical to SEQ ID NO: 814233
  misc_feature (11)..(11): Xaa can be any naturally occurring amino acid

SEQ ID NO: 814235 - protein, 202 aa, Homo sapiens
GRPQHLLASSRPEPANERKMADNFSLHDALSGSGNPNPQGWPGAWGNQPAGAGGYPGASYPGAYPGQAPPGAYPGQAPPGAYHGAPGAYPGAPAPGVYPGPPSGPGAYPSSGQPSAPGAYPATGPYGAPAGPLIVPYNLPLPGGVVPRMLITILGTVKPNANRIALDFQRGNDVAFHFNPRFNENNRRVIVCNTCVKVSCSL

SEQ ID NO: 814236 - protein, 143 aa, Homo sapiens
LVIQAVADNFSLHDALSGSGNPNPQGWPGAWGNQPAGAGGYPGASYPGAYPGQAPPGAYPGQAPPGAYHGAPGAYPGAPAPGVYPGPPSGPGAYPSSGQPSAPGAYPATGPYGAPAGPLIVLYNLPFLGGVVPRLLGLKGGTE

SEQ ID NO: 814237 - protein, 221 aa, Homo sapiens; identical to SEQ ID NO: 814233
  misc_feature (11)..(11): Xaa can be any naturally occurring amino acid

SEQ ID NO: 814238 - protein, 221 aa, Homo sapiens; identical to SEQ ID NO: 814233
  misc_feature (11)..(11): Xaa can be any naturally occurring amino acid

SEQ ID NO: 814239 - protein, 221 aa, Homo sapiens; identical to SEQ ID NO: 814233
  misc_feature (11)..(11): Xaa can be any naturally occurring amino acid

SEQ ID NO: 814240 - protein, 221 aa, Homo sapiens; identical to SEQ ID NO: 814233
  misc_feature (11)..(11): Xaa can be any naturally occurring amino acid

SEQ ID NO: 814241 - protein, 105 aa, Homo sapiens [sequence omitted]

SEQ ID NO: 814242 - protein, 211 aa, Homo sapiens
GRPQHLLASSRPEPANERKMADNFSLHDALSGSGNPNPQGWPGAWGNQPAGAGGYPGASYPGAYPGQAPPGAYPGQAPPGAYHGAPGAYPGAPAPGVYPGPPSGPGAYPSSGQPSAPGAYPATGPYGAPAGPLIVPYNLPLPGGVVPRMLITILGTVKPNANRIALDFQRGNDVAFHFNPRFNENNRRVIVCNTKLDNNWGRERKTVGFPI

SEQ ID NO: 814243 - protein, 224 aa, Homo sapiens
APAAPPRQQPSGASQRAGMHSKTPCGCFKPWKMADNFSLHDALSGSGNPNPQGWPGAWGNQPAGAGGYPGASYPGAYPGQAPPGAYPGQAPPGAYHGAPGAYPGAPAPGVYPGPPSGPGAYPSSGQPSAPGAYPATGPYGAPAGPLIVPYNLPLPGGVVPRMLITILGTVKPNANRIALDFQRGNDVAFHFNPRFNENNRRVIVCNTKLDNNWGRERKTVGFPI

SEQ ID NO: 814244 - protein, 209 aa, Homo sapiens
TKYSAALGIPSDSCCRKMADNFSLHDALSGSGNPNPQGWPGAWGNQPAGAGGYPGASYPGAYPGQAPPGAYPGQAPPGAYHGAPGAYPGAPAPGVYPGPPSGPGAYPSSGQPSAPGAYPATGPYGAPAGPLIVPYNLPLPGGVVPRMLITILGTVKPNANRIALDFQRGNDVAFHFNPRFNENNRRVIVCNTKLDNNWGRERKTVGFPI

SEQ ID NO: 814245 - protein, 105 aa, Homo sapiens [sequence omitted]

SEQ ID NO: 814246 - protein, 105 aa, Homo sapiens [sequence omitted]

SEQ ID NO: 814247 - protein, 156 aa, Homo sapiens
GRPQHLLASSRPEPANERKMADNFSLHDALSGSGNPNPQGWPGAWGNQPAGAYPSSGQPSAPGAYPATGPYGAPAGPLIVPYNLPLPGGVVPRMLITILGTVKPNANRIALDFQRGNDVAFHFNPRFNENNRRVIVCNTKLDNNWGRERKTVGFPI

SEQ ID NO: 814248 - protein, 158 aa, Homo sapiens
DGSASLYACMLSLEFPPPRAYPGQAPPGAYPGQAPPGAYHGAPGAYPGAPAPGAYPSSGQPSAPGAYPATGPYGAPAGPLIVPYNLPLPGGVVPRMLITILGTVKPNANRIALDFQRGNDVAFHFNPRFNENNRRVIVCNTKLDNNWGRERKTVGFPI

SEQ ID NO: 814249 - protein, 111 aa, Homo sapiens
MAWRMGEPACWGRGLPRGFLSCTGPYGAPAGPLIVPYNLPLPGGVVPRMLITILGTVKPNANRIALDFQRGNDVAFHFNPRFNENNRRVIVCNTKLDNNWGRERKTVGFPI

SEQ ID NO: 814250 - protein, 148 aa, Homo sapiens
  misc_feature (11)..(11): Xaa can be any naturally occurring amino acid
ATRYRSRYEAXWWQHLLASSRPEPANERKMADNFSLHDALSGSGNPNPQGWPGAWGNQPAGAGGYPGASYPGAYPGQAPPGAYPGQAPPGAYHGAPGAYPGAPAPGVYPGPPSGPGAYPSSGQPSAPGAYPALCLITCLCLGEWCLAC

SEQ ID NO: 814251 - protein, 197 aa, Homo sapiens
  misc_feature (11)..(11): Xaa can be any naturally occurring amino acid
LHGIGLGTRLXGGSTSSPAAVRSQPTSGKWQTIFRSMMRYLGLETQTLKDGLAHGGTSLLGQGATQGLPILGPTPGRHPQGLILDRHLQAPTMEHLELIPEHLHLESTQGHPAALGPTHLLDSQVPPEPTLLPRMLITILGTVKPNANRIALDFQRGNDVAFHFNPRFNENNRRVIVCNTKLDNNWGRERKTVGFPI

SEQ ID NO: 814252 - protein, 101 aa, Homo sapiens
TLRFIVVHCVVLHLIVVHCVVVHCVVVHCVVLHCVVPRMLITILGTVKPNANRIALDFQRGNDVAFHFNPRFNENNRRVIVCNTKLDNNWGRERKTVGFPI

SEQ ID NO: 814253 - protein, 161 aa, Homo sapiens
TKYSAALGIPSDSCCRKMADNFSLHDALSGSGNPNPQGWPGAWGNQPAGAGGYPGASYPGAYPGQAPPGAYPGQAPPGAYHGAPGAYPGAPAPGVYPGPPSGPGAYPSSGQPSAPGAYPATGPYGAPAGPLIVPYNLPLPGGVVPRMLITILGTVKPNANR

SEQ ID NO: 814254 - protein, 106 aa, Homo sapiens [sequence omitted]

SEQ ID NO: 814255 - protein, 396 aa, Homo sapiens
MSWSFLTRLLEEIHNHSTFVGKIWLTVLIVFRIVLTAVGGESIYYDEQSKFVCNTEQPGCENVCYDAFAPLSHVRFWVFQIILVATPSVMYLGYAIHKIAKMEHGEADKKAARSKPYAMRWKQHRALEETEEDNEEDPMMYPEMELESDKENKEQSQPKPKHDGRRRIREDGLMKIYVLQLLARTVFEVGFLIGQYFLYGFQVHPFYVCSRLPCPHKIDCFISRPTEKTIFLLIMYGVTGLCLLLNIWEMLHLGFGTIRDSLNSKRRELEDPGAYNYPFTWNTPSAPPGYNIAVKPDQIQYTELSNAKIAYKQNKANTAQEQQYGSHEENLPADLEALQREIRMAQERLDLAVQAYSHQNNPHGPREKKAKVGSKAGSNKSTASSKSGDGKTSVWI

SEQ ID NO: 814256 - protein, 396 aa, Homo sapiens; identical to SEQ ID NO: 814255

SEQ ID NO: 814257 - protein, 396 aa, Homo sapiens; identical to SEQ ID NO: 814255

SEQ ID NO: 814258 - protein, 138 aa, Homo sapiens
MSWSFLTRLLEEIHNHSTFVGKIWLTVLIVFRIVLTAVGGESIYYDEQSKFVCNTEQPGCENVCYDAFAPLSHVRFWVFQIILVATPSVMYLGYAIHKIAKMEHGEADKKAARSKPYAMRWKQHRALEATQEAEMRIT

SEQ ID NO: 814259 - protein, 138 aa, Homo sapiens; identical to SEQ ID NO: 814258

SEQ ID NO: 814260 - protein, 734 aa, Homo sapiens
MSGFDDPGIFYSDSFGGDAQADEGQARKSQLQRRFKEFLRQYRVGTDRTGFTFKYRDELKRHYNLGEYWIEVEMEDLASFDEDLADYLYKQPAEHLQLLEEAAKEVADEVTRPRPSGEEVLQDIQVMLKSDASPSSIRSLKSDMMSHLVKIPGIIIAASAVRAKATRISIQCRSCRNTLTNIAMRPGLEGYALPRKCNTDQAGRPKCPLDPYFIMPDKCKCVDFQTLKLQELPDAVPHGEMPRHMQLYCDRYLCDKVVPGNRVTIMGIYSIKKFGLTTSRGRDRVGVGIRSSYIRVLGIQVDTDGSGRSFAGAVSPQEEEEFRRLAALPNVYEVISKSIAPSIFGGTDMKKAIACLLFGGSRKRLPDGLTRRGDINLLMLGDPGTAKSQLLKFVEKCSPIGVYTSGKGSSAAGLTASVMRDPSSRNFIMEGGAMVLADGGVVCIDEFDKMREDDRVAIHEAMEQQTISIAKAGITTTLNSRCSVLAAANSVFGRWDETKGEDNIDFMPTILSRFDMIFIVKDEHNEERDVMLAKHVITLHVSALTQTQAVEGEIDLAKLKKFIAYCRVKCGPRLSAEAAEKLKNRYIIMRSGARQHERDSDRRSSIPITVRQLEAIVRIAEALSKMKLQPFATEADVEEALRLFQVSTLDAALSGTLSGVEGFTSQEDQEMLSRIEKQLKRRFAIGSQVSEHSIIKDFTKQKYPEHAIHKVLQLMLRRGEIQHRMQRKVLYRLK

SEQ ID NO: 814261 - protein, 734 aa, Homo sapiens; identical to SEQ ID NO: 814260

SEQ ID NO: 814262 - protein, 734 aa, Homo sapiens; identical to SEQ ID NO: 814260

SEQ ID NO: 814263 - protein, 734 aa, Homo sapiens; identical to SEQ ID NO: 814260

SEQ ID NO: 814264 - protein, 756 aa, Homo sapiens
GEEVPGAAPSLFWPFVPTPGAVMSGFDDPGIFYSDSFGGDAQADEGQARKSQLQRRFKEFLRQYRVGTDRTGFTFKYRDELKRHYNLGEYWIEVEMEDLASFDEDLADYLYKQPAEHLQLLEEAAKEVADEVTRPRPSGEEVLQDIQVMLKSDASPSSIRSLKSDMMSHLVKIPGIIIAASAVRAKATRISIQCRSCRNTLTNIAMRPGLEGYALPRKCNTDQAGRPKCPLDPYFIMPDKCKCVDFQTLKLQELPDAVPHGEMPRHMQLYCDRYLCDKVVPGNRVTIMGIYSIKKFGLTTSRGRDRVGVGIRSSYIRVLGIQVDTDGSGRSFAGAVSPQEEEEFRRLAALPNVYEVISKSIAPSIFGGTDMKKAIACLLFGGSRKRLPDGLTRRGDINLLMLGDPGTAKSQLLKFVEKCSPIGVYTSGKGSSAAGLTASVMRDPSSRNFIMEGGAMVLADGGVVCIDEFDKMREDDRVAIHEAMEQQTISIAKAGITTTLNSRCSVLAAANSVFGRWDETKGEDNIDFMPTILSRFDMIFIVKDEHNEERDVMLAKHVITLHVSALTQTQAVEGEIDLAKLKKFIAYCRVKCGPRLSAEAAEKLKNRYIIMRSGARQHERDSDRRSSIPITVRQLEAIVRIAEALSKMKLQPFATEADVEEALRLFQVSTLDAALSGTLSGVEGFTSQEDQEMLSRIEKQLKRRFAIGSQVSEHSIIKDFTKQKYPEHAIHKVLQLMLRRGEIQHRMQRKVLYRLK

SEQ ID NO: 814265 - protein, 766 aa, Homo sapiens
MSGFDDPGIFYSDSFGGDAQADEGQARKSQLQRRFKEFLRQYRVGTDRTGFTFKYSLAPSLIEHLLPARYCSGCWAAALKLDLAPASRDELKRHYNLGEYWIEVEMEDLASFDEDLADYLYKQPAEHLQLLEEAAKEVADEVTRPRPSGEEVLQDIQVMLKSDASPSSIRSLKSDMMSHLVKIPGIIIAASAVRAKATRISIQCRSCRNTLTNIAMRPGLEGYALPRKCNTDQAGRPKCPLDPYFIMPDKCKCVDFQTLKLQELPDAVPHGEMPRHMQLYCDRYLCDKVVPGNRVTIMGIYSIKKFGLTTSRGRDRVGVGIRSSYIRVLGIQVDTDGSGRSFAGAVSPQEEEEFRRLAALPNVYEVISKSIAPSIFGGTDMKKAIACLLFGGSRKRLPDGLTRRGDINLLMLGDPGTAKSQLLKFVEKCSPIGVYTSGKGSSAAGLTASVMRDPSSRNFIMEGGAMVLADGGVVCIDEFDKMREDDRVAIHEAMEQQTISIAKAGITTTLNSRCSVLAAANSVFGRWDETKGEDNIDFMPTILSRFDMIFIVKDEHNEERDVMLAKHVITLHVSALTQTQAVEGEIDLAKLKKFIAYCRVKCGPRLSAEAAEKLKNRYIIMRSGARQHERDSDRRSSIPITVRQLEAIVRIAEALSKMKLQPFATEADVEEALRLFQVSTLDAALSGTLSGVEGFTSQEDQEMLSRIEKQLKRRFAIGSQVSEHSIIKDFTKQKYPEHAIHKVLQLMLRRGEIQHRMQRKVLYRLK

SEQ ID NO: 814266 - protein, 678 aa, Homo sapiens
MSGFDDPGIFYSDSFGGDAQADEGQARKSQYLYKQPAEHLQLLEEAAKEVADEVTRPRPSGEEVLQDIQVMLKSDASPSSIRSLKSDMMSHLVKIPGIIIAASAVRAKATRISIQCRSCRNTLTNIAMRPGLEGYALPRKCNTDQAGRPKCPLDPYFIMPDKCKCVDFQTLKLQELPDAVPHGEMPRHMQLYCDRYLCDKVVPGNRVTIMGIYSIKKFGLTTSRGRDRVGVGIRSSYIRVLGIQVDTDGSGRSFAGAVSPQEEEEFRRLAALPNVYEVISKSIAPSIFGGTDMKKAIACLLFGGSRKRLPDGLTRRGDINLLMLGDPGTAKSQLLKFVEKCSPIGVYTSGKGSSAAGLTASVMRDPSSRNFIMEGGAMVLADGGVVCIDEFDKMREDDRVAIHEAMEQQTISIAKAGITTTLNSRCSVLAAANSVFGRWDETKGEDNIDFMPTILSRFDMIFIVKDEHNEERDVMLAKHVITLHVSALTQTQAVEGEIDLAKLKKFIAYCRVKCGPRLSAEAAEKLKNRYIIMRSGARQHERDSDRRSSIPITVRQLEAIVRIAEALSKMKLQPFATEADVEEALRLFQVSTLDAALSGTLSGVEGFTSQEDQEMLSRIEKQLKRRFAIGSQVSEHSIIKDFTKQKYPEHAIHKVLQLMLRRGEIQHRMQRKVLYRLK

SEQ ID NO: 814267 - protein, 715 aa, Homo sapiens
MSGFDDPGIFYSDSFGGDAQADEGQARKSQLQRRFKEFLRQYRVGTDRTGFTFKYRDELKRHYNLGEYWIEVEMEDLASFDEDLADYLYKQPAEHLQLLEEAAKEVADEVTRPRPSGEEVLQDIQVMLKSDASPSSIRSLKSDMMSHLVKIPGIIIAASAVRAKATRISIQCRSCRNTLTNIAMRPGLEGYALPRKCNTDQAGRPKCPLDPYFIMPDKCKCVDFQTLKLQELPDAVPHGEMPRHMQLYCDRYLCDKVVPGNRVTIMGIYSIKKFGLTTSRGRDRVGVGIRSSYIRVLGIQVDTDGSGRSFAGAVSPQEEEEFRRLAALPNVYEVISKSIAPSIFGGTDMKKAIACLLFGGSRKRLPDGLTRRGDINLLMLGDPGTAKSQLLKFVEKCSPIGVYTSGKGSSAAGLTASVMRDPSSRNFIMEGGAMVLADGGVVCIDEFDKMREDDRVAIHEAMEQQTISIAKAGITTTLNSRCSVLAAANSVFGRWDETKGEDNIDFMPTILSRFDMIFIVKDEHNEERDVMLAKHVITLHVSALTQTQAVEGEIDLAKLKKFIAYCRVKCGPRLSAEAAEKLKNRYIIMRSGARQHERDSDRRSSIPITVRQLEAIVRIAEALSKMKLQPFATEADVEEALRLFQVSTLDAALSGTLSGVEGFTSQEDQEMLSRIEKQLKRRFAIGSQVSEHSIIKDFTKQGALLPETPCLLLVV

SEQ ID NO: 814268 - protein, 638 aa, Homo sapiens
MSGFDDPGIFYSDSFGGDAQADEGQARKSQLQRRFKEFLRQYRVGTDRTGFTFKYRDELKRHYNLGEYWIEVEMEDLASFDEDLADYLYKQPAEHLQLLEEAAKEVADEVTRPRPSGEEVLQDIQVMLKSDASPSSIRSLKSDMMSHLVKIPGIIIAASAVRAKATRISIQCRSCRNTLTNIAMRPGLEGYALPRKCNTDQAGRPKCPLDPYFIMPDKCKCVDFQTLKLQELPDAVPHGEMPRHMQLYCDRYLCDKVVPGNRVTIMGIYSIKKFGLTTSRGRDRVGVGIRSSYIRVLGIQVDTDGSGRSFAGAVSPQEEEEFRRLAALPNVYEVISKSIAPSIFGGTDMKKAIACLLFGGSRKRLPDGLTRRGDINLLMLGDPGTAKSQLLKFVEKCSPIGVYTSGKGSSAAGLTASVMRDPSSRNFIMEGGAMVLADGGVVCIDEFDKMREDDRVAIHEAMEQQTISIAKAGITTTLNSRCSVLAAANSVFGRWDETKGEDNIDFMPTILSRFDMIFIVKDEHNEERDVMLAKHVITLHVSALTQTQAVEGEIDLAKLKKFIAYCRVKCGPRLSAEAAEKLKNRYIIMRSGARQHERDSDRRSSIPITVRQLEAIVRIAEAPRTSQAPSFLPQRKEL

SEQ ID NO: 814269 - protein, 692 aa, Homo sapiens
MSGFDDPGIFYSDSFGGDAQADEGQARKSQLQRRFKEFLRQYRVGTDRTGFTFKYRDELKRHYNLGEYWIEVEMEDLASFDEDLADYLYKQPAEHLQLLEEAAKEVADEVTRPRPSGEEVLQDIQVMLKSDASPSSIRSLKSDMMSHLVKIPGIIIAASAVRAKATRISIQCRSCRNTLTNIAMRPGLEGYALPRKCNTDQAGRPKCPLDPYFIMPDKCKCVDFQTLKLQELPDAVPHGEMPRHMQLYCDRYLCDKVVPGNRVTIMGIYSIKKFGLTTSRGRDRVGVGIRSSYIRVLGIQVDTDGSGRSFAGAVSPQEEEEFRRLAALPNVYEVISKSIAPSIFGGTDMKKAIACLLFGGSRKRLPDGLTRRGDINLLMLGDPGTAKSQLLKFVEKCSPIGVYTSGKGSSAAGLTASVMRDPSSRNFIMEGGAMVLADGGVVCIDEFDKMREDDRVAIHEAMEQQTISIAKAGITTTLNSRCSVLAAANSVFGRWDETKGEDNIDFMPTILSRFDMIFIVKDEHNEERDVMLAKHVITLHVSALTQTQAVEGEIDLAKLKKFIAYCRVKCGPRLSAEAAEKLKNRYIIMRSGARQHERDSDRRSSIPITVRQLEAIVRIAEALSKMKLQPFATEADVEEALRLFQVSTLDAALSGTLSGVEGFTSQEDQEMLCSDTWEPMAKRRLSCFSMRL

SEQ ID NO: 814270 - protein, 518 aa, Homo sapiens
MLQWTLRVLGMGGIRDLLSKSESQLFSFLLYPPLRYLCDKVVPGNRVTIMGIYSIKKFGLTTSRGRDRVGVGIRSSYIRVLGIQVDTDGSGRSFAGAVSPQEEEEFRRLAALPNVYEVISKSIAPSIFGGTDMKKAIACLLFGGSRKRLPDGLTRRGDINLLMLGDPGTAKSQLLKFVEKCSPIGVYTSGKGSSAAGLTASVMRDPSSRNFIMEGGAMVLADGGVVCIDEFDKMREDDRVAIHEAMEQQTISIAKAGITTTLNSRCSVLAAANSVFGRWDETKGEDNIDFMPTILSRFDMIFIVKDEHNEERDVMLAKHVITLHVSALTQTQAVEGEIDLAKLKKFIAYCRVKCGPRLSAEAAEKLKNRYIIMRSGARQHERDSDRRSSIPITVRQLEAIVRIAEALSKMKLQPFATEADVEEALRLFQVSTLDAALSGTLSGVEGFTSQEDQEMLSRIEKQLKRRFAIGSQVSEHSIIKDFTKQKYPEHAIHKVLQLMLRRGEIQHRMQRKVLYRLK

SEQ ID NO: 814271 - protein, 466 aa, Homo sapiens
MSGFDDPGIFYSDSFGGDAQADEGQARKSQLQRRFKEFLRQYRVGTDRTGFTFKYRDELKRHYNLGEYWIEVEMEDLASFDEDLADYLYKQPAEHLQLLEEAAKEVADEVTRPRPSGEEVLQDIQVMLKSDASPSSIRSLKSDMMSHLVKIPGIIIAASAVRAKATRISIQCRSCRNTLTNIAMRPGLEGYALPRKCNTDQAGRPKCPLDPYFIMPDKCKCVDFQTLKLQELPDAVPHGEMPRHMQLYCDRYLCDKVVPGNRVTIMGIYSIKKFGLTTSRGRDRVGVGIRSSYIRVLGIQVDTDGSGRSFAGAVSPQEEEEFRRLAALPNVYEVISKSIAPSIFGGTDMKKAIACLLFGGSRKSPDGLNPRGDINLLMLGDLGTASPASELWRGSPLGFRLGKARRVTALCDGTSARFSWGGPAASGACLLANARVLVPGPFPGTPPSGPPRTGLPPFTGFPLAVR

SEQ ID NO: 814272 - protein, 251 aa, Homo sapiens
MSGFDDPGIFYSDSFGGDAQADEGQARKSQLQRRFKEFLRQYRVGTDRTGFTFKYRDELKRHYNLGEYWIEVEMEDLASFDEDLADYLYKQPAEHLQLLEEAAKEVADEVTRPRPSGEEVLQDIQVMLKSDASPSSIRSLKSDMMSHLVKIPGIIIAASAVRAKATRISIQCRSCRNTLTNIAMRPGLEGYALPRKCNTIRLGPKCHWADSSGRTCIAVASDLTEECWCAPGGIRTCAFDAVEGRGGTGPP

SEQ ID NO: 814273 - protein, 120 aa, Homo sapiens
SPLAGVSWSGKGQSHESELSGSLRRVLLAPAMCSHRNTRSTPSTRCCSSCCGAARSSIACSARFSTASSESRRLTGLMDSPTPRPSCRCLPLTMLLGPLPPHCSPRTSQAPSFLPQRKEL

SEQ ID NO: 814274 - protein, 203 aa, Homo sapiens
MSGFDDPGIFYSDSFGGDAQADEGQARKSQLQRRFKEFLRQYRVGTDRTGFTFKYRDELKRHYNLGEYWIEVEMEDLASFDEDLADYLYKQPAEHLQLLEEAAKEVADEVTRPRPSGEEVLQDIQVMLKSDASPSSIRSLKSDMMSHLVKIPGIIIAASAVRAKATRPGPHIRTGPLSALAMVRRPTQKTKMWPRDAIVHIRT

SEQ ID NO: 814275 - protein, 107 aa, Homo sapiens
TTTTTNFAAASTLSVLYHESWLWAPVMCWDRYPNQTLKPSLYWWYLLELGFYLSLLIRLPFDVKRKDFKEQVIHHFVAVILMTFSYSANLLRIGSLVLLRFRRRGRE

SEQ ID NO: 814276 - protein, 394 aa, Homo sapiens [sequence omitted]

SEQ ID NO: 814277 - protein, 394 aa, Homo sapiens [sequence omitted]

SEQ ID NO: 814278 - protein, 394 aa, Homo sapiens [sequence omitted]

SEQ ID NO: 814279 - protein, 394 aa, Homo sapiens [sequence omitted]

SEQ ID NO: 814280 - protein, 394 aa, Homo sapiens [sequence omitted]

SEQ ID NO: 814281 - protein, 442 aa, Homo sapiens
MDVLAAASRICSVTQAGVQWCDHSSLQPQTPGLNQSSHLSLLSSRDYRMLSSFNEWFWQDRFWLPPNVTWTELEDRDGRVYPHPQDLLAALPLALVLLAMRLAFERFIGLPLSRWLGVRDQTRRQVKPNATLEKHFLTEGHRPKEPQLSLLAAQCGLTLQQTQRWFRRRRNQDRPQLTKKFCEASWRFLFYLSSFVGGLSVLYHESWLWAPVMCWDRYPNQTLKPSLYWWYLLELGFYLSLLIRLPFDVKRKDFKEQVIHHFVAVILMTFSYSANLLRIGSLVLLLHDSSDYLLEACKMVNYMQYQQVCDALFLIFSFVFFYTRLVLFPTQILYTTYYESISNRGPFFGYYFFNGLLMLLQLLHVFWSCLILRMLYSFMKKGQMEKDIRSDVEESDSSEEAAAAQEPLQLKNGTAGGPRPAPTDGPRSRVAGRLTNRHTTAT

SEQ ID NO: 814282 - protein, 463 aa, Homo sapiens
LPPLKPFFPCWGPRPGQEQSPAAWGGRRVSAAAPGSPLGAPSPAPPPALGAPGRLHPQTSQLTGTCVHRMLSSFNEWFWQDRFWLPPNVTWTELEDRDGRVYPHPQDLLAALPLALVLLAMRLAFERFIGLPLSRWLGVRDQTRRQVKPNATLEKHFLTEGHRPKEPQLSLLAAQCGLTLQQTQRWFRRRRNQDRPQLTKKFCEASWRFLFYLSSFVGGLSVLYHESWLWAPVMCWDRYPNQTLKPSLYWWYLLELGFYLSLLIRLPFDVKRKDFKEQVIHHFVAVILMTFSYSANLLRIGSLVLLLHDSSDYLLEACKMVNYMQYQQVCDALFLIFSFVFFYTRLVLFPTQILYTTYYESISNRGPFFGYYFFNGLLMLLQLLHVFWSCLILRMLYSFMKKGQMEKDIRSDVEESDSSEEAAAAQEPLQLKNGTAGGPRPAPTDGPRSRVAGRLTNRHTTAT

SEQ ID NO: 814283 - protein, 343 aa, Homo sapiens [sequence omitted]

SEQ ID NO: 814284 - protein, 230 aa, Homo sapiens [sequence omitted]

SEQ ID NO: 814285 - protein, 407 aa, Homo sapiens
MRLEGAARHLEEECSGQKAQQVQKALRLEQAWICSVTQAGVQWCDHSSLQPQTPGLNQSSHLSLLSSRDYRFIGLPLSRWLGVRDQTRRQVKPNATLEKHFLTEGHRPKEPQLSLLAAQCGLTLQQTQRWFRRRRNQDRPQLTKKFCEASWRFLFYLSSFVGGLSVLYHESWLWAPVMCWDRYPNQTLKPSLYWWYLLELGFYLSLLIRLPFDVKRKDFKEQVIHHFVAVILMTFSYSANLLRIGSLVLLLHDSSDYLLEACKMVNYMQYQQVCDALFLIFSFVFFYTRLVLFPTQILYTTYYESISNRGPFFGYYFFNGLLMLLQLLHVFWSCLILRMLYSFMKKGQMEKDIRSDVEESDSSEEAAAAQEPLQLKNGTAGGPRPAPTDGPRSRVAGRLTNRHTTAT

SEQ ID NO: 814286 - protein, 380 aa, Homo sapiens
AVLSEPVTLPLRDLVIPPAACLPPHTGSPISSPGLIGSVSFAPRFIGLPLSRWLGVRDQTRRQVKPNATLEKHFLTEGHRPKEPQLSLLAAQCGLTLQQTQRWFRRRRNQDRPQLTKKFCEASWRFLFYLSSFVGGLSVLYHESWLWAPVMCWDRYPNQTLKPSLYWWYLLELGFYLSLLIRLPFDVKRKDFKEQVIHHFVAVILMTFSYSANLLRIGSLVLLLHDSSDYLLEACKMVNYMQYQQVCDALFLIFSFVFFYTRLVLFPTQILYTTYYESISNRGPFFGYYFFNGLLMLLQLLHVFWSCLILRMLYSFMKKGQMEKDIRSDVEESDSSEEAAAAQEPLQLKNGTAGGPRPAPTDGPRSRVAGRLTNRHTTAT

SEQ ID NO: 814287 - protein, 285 aa, Homo sapiens
MLSSFNEWFWQDRFWLPPNVTWTELEDRDGRVYPHPQDLLAALPLALVLLAMRLAFERFIGLPLSRWLGVRDQTRRQVKPNATLEKHFLTEGHRPKEPQLSLLAAQCGLTLQQTQRWFRRRRNQDRPQLTKKFCEASWRFLFYLSSFVGGLSVLYHESWLWAPVMCWDRYPNQTLKPSLYWWYLLELGFYLSLLIRLPFDVKRKDFKEQVIHHFVAVILMTFSYSANLLRIGSLVLLLHDSSDYLLEACKMVNYMQYQQVCDALFLIFSFVFFYTRLVLFPTHRT

SEQ ID NO: 814288 - protein, 144 aa, Homo sapiens [sequence omitted]

SEQ ID NO: 814289 - protein, 223 aa, Homo sapiens
RRGCGGSWAPGQCPRQQARRSSREGAVLGNILSNWLGLHSENEAPPLPASVGDKAPPLSGYLGDEAPPLFYSLGDEAPPLLNSGRWSPAPCVFLGDEAPPPAFLTGSPSPMRILYTTYYESISNRGPFFGYYFFNGLLMLLQLLHVFWSCLILRMLYSFMKKGQMEKDIRSDVEESDSSEEAAAAQEPLQLKNGTAGGPRPAPTDGPRSRVAGRLTNRHTTAT

SEQ ID NO: 814290 - protein, 151 aa, Homo sapiens
AEALLTSHPGSHLPQPPACPTRRLWLSSFSTPFAWLFPTQILYTTYYESISNRGPFFGYYFFNGLLMLLQLLHVFWSCLILRMLYSFMKKGQMEKDIRSDVEESDSSEEAAAAQEPLQLKNGTAGGPRPAPTDGPRSRVAGRLTNRHTTAT

SEQ ID NO: 814291 - protein, 183 aa, Homo sapiens
MLSSFNEWFWQDRFWLPPNVTWTELEDRDGRVYPHPQDLLAALPLALVLLAMRLAFERFIGLPLSRWLGVRDQTRRQVKPNATLEKHFLTEGHRPKEPQLSLLAAQCGLTLQQTQRWFRRRRNQDRPQLTKKFCEASLTFSFYMSSFVGRPLGSGTTSHGCGHQLMCWAHGYQTKLWMPSFTR

SEQ ID NO: 814292 - protein, 104 aa, Homo sapiens
MSVPEEEERLLPLTQRWPRASKFLLSGCAATVAELGTRLPTPGPPGPVARAALGEGARAASRPAVRIGEVAPSMPAWQRWRWRPGPRWEEEGLRSPRPFPSNLF

SEQ ID NO: 814293 - protein, 323 aa, Homo sapiens
MSVPEEEERLLPLTQRWPRASKFLLSGCAATVAELATFPLDLTKTRLQMQGEAALARLGDGARESAPYRGMVRTALGIIEEEGFLKLWQGVTPAIYRHVVYSGGRMVTYEHLREVVFGKSEDEHYPLWKSVIGGMMAGVIGQFLANPTDLVKVQMQMEGKRKLEGKPLRFRGVHHAFAKILAEGGIRGLWAGWVPNIQRAALVNMGDLTTYDTVKHYLVLNTPLEDNIMTHGLSSLCSGLVASILGTPADVIKSRIMNQPRDKQGRGLLYKSSTDCLIQAVQGEGFMSLYKGFLPSWLRMTPWSMVFWLTYEKIREMSGVSPF

SEQ ID NO: 814294 - protein, 323 aa, Homo sapiens; identical to SEQ ID NO: 814293

SEQ ID NO: 814295 - protein, 826 aa, Homo sapiens
RVEATLSERKIGDSCDKDLPLKFCEFPQKTIMPGFKTTVYVSHINDLSDFYVQLIEDEAEISHLSERLNSVKTRPEYYVGPPLQRGDMICAVFPEDNLWYRAVIKEQQPNDLLSVQFIDYGNVSVVHTNKIGRLDLVNAILPGLCIHCSLQGFEVPDNKNSKKMMHYFSQRTSEAAIRCEFVKFQDRWEVILADEHGIIADDMISRYALSEKSQVELSTQVIKSASSKSVNKSDIDTSVFLNWYNPEKKMIRAYATVIDGPEYFWCQFADTEKLQCLEVEVQTAGEQVADRRNCIPCPYIGDPCIVRYREDGHYYRALITNICEDYLVSVRLVDFGNIEDCVDPKALWAIPSELLSVPMQAFPCCLSGFNISEGLCSQEGNDYFYEIITEDVLEITILEIRRDVCDIPLAIVDLKSKGKSINEKMEKYSKTGIKSALPYENIDSEIKQTLGSYNLDVGLKKLSNKAVQNKIYMEQQTDELAEITEKDVNIIGTKPSNFRDPKTDNICEGFENPCKDKIDTEELEGELECHLVDKAEFDDKYLITGFNTLLPHANETKEILELNSLEVPLSPDDESKEFLELESIELQNSLVVDEEKGELSPVPPNVPLSQECVTKGAMELFTLQLPLSCEAEKQPELELPTAQLPLDDKMDPLSLGVSQKAQESMCTEDMRKSSCVESFDDQRRMSLHLHGADCDPKTQNEMNICEEEFVEYKNRDAISALMPLFSEEESSDGSKHNNGLPDHISAQLQNTYTLKAFTVGSKCVVWSSLRNTWSKCEILETAEEGTRVLNLSNGMEEIVNPENVWNGIPKLDKSPPEKRGLEVMEI

SEQ ID NO: 814296 - protein, 826 aa, Homo sapiens; identical to SEQ ID NO: 814295

SEQ ID NO: 814297 - protein, 323 aa, Homo sapiens; identical to SEQ ID NO: 814293

SEQ ID NO: 814298 - protein, 304 aa, Homo sapiens
MSVPEEEERLLPLTQRWPRASKFLLSGCAATVAELATFPLDLTKTRLQMQGEAALARLGDGARESAPYRGMVRTALGIIEEEGFLKLWQGVTPAIYRHVVYSGGRMVTYEHLREVVFGKSEDEHYPLWKSVIGGMMAGVIGQFLANPTDLVKVQMQMEGKRKLEGKPLRFRGVHHAFAKILAEGGIRGLWAGWVPNIQRAALVNMGDLTTYDTVKHYLVLNTPLEDNIMTHGLSSLCSGLVASILGTPADVIKSRIMNQPRDKQGRGLLYKSSTDCLIQAVQGEGFMSLYKGFLPSWLRMNRLL

SEQ ID NO: 814299 - protein, 300 aa, Homo sapiens
MSVPEEEERLLPLTQRWPRASKFLLSGCAATVAELATFPLDLTKTRLQMQGEAALARLGDGARESAPYRGMVRTALGIIEEEGFLKLWQGVTPAIYRHVVYSGGRMVTYEHLREVVFGKSEDEHYPLWKSVIGGMMAGVIGQFLANPTDLVKVQMQMEGKRKLEGKPLRFRGVHHAFAKILAEGGIRGLWAGWVPNIQRAALVNMGDLTTYDTVKHYLVLNTPLEDNIMTHGLSSLCSGLVASILGTPADVIKSRIMNQPRDKQGRGLLYKSSTDCLIQAVQGEGFMSLYKGFLPSWLRM

SEQ ID NO: 814300 - protein, 310 aa, Homo sapiens
MSVPEEEERLLPLTQRWPRASKFLLSGCAATVAELATFPLDLTKTRLQMQGEAALARLGDGARESAPYRGMVRTALGIIEEEGFLKLWQGVTPAIYRHVVYSGGRMVTYEHLREVVFGKSEDEHYPLWKSVIGGMMAGVIGQFLANPTDLVKVQMQMEGKRKLEGKPLRFRGVHHAFAKILAEGGIRGLWAGWVPNIQRAALVNMGDLTTYDTVKHYLVLNTPLEDNIMTHGLSSLCSGLVASILGTPADVIKSRIMNQPRDKQGRGLLYKSSTDCLIQAVQGEGFMSLYKGFLPSWLRMEDTYSTETDL

SEQ ID NO: 814301 - protein, 300 aa, Homo sapiens; identical to SEQ ID NO: 814299

SEQ ID NO: 814302 - protein, 234 aa, Homo sapiens
MSECPLILYIHKHIDTYSQSYLFNDLFYPVYSGGRMVTYEHLREVVFGKSEDEHYPLWKSVIGGMMAGVIGQFLANPTDLVKVQMQMEGKRKLEGKPLRFRGVHHAFAKILAEGGIRGLWAGWVPNIQRAALVNMGDLTTYDTVKHYLVLNTPLEDNIMTHGLSSLCSGLVASILGTPADVIKSRIMNQPRDKQGRGLLYKSSTDCLIQAVQGEGFMSLYKGFLPSWLRMNRLL

SEQ ID NO: 814303 - protein, 234 aa, Homo sapiens; identical to SEQ ID NO: 814302

SEQ ID NO: 814304 - protein, 300 aa, Homo sapiens; identical to SEQ ID NO: 814299

SEQ ID NO: 814305 - protein, 103 aa, Homo sapiens
MSECPLILYIHKHIDTYSQSYLFNDLFYPVYSGGRMVTYEHLREVVFGKSEDEHYPLWKSVIGGMMAGVIGQFLANPTDLVKVQMQMEGKRKLEGKPLRFNHL

SEQ ID NO: 814306 - protein, 234 aa, Homo sapiens; identical to SEQ ID NO: 814302

SEQ ID NO: 814307 - protein, 1522 aa, Homo sapiens
MKAVRNLLIYIFSTYLLVMFGFNAAQDFWCSTLVKGVIYGSYSVSEMFPKNFTNCTWTLENPDPTKYSIYLKFSKKDLSCSNFSLLAYQFDHFSHEKIKDLLRKNHSIMQLCNSKNAFVFLQYDKNFIQIRRVFPTNFPGLQKKGEEDQKSFFEFLVLNKVSPSQFGCHVLCTWLESCLKSENGRTESCGIMYTKCTCPQHLGEWGIDDQSLILLNNVVLPLNEQTEGCLTQELQTTQVCNLTREAKRPPKEEFGMMGDHTIKSQRPRSVHEKRVPQEQADAAKFMAQTGESGVEEWSQWSTCSVTCGQGSQVRTRTCVSPYGTHCSGPLRESRVCNNTALCPVHGVWEEWSPWSLCSFTCGRGQRTRTRSCTPPQYGGRPCEGPETHHKPCNIALCPVDGQWQEWSSWSQCSVTCSNGTQQRSRQCTAAAHGGSECRGPWAESRECYNPECTANGQWNQWGHWSGCSKSCDGGWERRIRTCQGAVITGQQCEGTGEEVRRCSEQRCPAPYEICPEDYLMSMVWKRTPAGDLAFNQCPLNATGTTSRRCSLSLHGVAFWEQPSFARCISNEYRHLQHSIKEHLAKGQRMLAGDGMSQVTKTLLDLTQRKNFYAGDLLMSVEILRNVTDTFKRASYIPASDGVQNFFQIVSNLLDEENKEKWEDAQQIYPGSIELMQVIEDFIHIVGMGMMDFQNSYLMTGNVVASIQKLPAASVLTDINFPMKGRKGMVDWARNSEDRVVIPKSIFTPVSSKELDESSVFVLGAVLYKNLDLILPTLRNYTVINSKIIVVTIRPEPKTTDSFLEIELAHLANGTLNPYCVLWDDSKTNESLGTWSTQGCKTVLTDASHTKCLCDRLSTFAILAQQPREIIMESSGTPSVTLIVGSGLSCLALITLAVVYAALWRYIRSERSIILINFCLSIISSNILILVGQTQTHNKSICTTTTAFLHFFFLASFCWVLTEAWQSYMAVTGKIRTRLIRKRFLCLGWGLPALVVATSVGFTRTKGYGTDHYCWLSLEGGLLYAFVGPAAAVVLVNMVIGILVFNKLVSRDGILDKKLKHRAGQMSEPHSGLTLKCAKCGVVSTTALSATTASNAMASLWSSCVVLPLLALTWMSAVLAMTDKRSILFQILFAVFDSLQGFVIVMVHCILRREVQDAFRCRLRNCQDPINADSSSSFPNGHAQIMTDFEKDVDIACRSVLHKDIGPCRAATITGTLSRISLNDDEEEKGTNPEGLSYSTLPGNVISKVIIQQPTGLHMPMSMNELSNPCLKKENSELRRTVYLCTDDNLRGADMDIVHPQERMMESDYIVMPRSSVNNQPSMKEESKMNIGMETLPHERLLHYKVNPEFNMNPPVMDQFNMNLEQHLAPQEHMQNLPFEPRTAVKNFMASELDDNAGLSRSETGSTISMSSLERRKSRYSDLDFEKVMHTRKRHMELFQELNQKFQTLDRFRDIPNTSSMENPAPNKNPWDTFKNPSEYPHYTTINVLDTEAKDALELRPAEWEKCLNLPLDVQEGDFQTEV

SEQ ID NO: 814308 - protein, 984 aa, Homo sapiens
MKAVRNLLIYIFSTYLLVMFGFNAAQDFWCSTLVKGVIYGSYSVSEMFPKNFTNCTWTLENPDPTKYSIYLKFSKKDLSCSNFSLLAYQFDHFSHEKIKDLLRKNHSIMQLCNSKNAFVFLQYDKNFIQIRRVFPTNFPGLQKKGEEDQKSFFEFLVLNKVSPSQFGCHVLCTWLESCLKSENGRTESCGIMYTKCTCPQHLGEWGIDDQSLILLNNVVLPLNEQTEGCLTQELQTTQVCNLTREAKRPPKEEFGMMGDHTIKSQRPRSVHEKRVPQEQADAAKFMAQTGESGVEEWSQWSTCSVTCGQGSQVRTRTCVSPYGTHCSGPLRESRVCNNTALCPVHGVWEEWSPWSLCSFTCGRGQRTRTRSCTPPQYGGRPCEGPETHHKPCNIALCPVDGQWQEWSSWSQCSVTCSNGTQQRSRQCTAAAHGGSECRGPWAESRECYNPECTANGQWNQWGHWSGCSKSCDGGWERRIRTCQGAVITGQQCEGTGEEVRRCSEQRCPAPYEICPEDYLMSMVWKRTPAGDLAFNQCPLNATGTTSRRCSLSLHGVAFWEQPSFARCISNEYRHLQHSIKEHLAKGQRMLAGDGMSQVTKTLLDLTQRKNFYAGDLLMSVEILRNVTDTFKRASYIPASDGVQIYPGSIELMQVIEDFIHIVGMGMMDFQNSYLMTGNVVASIQKLPAASVLTDINFPMKGRKGMVDWARNSEDRVVIPKSIFTPVSSKELDESSVFVLGAVLYKNLDLILPTLRNYTVINSKIIVVTIRPEPKTTDSFLEIELAHLANGTLNPYCVLWDDSKTNESLGTWSTQGCKTVLTDASHTKCLCDRLSTFAILAQQPREIIMESSGTPSVTLIVGSGLSCLALITLAVVYAALWRYIRSERSIILINFCLSIISSNILILVGQTQTHNKSICTTTTAFLHFFFLASFCWVLTEAWQSYMAVTGKIRTRLIRKRFLCLGWGKHIDIPFHALLKMTLNTH

SEQ ID NO: 814309 - protein, 713 aa, Homo sapiens
QGRQRRAGLSEVWSRKLRNESLGTWSTQGCKTVLTDASHTKCLCDRLSTFAILAQQPREIIMESSGTPSVTLIVGSGLSCLALITLAVVYAALWRYIRSERSIILINFCLSIISSNILILVGQTQTHNKSICTTTTAFLHFFFLASFCWVLTEAWQSYMAVTGKIRTRLIRKRFLCLGWGLPALVVATSVGFTRTKGYGTDHYCWLSLEGGLLYAFVGPAAAVVLVNMVIGILVFNKLVSRDGILDKKLKHRAGQMSEPHSGLTLKCAKCGVVSTTALSATTASNAMASLWSSCVVLPLLALTWMSAVLAMTDKRSILFQILFAVFDSLQGFVIVMVHCILRREVQDAFRCRLRNCQDPINADSSSSFPNGHAQIMTDFEKDVDIACRSVLHKDIGPCRAATITGTLSRISLNDDEEEKGTNPEGLSYSTLPGNVISKVIIQQPTGLHMPMSMNELSNPCLKKENSELRRTVYLCTDDNLRGADMDIVHPQERMMESDYIVMPRSSVNNQPSMKEESKMNIGMETLPHERLLHYKVNPEFNMNPPVMDQFNMNLEQHLAPQEHMQNLPFEPRTAVKNFMASELDDNAGLSRSETGSTISMSSLERRKSRYSDLDFEKVMHTRKRHMELFQELNQKFQTLDRFRDIPNTSSMENPAPNKNPWDTFKNPSEYPHYTTINVLDTEAKDALELRPAEWEKCLNLPLDVQEGDFQTEV

SEQ ID NO: 814310 - protein, 652 aa, Homo sapiens [sequence omitted]

SEQ ID NO: 814311 - protein, 886 aa, Homo sapiens
MKAVRNLLIYIFSTYLLVMFGFNAAQDFWCSTLVKGVIYGSYSVSEMFPKNFTNCTWTLENPDPTKYSIYLKFSKKDLSCSNFSLLAYQFDHFSHEKIKDLLRKNHSIMQLCNSKNAFVFLQYDKNFIQIRRVFPTNFPGLQKKGEEDQKSFFEFLVLNKVSPSQFGCHVLCTWLESCLKSENGRTESCGIMYTKCTCPQHLGEWGIDDQSLILLNNVVLPLNEQTEGCLTQELQTTQVCNLTREAKRPPKEEFGMMGDHTIKSQRPRSVHEKRVPQEQADAAKFMAQTGESGVEEWSQWSTCSVTCGQGSQVRTRTCVSPYGTHCSGPLRESRVCNNTALCPVHGVWEEWSPWSLCSFTCGRGQRTRTRSCTPPQYGGRPCEGPETHHKPCNIALCPVDGQWQEWSSWSQCSVTCSNGTQQRSRQCTAAAHGGSECRGPWAESRECYNPECTANGQWNQWGHWSGCSKSCDGGWERRIRTCQGAVITGQQCEGTGEEVRRCSEQRCPAPYEICPEDYLMSMVWKRTPAGDLAFNQCPLNATGTTSRRCSLSLHGVAFWEQPSFARCISNEYRHLQHSIKEHLAKGQRMLAGDGMSQVTKTLLDLTQRKNFYAGDLLMSVEILRNVTDTFKRASYIPASDGVQNFFQIVSNLLDEENKEKWEDAQQIYPGSIELMQVIEDFIHIVGMGMMDFQNSYLMTGNVVASIQKLPAASVLTDINFPMKGRKGMVDWARNSEDRVVIPKSIFTPVSSKELDESSVFVLGAVLYKNLDLILPTLRNYTVINSKIIVVTIRPEPKTTDSFLEIELAHLANGTLNPYCVLWDDSKTNESLGTWSTQGCKTVLTDASHTKCLCDRLSTFAILAQQPREICLNLPLDVQEGDFQTEV

SEQ ID NO: 814312 - protein, 368 aa, Homo sapiens
QGRQRRAGLSEVWSRKLRNESLGTWSTQGCKTVLTDASHTKCLCDRLSTFAILAQQPREIIMESSGTPSVTLIVGSGLSCLALITLAVVYAALWRYIRSERSIILINFCLSIISSNILILVGQTQTHNKSICTTTTAFLHFFFLASFCWVLTEAWQSYMAVTGKIRTRLIRKRFLCLGWGLPALVVATSVGFTRTKGYGTDHYCWLSLEGGLLYAFVGPAAAVVLVNMVIGILVFNKLVSRDGILDKKLKHRAGQMSEPHSGLTLKCAKCGVVSTTALSATTASNAMASLWSSCVVLPLLALTWMSAVLAMTDKRSILFQILFAVFDSLQGFVIVMVHCILRREVRSILVIENSDGWNGISLLKRMIF

SEQ ID NO: 814313 - protein, 705 aa, Homo sapiens
MKAVRNLLIYIFSTYLLVMFGFNAAQDFWCSTLVKGVIYGSYSVSEMFPKNFTNCTWTLENPDPTKYSIYLKFSKKDLSCSNFSLLAYQFDHFSHEKIKDLLRKNHSIMQLCNSKNAFVFLQYDKNFIQIRRVFPTNFPGLQKKGEEDQKSFFEFLVLNKVSPSQFGCHVLCTWLESCLKSENGRTESCGIMYTKCTCPQHLGEWGIDDQSLILLNNVVLPLNEQTEGCLTQELQTTQVCNLTREAKRPPKEEFGMMGDHTIKSQRPRSVHEKRVPQEQADAAKFMAQTGESGVEEWSQWSTCSVTCGQGSQVRTRTCVSPYGTHCSGPLRESRVCNNTALCPVHGVWEEWSPWSLCSFTCGRGQRTRTRSCTPPQYGGRPCEGPETHHKPCNIALCPVDGQWQEWSSWSQCSVTCSNGTQQRSRQCTAAAHGGSECRGPWAESRECYNPECTANGQWNQWGHWSGCSKSCDGGWERRIRTCQGAVITGQQCEGTGEEVRRCSEQRCPAPYEICPEDYLMSMVWKRTPAGDLAFNQCPLNATGTTSRRCSLSLHGVAFWEQPSFARCISNEYRHLQHSIKEHLAKGQRMLAGDGMSQVTKTLLDLTQRKNFYAGDLLMSVEILRNVTDTFKRASYIPASDGVQNFFQIVSNLLDEENKEKWEDAQQIYPGSIELMQVIEDFIHIVGMGMMDFQNSYLMTGNVGKK

SEQ ID NO: 814314 - protein, 128 aa, Homo sapiens
GDFLSVTPLFLAPCASLAIAYKRTAGCDGRRPSQHQGGDGNVPGRRTESWTPRGKPRAPGDSRNDGAWISVPGCLPEEAEVGTKSCWLCFSQTSLEYDCHPTQENATQGQMQWRRLAWKSSMYWRWKS

SEQ ID NO: 814315 - protein, 183 aa, Homo sapiens
MAGGPPNTKAEMEMSLAEELNHGRQGENQEHLVIAEMMELGSRSRGASQKKQKLEQKAAGSASAKRVWNMTATRPKKMGSQLPKPRMLRESGHGDAHLQEYAGNFQGIRFHYDRNPGTDAVAQTSLEEFNVLEMEVMRRQLYAVNRRLRALEEQGATWRHRETLIIAVLVSASIANLWLWMNQ

SEQ ID NO: 814316 - protein, 148 aa, Homo sapiens
GDFLSVTPLFLAPCASLAIAYKRTAGCDGRRPSQHQGGDGNVPGRRTESWTPRGKPRAPGDSRNDGAWISVPGCLPEEAEVGTKSCWLCFSQTSLEYDCHPTQENGMPISRSTLAISKAYVSIMIATQGQMQWRRLAWKSSMYWRWKS

SEQ ID NO: 814317 - protein, 182 aa, Homo sapiens
AGPVRSRGWRAAGSAGPQEMTAGGQAEAEGAGGEPGAARLPSRVARLLSALFYGTCSFLIVLVNKALLTTYGFPSPIFLGIGQMAATIMILYVSKLNKIIHFPDFDKKIPVKLFPLPLLYVGNHISGLSSTSKLSLPMFTVLRKFTIPLTLLLETIILGKQYSLNIILSVFAIILGAFIAAG

SEQ ID NO: 814318 - protein, 84 aa, Homo sapiens
AGPVRSRGWRAAGSAGPQEMTAGGQAEAEGAGGEPGAARLPSRVARLLSALFYGTCSFLIVLVNKALLTTYGFKHTENGKAKEE

SEQ ID NO: 814319 - protein, 356 aa, Homo sapiens
AGPVRSRGWRAAGSAGPQEMTAGGQAEAEGAGGEPGAARLPSRVARLLSALFYGTCSFLIVLVNKALLTTYGFPSPIFLGIGQMAATIMILYVSKLNKIIHFPDFDKKIPVKLFPLPLLYVGNHISGLSSTSKLSLPMFTVLRKFTIPLTLLLETIILGKQYSLNIILSVFAIILGAFIAAGSDLAFNLEGYIFVFLNDIFTAANGVYTKQKMDPKELGKYGVLFYNACFMIIPTLIISVSTGDLQQATEFNQWKNVVFILQFLLSCFLGFLLMYSTVLCSYYNSALTTAVVGAIKNVSVAYIGILIGGDYIFSLLNFVGLNICMAGGLRYSFLTLSSQLKPKPVGEENICLDLKS

SEQ ID NO: 814320 - protein, 356 aa, Homo sapiens; identical to SEQ ID NO: 814319

SEQ ID NO: 814321 - protein, 314 aa, Homo sapiens
AGPVRSRGWRAAGSAGPQEMTAGGQAEAEGAGGEPGAARLPSRVARLLSALFYGTCSFLIVLVNKALLTTYGFPSPIFLGIGQMAATIMILYVSKLNKIIHFPDFDKKIPVKLFPLPLLYVGNHISGLSSTSKLSLPMFTVLRKFTIPLTLLLETIILGKQYSLNIILSVFAIILGAFIAAGSDLAFNLEGYIFVFLNDIFTAANGVYTKQKMDPKELGKYGVLFYNACFMIIPTLIISVSTGDLQQATEFNQWKNVVFILQFLLSCFLGFLLMYSTVLCSYYNSALTTAVVGAIKHGRGLEIFLFNTEQPVKT

SEQ ID NO: 814322 - protein, 104 aa, Homo sapiens [sequence omitted]

SEQ ID NO: 814323 - protein, 78 aa, Homo sapiens
SAGSPAASCSPAQERSGEAAVGAGRRPALRELGEERGGDGGGGSRRGGGGSPFLFSDPGASGTRSPELGRRGDCGGLG

SEQ ID NO: 814324 - protein, 78 aa, Homo sapiens; identical to SEQ ID NO: 814323

SEQ ID NO: 814325 - protein, 545 aa, Homo sapiens
MSRKQNQKDSSGFIFDLQSNTVLAQGGAFENMKEKINAVRAIVPNKSNNEIILVLQHFDNCVDKTVQAFMEGSASEVLKEWTVTGKKKNKKKKNKPKPAAEPSNGIPDSSKSVSIQEEQSAPSSEKGGMNGYHVNGAINDTESVDSLSEGLETLSIDARELEDPESAMLDTLDRTGSMLQNGVSDFETKSLTMHSIHNSQQPRNAAKSLSRPTTETQFSNMGMEDVPLATSKKLSSNIEKSVKDLQRCTVSLARYRVVVKEEMDASIKKMKQAFAELESCLMDREVALLAEMDKVKAEAMEILLSRQKKAELLKKMTHVAVQMSEQQLVELRADIKHFVSERKYDEDLGRVARFTCDVETLKKSIDSFGQVSHPKNSYSTRSRCSSVTSVSLSSPSDASAASSSTCASPPSLTSANKKNFAPGETPAAIANSSGQPYQPLREVLPGNRRGGQGYRPQGQKSNDPMNQGRHDSMGRYRNSSWYSSGSRYQSAPSQAPGNTIERGQTHSAGTNGTGVSMEPSPPTPSFKKGLPQRKPRTSQTEAVNS

SEQ ID NO: 814326 - protein, 545 aa, Homo sapiens; identical to SEQ ID NO: 814325

SEQ ID NO: 814327 - protein, 545 aa, Homo sapiens; identical to SEQ ID NO: 814325

SEQ ID NO: 814328 - protein, 545 aa, Homo sapiens; identical to SEQ ID NO: 814325

SEQ ID NO: 814329 - protein, 527 aa, Homo sapiens
MSRKQNQKDSSGFIFDLQSNTVLAQGGAFENMKEKINAVRAIVPNKSNNEIILVLQHFDNCVDKTVQAFMEGSASEVLKEWTVTGKKKNKKKKNKPKPAAEPSNGIPDSSKSVSIQEEQSAPSSEKGGMNGYHVNGAINDTESVDSLSEGLETLSIDARELEDPESAMLDTLDRTGSMLQNGVSDFETKSLTMHSIHNSQQPRNAAKSLSRPTTETQFSNMGMEDVPLATSKKLSSNIEKSVKDLQRCTVSLARYRVVVKEEMDASIKKMKQAFAELESCLMDREVALLAEMDKVKAEAMEILLSRQQQLVELRADIKHFVSERKYDEDLGRVARFTCDVETLKKSIDSFGQVSHPKNSYSTRSRCSSVTSVSLSSPSDASAASSSTCASPPSLTSANKKNFAPGETPAAIANSSGQPYQPLREVLPGNRRGGQGYRPQGQKSNDPMNQGRHDSMGRYRNSSWYSSGSRYQSAPSQAPGNTIERGQTHSAGTNGTGVSMEPSPPTPSFKKGLPQRKPRTSQTEAVNS

SEQ ID NO: 814330 - protein, 560 aa, Homo sapiens
MSRKQNQKDSSGFIFDLQSNTVLAQGGAFENMKEKINAVRAIVPNKSNNEIILVLQHFDNCVDKTVQAFMEGSASEVLKEWTVTGKKKNKKKKNKPKPAAEPSNGIPDSSKSVSIQEEQSAPSSEKGGMNGYHVNGAINDTESVDSLSEGLETLSIDARELEDPESAMLDTLDRTGSMLQNGVSDFETKSLTMHSIHNSQQPRNAAKSLSRPTTETQFSNMGMEDVPLATSKKLSSNIEKSVKDLQRCTVSLARYRVVVKEEMDASIKKMKQAFAELESWYSNAARVLGAKYLPSLMDREVALLAEMDKVKAEAMEILLSRQKKAELLKKMTHVAVQMSEQQLVELRADIKHFVSERKYDEDLGRVARFTCDVETLKKSIDSFGQVSHPKNSYSTRSRCSSVTSVSLSSPSDASAASSSTCASPPSLTSANKKNFAPGETPAAIANSSGQPYQPLREVLPGNRRGGQGYRPQGQKSNDPMNQGRHDSMGRYRNSSWYSSGSRYQSAPSQAPGNTIERGQTHSAGTNGTGVSMEPSPPTPSFKKGLPQRKPRTSQTEAVNS

SEQ ID NO: 814331 - protein, 455 aa, Homo sapiens
MSRKQNQKDSSGFIFDLQSNTVLAQGGAFENMKEKINAVRAIVPNKSNNEIILVLQHFDNCVDKTVQAFMEGSASEVLKEWTVTGKKKNKKKKNKPKPAAEPSNGIPDSSKSVSIQEEQSAPSSEKGGMNGYHVNGAINDTESVDSLSEGLETLSIDARELEDPESAMLDTLDRTGSMLQNGVSDFETKSLTMHSIHNSQQPRNAAKSLSRPTTETQFSNMGMEDVPLATSKKLSSNIEKSVKDLQRCTVSLARYRVVVKEEMDASIKKMKQAFAELESCLMDREVALLAEMDKVKAEAMEILLSRQKKAELLKKMTHVAVQMSEQQLVELRADIKHFVSERKYDEDLGRVARFTCDVETLKKSIDSFGQVSHPKNSYSTRSRCSSVTSVSLSSPSDASAASSSTCASPPSLTSANKKNFAPGETPAAIANSSGQPYQPLREVSECSISGTRKHH

SEQ ID NO: 814332 - protein, 264 aa, Homo sapiens [sequence omitted]

SEQ ID NO: 814333 - protein, 281 aa, Homo sapiens
MSRKQNQKDSSGFIFDLQSNTVLAQGGAFENMKEKINAVRAIVPNKSNNEIILVLQHFDNCVDKTVQAFMEGSASEVLKEWTVTGKKKNKKKKNKPKPAAEPSNGIPDSSKSVSIQEEQSAPSSEKGGMNGYHVNGAINDTESVDSLSEGLETLSIDARELEDPESAMLDTLDRTGSMLQNGVSDFETKSLTMHSIHNSQQPRNAAKSLSRPTTETQFSNMGMEDVPLATSKKLSSNIEKSVKDLQRCTVSLARYRVVVKEEMDASIKKMKQAFAELESCD

SEQ ID NO: 814334 - protein, 281 aa, Homo sapiens
MSRKQNQKDSSGFIFDLQSNTVLAQGGAFENMKEKINAVRAIVPNKSNNEIILVLQHFDNCVDKTVQAFMEGSASEVLKEWTVTGKKKNKKKKNKPKPAAEPSNGIPDSSKSVSIQEEQSAPSSEKGGMNGYHVNGAINDTESVDSLSEGLETLSIDARELEDPESAMLDTLDRTGSMLQNGVSDFETKSLTMHSIHNSQQPRNAAKSLSRPTTETQFSNMGMEDVPLATSKKLSSNIEKSVKDLQRCTVSLARYRVVVKEEMDASIKKMKQAFAELESCV

SEQ ID NO: 814335 - protein, 334 aa, Homo sapiens
MSRKQNQKDSSGFIFDLQSNTVLAQGGAFENMKEKINAVRAIVPNKSNNEIILVLQHFDNCVDKTVQAFMEGSASEVLKEWTVTGKKKNKKKKNKPKPAAEPSNGIPDSSKSVSIQEEQSAPSSEKGGMNGYHVNGAINDTESVDSLSEGLETLSIDARELEDPESAMLDTLDRTGSMLQNGVSDFETKSLTMHSIHNSQQPRNAAKSLSRPTTETQFSNMGMEDVPLATSKKLSSNIEKSVKDLQRCTVSLARYRVVVKEEMDASIKKMKQAFAELESWYSNAARVLGAKYCQGLGNAFLAKYCYPTIIVSSLQFDAFGLICQPNLFSYKSVY

SEQ ID NO: 814336 - protein, 181 aa, Homo sapiens
MMLQHPGQVSASEVSASAIVPCLSPPGSLVFEDFANLTPFVKEELRFAIQNKHLCHRMSSALESVTVSDRPLGVSITKAEVAPEEDERKKRRRERNKIAAAKCRNKKKEKTECLQKESEKLESVNAELKAQIEELKNEKQHLIYMLNLHRPTCIVRAQNGRTPEDERNLFIQQIKEGTLQS

SEQ ID NO: 814337 - protein, 229 aa, Homo sapiens
MMLQHPGQVSASEVSASAIVPCLSPPGSLVFEDFANLTPFVKEELRFAIQNKHLCHRMSSALESVTVSDRPLGVSITKAEVAPEEDERKKRRRERNKIAAAKCRNKKKEKTECLQKLQYYRATGRLCGITRVSLKKRVCIFLNPVLLSHLPSSSRSLMSPGVSQESEKLESVNAELKAQIEELKNEKQHLIYMLNLHRPTCIVRAQNGRTPEDERNLFIQQIKEGTLQS

SEQ ID NO: 814338 - protein, 157 aa, Homo sapiens
MMLQHPGQVSASEVSASAIVPCLSPPGSLVFEDFANLTPFVKEELRFAIQNKHLCHRMSSALESVTVSDRPLGVSITKAEVAPEEDERKKRRRERNKIAAAKCRNKKKEKTECLQKSECLLALPFLSLTPVFTSFMWLSEEELENPLLGYSFPRRAL

SEQ ID NO: 814339 - protein, 157 aa, Homo sapiens; identical to SEQ ID NO: 814338

SEQ ID NO: 814340 - protein, 157 aa, Homo sapiens; identical to SEQ ID NO: 814338

SEQ ID NO: 814341 - protein, 181 aa, Homo sapiens; identical to SEQ ID NO: 814336

SEQ ID NO: 814342 - protein, 126 aa, Homo sapiens
VSKIPVRYYVPVLLSHLPSSSRSLMSPGVSQVHPCIQAAAQATPSSLALAPFLMPLLLVPQESEKLESVNAELKAQIEELKNEKQHLIYMLNLHRPTCIVRAQNGRTPEDERNLFIQQIKEGTLQS

SEQ ID NO: 814343 - protein, 124 aa, Homo sapiens
MSSALESVTVSDRPLGVSITKAEVAPEEDERKKRRRERNKIAAAKCRNKKKEKTECLQKESEKLESVNAELKAQIEELKNEKQHLIYMLNLHRPTCIVRAQNGRTPEDERNLFIQQIKEGTLQS

SEQ ID NO: 814344 - protein, 147 aa, Homo sapiens
YRLGSEAWVLLRFAIQNKHLCHRMSSALESVTVSDRPLGVSITKAEVAPEEDERKKRRRERNKIAAAKCRNKKKEKTECLQKESEKLESVNAELKAQIEELKNEKQHLIYMLNLHRPTCIVRAQNGRTPEDERNLFIQQIKEGTLQS

SEQ ID NO: 814345 - protein, 84 aa, Homo sapiens
RSADVQILKKEKTECLQNEESEKLESVNAELKAQIEELKNEKQHLIYMLNLHRPTCIVRAQNGRTPEDERNLFIQQIKEGTLQS

SEQ ID NO: 814346 - protein, 130 aa, Homo sapiens
FGRFSREAINSITSAWDWQHGVNDRAASLRAIKGVMQRSPSHSRTQPGAHCTALFSRRRPSAPFSPRAGRESSVLARRPDKQPARPRPDPGRPERSLEQNDASTPRPGLCLGSECFCHRPLPVPSWVTGV

SEQ ID NO: 814347 - protein, 181 aa, Homo sapiens; identical to SEQ ID NO: 814336

SEQ ID NO: 814348 - protein, 181 aa, Homo sapiens; identical to SEQ ID NO: 814336

SEQ ID NO: 814349 - protein, 181 aa, Homo sapiens; identical to SEQ ID NO: 814336

SEQ ID NO: 814350 - protein, 181 aa, Homo sapiens; identical to SEQ ID NO: 814336

SEQ ID NO: 814351 - protein, 181 aa, Homo sapiens; identical to SEQ ID NO: 814336

SEQ ID NO: 814352 - protein, 141 aa, Homo sapiens
IELLNSSITLKDDIPPIYPTSPGPIPITLAMEHVVLKRSDDGVFHIGAAAQDKPSAEVLKSEKRQPPKEQVFLVPTGEVFEQQVKELPILQKELIETKQALANANQDKENFFRRLGNITPSLSSETSGSAICAKERGYHQQ

SEQ ID NO: 814353 - protein, 141 aa, Homo sapiens; identical to SEQ ID NO: 814352

SEQ ID NO: 814354 - protein, 526 aa, Homo sapiens
MDVRFYPPPAQPAAAPDAPCLGPSPCLDPYYCNKFDGENMYMSMTEPSQDYVPASQSYPGPSLESEDFNIPPITPPSLPDHSLVHLNEVESGYHSLCHPMNHNGLLPFHPQNMDLPEITVSNMLGQDGTLLSNSISVMPDIRNPEGTQYSSHPQMAAMRPRGQPADIRQQPGMMPHGQLTTINQSQLSAQLGLNMGGSNVPHNSPSPPGSKSATPSPSSSVHEDEGDDTSKINGGEKRPASDMGKKPKTPKKKKKKDPNEPQKPVSAYALFFRDTQAAIKGQNPNATFGEVSKIVASMWDGLGEEQKQVYKKKTEAAKKEYLKQLAAYRASLVSKSYSEPVDVKTSQPPQLINSKPSVFHGPSQAHSALYLSSHYHQQPGMNPHLTAMHPSLPRNIAPKPNNQMPVTVSIANMAVSPPPPLQISPPLHQHLNMQQHQPLTMQQPLGNQLPMQVQSALHSPTMQQGFTLQPDYQTIINPTSTAAQVVTQAMEYVRSGCRNPPPQPVDWNNDYCSSGGMQRDKALYLT

SEQ ID NO: 814355 - protein, 227 aa, Homo sapiens
MDVRFYPPPAQPAAAPDAPCLGPSPCLDPYYCNKFDGENMYMSMTEPSQDYVPASQSYPGPSLESEDFNIPPITPPSLPDHSLVHLTAMHPSLPRNIAPKPNNQMPVTVSIANMAVSPPPPLQISPPLHQHLNMQQHQPLTMQQPLGNQLPMQVQSALHSPTMQQGFTLQPDYQTIINPTSTAAQVVTQAMEYVRSGCRNPPPQPVDWNNDYCSSGGMQRDKALYLT

SEQ ID NO: 814356 - protein, 526 aa, Homo sapiens; identical to SEQ ID NO: 814354

SEQ ID NO: 814357 - protein, 526 aa, Homo sapiens; identical to SEQ ID NO: 814354

SEQ ID NO: 814358 - protein, 216 aa, Homo sapiens
AGERPGAQGEGGCGAVCSMAYPGHPGAGGGYYPGGYGGAPGGPAFPGQTQDPLYGYFAAVAGQDGQIDADELQRCLTQSGIAGGYKPFNLETCRLMVSMLDRDMSGTMGFNEFKELWAVLNGWRQHFISFDTDRSGTVDPQELQKALTTMGFRLSPQAVNSIAKRYSTNGKITFDDYIACCVKLRALTDSFRRRDTAQQGVVNFPYDDFIQCVMSV

SEQ ID NO: 814359 - protein, 216 aa, Homo sapiens; identical to SEQ ID NO: 814358

SEQ ID NO: 814360 - protein, 213 aa, Homo sapiens
AGERPGAQGEGGCGAVCSMAYPGHPGAGGGYYPGGYGGAPGGPAFPGQTQDPLYGYFAAVAGQDGQIDADELQRCLTQSGIAGGYKPFNLETCRLMVSMLDRDMSGTMGFNEFKELWAVLNGWRQHFISFDTDRSGTVDPQELQKALTTMGFRLSPQAVNSIAKRYSTNGKITFDDYIACCVKLRALTDSFRRRDTAQQGVVNFPYDDVSLRN

SEQ ID NO: 814361 - protein, 216 aa, Homo sapiens; identical to SEQ ID NO: 814358

SEQ ID NO: 814362 - protein, 203 aa, Homo sapiens
SARRQSSKDHQLLPIRLQLKMQYGGAPGGPAFPGQTQDPLYGYFAAVAGQDGQIDADELQRCLTQSGIAGGYKPFNLETCRLMVSMLDRDMSGTMGFNEFKELWAVLNGWRQHFISFDTDRSGTVDPQELQKALTTMGFRLSPQAVNSIAKRYSTNGKITFDDYIACCVKLRALTDSFRRRDTAQQGVVNFPYDDFIQCVMSV

SEQ ID NO: 814363 - protein, 185 aa, Homo sapiens
PVSQYGGAPGGPAFPGQTQDPLYGYFAAVAGQDGQIDADELQRCLTQSGIAGGYKPFNLETCRLMVSMLDRDMSGTMGFNEFKELWAVLNGWRQHFISFDTDRSGTVDPQELQKALTTMGFRLSPQAVNSIAKRYSTNGKITFDDYIACCVKLRALTDSFRRRDTAQQGVVNFPYDDFIQCVMSV

SEQ ID NO: 814364 - protein, 188 aa, Homo sapiens
AGERPGAQGEGGCGAVCSMAYPGHPGAGGGYYPGGDGQIDADELQRCLTQSGIAGGYKPFNLETCRLMVSMLDRDMSGTMGFNEFKELWAVLNGWRQHFISFDTDRSGTVDPQELQKALTTMGFRLSPQAVNSIAKRYSTNGKITFDDYIACCVKLRALTDSFRRRDTAQQGVVNFPYDDFIQCVMSV

SEQ ID NO: 814365 - protein, 121 aa, Homo sapiens [sequence omitted]

SEQ ID NO: 814366 - protein, 155 aa, Homo sapiens
GLVLDLHADVLALMLDVVWHVGGSKPFNLETCRLMVSMLDRDMSGTMGFNEFKELWAVLNGWRQHFISFDTDRSGTVDPQELQKALTTMGFRLSPQAVNSIAKRYSTNGKITFDDYIACCVKLRALTDSFRRRDTAQQGVVNFPYDDFIQCVMSV

SEQ ID NO: 814367 - protein, 137 aa, Homo sapiens
MACSEDTNFNRETCRLMVSRLDRDMSGTMGFNEFKELWAVLNGWRQHFISFDTDRSGTVDPQELQKALTTMGFRLSPQAVNSIAKRYSTNGKITFDDYIACCVKLRALTDSFRRRDTAQQGVVNFPYDDFIQCVMSV

SEQ ID NO: 814368 - protein, 109 aa, Homo sapiens
MGFNEFKELWAVLNGWRQHFISFDTDRSGTVDPQELQKALTTMGFRLSPQAVNSIAKRYSTNGKITFDDYIACCVKLRALTDSFRRRDTAQQGVVNFPYDDFIQCVMSV

SEQ ID NO: 814369 - protein, 94 aa, Homo sapiens
DDSRVTPRGHFGSGTVDPQELQKALTTMGFRLSPQAVNSIAKRYSTNGKITFDDYIACCVKLRALTDSFRRRDTAQQGVVNFPYDDFIQCVMSV

SEQ ID NO: 814370 - protein, 214 aa, Homo sapiens
SGERPGAQGEGGCGAVCSMAYPGHPGAGGGYYPGGYGGAPGGPAFPGQTQDPLYGYFAAVAGQDGQIDADELQRCLTQSGIAGGYKPFNLETCRLMVSMLDRDMSGTMGFNEFKELWAVLNGWRQHFISFDTDRSGTVDPQELQKALTTMGFRLSPQAVNSIAKRYSTNGKITFDDYIACCVKLRALTDSFRRRDTAQQVHSMCHECLNQEEAA

SEQ ID NO: 814371 - protein, 298 aa, Homo sapiens
SGERPGAQGEGGCGAVCSMAYPGHPGAGGGYYPGGYGGAPGGPAFPGQTQDPLYGYFAAVAGQDGQIDADELQRCLTQSGIAGGYKPFNLETCRLMVSMLDRDMSGTMGFNEFKELWAVLNGWRQHFISFDTDRSGTVDPQELQKALTTMGFRLSPQAVNSIAKRYSTNGKITFDDYIACCVKLRALTDSFRRRDTSGRAELGGPCGAPGVKMASSAEGDEGTVVALAGVLQSGFQELSLNGLATSLGASEQALRLIISIFLGYPFALVYRHYLFYKETYLIHLFHTFTGLSIAYFNF

SEQ ID NO: 814372 - protein, 1190 aa, Homo sapiens
LGRQSEAPAQSLGSGRRGCSAPLPARSWAPAPGPGPPAVDFKMSVPDYMQCAEDHQTLLVVVQPVGIVSEENFFRIYKRICSVSQISVRDSQRVLYIRYRHHYPPENNEWGDFQTHRKVVGLITITDCFSAKDWPQTFEKFHVQKEIYGSTLYDSRLFVFGLQGEIVEQPRTDVAFYPNYEDCQTVEKRIEDFIESLFIVLESKRLDRATDKSGDKIPLLCVPFEKKDFVGLDTDSRHYKKRCQGRMRKHVGDLCLQAGMLQDSLVHYHMSVELLRSVNDFLWLGAALEGLCSASVIYHYPGGTGGKSGARRFQGSTLPAEAANRHRPGAQEVLIDPGALTTNGINPDTSTEIGRAKNCLSPEDIIDKYKEAISYYSKYKNAGVIELEACIKAVRVLAIQKRSMEASEFLQNAVYINLRQLSEEEKIQRYSILSELYELIGFHRKSAFFKRVAAMQCVAPSIAEPGWRACYKLLLETLPGYSLSLDPKDFSRGTHRGWAAVQMRLLHELVYASRRMGNPALSVRHLSFLLQTMLDFLSDQEKKDVAQSLENYTSKCPGTMEPIALPGGLTLPPVPFTKLPIVRHVKLLNLPASLRPHKMKSLLGQNVSTKSPFIYSPIIAHNRGEERNKKIDFQWVQGDVCEVQLMVYNPMPFELRVENMGLLTSGVEFESLPAALSLPAESGLYPVTLVGVPQTTGTITVNGYHTTVFGVFSDCLLDNLPGIKTSGSTVEVIPALPRLQISTSLPRSAHSLQPSSGDEISTNVSVQLYNGESQQLIIKLENIGMEPLEKLEVTSKVLTTKEKLYGDFLSWKLEETLAQFPLQPGKVATFTINIKVKLDFSCQENLLQDLSDDGISVSGFPLSSPFRQVVRPRVEGKPVNPPESNKAGDYSHVKTLEAVLNFKYSGGPGHTEGYYRNLSLGLHVEVEPSVFFTRVSTLPATSTRQCHLLLDVFNSTEHELTVSTRSSEALILHAGECQRMAIQVDKFNFESFPESPGEKGQFANPKQLEEERREARGLEIHSKLGICWRIPSLKRSGEASVEGLLNQLVLEHLQLAPLQWDVLVDGQPCDREAVAACQVGDPVRLEVRLTNRSPRSVGPFALTVVPFQDHQNGVHNYDLHDTVSFVGSSTFYLDAVQPSGQSACLGALLFLYTGDFFLHIRFHEDSTSKELPPSWFCLPSVHVCALEAQA

SEQ ID NO: 814373 - protein, 1181 aa, Homo sapiens
LGRQSEAPAQSLGSGRRGCSAPLPARSWAPAPGPGPPAVDFKMSVPDYMQCAEDHQTLLVVVQPVGIVSEENFFRIYKRICSVSQISVRDSQRVLYIRYRHHYPPENNEWGDFQTHRKVVGLITITDCFSAKDWPQTFEKFHVQKEIYGSTLYDSRLFVFGLQGEIVEQPRTDVAFYPNYEDCQTVEKRIEDFIESLFIVLESKRLDRATDKSGDKIPLLCVPFEKKDFVGLDTDSRHYKKRCQGRMRKHVGDLCLQAGMLQDSLVHYHMSVELLRSVNDFLWLGAALEGLCSASVIYHYPGGTGGKSGARRFQGSTLPAEAANRHRPGALTTNGINPDTSTEIGRAKNCLSPEDIIDKYKEAISYYSKYKNAGVIELEACIKAVRVLAIQKRSMEASEFLQNAVYINLRQLSEEEKIQRYSILSELYELIGFHRKSAFFKRVAAMQCVAPSIAEPGWRACYKLLLETLPGYSLSLDPKDFSRGTHRGWAAVQMRLLHELVYASRRMGNPALSVRHLSFLLQTMLDFLSDQEKKDVAQSLENYTSKCPGTMEPIALPGGLTLPPVPFTKLPIVRHVKLLNLPASLRPHKMKSLLGQNVSTKSPFIYSPIIAHNRGEERNKKIDFQWVQGDVCEVQLMVYNPMPFELRVENMGLLTSGVEFESLPAALSLPAESGLYPVTLVGVPQTTGTITVNGYHTTVFGVFSDCLLDNLPGIKTSGSTVEVIPALPRLQISTSLPRSAHSLQPSSGDEISTNVSVQLYNGESQQLIIKLENIGMEPLEKLEVTSKVLTTKEKLYGDFLSWKLEETLAQFPLQPGKVATFTINIKVKLDFSCQENLLQDLSDDGISVSGFPLSSPFRQVVRPRVEGKPVNPPESNKAGDYSHVKTLEAVLNFKYSGGPGHTEGYYRNLSLGLHVEVEPSVFFTRVSTLPATSTRQCHLLLDVFNSTEHELTVSTRSSEALILHAGECQRMAIQVDKFNFESFPESPGEKGQFANPKQLEEERREARGLEIHSKLGICWRIPSLKRSGEASVEGLLNQLVLEHLQLAPLQWDVLVDGQPCDREAVAACQVGDPVRLEVRLTNRSPRSVGPFALTVVPFQDHQNGVHNYDLHDTVSFVGSSTFYLDAVQPSGQSACLGALLFLYTGDFFLHIRFHEDSTSKELPPSWFCLPSVHVCALEAQA

SEQ ID NO: 814374 - protein, 1177 aa, Homo sapiens
TGLVDPGLRRMMRGRPRMSAMSWAPAPGPWGHLDVDFKMSVPDYMQCAEDHQTLLVVVQPVGIVSEENFFRIYKRICSVSQISVRDSQRVLYIRYRHHYPPENNEWGDFQTHRKVVGLITITDCFSAKDWPQTFEKFHVQKEIYGSTLYDSRLFVFGLQGEIVEQPRTDVAFYPNYEDCQTVEKRIEDFIESLFIVLESKRLDRATDKSGDKIPLLCVPFEKKDFVGLDTDSRHYKKRCQGRMRKHVGDLCLQAGMLQDSLVHYHMSVELLRSVNDFLWLGAALEGLCSASVIYHYPGGTGGKSGARRFQGSTLPAEAANRHRPGALTTNGINPDTSTEIGRAKNCLSPEDIIDKYKEAISYYSKYKNAGVIELEACIKAVRVLAIQKRSMEASEFLQNAVYINLRQLSEEEKIQRYSILSELYELIGFHRKSAFFKRVAAMQCVAPSIAEPGWRACYKLLLETLPGYSLSLDPKDFSRGTHRGWAAVQMRLLHELVYASRRMGNPALSVRHLSFLLQTMLDFLSDQEKKDVAQSLENYTSKCPGTMEPIALPGGLTLPPVPFTKLPIVRHVKLLNLPASLRPHKMKSLLGQNVSTKSPFIYSPIIAHNRGEERNKKIDFQWVQGDVCEVQLMVYNPMPFELRVENMGLLTSGVEFESLPAALSLPAESGLYPVTLVGVPQTTGTITVNGYHTTVFGVFSDCLLDNLPGIKTSGSTVEVIPALPRLQISTSLPRSAHSLQPSSGDEISTNVSVQLYNGESQQLIIKLENIGMEPLEKLEVTSKVLTTKEKLYGDFLSWKLEETLAQFPLQPGKVATFTINIKVKLDFSCQENLLQDLSDDGISVSGFPLSSPFRQVVRPRVEGKPVNPPESNKAGDYSHVKTLEAVLNFKYSGGPGHTEGYYRNLSLGLHVEVEPSVFFTRVSTLPATSTRQCHLLLDVFNSTEHELTVSTRSSEALILHAGECQRMAIQVDKFNFESFPESPGEKGQFANPKQLEEERREARGLEIHSKLGICWRIPSLKRSGEASVEGLLNQLVLEHLQLAPLQWDVLVDGQPCDREAVAACQVGDPVRLEVRLTNRSPRSVGPFALTVVPFQDHQNGVHNYDLHDTVSFVGSSTFYLDAVQPSGQSACLGALLFLYTGDFFLHIRFHEDSTSKELPPSWFCLPSVHVCALEAQA

SEQ ID NO: 814375 - protein, 319 aa, Homo sapiens
DLVPRLALKTCCVLEKAGPEELETLEAVLNFKYSGGPGHTEGYYRNLSLGLHVEVEPSVFFTRVSTLPATSTRQCHLLLDVFNSTEHELTVSTRSSEALILHAGECQRMAIQVDKFNFESFPESPGEKGQFANPKQLEEERREARGLEIHSKLGICWRIPSLKRSGEASVEGLLNQLVLEHLQLAPLQWDVLVDGQPCDREAVAACQVGDPVRLEVRLTNRSPRSVGPFALTVVPFQDHQNGVHNYDLHDTVSFVGSSTFYLDAVQPSGQSACLGALLFLYTGDFFLHIRFHEDSTSKELPPSWFCLPSVHVCALEAQA

SEQ ID NO: 814376 - protein, 135 aa, Homo sapiens
MLFLFDVLVDGQPCDREAVAACQVGDPVRLEVRLTNRSPRSVGPFALTVVPFQDHQNGVHNYDLHDTVSFVGSSTFYLDAVQPSGQSACLGALLFLYTGDFFLHIRFHEDSTSKELPPSWFCLPSVHVCALEAQA

SEQ ID NO: 814377 - protein, 551 aa, Homo sapiens
LGRQSEAPAQSLGSGRRGCSAPLPARSWAPAPGPGPPAVDFKMSVPDYMQCAEDHQTLLVVVQPVGIVSEENFFRIYKRICSVSQISVRDSQRVLYIRYRHHYPPENNEWGDFQTHRKVVGLITITDCFSAKDWPQTFEKFHVQKEIYGSTLYDSRLFVFGLQGEIVEQPRTDVAFYPNYEDCQTVEKRIEDFIESLFIVLESKRLDRATDKSGDKIPLLCVPFEKKDFVGLDTDSRHYKKRCQGRMRKHVGDLCLQAGMLQDSLVHYHMSVELLRSVNDFLWLGAALEGLCSASVIYHYPGGTGGKSGARRFQGSTLPAEAANRHRPGAQEVLIDPGALTTNGINPDTSTEIGRAKNCLSPEDIIDKYKEAISYYSKYKNAGVIELEACIKAVRVLAIQKRSMEASEFLQNAVYINLRQLSEEEKIQRYSILSELYELIGFHRKSAFFKRVAAMQCVAPSIAEPGWRACYKLLLETLPGYSLSLDPKDFSRGTHRGWAAVQMRLLHELVYASRRMGNPALSVRHLSFLLQTMLDFLSDQEKKDVAQSLEN

SEQ ID NO: 814378 - protein, 575 aa, Homo sapiens
MSHAAEPARDGVEASAEGPRAVFVLLEERRPADSAQLLSLNSLLPESGIVADIELENVLDPDSFYELKSQPLPLRSSLPISLQATPATPATLSASSSAGGSRTPAMSSSSSSRVLLRQQLMRAQAQEQERRERREQAAAAPFPSPAPASPAISVVGVSAGGHTLSRPPPAQVPREVLKVQTHLENPTRYHLQQARRQQVKQYLSTTLGPKLASQALTPPPGPASAQPLPAPEAAHTTGPTGSAPNSPMALLTIGSSSEKEIDDVIDEIISLESSYNDEMLSYLPGGTTGLQLPSTLPVSGNLLDVYSSQGVATPAITVSNSCPAELPNIKREISETEAKALLKERQKKDNHNLIERRRRFNINDRIKELGTLIPKSSDPEMRWNKGTILKASVDYIRKLQKEQQRSKDLESRQRSLEQANRSLQLRIQELELQAQIHGLPVPPTPGLLSLATTSASDSLKPEQLDIEEEGRPGAATFHVGGGPAQNAPHQQPPAPPSDALLDLHFPSDHLGDLGDPFHLGLEDILMEEEEGVVGGLSGGALSPLRAASDPLLSSVSPAVSKASSRRSSFSMEEES

SEQ ID NO: 814379 - protein, 575 aa, Homo sapiens; identical to SEQ ID NO: 814378

SEQ ID NO: 814380 - protein, 470 aa, Homo sapiens
MSSSSSSRVLLRQQLMRAQAQEQERRERREQAAAAPFPSPAPASPAISVVGVSAGGHTLSRPPPAQVPREVLKVQTHLENPTRYHLQQARRQQVKQYLSTTLGPKLASQALTPPPGPASAQPLPAPEAAHTTGPTGSAPNSPMALLTIGSSSEKEIDDVIDEIISLESSYNDEMLSYLPGGTTGLQLPSTLPVSGNLLDVYSSQGVATPAITVSNSCPAELPNIKREISETEAKALLKERQKKDNHNLIERRRRFNINDRIKELGTLIPKSSDPEMRWNKGTILKASVDYIRKLQKEQQRSKDLESRQRSLEQANRSLQLRIQELELQAQIHGLPVPPTPGLLSLATTSASDSLKPEQLDIEEEGRPGAATFHVGGGPAQNAPHQQPPAPPSDALLDLHFPSDHLGDLGDPFHLGLEDILMEEEEGVVGGLSGGALSPLRAASDPLLSSVSPAVSKASSRRSSFSMEEES

SEQ ID NO: 814381 - protein, 575 aa, Homo sapiens; identical to SEQ ID NO: 814378

SEQ ID NO: 814382 - protein, 470 aa, Homo sapiens; identical to SEQ ID NO: 814380

SEQ ID NO: 814383 - protein, 470 aa, Homo sapiens; identical to SEQ ID NO: 814380

SEQ ID NO: 814384 - protein, 575 aa, Homo sapiens; identical to SEQ ID NO: 814378

SEQ ID NO: 814385 - protein, 326 aa, Homo sapiens
RDPQQEQERERIDDVIDEIISLESSYNDEMLSYLPGGTTGLQLPSTLPVSGNLLDVYSSQGVATPAITVSNSCPAELPNIKREISETEAKALLKERQKKDNHNLIERRRRFNINDRIKELGTLIPKSSDPEMRWNKGTILKASVDYIRKLQKEQQRSKDLESRQRSLEQANRSLQLRIQELELQAQIHGLPVPPTPGLLSLATTSASDSLKPEQLDIEEEGRPGAATFHVGGGPAQNAPHQQPPAPPSDALLDLHFPSDHLGDLGDPFHLGLEDILMEEEEGVVGGLSGGALSPLRAASDPLLSSVSPAVSKASSRRSSFSMEEES

SEQ ID NO: 814386 - protein, 291 aa, Homo sapiens
RDPQQEQERERLPVSGNLLDVYSSQGVATPAITVSNSCPAELPNIKREISETEAKALLKERQKKDNHNLIERRRRFNINDRIKELGTLIPKSSDPEMRWNKGTILKASVDYIRKLQKEQQRSKDLESRQRSLEQANRSLQLRIQELELQAQIHGLPVPPTPGLLSLATTSASDSLKPEQLDIEEEGRPGAATFHVGGGPAQNAPHQQPPAPPSDALLDLHFPSDHLGDLGDPFHLGLEDILMEEEEGVVGGLSGGALSPLRAASDPLLSSVSPAVSKASSRRSSFSMEEES

SEQ ID NO: 814387 - protein, 195 aa, Homo sapiens [sequence omitted]

SEQ ID NO: 814388 - protein, 198 aa, Homo sapiens
MRPCTFPKGTAQCRYFRRRRLEKDMRSGPAPWGSQPHPCPCGTHPCPGEGRRQDEVSTLSPRDCPSQVSWEREMSGCCSILCLGTTSLVRPGTEEESSNGGPCPALPRQGTEVRMRPSPFPWELSWPSRNGGARPHPFPIGTAQHRYFRCERISRTRPPLVLVEITAPPLSLSNIPSKHSTLQGGVVLKLPCLNLGPT

SEQ ID NO: 814389 - protein, 135 aa, Homo sapiens [sequence omitted]

SEQ ID NO: 814390 - protein, 575 aa, Homo sapiens; identical to SEQ ID NO: 814378

SEQ ID NO: 814391 - protein, 575 aa, Homo sapiens; identical to SEQ ID NO: 814378

SEQ ID NO: 814392 - protein, 500 aa, Homo sapiens
MSHAAEPARDGVEASAEGPRAVFVLLEERRPADSAQLLSLNSLLPESGIVADIELENVLDPDSFYELKSQPLPLRSSLPISLQATPATPATLSASSSAGGSRTPAMSSSSSSRVLLRQQLMRAQAQEQERRERREQAAAAPFPSPAPASPAISVVGVSAGGHTLSRPPPAQVPREVLKVQTHLENPTRYHLQQARRQQVKQYLSTTLGPKLASQALTPPPGPASAQPLPAPEAAHTTGPTGSAPNSPMALLTIGSSSEKEIDDVIDEIISLESSYNDEMLSYLPGGTTGLQLPSTLPVSGNLLDVYSSQGVATPAITVSNSCPAELPNIKREISETEAKALLKERQKKDNHNLIERRRRFNINDRIKELGTLIPKSSDPEMRWNKGTILKASVDYIRKLQKEQQRSKDLESRQRSLEQANRSLQLRIQELELQAQIHGLPVPPTPGLLSLATTSASDSLKPEQLDIEEEGRPGAATFHVGGGPAQNAPHQQLAPELAARP

SEQ ID NO: 814393 - protein, 379 aa, Homo sapiens
MSHAAEPARDGVEASAEGPRAVFVLLEERRPADSAQLLSLNSLLPESGIVADIELENVLDPDSFYELKSQPLPLRSSLPISLQATPATPATLSASSSAGGSRTPAMSSSSSSRVLLRQQLMRAQAQEQERRERREQAAAAPFPSPAPASPAISVVGVSAGGHTLSRPPPAQVPREVLKVQTHLENPTRYHLQQARRQQVKQYLSTTLGPKLASQALTPPPGPASAQPLPAPEAAHTTGPTGSAPNSPMALLTIGSSSEKEIDDVIDEIISLESSYNDEMLSYLPGGTTGLQLPSTLPVSGNLLDVYSSQGVATPAITVSNSCPAELPNIKREISETEAKALLKERQKKDNHNLIERRRRFNINDRIKELGTLIPKSSDP

SEQ ID NO: 814394 - protein, 410 aa, Homo sapiens
MSHAAEPARDGVEASAEGPRAVFVLLEERRPADSAQLLSLNSLLPESGIVADIELENVLDPDSFYELKSQPLPLRSSLPISLQATPATPATLSASSSAGGSRTPAMSSSSSSRVLLRQQLMRAQAQEQERRERREQAAAAPFPSPAPASPAISVVGVSAGGHTLSRPPPAQVPREVLKVQTHLENPTRYHLQQARRQQVKQYLSTTLGPKLASQALTPPPGPASAQPLPAPEAAHTTGPTGSAPNSPMALLTIGSSSEKEIDDVIDEIISLESSYNDEMLSYLPGGTTGLQLPSTAGAQWCYLGSLEPPPTKFKRFSCLSLLSNWDYSCLCQGICLMCTVVKAWPHQPSLSATPAQLSCPTSNGRSLTGAKPLQDRDTELTSKLIERRRRFNINDRIKELGTLIPKSSDP

SEQ ID NO: 814395 - protein, 298 aa, Homo sapiens
MSHAAEPARDGVEASAEGPRAVFVLLEERRPADSAQLLSLNSLLPESGIVADIELENVLDPDSFYELKSQPLPLRSSLPISLQATPATPATLSASSSAGGSRTPAMSSSSSSRVLLRQQLMRAQAQEQERRERREQAAAAPFPSPAPASPAISVVGVSAGGHTLSRPPPAQVPREVLKVQTHLENPTRYHLQQARRQQVKQYLSTTLGPKLASQALTPPPGPASAQPLPAPEAAHTTGPTGSAPNSPMALLTIGSSSEKEIDDVIDEIISLESSYNDEMLSYLPGGTTGLQLPSTVRP

SEQ ID NO: 814396 - protein, 330 aa, Homo sapiens
MSDRLGQITKGKDGKSKYSTLSLFDKYKGKSVDAIRSSVIPRHGLQSLGKVAAARRMPPPANLPSLKSENKGNDPNIVIVPKDGTGWANKQDQQDPKSSSATASQPPESLPQPGLQKSVSNLQKPTQSISQENTNSVPGGPKSWAQLNGKPVGHEGGLRGSSRLLSFSPEEFPTLKAAGGQDKAGKEKGVLDLSYGPGPSLRPQNVTSWREGGGRHIISATSLSTSPTELGSRNSSTGDGAPSSACTSDSKDPSLRPAQPVRKGASQFMGNVYHPPTYHDMLPAFMCSPKSSENQGTVERGSFPLPQLRLEPRVPFRQFQMNDQDGIMVL

SEQ ID NO: 814397 - protein, 592 aa, Homo sapiens
MSDRLGQITKGKDGKSKYSTLSLFDKYKGKSVDAIRSSVIPRHGLQSLGKVAAARRMPPPANLPSLKSENKGNDPNIVIVPKDGTGWANKQDQQDPKSSSATASQPPESLPQPGLQKSVSNLQKPTQSISQENTNSVPGGPKSWAQLNGKPVGHEGGLRGSSRLLSFSPEEFPTLKAAGGQDKAGKEKGVLDLSYGPGPSLRPQNVTSWREGGGRHIISATSLSTSPTELGSRNSSTGDGAPSSACTSDSKDPSLRPAQPVRKGASQFMGNVYHPPTYHDMLPAFMCSPKSSENQGTVERGSFPLPQLRLEPRVPFRQFQMNDQDGKENRLGLSRPLRPLRQLVERAPRPTIINAENLKGLDDLDADADDGWAGLHEEVDYSEKLKFSDDEEEEEVVKDGRPKWNSWDPRRQRQLSMSSADSADAKRTREEGKDWAEAVGASRVVRKAPDPQPPPRKLHGWAPGPDYQKSSMGSMFRQQSIEDKEDKPPPRQKFIQSEMSEAVERARKRREEEERRAREERLAACAAKLKQLDQKCKQARKAGEARKQAEKEVPWSPSAEKASPQENGPAVHKGSPEFLPKMPPPQDPLDTT

SEQ ID NO: 814398 - protein, 649 aa, Homo sapiens
MSDRLGQITKGKDGKSKYSTLSLFDKYKGKSVDAIRSSVIPRHGLQSLGKVAAARRMPPPANLPSLKSENKGNDPNIVIVPKDGTGWANKQDQQDPKSSSATASQPPESLPQPGLQKSVSNLQKPTQSISQENTNSVPGGPKSWAQLNGKPVGHEGGLRGSSRLLSFSPEEFPTLKAAGGQDKAGKEKGVLDLSYGPGPSLRPQNVTSWREGGGRHIISATSLSTSPTELGSRNSSTGDGAPSSACTSDSKDPSLRPAQPVRKGASQFMGNVYHPPTYHDMLPAFMCSPKSSENQGTVERGSFPLPQLRLEPRVPFRQFQMNDQDGKENRLGLSRPLRPLRQLVERAPRPTIINAENLKGLDDLDADADDGWAGLHEEVDYSEKLKFSDDEEEEEVVKDGRPKWNSWDPRRQRQLSMSSADSADAKRTREEGKDWAEAVGASRVVRKAPDPQPPPRKLHGWAPGPDYQKSSMGSMFRQQSIEDKEDKPPPRQKFIQSEMSEAVERARKRREEEERRAREERLAACAAKLKQLDQKCKQARKAGEARKQAEKEVPWSPSAEKASPQENGPAVHKGSPEFPAQETPTTFPEEAPTVSPAVAQSNSSEEEAREAGSPAQEFKYQILSRSSAHTHTEHLQVTLHVTDSLKIVA

SEQ ID NO: 814399 - protein, 659 aa, Homo sapiens
MSDRLGQITKGKDGKSKYSTLSLFDKYKGKSVDAIRSSVIPRHGLQSLGKVAAARRMPPPANLPSLKSENKGNDPNIVIVPKDGTGWANKQDQQDPKSSSATASQPPESLPQPGLQKSVSNLQKPTQSISQENTNSVPGGPKSWAQLNGKPVGHEGGLRGSSRLLSFSPEEFPTLKAAGGQDKAGKEKGVLDLSYGPGPSLRPQNVTSWREGGGRHIISATSLSTSPTELGSRNSSTGDGAPSSACTSDSKDPSLRPAQPVRKGASQFMGNVYHPPTYHDMLPAFMCSPKSSENQGTVERGSFPLPQLRLEPRVPFRQFQMNDQDGKENRLGLSRPLRPLRQLVERAPRPTIINAENLKGLDDLDADADDGWAGLHEEVDYSEKLKFSDDEEEEEVVKDGRPKWNSWDPRRQRQLSMSSADSADAKRTREEGKDWAEAVGASRVVRKAPDPQPPPRKLHGWAPGPDYQKSSMGSMFRQQSIEDKEDKPPPRQKFIQSEMSEAVERARKRREEEERRAREERLAACAAKLKQLDQKCKQARKAGEARKQAEKEVPWSPSAEKASPQENGPAVHKGSPEFPAQETPTTFPEEAPTVSPAVAQSNSSEEEAREAGSPAQEFKYQKSLPPRFQRQQQQQQQEQLYKMQHWQPVYPPPSHPQRT

SEQ ID NO: 814400 - protein, 444 aa, Homo sapiens
MSDRLGQITKGKDGKSKYSTLSLFDKYKGKSVDAIRSSVIPRHGLQSLGKVAAARRMPPPANLPSLKSENKGNDPNIVIVPKDGTGWANKQDQQDPKSSSATASQPPESLPQPGLQKSVSNLQKPTQSISQENTNSVPGGPKSWAQLNGKPVGHEGGLRGSSRLLSFSPEEFPTLKAAGGQDKAGKEKGVLDLSYGPGPSLRPQNVTSWREGGGRHIISATSLSTSPTELGSRNSSTGDGAPSSACTSDSKDPSLRPAQPVRKGASQFMGNVYHPPTYHDMLPAFMCSPKSSENQGTVERGSFPLPQLRLEPRVPFRQFQMNDQDGKENRLGLSRPLRPLRQLVERAPRPTIINAENLKGLDDLDADADDGWAGGQRSTGGLDGQDQSPSVLTRDGNPLAPPCVFPWQDRDEEPDREADLMPSFLIYSLTSGSFLAKPLASFGL

SEQ ID NO: 814401 - protein, 234 aa, Homo sapiens
MSDRLGQITKGKDGKSKYSTLSLFDKYKGKSVDAIRSSVIPRHGLQSLGKVAAARRMPPPANLPSLKSENKGNDPNIVIVPKDGTGWANKQDQQDPKSSSATASQPPESLPQPGLQKSVSNLQKPTQSISQENTNSVPGGPKSWAQLNGKPVGHEGGLRGSSRLLSFSPEEFPTLKAAGGQDKAGKEKGVLDLSYGPCWPLRAALPHKVYSGGALLPLQKRTHPWHMQNFIVKR

SEQ ID NO: 814402 - protein, 174 aa, Homo sapiens
MSDRLGQITKGKDGKSKYSTLSLFDKYKGKSVDAIRSSVIPRHGLQSLGKVAAARRMPPPANLPSLKSENKGNDPNIVIVPKDGTGWANKQDQQDPKSSSATASQPPESLPQPGLQKSVSNLQKPTQSISQENTNSVPGGPKSWAQLNGKPVGHEGGKCARECVAWFRWGEGGE

SEQ ID NO: 814403 - protein, 41 aa, Homo sapiens
MGQDQASALRVSDCSLWALDGVTELPPLISLHSYKGADATG

SEQ ID NO: 814404 - protein, 80 aa, Homo sapiens
IRRAAVELLRPARQPPPNARWGRGVSESQRHQGPCDKVAAARPGASGRRSGFGSVTRRPEGAGPAFSARAPGPCRSRFAS

SEQ ID NO: 814405 - protein, 218 aa, Homo sapiens
MVPQRGSRPHYGGERLYHQHSTPSATPGAATAPIISPTKRAREPRGENKHAPVHQAEAHPSLRRTKRTRQQIGQAGQCDAHNRRAATHSTPSHQRNRSTPQTPPPTRRHTHTPTPPPSPDGRQQHPRRRHQQPAQPATQSARPAPARGRTDQTIRAPHHPSAGEAPQHSPSSTPHTDVCHPRRPREHHRPRTGQQTPPELHRTHQARHRRHAHPHAPP

SEQ ID NO: 814406 - protein, 80 aa, Homo sapiens; identical to SEQ ID NO: 814404

SEQ ID NO: 814407 - protein, 80 aa, Homo sapiens; identical to SEQ ID NO: 814404

SEQ ID NO: 814408 - protein, 80 aa, Homo sapiens; identical to SEQ ID NO: 814404

SEQ ID NO: 814409 - protein, 218 aa, Homo sapiens; identical to SEQ ID NO: 814405

SEQ ID NO: 814410 - protein, 94 aa, Homo sapiens
QFEETLRITWDSESISENFPQKYVDPLAGAADGKEKNIGNEQAEDVFYIPSCMSGSRNFKMAKLEDTRNVGMPVAHMESPERVSVELVRRRLSL

SEQ ID NO: 814411 - protein, 1709 aa, Homo sapiens
MKKIFSKKGESPLGSFARRRRSSAGGGGEPGEGAYSQPGYHVRDRDLGKIHKAASAGNVAKVQQILLLRKNGLNDRDKMNRTALHLACANGHPEVVTLLVDRKCQLNVCDNENRTALMKAVQCQEEKCATILLEHGADPNLADVHGNTALHYAVYNEDISVATKLLLYDANIEAKNKDDLTPLLLAVSGKKQQMVEFLIKKKANVNAVDKLESSHQLISEYKEERIPKHSSQNSNSVDESSEDSLSRLSGKPGVDDSWPTSDDEDLNFDTKNVPKPSLAKLMTASQQSRKNLEATYGTVRTGNRTLFEDRDSDSQDEVVVESLPTTSIKVQCFSHPTYQSPDLLPKPSHKSLANPGLMKEEPTKPGIAKKENGIDIIESAPLEQTNNDNLTYVDEVHKNNRSDMMSALGLGQEEDIESPWDSESISENFPQKYVDPLAGAADGKEKNIGNEQAEDVFYIPSCMSGSRNFKMAKLEDTRNVGMPVAHMESPERYLHLKPTIEMKDSVPNKAGGMKDVQTSKAAEHDLEVASEEEQEREGSENNQPQVEEERKKHRNNEMEVSANIHDGATDDAEDDDDDDGLIQKRKSGETDHQQFPRKENKEYASGPALQMKEVKSTEKEKRTSKESVNSPVFGKASLLTGGLLQVDDDSSLSEIDEDEGRPTKKTSNEKNKVKNQIQSMDDVDDLTQSSETASEDCELPHSSYKNFMLLIEQLGMECKDSVSLLKIQDAALSCERLLELKKNHCELLTVKIKKMEDKVNVLQRELSETKEIKSQLEHQKVEWERELCSLRFSLNQEEEKRRNADTLYEKIREQLRRKEEQYRKEVEVKQQLELSLQTLEMELRTVKSNLNQVVQERNDAQRQLSREQNARMLQDGILTNHLSKQKEIEMAQKKMNSENSHSHEEEKDLSHKNSMLQEEIAMLRLEIDTIKNQNQEKEKKCFEDLKIVKEKNEDLQKTIKQNEETLTQTISQYNGRLSVLTAENAMLNSKLENEKQSKERLEAEVESYHSRLAAAIHDRDQSETSKRELELAFQRARDECSRLQDKMNFDVSNLKDNNEILSQQLFKTESKLNSLEIEFHHTRDALREKTLGLERVQKDLSQTQCQMKEMEQKYQNEQVKVNKYIGKQESVEERLSQLQSENMLLRQQLDDAHNKADNKEKTVINIQDQFHAIVQKLQAESEKQSLLLEERNKELISECNHLKERQYQYENEKAEREVVVRQLQQELADTLKKQSMSEASLEVTSRYRINLEDETQDLKKKLGQIRNQLQEAQDRHTEAVRCAEKMQDHKQKLEKDNAKLKVTVKKQMDKIEELQKNLLNANLSEDEKEQLKKLMELKQSLECNLDQEMKKNVELEREITGFKNLLKMTRKKLNEYENGEFSFHGDLKTSQFEMDIQINKLKHKIDDLTAELETAGSKCLHLDTKNQILQEELLSMKTVQKKCEKLQKNKKKLEQEVINLRSHIERNMVELGQVKQYKQEIEERARQEIAEKLKEVNLFLQAQAASQENLEQFRENNFASMKSQMELRIKDLESELSKIKTSQEDFNKTELEKYKQLYLEELKVRKSLSSKLTKTNERLAEVNTKLLVEKQQSRSLFTTLTTRPVMEPPCVGNLNNSLDLNRKLIPRENLVISTSNPRASNNSMENYLSKMQQELEKNITRELKEAAAELESGSIASPLGSTDESNLNQDLVWKASREYVQVLKKNYMI

SEQ ID NO: 814412 - protein, 1709 aa, Homo sapiens; identical to SEQ ID NO: 814411

SEQ ID NO: 814413 - protein, 1749 aa, Homo sapiens
MKKIFSKKGESPLGSFARRRRSSAGGGGEPGEGAYSQPGYHVRDRDLGKIHKAASAGNVAKVQQILLLRKNGLNDRDKMNRTALHLACANGHPEVVTLLVDRKCQLNVCDNENRTALMKAVQCQEEKCATILLEHGADPNLADVHGNTALHYAVYNEDISVATKLLLYDANIEAKNKDDLTPLLLAVSGKKQQMVEFLIKKKANVNAVDKLESSHQLISEYKEERIPKHSSQNSNSVDESSEDSLSRLSGKPGVDDSWPTSDDEDLNFDTKNVPKPSLAKLMTASQQSRKNLEATYGTVRTGNRTLFEDRDSDSQDEVVVESLPTTSIKVQCFSHPTYQSPDLLPKPSHKSLANPGLMKEEPTKPGIAKKENGIDIIESAPLEQTNNDNLTYVDEVHKNNRSDMMSALGLGQEEDIESPWDSESISENFPQKYVDPLAGAADGKEKNIGNEQAEDVFYIPSCMSGSRNFKMAKLEDTRNVGMPVAHMESPERYLHLKPTIEMKDSVPNKAGGMKDVQTSKAAEHDLEVASEEEQEREGSENNQPQVEEERKKHRNNEMEVSANIHDGATDDAEDDDDDDGLIQKRKSGETDHQQFPRKENKEYASGPALQMKEVKSTEKEKRTSKESVNSPVFGKASLLTGGLLQVDDDSSLSEIDEDEGRPTKKTSNEKNKVKNQIQSMDDVDDLTQSSETASEDCELPHSSYKNFMLLIEQLGMECKDSVSLLKIQDAALSCERLLELKKNHCELLTVKIKKMEDKVNVLQRELSETKEIKSQLEHQKVEWERELCSLRFSLNQEEEKRRNADTLYEKIREQLRRKEEQYRKEVEVKQQLELSLQTLEMELRTVKSNLNQSLKQNCYLKLTCDLYNYKLFMIILAPNRCLVSVFCMKEWRVVQERNDAQRQLSREQNARMLQDGILTNHLSKQKEIEMAQKKMNSENSHSHEEEKDLSHKNSMLQEEIAMLRLEIDTIKNQNQEKEKKCFEDLKIVKEKNEDLQKTIKQNEETLTQTISQYNGRLSVLTAENAMLNSKLENEKQSKERLEAEVESYHSRLAAAIHDRDQSETSKRELELAFQRARDECSRLQDKMNFDVSNLKDNNEILSQQLFKTESKLNSLEIEFHHTRDALREKTLGLERVQKDLSQTQCQMKEMEQKYQNEQVKVNKYIGKQESVEERLSQLQSENMLLRQQLDDAHNKADNKEKTVINIQDQFHAIVQKLQAESEKQSLLLEERNKELISECNHLKERQYQYENEKAEREVVVRQLQQELADTLKKQSMSEASLEVTSRYRINLEDETQDLKKKLGQIRNQLQEAQDRHTEAVRCAEKMQDHKQKLEKDNAKLKVTVKKQMDKIEELQKNLLNANLSEDEKEQLKKLMELKQSLECNLDQEMKKNVELEREITGFKNLLKMTRKKLNEYENGEFSFHGDLKTSQFEMDIQINKLKHKIDDLTAELETAGSKCLHLDTKNQILQEELLSMKTVQKKCEKLQKNKKKLEQEVINLRSHIERNMVELGQVKQYKQEIEERARQEIAEKLKEVNLFLQAQAASQENLEQFRENNFASMKSQMELRIKDLESELSKIKTSQEDFNKTELEKYKQLYLEELKVRKSLSSKLTKTNERLAEVNTKLLVEKQQSRSLFTTLTTRPVMEPPCVGNLNNSLDLNRKLIPRENLVISTSNPRASNNSMENYLSKMQQELEKNITRELKEAAAELESGSIASPLGSTDESNLNQDLVWKASREYVQVLKKNYMI

SEQ ID NO: 814414 - protein, 1718 aa, Homo sapiens
MKKIFSKKGESPLGSFARRRRSSAGGGGEPGEGAYSQPGYHVRDRDLGKIHKAASAGNVAKVQQILLLRKNGLNDRDKMNRTALHLACANGHPEVVTLLVDRKCQLNVCDNENRTALMKAVQCQEEKCATILLEHGADPNLADVHGNTALHYAVYNEDISVATKLLLYDANIEAKNKDDLTPLLLAVSGKKQQMVEFLIKKKANVNAVDKLESSHQLISEYKEERIPKHSSQNSNSVDESSEDSLSRLSGKPGVDDSWPTSDDEDLNFDTKNVPKPSLAKLMTASQQSRKNLEATYGTVRTGNRTLFEDRDSDSQDEVVVESLPTTSIKVQCFSHPTYQSPDLLPKPSHKSLANPGLMKEEPTKPGIAKKENGIDIIESAPLEQTNNDNLTYVDEVHKNNRSDMMSALGLGQEEDIESPWDSESISENFPQKYVDPLAGAADGKEKNIGNEQAEDVFYIPSCMSGSRNFKMAKLEDTRNVGMPVAHMESPERYLHLKPTIEMKDSVPNKAGGMKDVQTSKAAEHDLEVASEEEQEREGSENNQPQVEEERKKHRNNEMEVSANIHDGATDDAEDDDDDDGLIQKRKSGETDHQQFPRKENKEYASGPALQMKEVKSTEKEKRTSKESVNSPVFGKASLLTGGLLQVDDDSSLSEIDEDEGRPTKKTSNEKNKVKNQIQSMDDVDDLTQSSETASEDCELPHSSYKNFMLLIEQLGMECKDSVSLLKIQDAALSCERLLELKKNHCELLTVKIKKMEDKVNVLQRELSETKEIKSQLEHQKVEWERELCSLRFKINIFNCRFSLNQEEEKRRNADTLYEKIREQLRRKEEQYRKEVEVKQQLELSLQTLEMELRTVKSNLNQVVQERNDAQRQLSREQNARMLQDGILTNHLSKQKEIEMAQKKMNSENSHSHEEEKDLSHKNSMLQEEIAMLRLEIDTIKNQNQEKEKKCFEDLKIVKEKNEDLQKTIKQNEETLTQTISQYNGRLSVLTAENAMLNSKLENEKQSKERLEAEVESYHSRLAAAIHDRDQSETSKRELELAFQRARDECSRLQDKMNFDVSNLKDNNEILSQQLFKTESKLNSLEIEFHHTRDALREKTLGLERVQKDLSQTQCQMKEMEQKYQNEQVKVNKYIGKQESVEERLSQLQSENMLLRQQLDDAHNKADNKEKTVINIQDQFHAIVQKLQAESEKQSLLLEERNKELISECNHLKERQYQYENEKAEREVVVRQLQQELADTLKKQSMSEASLEVTSRYRINLEDETQDLKKKLGQIRNQLQEAQDRHTEAVRCAEKMQDHKQKLEKDNAKLKVTVKKQMDKIEELQKNLLNANLSEDEKEQLKKLMELKQSLECNLDQEMKKNVELEREITGFKNLLKMTRKKLNEYENGEFSFHGDLKTSQFEMDIQINKLKHKIDDLTAELETAGSKCLHLDTKNQILQEELLSMKTVQKKCEKLQKNKKKLEQEVINLRSHIERNMVELGQVKQYKQEIEERARQEIAEKLKEVNLFLQAQAASQENLEQFRENNFASMKSQMELRIKDLESELSKIKTSQEDFNKTELEKYKQLYLEELKVRKSLSSKLTKTNERLAEVNTKLLVEKQQSRSLFTTLTTRPVMEPPCVGNLNNSLDLNRKLIPRENLVISTSNPRASNNSMENYLSKMQQELEKNITRELKEAAAELESGSIASPLGSTDESNLNQDLVWKASREYVQVLKKNYMI

SEQ ID NO: 814415 - protein, 1428 aa, Homo sapiens
MTASQQSRKNLEATYGTVRTGNRTLFEDRDSDSQDEVVVESLPTTSIKVQCFSHPTYQSPDLLPKPSHKSLANPGLMKEEPTKPGIAKKENGIDIIESAPLEQTNNDNLTYVDEVHKNNRSDMMSALGLGQEEDIESPWDSESISENFPQKYVDPLAGAADGKEKNIGNEQAEDVFYIPSCMSGSRNFKMAKLEDTRNVGMPVAHMESPERYLHLKPTIEMKDSVPNKAGGMKDVQTSKAAEHDLEVASEEEQEREGSENNQPQVEEERKKHRNNEMEVSANIHDGATDDAEDDDDDDGLIQKRKSGETDHQQFPRKENKEYASGPALQMKEVKSTEKEKRTSKESVNSPVFGKASLLTGGLLQVDDDSSLSEIDEDEGRPTKKTSNEKNKVKNQIQSMDDVDDLTQSSETASEDCELPHSSYKNFMLLIEQLGMECKDSVSLLKIQDAALSCERLLELKKNHCELLTVKIKKMEDKVNVLQRELSETKEIKSQLEHQKVEWERELCSLRFSLNQEEEKRRNADTLYEKIREQLRRKEEQYRKEVEVKQQLELSLQTLEMELRTVKSNLNQVVQERNDAQRQLSREQNARMLQDGILTNHLSKQKEIEMAQKKMNSENSHSHEEEKDLSHKNSMLQEEIAMLRLEIDTIKNQNQEKEKKCFEDLKIVKEKNEDLQKTIKQNEETLTQTISQYNGRLSVLTAENAMLNSKLENEKQSKERLEAEVESYHSRLAAAIHDRDQSETSKRELELAFQRARDECSRLQDKMNFDVSNLKDNNEILSQQLFKTESKLNSLEIEFHHTRDALREKTLGLERVQKDLSQTQCQMKEMEQKYQNEQVKVNKYIGKQESVEERLSQLQSENMLLRQQLDDAHNKADNKEKTVINIQDQFHAIVQKLQAESEKQSLLLEERNKELISECNHLKERQYQYENEKAEREVVVRQLQQELADTLKKQSMSEASLEVTSRYRINLEDETQDLKKKLGQIRNQLQEAQDRHTEAVRCAEKMQDHKQKLEKDNAKLKVTVKKQMDKIEELQKNLLNANLSEDEKEQLKKLMELKQSLECNLDQEMKKNVELEREITGFKNLLKMTRKKLNEYENGEFSFHGDLKTSQFEMDIQINKLKHKIDDLTAELETAGSKCLHLDTKNQILQEELLSMKTVQKKCEKLQKNKKKLEQEVINLRSHIERNMVELGQVKQYKQEIEERARQEIAEKLKEVNLFLQAQAASQENLEQFRENNFASMKSQMELRIKDLESELSKIKTSQEDFNKTELEKYKQLYLEELKVRKSLSSKLTKTNERLAEVNTKLLVEKQQSRSLFTTLTTRPVMEPPCVGNLNNSLDLNRKLIPRENLVISTSNPRASNNSMENYLSKMQQELEKNITRELKEAAAELESGSIASPLGSTDESNLNQDLVWKASREYVQVLKKNYMI

SEQ ID NO: 814416 - protein, 1463 aa, Homo sapiens
RTGCAISHLTFFQTFPQVVSNPGLMNVPKPSLAKLMTASQQSRKNLEATYGTVRTGNRTLFEDRDSDSQDEVVVESLPTTSIKVQCFSHPTYQSPDLLPKPSHKSLANPGLMKEEPTKPGIAKKENGIDIIESAPLEQTNNDNLTYVDEVHKNNRSDMMSALGLGQEEDIESPWDSESISENFPQKYVDPLAGAADGKEKNIGNEQAEDVFYIPSCMSGSRNFKMAKLEDTRNVGMPVAHMESPERYLHLKPTIEMKDSVPNKAGGMKDVQTSKAAEHDLEVASEEEQEREGSENNQPQVEEERKKHRNNEMEVSANIHDGATDDAEDDDDDDGLIQKRKSGETDHQQFPRKENKEYASGPALQMKEVKSTEKEKRTSKESVNSPVFGKASLLTGGLLQVDDDSSLSEIDEDEGRPTKKTSNEKNKVKNQIQSMDDVDDLTQSSETASEDCELPHSSYKNFMLLIEQLGMECKDSVSLLKIQDAALSCERLLELKKNHCELLTVKIKKMEDKVNVLQRELSETKEIKSQLEHQKVEWERELCSLRFSLNQEEEKRRNADTLYEKIREQLRRKEEQYRKEVEVKQQLELSLQTLEMELRTVKSNLNQVVQERNDAQRQLSREQNARMLQDGILTNHLSKQKEIEMAQKKMNSENSHSHEEEKDLSHKNSMLQEEIAMLRLEIDTIKNQNQEKEKKCFEDLKIVKEKNEDLQKTIKQNEETLTQTISQYNGRLSVLTAENAMLNSKLENEKQSKERLEAEVESYHSRLAAAIHDRDQSETSKRELELAFQRARDECSRLQDKMNFDVSNLKDNNEILSQQLFKTESKLNSLEIEFHHTRDALREKTLGLERVQKDLSQTQCQMKEMEQKYQNEQVKVNKYIGKQESVEERLSQLQSENMLLRQQLDDAHNKADNKEKTVINIQDQFHAIVQKLQAESEKQSLLLEERNKELISECNHLKERQYQYENEKAEREVVVRQLQQELADTLKKQSMSEASLEVTSRYRINLEDETQDLKKKLGQIRNQLQEAQDRHTEAVRCAEKMQDHKQKLEKDNAKLKVTVKKQMDKIEELQKNLLNANLSEDEKEQLKKLMELKQSLECNLDQEMKKNVELEREITGFKNLLKMTRKKLNEYENGEFSFHGDLKTSQFEMDIQINKLKHKIDDLTAELETAGSKCLHLDTKNQILQEELLSMKTVQKKCEKLQKNKKKLEQEVINLRSHIERNMVELGQVKQYKQEIEERARQEIAEKLKEVNLFLQAQAASQENLEQFRENNFASMKSQMELRIKDLESELSKIKTSQEDFNKTELEKYKQLYLEELKVRKSLSSKLTKTNERLAEVNTKLLVEKQQSRSLFTTLTTRPVMEPPCVGNLNNSLDLNRKLIPRENLVISTSNPRASNNSMENYLSKMQQELEKNITRELKEAAAELESGSIASPLGSTDESNLNQDLVWKASREYVQVLKKNYMI

SEQ ID NO: 814417 - protein, 402 aa, Homo sapiens [sequence omitted]

SEQ ID NO: 814418 - protein, 1724 aa, Homo sapiens
MKKIFSKKGESPLGSFARRRRSSAGGGGEPGEGAYSQPGYHVRDRDLGKIHKAASAGNVAKVQQILLLRKNGLNDRDKMNRTALHLACANGHPEVVTLLVDRKCQLNVCDNENRTALMKAVQCQEEKCATILLEHGADPNLADVHGNTALHYAVYNEDISVATKLLLYDANIEAKNKDDLTPLLLAVSGKKQQMVEFLIKKKANVNAVDKLESSHQLISEYKEERIPKHSSQNSNSVDESSEDSLSRLSGKPGVDDSWPTSDDEDLNFDTKNVPKPSLAKLMTASQQSRKNLEATYGTVRTGNRTLFEDRDSDSQDEVVVESLPTTSIKVQCFSHPTYQSPDLLPKPSHKSLANPGLMKEEPTKPGIAKKENGIDIIESAPLEQTNNDNLTYVDEVHKNNRSDMMSALGLGQEEDIESPWDSESISENFPQKYVDPLAGAADGKEKNIGNEQAEDVFYIPSCMSGSRNFKMAKLEDTRNVGMPVAHMESPERYLHLKPTIEMKDSVPNKAGGMKDVQTSKAAEHDLEVASEEEQEREGSENNQPQVEEERKKHRNNEMEVSANIHDGATDDAEDDDDDDGLIQKRKSGETDHQQFPRKENKEYASGPALQMKEVKSTEKEKRTSKESVNSPVFGKASLLTGGLLQVDDDSSLSEIDEDEGRPTKKTSNEKNKVKNQIQSMDDVDDLTQSSETASEDCELPHSSYKNFMLLIEQLGMECKDSVSLLKIQDAALSCERLLELKKNHCELLTVKIKKMEDKVNVLQRELSETKEIKSQLEHQKVEWERELCSLRFSLNQEEEKRRNADTLYEKIREQLRRKEEQYRKEVEVKQQLELSLQTLEMELRTVKSNLNQVVQERNDAQRQLSREQNARMLQDGILTNHLSKQKEIEMAQKKMNSENSHSHEEEKDLSHKNSMLQEEIAMLRLEIDTIKNQNQEKEKKCFEDLKIVKEKNEDLQKTIKQNEETLTQTISQYNGRLSVLTAENAMLNSKLENEKQSKERLEAEVESYHSRLAAAIHDRDQSETSKRELELAFQRARDECSRLQDKMNFDVSNLKDNNEILSQQLFKTESKLNSLEIEFHHTRDALREKTLGLERVQKDLSQTQCQMKEMEQKYQNEQVKVNKYIGKQESVEERLSQLQSENMLLRQQLDDAHNKADNKEKTVINIQDQFHAIVQKLQAESEKQSLLLEERNKELISECNHLKERQYQYENEKAEREVVVRQLQQELADTLKKQSMSEASLEVTSRYRINLEDETQDLKKKLGQIRNQLQEAQDRHTEAVRCAEKMQDHKQKLEKDNAKLKVTVKKQMDKIEELQKNLLNANLSEDEKEQLKKLMELKQSLECNLDQEMKKNVELEREITGFKNLLKMTRKKLNEYENGEFSFHGDLKTSQFEMDIQINKLKHKIDDLTAELETAGSKCLHLDTKNQILQEELLSMKTVQKKCEKLQKNKKKLEQEVINLRSHIERNMVELGQVKQYKQEIEERARQEIAEKLKEVNLFLQAQAASQENLEQFRENNFASMKSQMELRIKDLESELSKIKTSQEDFNKTELEKYKQLYLEELKVRKSLSSKLTKTNERLAEVNTKLLVEKQQSRSLFTTLTTRPVMEPPCVGNLNNSLDLNRKLIPRENLVISTSNPRASNNSMENYLSKMQQELEKNITRELKEAAAELESGSIASPLGSTDESNLNQDLVWKASREYGPSDETPHDYVLMTDQCLTSRTDLQ

SEQ ID NO: 814419 - protein, 397 aa, Homo sapiens
MKKIFSKKGESPLGSFARRRRSSAGGGGEPGEGAYSQPGYHVRDRDLGKIHKAASAGNVAKVQQILLLRKNGLNDRDKMNRTALHLACANGHPEVVTLLVDRKCQLNVCDNENRTALMKAVQCQEEKCATILLEHGADPNLADVHGNTALHYAVYNEDISVATKLLLYDANIEAKNKDDLTPLLLAVSGKKQQMVEFLIKKKANVNAVDKLESSHQLISEYKEERIPKHSSQNSNSVDESSEDSLSRLSGKPGVDDSWPTSDDEDLNFDTKNVPKPSLAKLMTASQQSRKNLEATYGTVRTGNRTLFEDRDSDSQDEVVVESLPTTSIKVQCFSHPTYQSPDLLPKPSHKSLANPGLMKVSCFLKNFFHVPFPCPNNPHNDASIEMIIQFLFLIMFM

SEQ ID NO: 814420 - protein, 800 aa, Homo sapiens
VLAGPRRSVPCCSTRCHSPAGRRARPPEPRRGCGTVGQRAQPSLGKRQQSQRGDGERAKLTSLPPTLRPSCPEGLQPAVCRACLCARGAAPGRRPGAELFPQGGSAAQPRGSGGLATQDPAPQPRTPSGGEVWLLSGAAPDHWTAGAMPVGGLLPLFSSPAGGVLGGGLGGGGGRKGSGPAALRLTEKFVLLLVFSAFITLCFGAIFFLPDSSKLLSGVLFHSSPALQPAADHKPGPGARAEDAAEGRARRREEGAPGDPEAALEDNLARIRENHERALREAKETLQKLPEEIQRDILLEKKKVAQDQLRDKAPFRGLPPVDFVPPIGVESREPADAAIREKRAKIKEMMKHAWNNYKGYAWGLNELKPISKGGHSSSLFGNIKGATIVDALDTLFIMEMKHEFEEAKSWVEENLDFNVNAEISVFEVNIRFVGGLLSAYYLSGEEIFRKKAVELGVKLLPAFHTPSGIPWALLNMKSGIGRNWPWASGGSSILAEFGTLHLEFMHLSHLSGNPIFAEKVMNIRTVLNKLEKPQGLYPNYLNPSSGQWGQHHVSVGGLGDSFYEYLLKAWLMSDKTDLEAKKMYFDAVQAIETHLIRKSSSGLTYIAEWKGGLLEHKMGHLTCFAGGMFALGADAAPEGMAQHYLELGAEIARTCHESYNRTFMKLGPEAFRFDGGVEAIATRQNEKYYILRPEVMETYMYMWRLTHDPKYRKWAWEAVEALENHCRVNGGYSGLRDVYLLHESYDDVQQSFFLAETLKYLYLIFSDDDLLPLEHWIFNSEAHLLPILPKDKKEVEIREE

SEQ ID NO: 814421 - protein, 614 aa, Homo sapiens
MSLLPSNLFSAFITLCFGAIFFLPDSSKLLSGVLFHSSPALQPAADHKPGPGARAEDAAEGRARRREEGAPGDPEAALEDNLARIRENHERALREAKETLQKLPEEIQRDILLEKKKVAQDQLRDKAPFRGLPPVDFVPPIGVESREPADAAIREKRAKIKEMMKHAWNNYKGYAWGLNELKPISKGGHSSSLFGNIKGATIVDALDTLFIMEMKHEFEEAKSWVEENLDFNVNAEISVFEVNIRFVGGLLSAYYLSGEEIFRKKAVELGVKLLPAFHTPSGIPWALLNMKSGIGRNWPWASGGSSILAEFGTLHLEFMHLSHLSGNPIFAEKVMNIRTVLNKLEKPQGLYPNYLNPSSGQWGQHHVSVGGLGDSFYEYLLKAWLMSDKTDLEAKKMYFDAVQAIETHLIRKSSSGLTYIAEWKGGLLEHKMGHLTCFAGGMFALGADAAPEGMAQHYLELGAEIARTCHESYNRTFMKLGPEAFRFDGGVEAIATRQNEKYYILRPEVMETYMYMWRLTHDPKYRKWAWEAVEALENHCRVNGGYSGLRDVYLLHESYDDVQQSFFLAETLKYLYLIFSDDDLLPLEHWIFNSEAHLLPILPKDKKEVEIREE

SEQ ID NO: 814422 - protein, 614 aa, Homo sapiens; identical to SEQ ID NO: 814421

SEQ ID NO: 814423 - protein, 614 aa, Homo sapiens; identical to SEQ ID NO: 814421

SEQ ID NO: 814424 - protein, 464 aa, Homo sapiens
MYGEMEVCPFHQMMKHAWNNYKGYAWGLNELKPISKGGHSSSLFGNIKGATIVDALDTLFIMEMKHEFEEAKSWVEENLDFNVNAEISVFEVNIRFVGGLLSAYYLSGEEIFRKKAVELGVKLLPAFHTPSGIPWALLNMKSGIGRNWPWASGGSSILAEFGTLHLEFMHLSHLSGNPIFAEKVMNIRTVLNKLEKPQGLYPNYLNPSSGQWGQHHVSVGGLGDSFYEYLLKAWLMSDKTDLEAKKMYFDAVQAIETHLIRKSSSGLTYIAEWKGGLLEHKMGHLTCFAGGMFALGADAAPEGMAQHYLELGAEIARTCHESYNRTFMKLGPEAFRFDGGVEAIATRQNEKYYILRPEVMETYMYMWRLTHDPKYRKWAWEAVEALENHCRVNGGYSGLRDVYLLHESYDDVQQSFFLAETLKYLYLIFSDDDLLPLEHWIFNSEAHLLPILPKDKKEVEIREE

SEQ ID NO: 814425 - protein, 614 aa, Homo sapiens; identical to SEQ ID NO: 814421

SEQ ID NO: 814426 - protein, 446 aa, Homo sapiens
MYGEMEVCPFHQMMKHAWNNYKGYAWGLNELKPISKGGHSSSLFGNIKGATIVDALDTLFIMEMKHEFEEAKSWVEGFVGGLLSAYYLSGEEIFRKKAVELGVKLLPAFHTPSGIPWALLNMKSGIGRNWPWASGGSSILAEFGTLHLEFMHLSHLSGNPIFAEKVMNIRTVLNKLEKPQGLYPNYLNPSSGQWGQHHVSVGGLGDSFYEYLLKAWLMSDKTDLEAKKMYFDAVQAIETHLIRKSSSGLTYIAEWKGGLLEHKMGHLTCFAGGMFALGADAAPEGMAQHYLELGAEIARTCHESYNRTFMKLGPEAFRFDGGVEAIATRQNEKYYILRPEVMETYMYMWRLTHDPKYRKWAWEAVEALENHCRVNGGYSGLRDVYLLHESYDDVQQSFFLAETLKYLYLIFSDDDLLPLEHWIFNSEAHLLPILPKDKKEVEIREE

SEQ ID NO: 814427 - protein, 296 aa, Homo sapiens [sequence omitted]

SEQ ID NO: 814428 - protein, 464 aa, Homo sapiens; identical to SEQ ID NO: 814424

SEQ ID NO: 814429 - protein, 614 aa, Homo sapiens; identical to SEQ ID NO: 814421

SEQ ID NO: 814430 - protein, 614 aa, Homo sapiens; identical to SEQ ID NO: 814421

SEQ ID NO: 814431 - protein, 142 aa, Homo sapiens
MYGEMEVCPFHQMMKHAWNNYKGYAWGLNELKPISKGGHSSSLFGNIKGATIVDALDTLFIMEMKHEFEEAKSWVEENLDFNVNAEISVFEVNIRFVGGLLSAYYLSGEEIFRKKAVELGVKLLPAFHTPSGIPWALLNMKR

SEQ ID NO: 814432 - protein, 45 aa, Homo sapiens
MELFTVNKEKGKSLLLGPSSGGGSIPETVRGAASGVLCVADADPS

SEQ ID NO: 814433 - protein, 985 aa, Homo sapiens
QAAAWVAQLPGQRCLSRRVPCVRRGCRPPLPPLPGSQSRAWSRDREAPLDPGRPAQSGRRPTSRSVSHACSWNGGSLDPLEGTPALLRSAERLMRKVKKLRLDKENTGSWRSFSLNSEGAERMATTGTPTADRGDAAATDDPAARFQVQKHSWDGLRSIIHGSRKYSGLIVNKAPHDFQFVQKTDESGPHSHRLYYLGMPYGSRENSLLYSEIPKKVRKEALLLLSWKQMLDHFQATPHHGVYSREEELLRERKRLGVFGITSYDFHSESGLFLFQASNSLFHCRDGGKNGFMVSPMKPLEIKTQCSGPRMDPKICPADPAFFSFINNSDLWVANIETGEERRLTFCHQGLSNVLDDPKSAGVATFVIQEEFDRFTGYWWCPTASWEGSEGLKTLRILYEEVDESEVEVIHVPSPALEERKTDSYRYPRTGSKNPKIALKLAEFQTDSQGKIVSTQEKELVQPFSSLFPKVEYIARAGWTRDGKYAWAMFLDRPQQWLQLVLLPPALFIPSTENEEQRLASARAVPRNVQPYVVYEEVTNVWINVHDIFYPFPQSEGEDELCFLRANECKTGFCHLYKVTAVLKSQGYDWSEPFSPGEDEFKCPIKEEIALTSGEWEVLARHGSKIWVNEETKLVYFQGTKDTPLEHHLYVVSYEAAGEIVRLTTPGFSHSCSMSQNFDMFVSHYSSVSTPPCVHVYKLSGPDDDPLHKQPRFWASMMEAASCPPDYVPPEIFHFHTRSDVRLYGMIYKPHALQPGKKHPTVLFVYGGPQVQLVNNSFKGIKYLRLNTLASLGYAVVVIDGRGSCQRGLRFEGALKNQMGQVEIEDQVEGLQFVAEKYGFIDLSRVAIHGWSYGGFLSLMGLIHKPQVFKVAIAGAPVTVWMAYDTGYTERYMDVPENNQHGYEAGSVALHVEKLPNEPNRLLILHGFLDENVHFFHTNFLVSQLIRAGKPYQLQIYPNERHSIRCPESGEHYEVTLLHFLQEYL

SEQ ID NO: 814434 - protein, 822 aa, Homo sapiens
QAAAWVAQLPGQRCLSRRVPCVRRGCRPPLPPLPGSQSRAWSRDREAPLDPGRPAQSGRRPTSRSVSHACSWNGGSLDPLEGTPALLRSAERLMRKVKKLRLDKENTGSWRSFSLNSEGAERMATTGTPTADRGDAAATDDPAARFQVQKHSWDGLRSIIHGSRKYSGLIVNIETGEERRLTFCHQGLSNVLDDPKSAGVATFVIQEEFDRFTGYWWCPTASWEGSEGLKTLRILYEEVDESEVEVIHVPSPALEERKTDSYRYPRTGSKNPKIALKLAEFQTDSQGKIVSTQEKELVQPFSSLFPKVEYIARAGWTRDGKYAWAMFLDRPQQWLQLVLLPPALFIPSTENEEQRLASARAVPRNVQPYVVYEEVTNVWINVHDIFYPFPQSEGEDELCFLRANECKTGFCHLYKVTAVLKSQGYDWSEPFSPGEDEFKCPIKEEIALTSGEWEVLARHGSKIWVNEETKLVYFQGTKDTPLEHHLYVVSYEAAGEIVRLTTPGFSHSCSMSQNFDMFVSHYSSVSTPPCVHVYKLSGPDDDPLHKQPRFWASMMEAASCPPDYVPPEIFHFHTRSDVRLYGMIYKPHALQPGKKHPTVLFVYGGPQVQLVNNSFKGIKYLRLNTLASLGYAVVVIDGRGSCQRGLRFEGALKNQMGQVEIEDQVEGLQFVAEKYGFIDLSRVAIHGWSYGGFLSLMGLIHKPQVFKVAIAGAPVTVWMAYDTGYTERYMDVPENNQHGYEAGSVALHVEKLPNEPNRLLILHGFLDENVHFFHTNFLVSQLIRAGKPYQLQIYPNERHSIRCPESGEHYEVTLLHFLQEYL

SEQ ID NO: 814435 - protein, 711 aa, Homo sapiens
ALTRLCSFGVFALLGSLLMVSPMKPLEIKTQCSGPRMDPKICPADPAFFSFINNSDLWVANIETGEERRLTFCHQGLSNVLDDPKSAGVATFVIQEEFDRFTGYWWCPTASWEGSEGLKTLRILYEEVDESEVEVIHVPSPALEERKTDSYRYPRTGSKNPKIALKLAEFQTDSQGKIVSTQEKELVQPFSSLFPKVEYIARAGWTRDGKYAWAMFLDRPQQWLQLVLLPPALFIPSTENEEQRLASARAVPRNVQPYVVYEEVTNVWINVHDIFYPFPQSEGEDELCFLRANECKTGFCHLYKVTAVLKSQGYDWSEPFSPGEDEFKCPIKEEIALTSGEWEVLARHGSKIWVNEETKLVYFQGTKDTPLEHHLYVVSYEAAGEIVRLTTPGFSHSCSMSQNFDMFVSHYSSVSTPPCVHVYKLSGPDDDPLHKQPRFWASMMEAASCPPDYVPPEIFHFHTRSDVRLYGMIYKPHALQPGKKHPTVLFVYGGPQVQLVNNSFKGIKYLRLNTLASLGYAVVVIDGRGSCQRGLRFEGALKNQMGQVEIEDQVEGLQFVAEKYGFIDLSRVAIHGWSYGGFLSLMGLIHKPQVFKVAIAGAPVTVWMAYDTGYTERYMDVPENNQHGYEAGSVALHVEKLPNEPNRLLILHGFLDENVHFFHTNFLVSQLIRAGKPYQLQIYPNERHSIRCPESGEHYEVTLLHFLQEYL

SEQ ID NO: 814436 - protein, 522 aa, Homo sapiens
DAWVDPRRPYIARSGWTRDGKYAWAMFLDRPQQWLQLVLLPPALFIPSTENEEQRLASARAVPRNVQPYVVYEEVTNVWINVHDIFYPFPQSEGEDELCFLRANECKTGFCHLYKVTAVLKSQGYDWSEPFSPGEDEFKCPIKEEIALTSGEWEVLARHGSKIWVNEETKLVYFQGTKDTPLEHHLYVVSYEAAGEIVRLTTPGFSHSCSMSQNFDMFVSHYSSVSTPPCVHVYKLSGPDDDPLHKQPRFWASMMEAASCPPDYVPPEIFHFHTRSDVRLYGMIYKPHALQPGKKHPTVLFVYGGPQVQLVNNSFKGIKYLRLNTLASLGYAVVVIDGRGSCQRGLRFEGALKNQMGQVEIEDQVEGLQFVAEKYGFIDLSRVAIHGWSYGGFLSLMGLIHKPQVFKVAIAGAPVTVWMAYDTGYTERYMDVPENNQHGYEAGSVALHVEKLPNEPNRLLILHGFLDENVHFFHTNFLVSQLIRAGKPYQLQIYPNERHSIRCPESGEHYEVTLLHFLQEYL

SEQ ID NO: 814437 - protein, 515 aa, Homo sapiens
MVALGFKTAVTLYKWQKPVLHFIGAEKAELVLLPPALFIPSTENEEQRLASARAVPRNVQPYVVYEEVTNVWINVHDIFYPFPQSEGEDELCFLRANECKTGFCHLYKVTAVLKSQGYDWSEPFSPGEDEFKCPIKEEIALTSGEWEVLARHGSKIWVNEETKLVYFQGTKDTPLEHHLYVVSYEAAGEIVRLTTPGFSHSCSMSQNFDMFVSHYSSVSTPPCVHVYKLSGPDDDPLHKQPRFWASMMEAASCPPDYVPPEIFHFHTRSDVRLYGMIYKPHALQPGKKHPTVLFVYGGPQVQLVNNSFKGIKYLRLNTLASLGYAVVVIDGRGSCQRGLRFEGALKNQMGQVEIEDQVEGLQFVAEKYGFIDLSRVAIHGWSYGGFLSLMGLIHKPQVFKVAIAGAPVTVWMAYDTGYTERYMDVPENNQHGYEAGSVALHVEKLPNEPNRLLILHGFLDENVHFFHTNFLVSQLIRAGKPYQLQIYPNERHSIRCPESGEHYEVTLLHFLQEYL

SEQ ID NO: 814438 - protein, 466 aa, Homo sapiens
GITGVSHHARPPTPSDSIFYLLSGQVHDIFYPFPQSEGEDELCFLRANECKTGFCHLYKVTAVLKSQGYDWSEPFSPGEDEFKCPIKEEIALTSGEWEVLARHGSKIWVNEETKLVYFQGTKDTPLEHHLYVVSYEAAGEIVRLTTPGFSHSCSMSQNFDMFVSHYSSVSTPPCVHVYKLSGPDDDPLHKQPRFWASMMEAASCPPDYVPPEIFHFHTRSDVRLYGMIYKPHALQPGKKHPTVLFVYGGPQVQLVNNSFKGIKYLRLNTLASLGYAVVVIDGRGSCQRGLRFEGALKNQMGQVEIEDQVEGLQFVAEKYGFIDLSRVAIHGWSYGGFLSLMGLIHKPQVFKVAIAGAPVTVWMAYDTGYTERYMDVPENNQHGYEAGSVALHVEKLPNEPNRLLILHGFLDENVHFFHTNFLVSQLIRAGKPYQLQIYPNERHSIRCPESGEHYEVTLLHFLQEYL

SEQ ID NO: 814439 - protein, 925 aa, Homo sapiens
QAAAWVAQLPGQRCLSRRVPCVRRGCRPPLPPLPGSQSRAWSRDREAPLDPGRPAQSGRRPTSRSVSHACSWNGGSLDPLEGTPALLRSAERLMRKVKKLRLDKENTGSWRSFSLNSEGAERMATTGTPTADRGDAAATDDPAARFQVQKHSWDGLRSIIHGSRKYSGLIVNKAPHDFQFVQKTDESGPHSHRLYYLGMPYGSRENSLLYSEIPKKVRKEALLLLSWKQMLDHFQATPHHGVYSREEELLRERKRLGVFGITSYDFHSESGLFLFQASNSLFHCRDGGKNGFMVSPMKPLEIKTQCSGPRMDPKICPADPAFFSFINNSDLWVANIETGEERRLTFCHQGLSNVLDDPKSAGVATFVIQEEFDRFTGYWWCPTASWEGSEGLKTLRILYEEVDESEVEVIHVPSPALEERKTDSYRYPRTGSKNPKIALKLAEFQTDSQGKIVSTQEKELVQPFSSLFPKVEYIARAGWTRDGKYAWAMFLDRPQQWLQLVLLPPALFIPSTENEEQRLASARAVPRNVQPYVVYEEVTNVWINVHDIFYPFPQSEGEDELCFLRANECKTGFCHLYKVTAVLKSQGYDWSEPFSPGEDEFKCPIKEEIALTSGEWEVLARHGSKIWVNEETKLVYFQGTKDTPLEHHLYVVSYEAAGEIVRLTTPGFSHSCSMSQNFDMFVSHYSSVSTPPCVHVYKLSGPDDDPLHKQPRFWASMMEAASCPPDYVPPEIFHFHTRSDVRLYGMIYKPHALQPGKKHPTVLFVYGGPQVQLVNNSFKGIKYLRLNTLASLGYAVVVIDGRGSCQRGLRFEGALKNQMGQVEIEDQVEGLQFVAEKYGFIDLSRVAIHGWSYGGFLSLMGLIHKPQVFKAQPLAYPPRLPGRKRALFPHKLPRLPTDPSRETLPAPDLPQRETQYSLPRVGRAL

SEQ ID NO: 814440 - protein, 1027 aa, Homo sapiens
  misc_feature (937)..(937): Xaa can be any naturally occurring amino acid
  misc_feature (944)..(944): Xaa can be any naturally occurring amino acid
QAAAWVAQLPGQRCLSRRVPCVRRGCRPPLPPLPGSQSRAWSRDREAPLDPGRPAQSGRRPTSRSVSHACSWNGGSLDPLEGTPALLRSAERLMRKVKKLRLDKENTGSWRSFSLNSEGAERMATTGTPTADRGDAAATDDPAARFQVQKHSWDGLRSIIHGSRKYSGLIVNKAPHDFQFVQKTDESGPHSHRLYYLGMPYGSRENSLLYSEIPKKVRKEALLLLSWKQMLDHFQATPHHGVYSREEELLRERKRLGVFGITSYDFHSESGLFLFQASNSLFHCRDGGKNGFMVSPMKPLEIKTQCSGPRMDPKICPADPAFFSFINNSDLWVANIETGEERRLTFCHQGLSNVLDDPKSAGVATFVIQEEFDRFTGYWWCPTASWEGSEGLKTLRILYEEVDESEVEVIHVPSPALEERKTDSYRYPRTGSKNPKIALKLAEFQTDSQGKIVSTQEKELVQPFSSLFPKVEYIARAGWTRDGKYAWAMFLDRPQQWLQLVLLPPALFIPSTENEEQRLASARAVPRNVQPYVVYEEVTNVWINVHDIFYPFPQSEGEDELCFLRANECKTGFCHLYKVTAVLKSQGYDWSEPFSPGEDEFKCPIKEEIALTSGEWEVLARHGSKIWVNEETKLVYFQGTKDTPLEHHLYVVSYEAAGEIVRLTTPGFSHSCSMSQNFDMFVSHYSSVSTPPCVHVYKLSGPDDDPLHKQPRFWASMMEAASCPPDYVPPEIFHFHTRSDVRLYGMIYKPHALQPGKKHPTVLFVYGGPQVQLVNNSFKGIKYLRLNTLASLGYAVVVIDGRGSCQRGLRFEGALKNQMGQVEIEDQVEGLQFVAEKYGFIDLSRVAIHGWSYGGFLSLMGLIHKPQVFKVAIAGAPVTVWMAYDTGYTERYMDVPENNQHGYEAGSVALHVEKLPNDVRMACPKEPPNPAFAFNPXPTWRFPXVFNRKKRCNTYIFRQAKAKNNGFPQFTVIPFPPKNLGKFPGNAQGGKTLPSSQIYPNERHSIRCPESGEHYEVTLLHFLQEYL

SEQ ID NO: 814441 - protein, 363 aa, Homo sapiens
WRIRHEGEVLARHGSKGTKDTPLEHHLYVVSYEAAGEIVRLTTPGFSHSCSMSQNFDMFVSHYSSVSTPPCVHVYKLSGPDDDPLHKQPRFWASMMEAASCPPDYVPPEIFHFHTRSDVRLYGMIYKPHALQPGKKHPTVLFVYGGPQVQLVNNSFKGIKYLRLNTLASLGYAVVVIDGRGSCQRGLRFEGALKNQMGQVEIEDQVEGLQFVAEKYGFIDLSRVAIHGWSYGGFLSLMGLIHKPQVFKVAIAGAPVTVWMAYDTGYTERYMDVPENNQHGYEAGSVALHVEKLPNEPNRLLILHGFLDENVHFFHTNFLVSQLIRAGKPYQLQIYPNERHSIRCPESGEHYEVTLLHFLQEYL

SEQ ID NO: 814442 - protein, 985 aa, Homo sapiens; identical to SEQ ID NO: 814433

SEQ ID NO: 814443 - protein, 985 aa, Homo sapiens; identical to SEQ ID NO: 814433

SEQ ID NO: 814444 - protein, 611 aa, Homo sapiens
QAAAWVAQLPGQRCLSRRVPCVRRGCRPPLPPLPGSQSRAWSRDREAPLDPGRPAQSGRRPTSRSVSHACSWNGGSLDPLEGTPALLRSAERLMRKVKKLRLDKENTGSWRSFSLNSEGAERMATTGTPTADRGDAAATDDPAARFQVQKHSWDGLRSIIHGSRKYSGLIVNKAPHDFQFVQKTDESGPHSHRLYYLGMPYGSRENSLLYSEIPKKVRKEALLLLSWKQMLDHFQATPHHGVYSREEELLRERKRLGVFGITSYDFHSESGLFLFQASNSLFHCRDGGKNGFMVSPMKPLEIKTQCSGPRMDPKICPADPAFFSFINNSDLWVANIETGEERRLTFCHQGLSNVLDDPKSAGVATFVIQEEFDRFTGYWWCPTASWEGSEGLKTLRILYEEVDESEVEVIHVPSPALEERKTDSYRYPRTGSKNPKIALKLAEFQTDSQGKIVSTQEKELVQPFSSLFPKVEYIARAGWTRDGKYAWAMFLDRPQQWLQLVLLPPALFIPSTENEEQRLASARAVPRNVQPYVVYEEVTNVWINVHDIFYPFPQSEGEDELCFLRANECKTGFCHLYKVTAVLKSQGYDWSEPFSPGEGEQSLTNAVDSSR

SEQ ID NO: 814445 - protein, 133 aa, Homo sapiens [sequence omitted]

SEQ ID NO: 814446 - protein, 932 aa, Homo sapiens
QAAAWVAQLPGQRCLSRRVPCVRRGCRPPLPPLPGSQSRAWSRDREAPLDPGRPAQSGRRPTSRSVSHACSWNGGSLDPLEGTPALLRSAERLMRKVKKLRLDKENTGSWRSFSLNSEGAERMATTGTPTADRGDAAATDDPAARFQVQKHSWDGLRSIIHGSRKYSGLIVNKAPHDFQFVQKTDESGPHSHRLYYLGMPYGSRENSLLYSEIPKKVRKEALLLLSWKQMLDHFQATPHHGVYSREEELLRERKRLGVFGITSYDFHSESGLFLFQASNSLFHCRDGGKNGFMVSPMKPLEIKTQCSGPRMDPKICPADPAFFSFINNSDLWVANIETGEERRLTFCHQGLSNVLDDPKSAGVATFVIQEEFDRFTGYWWCPTASWEGSEGLKTLRILYEEVDESEVEVIHVPSPALEERKTDSYRYPRTGSKNPKIALKLAEFQTDSQGKIVSTQEKELVQPFSSLFPKVEYIARAGWTRDGKYAWAMFLDRPQQWLQLVLLPPALFIPSTENEEQRLASARAVPRNVQPYVVYEEVTNVWINVHDIFYPFPQSEGEDELCFLRANECKTGFCHLYKVTAVLKSQGYDWSEPFSPGEDEFKCPIKEEIALTSGEWEVLARHGSKIWVNEETKLVYFQGTKDTPLEHHLYVVSYEAAGEIVRLTTPGFSHSCSMSQNFDMFVSHYSSVSTPPCVHVYKLSGPDDDPLHKQPRFWASMMEAASCPPDYVPPEIFHFHTRSDVRLYGMIYKPHALQPGKKHPTVLFVYGGPQVQLVNNSFKGIKYLRLNTLASLGYAVVVIDGRGSCQRGLRFEGALKNQMGQVEIEDQVEGLQFVAEKYGFIDLSRVAIHGWSYGGFLSLMGLIHKPQVFKVAIAGAPVTVWMAYDTGYTERYMDVPENNQHGYEAGSVALHVEKLPNDHEPPKVHTMPRTTR

SEQ ID NO: 814447 - protein, 660 aa, Homo sapiens
QAAAWVAQLPGQRCLSRRVPCVRRGCRPPLPPLPGSQSRAWSRDREAPLDPGRPAQSGRRPTSRSVSHACSWNGGSLDPLEGTPALLRSAERLMRKVKKLRLDKENTGSWRSFSLNSEGAERMATTGTPTADRGDAAATDDPAARFQVQKHSWDGLRSIIHGSRKYSGLIVNKAPHDFQFVQKTDESGPHSHRLYYLGMPYGSRENSLLYSEIPKKVRKEALLLLSWKQMLDHFQATPHHGVYSREEELLRERKRLGVFGITSYDFHSESGLFLFQASNSLFHCRDGGKNGFMVSPMKPLEIKTQCSGPRMDPKICPADPAFFSFINNSDLWVANIETGEERRLTFCHQGLSNVLDDPKSAGVATFVIQEEFDRFTGYWWCPTASWEGSEGLKTLRILYEEVDESEVEVIHVPSPALEERKTDSYRYPRTGSKNPKIALKLAEFQTDSQGKIVSTQEKELVQPFSSLFPKVEYIARAGWTRDGKYAWAMFLDRPQQWLQLVLLPPALFIPSTENEEQRLASARAVPRNVQPYVVYEEVTNVWINVHDIFYPFPQSEGEDELCFLRANECKTGFCHLYKVTAVLKSQGYDWSEPFSPGEDEFKCPIKEEIALTSGEWEVLARHGSKICVNEETSGVLHGPGHPLSHSSGRMRGGNSLHRFL

SEQ ID NO: 814448 - protein, 70 aa, Homo sapiens
LSWSGRLEEFSVAAIVKIIHTSGGQKSKIKVSSGPRSLWRLQRRTSPGLLQLLVAASIPWLVATTLELLA

SEQ ID NO: 814449 - protein, 500 aa, Homo sapiens
CIERAPAAGTEGAAPALGALGYSCGARGLRALAPGPCWRRRNRGDLGRRRRALGGPRHAELGMRTLLPPALLTCWLLAPVNSIHPECRFHLEIQEEETKCAELLRSQTEKHKACSGVWDNITCWRPANVGETVTVPCPKVFSNFYSKAGNISKNCTSDGWSETFPDFVDACGYSDPEDESKITFYILVKAIYTLGYSVSLMSLATGSIILCLFRKLHCTRNYIHLNLFLSFILRAISVLVKDDVLYSSSGTLHCPDQPSSWVGCKLSLVFLQYCIMANFFWLLVEGLYLHTLLVAMLPPRRCFLAYLLIGWGLPTVCIGAWTAARLYLEDTGCWDTNDHSVPWWVIRIPILISIIVNFVLFISIIRILLQKLTSPDVGGNDQSQYKRLAKSTLLLIPLFGVHYMVFAVFPISISSKYQILFELCLGSFQGLVVAVLYCFLNSEVQCELKRKWRSRCPTPSASRDYRVCGSSFSRNGSEGALQFHRGSRAQSFLQTETSVI

SEQ ID NO: 814450 - protein, 500 aa, Homo sapiens; identical to SEQ ID NO: 814449

SEQ ID NO: 814451 - protein, 500 aa, Homo sapiens; identical to SEQ ID NO: 814449

SEQ ID NO: 814452 - protein, 139 aa, Homo sapiens
CIERAPAAGTEGAAPALGALGYSCGARGLRALAPGPCWRRRNRGDLGRRRRALGGPRHAELGMRTLLPPALLTCWLLAPVNSIHPECRFHLEIQEEETKCAELLRSQTEKHKGHTKGFILIHAGGLKRILDPHTYPLAP

SEQ ID NO: 814453 - protein, 500 aa, Homo sapiens; identical to SEQ ID NO: 814449

SEQ ID NO: 814454 - protein, 500 aa, Homo sapiens; identical to SEQ ID NO: 814449

SEQ ID NO: 814455 - protein, 228 aa, Homo sapiens [sequence omitted]

SEQ ID NO: 814456 - protein, 228 aa, Homo sapiens [sequence omitted]

SEQ ID NO: 814457 - protein, 641 aa, Homo sapiens
CIERAPAAGTEGAAPALGALGYSCGARGLRALAPGPCWRRRNRGDLGRRRRALGGPRHAELGMRTLLPPALLTCWLLAPVSAPATPAPRRLGPGSPLPRRALLPPVFAFLPGAGARAGSGRGSGVARGPELPPGEREALSSGPAGLRDSGWEAACALPRAPPSGVCWKRDRFFLDASTMSSFGAVPGAGSCGRLRGLRVSRGDRGWRWPQMPLGPSLYLLVNSIHPECRFHLEIQEEETKCAELLRSQTEKHKACSGVWDNITCWRPANVGETVTVPCPKVFSNFYSKAGNISKNCTSDGWSETFPDFVDACGYSDPEDESKITFYILVKAIYTLGYSVSLMSLATGSIILCLFRKLHCTRNYIHLNLFLSFILRAISVLVKDDVLYSSSGTLHCPDQPSSWVGCKLSLVFLQYCIMANFFWLLVEGLYLHTLLVAMLPPRRCFLAYLLIGWGLPTVCIGAWTAARLYLEDTGCWDTNDHSVPWWVIRIPILISIIVNFVLFISIIRILLQKLTSPDVGGNDQSQYKRLAKSTLLLIPLFGVHYMVFAVFPISISSKYQILFELCLGSFQGLVVAVLYCFLNSEVQCELKRKWRSRCPTPSASRDYRVCGSSFSRNGSEGALQFHRGSRAQSFLQTETSVI

SEQ ID NO: 814458 - protein, 228 aa, Homo sapiens [sequence omitted]

SEQ ID NO: 814459 - protein, 228 aa, Homo sapiens [sequence omitted]

SEQ ID NO: 814460 - protein, 228 aa, Homo sapiens [sequence omitted]

SEQ ID NO: 814461 - protein, 500 aa, Homo sapiens; identical to SEQ ID NO: 814449

SEQ ID NO: 814462 - protein, 176 aa, Homo sapiens
MVFAVFPISISSKYQILFELCLGSFQGLVVAVLYCFLNSEVSSWPPWNQAQVLTCFLRCCPAWCRSPHTCLSSAGSSYCPGPHSSVSPSENPQRHRQTHSSGGWGCTASCESLGRKPGAELCPAFIPSQGGCLRAAPTAWPRPLTPDPPAPRCGCWRFLCLTCSFHQHGFCKAEPE

SEQ ID NO: 814463 - protein, 117 aa, Homo sapiens
WSLALSPRLECGGTVSAHCNLHLPGSSDSPASASQVAEITEMHHHAQLILYSLVETGFLHVGQAGLELPTSDDPPASASHSAGITGVSERARPTTAFLFKNFPPTFYFEHLLIPQKR

SEQ ID NO: 814464 - protein, 373 aa, Homo sapiens
LLEIAAASRAVWSVRSWPRAAMLRLLASGCARGPGPGVGARPAAGLFHPGRRQSRQASDAPRNQPPSPEFVARPVGVCSMMRLPVQTSPEGLDAAFIGVPLDTGTSNRPGARFGPRRIREESVMLRTVNPSTGALPFQSLMVADLGDVNVNLYNLQDSCRRIQEACEKIVAAGCIPLTLGGDHTITYPILQAMAKKHGPVGLLHVDAHTDTTDKALGEKLYHGAPFRRCVDEGLLDCKRVVQIGIRGSSTTLDPYRYNRSQGFRVVLAEDCWMKSLVPLMGEVRQQMGGKPIYISFDIDALDPAYAPGTGTPEIAGLTPSQALEIIRGCQGLNVMGCDLVEVSPPYDLSGNTALLAANLLFEMLCALPKVTTV

SEQ ID NO: 814465 - protein, 804 aa, Homo sapiens [sequence omitted]

SEQ ID NO: 814466 - protein, 804 aa, Homo sapiens [sequence omitted]

SEQ ID NO: 814467 - protein, 857 aa, Homo sapiens [sequence omitted]

SEQ ID NO: 814468 - protein, 505 aa, Homo sapiens
FPQGSAIPRGSEVSTPLSPLCDNGVLTYHPSLHDYMQNVHGKEIDLLRTTVKVPGKRPPRATSACAPISSPKTNGLSKDMSSLHISPNSGNVTSASGSQMASGISLVSFNSRPDGMHQRSYSVSSADQWSEATVIANSAISSDTGLGDSVCSSPSISSTTSPKLDPPPSPHANRKKHRRKKSTSNFKADGLSGTAEEQEENFEFIIVSLTGQTWHFEATTYEERDAWVQAIESQILASLQSCESSKNKSRLTSQSEAMALQSIRNMRGNSHCVDCETQNPNWASLNLGALMCIECSGIHRNLGTHLSRVRSLDLDDWPIELIKVMSSIGNELANSVWEESSQGRTKPSVDSTREEKERWIRAKYEQKLFLAPLPCTELSLGQHLLRATADEDLRTAILLLAHGSRDEVNETCGEGDGRTALHLACRKGNVVLAQLLIWYGVDVTARDAHGNTALAYARQASSQECIDVLLQYGCPDERFVLMATPNLSRRNNNRNNSSGRVPTII

SEQ ID NO: 814469 - protein, 705 aa, Homo sapiens
MNYQQQLANSAAIRAEIQRFESVHPNIYSIYELLERVEEPVLQNQIREHVIAIEDAFVNSQEWTLSRSVPELKVGIVGNLASGKSALVHRYLTGTYVQEESPEGGRFKKEIVVDGQSYLLLIRDEGGPPEAQFAMWVDAVIFVFSLEDEISFQTVYHYYSRMANYRNTSEIPLVLVGTQDAISSANPRVIDDARARKLSNDLKRCTYYETCATYGLNVERVFQDVAQKIVATRKKQQLSIGPCKSLPNSPSHSSVCSAQVSAVHISQTSNGGGSLSDYSSSVPSTPSTSQKELRIDVPPTANTPTPVRKQSKRRSNLFTSRKGSDPDKEKKGLESRADSIGSGRAIPIKQGMLLKRSGKSLNKEWKKKYVTLCDNGVLTYHPSLHDYMQNVHGKEIDLLRTTVKVPGKRPPRATSACAPISSPKTNGLSKDMSSLHISPNSGNVTSASGSQMASGISLVSFNSRPDGMHQRSYSVSSADQWSEATVIANSAISSDTGLGDSVCSSPSISSTTSPKLDPPPSPHANRKKHRRKKSTSNFKADGLSGTAEEQEENFEFIIVSLTGQTWHFEATTYEERDAWVQAIESQILASLQSCESSKNKSRLTSQSEAMALQSIRNMRGNSHCVDCETQNPNWASLNLGALMCIECSGIHRNLGTHLSRVRSLDLDDWPIELIKVMSSIGNELANSVWEESSQGRTKPSVDSTR

SEQ ID NO: 814470 - protein, 468 aa, Homo sapiens
  misc_feature (468)..(468): Xaa can be any naturally occurring amino acid
MNYQQQLANSAAIRAEIQRFESVHPNIYSIYELLERVEEPVLQNQIREHVIAIEDAFVNSQEWTLSRSVPELKVGIVGNLASGKSALVHRYLTGTYVQEESPEGGRFKKEIVVDGQSYLLLIRDEGGPPEAQFAMWVDAVIFVFSLEDEISFQTVYHYYSRMANYRNTSEIPLVLVGTQDAISSANPRVIDDARARKLSNDLKRCTYYETCATYGLNVERVFQDVAQKIVATRKKQQLSIGPCKSLPNSPSHSSVCSAQVSAVHISQTSNGGGSLSDYSSSVPSTPSTSQKELRIDVPPTANTPTPVRKQSKRRSNLFTSRKGSDPDKEKKGLESRADSIGSGRAIPIKQGMLLKRSGKSLNKEWKKKYVTLCDNGVLTYHPSLHDTAGMSWYEMAFWDTGKVQKRHEHFTGHLSELNMRFAVLYFNPGGKLVKEDRLRRGQLTSGGGEAQGVRANSPKKRVGSVAAX

SEQ ID NO: 814471 - protein, 62 aa, Homo sapiens
HCAVTFWSSVPDAISSANPRVIDDARARKLSNDLKRCTYYETCATYGLNVERVFQDGKCAWL

SEQ ID NO: 814472 - protein, 1120 aa, Homo sapiens
SGLAAGRRRGAEAPRAAASRGCPGHAPHPLSDARAASPAATPRSALGLERPPPQLLTLGSPSPRGTGARLGEPRAWCDGAVRSALRRPQTPATRRLRALQNVAADPAPPGLQQQSPPPPGSSSQLLCLSGTRRRLRVPRIPGSRPPPSSRLRDSSSGLRDPLGSSHCTRAPQTQAPAVVSALPGIQLSRQYPRGQRHRPHPARSEPGRASAVEMNAPLDGLSVSSSSTGSLGSAAGAGGGGGAGLRLLSANVRQLHQALTALLSEAEREQFTHCLNAYHARRNVFDLVRTLRVLLDSPVKRRLLPMLRLVIPRSDQLLFDQYTAEGLYLPATTPYRQPAWGGPDSAGPGEVRLVSLRRAKAHEGLGFSIRGGSEHGVGIYVSLVEPGSLAEKEGLRVGDQILRVNDKSLARVTHAEAVKALKGSKKLVLSVYSAGRIPGGYVTNHIYTWVDPQGRSISPPSGLPQPHGGALRQQEGDRRSTLHLLQGGDEKKVNLVLGDGRSLGLTIRGGAEYGLGIYITGVDPGSEAEGSGLKVGDQILEVNGRSFLNILHDEAVRLLKSSRHLILTVKDVGRLPHARTTVDETKWIASSRIRETMANSAGFLGDLTTEGINKPGFYKGPAGSQVTLSSLGNQTRVLLEEQARHLLNEQEHATMAYYLDEYRGGSVSVEALVMALFKLLNTHAKFSLLSEVRGTISPQDLERFDHLVLRREIESMKARQPPGPGAGDTYSMVSYSDTGSSTGSHGTSTTVSSARNTLDLEETGEAVQGNINALPDVSVDDVRSTSQGLSSFKPLPRPPPLAQGNDLPLGQPRKLGREDLQPPSSMPSCSGTVFSAPQNRSPPAGTAPTPGTSSAQDLPSSPIYASVSPANPSSKRPLDAHLALVNQHPIGPFPRVQSPPHLKSPSAEATVAGGCLLPPSPSGHPDQTGTNQHFVMVEVHRPDSEPDVNEVRALPQTRTASTLSQLSDSGQTLSEDSGVDAGEAEASAPGRGRQSVSTKSRSSKELPRNERPTDGANKPPGLLEPTSTLVRVKKSAATLGIAIEGGANTRQPLPRIVTIQRGGSAHNCGQLKVGHVILEVNGLTLRGKEHREAARIIAEAFKTKDRDYIDFLVTEFNVML

SEQ ID NO: 814473 - protein, 556 aa, Homo sapiens
MHGSLEALLFLPQVTLSLAHAHLICSNAQLEMCVFPHRFLGDLTTEGINKPGFYKGPAGSQVTLSSLGNQTRVLLEEQARHLLNEQEHATMAYYLDEYRGGSVSVEALVMALFKLLNTHAKFSLLSEVRGTISPQDLERFDHLVLRREIESMKARQPPGPGAGDTYSMVSYSDTGSSTGSHGTSTTVSSARNTLDLEETGEAVQGNINALPDVSVDDVRSTSQGLSSFKPLPRPPPLAQGNDLPLGQPRKLGREDLQPPSSMPSCSGTVFSAPQNRSPPAGTAPTPGTSSAQDLPSSPIYASVSPANPSSKRPLDAHLALVNQHPIGPFPRVQSPPHLKSPSAEATVAGGCLLPPSPSGHPDQTGTNQHFVMVEVHRPDSEPDVNEVRALPQTRTASTLSQLSDSGQTLSEDSGVDAGEAEASAPGRGRQSVSTKSRSSKELPRNERPTDGANKPPGLLEPTSTLVRVKKSAATLGIAIEGGANTRQPLPRIVTIQRGGSAHNCGQLKVGHVILEVNGLTLRGKEHREAARIIAEAFKTKDRDYIDFLVTEFNVML

SEQ ID NO: 814474 - protein, 723 aa, Homo sapiens
KLLGSRGPRLLPPECRSVACVQALKGSKKLVLSVYSAGRIPGGYVTNHIYTWVDPQGRSISPPSGLPQPHGGALRQQEGDRRSTLHLLQGGDEKKVNLVLGDGRSLGLTIRGGAEYGLGIYITGVDPGSEAEGSGLKVGDQILEVNGRSFLNILHDEAVRLLKSSRHLILTVKDVGRLPHARTTVDETKWIASSRIRETMANSAGFLGDLTTEGINKPGFYKGPAGSQVTLSSLGNQTRVLLEEQARHLLNEQEHATMAYYLDEYRGGSVSVEALVMALFKLLNTHAKFSLLSEVRGTISPQDLERFDHLVLRREIESMKARQPPGPGAGDTYSMVSYSDTGSSTGSHGTSTTVSSARNTLDLEETGEAVQGNINALPDVSVDDVRSTSQGLSSFKPLPRPPPLAQGNDLPLGQPRKLGREDLQPPSSMPSCSGTVFSAPQNRSPPAGTAPTPGTSSAQDLPSSPIYASVSPANPSSKRPLDAHLALVNQHPIGPFPRVQSPPHLKSPSAEATVAGGCLLPPSPSGHPDQTGTNQHFVMVEVHRPDSEPDVNEVRALPQTRTASTLSQLSDSGQTLSEDSGVDAGEAEASAPGRGRQSVSTKSRSSKELPRNERPTDGANKPPGLLEPTSTLVRVKKSAATLGIAIEGGANTRQPLPRIVTIQRGGSAHNCGQLKVGHVILEVNGLTLRGKEHREAARIIAEAFKTKDRDYIDFLVTEFNVML

SEQ ID NO: 814475 - protein, 127 aa, Homo sapiens
CRLEDPSRHVTTLSTLHLLQGGDEKKVNLVLGDGRSLGLTIRGGAEYGLGIYITGVDPGSEAEGSGLKVGDQILEVNGRSFLNILHDEAVRLLKSSRHLILTVKDVGRLPHARTTVTWREGSSRSPH

SEQ ID NO: 814476 - protein, 558 aa, Homo sapiens
SGLAAGRRRGAEAPRAAASRGCPGHAPHPLSDARAASPAATPRSALGLERPPPQLLTLGSPSPRGTGARLGEPRAWCDGAVRSALRRPQTPATRRLRALQNVAADPAPPGLQQQSPPPPGSSSQLLCLSGTRRRLRVPRIPGSRPPPSSRLRDSSSGLRDPLGSSHCTRAPQTQAPAVVSALPGIQLSRQYPRGQRHRPHPARSEPGRASAVEMNAPLDGLSVSSSSTGSLGSAAGAGGGGGAGLRLLSANVRQLHQALTALLSEAEREQFTHCLNAYHARRNVFDLVRTLRVLLDSPVKRRLLPMLRLVIPRSDQLLFDQYTAEGLYLPATTPYRQPAWGGPDSAGPGEVRLVSLRRAKAHEGLGFSIRGGSEHGVGIYVSLVEPGSLAEKEGLRVGDQILRVNDKSLARVTHAEAVKALKGSKKLVLSVYSAGRIPGGYVTNHIYTWVDPQGRSISPPSGLPQPHGGALRQQEGDRRSTLHLLQGGDEKKVSGVGKGGQPLRHRILPPNPEQQSCLEAARRGWFCPGSVFPQVCTEGWCFFFAFLFDLCSVCYNTG

SEQ ID NO: 814477 - protein, 449 aa, Homo sapiens
SGLAAGRRRGAEAPRAAASRGCPGHAPHPLSDARAASPAATPRSALGLERPPPQLLTLGSPSPRGTGARLGEPRAWCDGAVRSALRRPQTPATRRLRALQNVAADPAPPGLQQQSPPPPGSSSQLLCLSGTRRRLRVPRIPGSRPPPSSRLRDSSSGLRDPLGSSHCTRAPQTQAPAVVSALPGIQLSRQYPRGQRHRPHPARSEPGRASALEMNAPLDGLSVSSSSTGSLGSAAGAGGGGGAGLRLLSANVRQLHQALTALLSEAEREQFTHCLNAYHARRNVFDLVRTLRVLLDSPVKRRLLPMLRLVIPRSDQLLFDQYTAEGLYLPATTPYRQPAWGGPDSAGPGEVRLVSLRRAKAHEGLGFSIRGGSEHGVGIYVSLVEPGSLAEKEGLRVGDQILRVNDKSLARVTHAEAVKVVYPEASHLPSQDLLFSTWKMGPLDQISGP

SEQ ID NO: 814478 - protein, 654 aa, Homo sapiens
CRLEDPSRHVTTLSTLHLLQGGDEKKVNLVLGDGRSLGLTIRGGAEYGLGIYITGVDPGSEAEGSGLKVGDQILEVNGRSFLNILHDEAVRLLKSSRHLILTVKDVGRLPHARTTVDETKWIASSRIRETMANSAGFLGDLTTEGINKPGFYKGPAGSQVTLSSLGNQTRVLLEEQARHLLNEQEHATMAYYLDEYRGGSVSVEALVMALFKLLNTHAKFSLLSEVRGTISPQDLERFDHLVLRREIESMKARQPPGPGAGDTYSMVSYSDTGSSTGSHGTSTTVSSARNTLDLEETGEAVQGNINALPDVSVDDVRSTSQGLSSFKPLPRPPPLAQGNDLPLGQPRKLGREDLQPPSSMPSCSGTVFSAPQNRSPPAGTAPTPGTSSAQDLPSSPIYASVSPANPSSKRPLDAHLALVNQHPIGPFPRVQSPPHLKSPSAEATVAGGCLLPPSPSGHPDQTGTNQHFVMVEVHRPDSEPDVNEVRALPQTRTASTLSQLSDSGQTLSEDSGVDAGEAEASAPGRGRQSVSTKSRSSKELPRNERPTDGANKPPGLLEPTSTLVRVKKSAATLGIAIEGGANTRQPLPRIVTIQRGGSAHNCGQLKVGHVILEVNGLTLRGKEHREAARIIAEAFKTKDRDYIDFLVTEFNVML

SEQ ID NO: 814479 - protein, 82 aa, Homo sapiens
IELAPPQHLLEPVAPPWIVTIQRGGSAHNCGQLKVGHVILEVNGLTLRGKEHREAARIIAEAFKTKDRDYIDFLVTEFNVML

SEQ ID NO: 814480 - protein, 427 aa, Homo sapiens
CRLEDPSRHVTTLSTLHLLQGGDEKKVNLVLGDGRSLGLTIRGGAEYGLGIYITGVDPGSEAEGSGLKVGDQILEVNGRSFLNILHDEAVRLLKSSRHLILTVKDVGRLPHARTTVDETKWIASSRIRETMANSAGFLGDLTTEGINKPGFYKGPAGSQVTLSSLGNQTRVLLEEQARHLLNEQEHATMAYYLDEYRGGSVSVEALVMALFKLLNTHAKFSLLSEVRGTISPQDLERFDHLVLRREIESMKARQPPGPGAGDTYSMVSYSDTGSSTGSHGTSTTVSSARNTLDLEETGEAVQGNINALPDVSVDDVRSTSQGLSSFKPLPRPPPLAQGNDLPLGQPRKLGREDLQPPSSMPSCSGTVFSAPQNRSPPAGTAPTPGTSSAQDLPLILRPAFVPHVLQRQIRSLTLSNRIRYQLDSYMY

SEQ ID NO: 814481 - protein, 295 aa, Homo sapiens
SARVAQQFAKSGLAAGRRRGAEAPRAAASRGCPGHAPHPLSDARAASPAATPRSALGLERPPPQLLTLGSPSPRGTGARLGEPRAWCDGAVRSALRRPQTPATRRLRALQNVAADPAPPGLQQQSPPPPGSSSQLLCLSGTRRRLRVPRIPGSRPPPSSRLRDSSSGLRDPLGSSHCTRAPQTQAPAVVSALPGIQLSRQYPRGQRHRPHPARSEPGRASALEMNAPLDGLSVSSSSTGSLGSAAGAGGGGGAGLRLLSANVRQLHQALTALLSEAEREQFTHCLNAYHARRNVF

SEQ ID NO: 814482 - protein, 635 aa, Homo sapiens
MISLFLTTEDIKGQFWNDDDSEGDNESEEFLYGVQGSCAADLYRHPQLDADIEAVKEIYSENSVSIREYGTIDDVDIDLHINISFLDEEVSTAWKVLRTEPIVLRLRFSLSQYLDGPEPSIEVFQPSNKEGFGLGLQLKKILGMFTSQQWKHLSNDFLKTQQEKRHSWFKASGTIKKFRAGLSIFSPIPKSPSFPIIQDSMLKGKLGVPELRVGRLMNRSISCTMKNPKVEVFGYPPSPQVSGHCKNIPTLEYGFLVQIMKYAEQRIPTLNEYCVVCDEQHVFQNGSMLKPAVCTRELCVFSFYTLGVMSGAAEEVATGAEVVDLLVAMCRAALESPRKSIIFEPYPSVVDPTDPKTLAFNPKKKNYERLQKALDSVMSIREMTQGCRNCIKEGDPPACCFGSYLEIKKQMDKLDPLAHPLLQWIISSNRSHIVKLPLSRQLKFMHTSHQFLLLSSPPAKEARFRTAKKLYGSTFAFHGSHIENWHSILRNGLVNASYTKLQLHGAAYGKGIYLSPISSISFGYSGMGKGQHRMPSKDELVQRYNRMNTIPQTRSIQSRFLQSRNLNCIALCEVITSKDLQKHGNIWVCPVSDHVCTRFFFVYEDGQVGDANINTQDPKIQKEIMRVIGTQVYTN

SEQ ID NO: 814483 - protein, 519 aa, Homo sapiens
MDIKGQFWNDDDSEGDNESEEFLYGVQGSCAADLYRHPQLDADIEAVKEIYSENSVSIREYGTIDDVDIDLHINISFLDEEVSTAWKVLRTEPIVLRLRFSLSQYLDGPEPSIEVFQPSNKEGFGLGLQLKKILGMFTSQQWKHLSNDFLKTQQEKRHSWFKASGTIKKFRAGLSIFSPIPKSPSFPIIQDSMLKGKLGVPELRVGRLMNRSISCTMKNPKVEVFGYPPSPQAGLLCPQHVGLPPPARTSPLVSGHCKNIPTLEYGFLVQIMKYAEQRIPTLNEYCVVCDEQHVFQNGSMLKPAVCTRELCVFSFYTLGVMSGAAEEVATGAEVVDLLVAMCRAALESPRKSIIFEPYPSVVDPTDPKTLAFNPKKKNYERLQKALDSVMSIREMTQGSYLEIKKQMDKLDPLAHPLLQWIISSNRSHIVKLPLSRQLKFMHTSHQFLLLSSPPAKEARFRTAKKLYGSTFAFHGSHIENWHSILRNGLVNASYTKLQEWEKDSTGCPPRMSWSRDTTG

SEQ ID NO: 814484 - protein, 519 aa, Homo sapiens; identical to SEQ ID NO: 814483

SEQ ID NO: 814485 - protein, 519 aa, Homo sapiens; identical to SEQ ID NO: 814483

SEQ ID NO: 814486 - protein, 519 aa, Homo sapiens; identical to SEQ ID NO: 814483

SEQ ID NO: 814487 - protein, 519 aa, Homo sapiens; identical to SEQ ID NO: 814483

SEQ ID NO: 814488 - protein, 519 aa, Homo sapiens; identical to SEQ ID NO: 814483

SEQ ID NO: 814489 - protein, 519 aa, Homo sapiens; identical to SEQ ID NO: 814483

SEQ ID NO: 814490 - protein, 499 aa, Homo sapiens
MDIKGQFWNDDDSEGDNESEEFLYGVQGSCAADLYRHPQLDADIEAVKEIYSENSVSIREYGTIDDVDIDLHINISFLDEEVSTAWKVLRTEPIVLRLRFSLSQYLDGPEPSIEVFQPSNKEGFGLGLQLKKILGMFTSQQWKHLSNDFLKTQQEKRHSWFKASGTIKKFRAGLSIFSPIPKSPSFPIIQDSMLKGKLGVPELRVGRLMNRSISCTMKNPKVEVFGYPPSPQVSGHCKNIPTLEYGFLVQIMKYAEQRIPTLNEYCVVCDEQHVFQNGSMLKPAVCTRELCVFSFYTLGVMSGAAEEVATGAEVVDLLVAMCRAALESPRKSIIFEPYPSVVDPTDPKTLAFNPKKKNYERLQKALDSVMSIREMTQGSYLEIKKQMDKLDPLAHPLLQWIISSNRSHIVKLPLSRQLKFMHTSHQFLLLSSPPAKEARFRTAKKLYGSTFAFHGSHIENWHSILRNGLVNASYTKLQEWEKDSTGCPPRMSWSRDTTG

SEQ ID NO: 814491 - protein, 420 aa, Homo sapiens
MDIKGQFWNDDDSEGDNESEEFLYGVQGSCAADLYRHPQLDADIEAVKEIYSENSVSIREYGTIDDVDIDLHINISFLDEEVSTAWKVLRTEPIVLRLRFSLSQYLDGPEPSIEVFQPSNKEGFGLGLQLKKILGMFTSQQWKHLSNDFLKTQQEKRHSWFKASGTIKKFRAGLSIFSPIPKSPSFPIIQDSMLKGKLGVPELRVGRLMNRSISCTMKNPKVEVFGYPPSPQVSGHCKNIPTLEYGFLVQIMKYAEQRIPTLNEYCVVCDEQHVFQNGSMLKPAVCTRELCVFSFYTLGVMSGAAEEVATGAEVVDLLVAMCRAALESPRKSIIFEPYPSVVDPTDPKTLAFNPKKKNYERLQKALDSVMSIREMTQGSYLEIKKQMDKLDPLAHPLLQWIISSNRSHIVKLPLSRWVPH

SEQ ID NO: 814492 - protein, 611 aa, Homo sapiens
MDIKGQFWNDDDSEGDNESEEFLYGVQGSCAADLYRHPQLDADIEAVKEIYSENSVSIREYGTIDDVDIDLHINISFLDEEVSTAWKVLRTEPIVLRLRFSLSQYLDGPEPSIEVFQPSNKEGFGLGLQLKKILGMFTSQQWKHLSNDFLKTQQEKRHSWFKASGTIKKFRAGLSIFSPIPKSPSFPIIQDSMLKGKLGVPELRVGRLMNRSISCTMKNPKVEVFGYPPSPQVSGHCKNIPTLEYGFLVQIMKYAEQRIPTLNEYCVVCDEQHVFQNGSMLKPAVCTRELCVFSFYTLGVMSGAAEEVATGAEVVDLLVAMCRAALESPRKSIIFEPYPSVVDPTDPKTLAFNPKKKNYERLQKALDSVMSIREMTQGSYLEIKKQMDKLDPLAHPLLQWIISSNRSHIVKLPLSRQLKFMHTSHQFLLLSSPPAKEARFRTAKKLYGSTFAFHGSHIENWHSILRNGLVNASYTKLQLHGAAYGKGIYLSPISSISFGYSGMGKGQHRMPSKDELVQRYNRMNTIPQTRSIQSRFLQSRNLNCIALCEVITSKDLQKHGNIWVCPVSDHVCTRFFFVYEDGQVGDANINTQDPKIQKEIMRVIGTQVYTN

SEQ ID NO: 814493 - protein, 631 aa, Homo sapiens
MDIKGQFWNDDDSEGDNESEEFLYGVQGSCAADLYRHPQLDADIEAVKEIYSENSVSIREYGTIDDVDIDLHINISFLDEEVSTAWKVLRTEPIVLRLRFSLSQYLDGPEPSIEVFQPSNKEGFGLGLQLKKILGMFTSQQWKHLSNDFLKTQQEKRHSWFKASGTIKKFRAGLSIFSPIPKSPSFPIIQDSMLKGKLGVPELRVGRLMNRSISCTMKNPKVEVFGYPPSPQAGLLCPQHVGLPPPARTSPLVSGHCKNIPTLEYGFLVQIMKYAEQRIPTLNEYCVVCDEQHVFQNGSMLKPAVCTRELCVFSFYTLGVMSGAAEEVATGAEVVDLLVAMCRAALESPRKSIIFEPYPSVVDPTDPKTLAFNPKKKNYERLQKALDSVMSIREMTQGSYLEIKKQMDKLDPLAHPLLQWIISSNRSHIVKLPLSRQLKFMHTSHQFLLLSSPPAKEARFRTAKKLYGSTFAFHGSHIENWHSILRNGLVNASYTKLQLHGAAYGKGIYLSPISSISFGYSGMGKGQHRMPSKDELVQRYNRMNTIPQTRSIQSRFLQSRNLNCIALCEVITSKDLQKHGNIWVCPVSDHVCTRFFFVYEDGQVGDANINTQDPKIQKEIMRVIGTQVYTN

SEQ ID NO: 814494 - protein, 356 aa, Homo sapiens
MDIKGQFWNDDDSEGDNESEEFLYGVQGSCAADLYRHPQLDADIEAVKEIYSENSVSIREYGTIDDVDIDLHINISFLDEEVSTAWKVLRTEPIVLRLRFSLSQYLDGPEPSIEVFQPSNKEGFGLGLQLKKILGMFTSQQWKHLSNDFLKTQQEKRHSWFKASGTIKKFRAGLSIFSPIPKSPSFPIIQDSMLKGKLGVPELRVGRLMNRSISCTMKNPKVEVFGYPPSPQVSGHCKNIPTLEYGFLVQIMKYAEQRIPTLNEYCVVCDEQHVFQNGSMLKPAVCTRELCVFSFYTLGVMSGAAEEVATGAEGSYLEIKKQMDKLDPLAHPLLQWIISSNRSHIVKLPLSRWVPH

SEQ ID NO: 814495 - protein, 499 aa, Homo sapiens; identical to SEQ ID NO: 814490

SEQ ID NO: 814496 - protein, 499 aa, Homo sapiens; identical to SEQ ID NO: 814490

SEQ ID NO: 814497 - protein, 499 aa, Homo sapiens; identical to SEQ ID NO: 814490

SEQ ID NO: 814498 - protein, 109 aa, Homo sapiens
MGKGQHRMPSKDELVQRYNRMNTIPQTRSIQSRFLQSRNLNCIALCEVITSKDLQKHGNIWVCPVSDHVCTRFFFVYEDGQVGDANINTQDPKIQKEIMRVIGTQVYTN

SEQ ID NO: 814499 - protein, 499 aa, Homo sapiens; identical to SEQ ID NO: 814490

SEQ ID NO: 814500 - protein, 109 aa, Homo sapiens; identical to SEQ ID NO: 814498

SEQ ID NO: 814501 - protein, 499 aa, Homo sapiens; identical to SEQ ID NO: 814490

SEQ ID NO: 814502 - protein, 380 aa, Homo sapiens
MDIKGQFWNDDDSEGDNESEEFLYGVQGSCAADLYRHPQLDADIEAVKEIYSENSVSIREYGTIDDVDIDLHINISFLDEEVSTAWKVLRTEPIVLRLRFSLSQYLDGPEPSIEVFQPSNKEGFGLGLQLKKILGMFTSQQWKHLSNDFLKTQQEKRHSWFKASGTIKKFRAGLSIFSPIPKSPSFPIIQDSMLKGKLGVPELRVGRLMNRSISCTMKNPKVEVFGYPPSPQAGLLCPQHVGLPPPARTSPLVSGHCKNIPTLEYGFLVQIMKYAEQRIPTLNEYCVVCDEQHVFQNGSMLKPAVCTRELCVFSFYTLGVMSGAAEEVATGAEVVDLLVAMCRAALESPRKSIIFEPYPSVVDPTDPKTLAFNPKLHGRA

SEQ ID NO: 814503 - protein, 454 aa, Homo sapiens
MDIKGQFWNDDDSEGDNESEEFLYGVQGSCAADLYRHPQLDADIEAVKEIYSENSVSIREYGTIDDVDIDLHINISFLDEEVSTAWKVLRTEPIVLRLRFSLSQYLDGPEPSIEVFQPSNKEGFGLGLQLKKILGMFTSQQWKHLSNDFLKTQQEKRHSWFKASGTIKKFRAGLSIFSPIPKSPSFPIIQDSMLKGKLGVPELRVGRLMNRSISCTMKNPKVEVFGYPPSPQVSGHCKNIPTLEYGFLVQIMKYAEQRIPTLNEYCVVCDEQHVFQNGSMLKPAVCTRELCVFSFYTLGVMSGAAEEVATGAEVVDLLVAMCRAALESPRKSIIFEPYPSVVDPTDPKTLAFNPKKKNYERLQKALDSVMSIREMTQGSYLEIKKQMDKLDPLAHPLLQWIISSNRSHIVKLPLSRQLKFMHTSHQFLLLSSPPAKEARFRTAKKLYGSTFAFQ

SEQ ID NO: 814504 - protein, 501 aa, Homo sapiens
MDIKGQFWNDDDSEGDNESEEFLYGVQGSCAADLYRHPQLDADIEAVKEIYSENSVSIREYGTIDDVDIDLHINISFLDEEVSTAWKVLRTEPIVLRLRFSLSQYLDGPEPSIEVFQPSNKEGFGLGLQLKKILGMFTSQQWKHLSNDFLKTQQEKRHSWFKASGTIKKFRAGLSIFSPIPKSPSFPIIQDSMLKGKLGVPELRVGRLMNRSISCTMKNPKVEVFGYPPSPQVSGHCKNIPTLEYGFLVQIMKYAEQRIPTLNEYCVVCDEQHVFQNGSMLKPAVCTRELCVFSFYTLGVMSGAAEEVATGAEVVDLLVAMCRAALESPRKSIIFEPYPSVVDPTDPKTLAFNPKKKNYERLQKALDSVMSIREMTQGSYLEIKKQMDKLDPLAHPLLQWIISSNRSHIVKLPLSRWVPNLACWWSSTCIRRSTLSIRDTTAVIRAHGKMAASSLSHRLPFAIEAQQRKVCQLQILSPCLIVISISVLQDSDIFHKCTVSR

SEQ ID NO: 814505 - protein, 232 aa, Homo sapiens
IFKSPRCSTSIVEPENPAVSKASGLPSVSTCRPQPPARGLPPGLQATWVALPACSSQPLGALNASILLWKAPRTPPESLFLLHCLPYPRRRRHPPLRTLSRLATAAQASQGWRRLLRRAQEQAVRLLVRSGPRAIVSPRELRRVAERARDGTTRRGVRDLARQARPPPLGLPLRPRGASRAARPVGCGRARPGVAVSTRQAGLCGRHHGHRAVRPGHGKGAGLAPSPQGWTK

SEQ ID NO: 814506 - protein, 676 aa, Homo sapiens
PVRLDRLSEAAKVNTDAMRSAQEEITEYRRQLQARTTELEALKSTKDSLERQRSELEDRHQADIASYQEAIQQLDAELRNTKWEMAAQLREYQDLLNVKMALDIEIAAYRKLLEGEECRIGFGPIPFSLPEGLPKIPSVSTHIKVKSEEKIKVVEKSEKETVIVEEQTEETQVTEEVTEEEEKEAKEEEGKEEEGGEEEEAEGGEEETKSPPAEEAASPEKEAKSPVKEEAKSPAEAKSPEKEEAKSPAEVKSPEKAKSPAKEEAKSPPEAKSPEKEEAKSPAEVKSPEKAKSPAKEEAKSPAEAKSPEKAKSPVKEEAKSPAEAKSPVKEEAKSPAEVKSPEKAKSPTKEEAKSPEKSPLRRPSPQLKEEAKSPEKAKSPVKEEAKTPEKAKSPVKEEAKSPEKAKSPEKAKTLDVKSPEAKTPAKEEARSPADKFPEKAKSPVKEEVKSPEKAKSPLKEDAKAPEKEIPKKEEVKSPVKEEEKPQEVKVKEPPKKAEEEKAPATPKTEEKKDSKKEEAPKKEAPKPKVEEKKEPAVEKPKESKVEAKKEEAEDKKKVPTPEKEAPAKVEVKEDAKPKEKTEVAKKEPDDAKAKEPSKPAEKKEAAPEKKDTKEEKAKKPEEKPKTEAKAKEDDKTLSKEPSKPKAEKAEKSSSTDQKDSKPPEKATEDKAAKGK

SEQ ID NO: 814507 - protein, 615 aa, Homo sapiens
CVTSPSQEAIQQLDAELRNTKWEMAAQLREYQDLLNVKMALDIEIAAYRKLLEGEECRIGFGPIPFSLPEGLPKIPSVSTHIKVKSEEKIKVVEKSEKETVIVEEQTEETQVTEEVTEEEEKEAKEEEGKEEEGGEEEEAEGGEEETKSPPAEEAASPEKEAKSPVKEEAKSPAEAKSPEKEEAKSPAEVKSPEKAKSPAKEEAKSPPEAKSPEKEEAKSPAEVKSPEKAKSPAKEEAKSPAEAKSPEKAKSPVKEEAKSPAEAKSPVKEEAKSPAEVKSPEKAKSPTKEEAKSPEKSPLRRPSPQWKEEAKSPEKAKSPVKEEAKTPEKAKSPVKEEAKSPEKAKSPEKAKTLDVKSPEAKTPAKEEARSPADKFPEKAKSPVKEEVKSPEKAKSPLKEDAKAPEKEIPKKEEVKSPVKEEEKPQEVKVKEPPKKAEEEKAPATPKTEEKKDSKKEEAPKKEAPKPKVEEKKEPAVEKPKESKVEAKKEEAEDKKKVPTPEKEAPAKVEVKEDAKPKEKTEVAKKEPDDAKAKEPSKPAEKKEAAPEKKDTKEEKAKKPEEKPKTEAKAKEDDKTLSKEPSKPKAEKAEKSSSTDQKDSKPPEKATEDKAAKGK

SEQ ID NO: 814508 - protein, 488 aa, Homo sapiens
GRLLLLNSRPVDAEGGEEETKSPPAEEAASPEKEAKSPVKEEAKSPAEAKSPEKEEAKSPAEVKSPEKAKSPAKEEAKSPPEAKSPEKEEAKSPAEVKSPEKAKSPAKEEAKSPAEAKSPEKAKSPVKEEAKSPAEAKSPVKEEAKSPAEVKSPEKAKSPTKEEAKSPEKSPLRRPSPQWKEEAKSPEKAKSPVKEEAKTPEKAKSPVKEEAKSPEKAKSPEKAKTLDVKSPEAKTPAKEEARSPADKFPEKAKSPVKEEVKSPEKAKSPLKEDAKAPEKEIPKKEEVKSPVKEEEKPQEVKVKEPPKKAEEEKAPATPKTEEKKDSKKEEAPKKEAPKPKVEEKKEPAVEKPKESKVEAKKEEAEDKKKVPTPEKEAPAKVEVKEDAKPKEKTEVAKKEPDDAKAKEPSKPAEKKEAAPEKKDTKEEKAKKPEEKPKTEAKAKEDDKTLSKEPSKPKAEKAEKSSSTDQKDSKPPEKATEDKAAKGK

SEQ ID NO: 814509 - protein, 200 aa, Homo sapiens
GRLLLLNSRPVDVKVKEPPKKAEEEKAPATPKTEEKKDSKKEEAPKKEAPKPKVEEKKEPAVEKPKESKVEAKKEEAEDKKKVPTPEKEAPAKVEVKEDAKPKEKTEVAKKEPDDAKAKEPSKPAEKKEAAPEKKDTKEEKAKKPEEKPKTEAKAKEDDKTLSKEPSKPKAEKAEKSSSTDQKDSKPPEKATEDKAAKGK

SEQ ID NO: 814510 - protein, 621 aa, Homo sapiens
PVRLDRLSEAAKVNTDAMRSAQEEITEYRRQLQARTTELEALKSTKDSLERQRSELEDRHQADIASYQEAIQQLDAELRNTKWEMAAQLREYQDLLNVKMALDIEIAAYRKLLEGEECRIGFGPIPFSLPEGLPKIPSVSTHIKVKSEEKIKVVEKSEKETVIVEEQTEETQVTEEVTEEEEKEAKEEEGKEEEGGEEEEAEGGEEETKSPPAEEAASPEKEAKSPVKEEAKSPAEAKSPEKEEAKSPAEVKSPEKAKSPAKEEAKSPPEAKSPEKEEAKSPAEVKSPEKAKSPAKEEAKSPAEAKSPEKAKSPVKEEAKSPAEAKSPVKEEAKSPAEVKSPEKAKSPTKEEAKSPEKSPLRRPSPQLKEEAKSPEKAKSPVKEEAKTPEKAKSPVKEEAKSPEKAKSPEKAKTLDVKSPEAKTPAKEEARSPADKFPEKAKSPVKEEVKSPEKAKSPLKEDAKAPEKEIPKKEEVKSPVKEEEKPQEVKVKEPPKKAEEEKAPATPKTEEKKDSKKEEAPKKEAPKPKVEEKKEPAVEKPKESKVEAKKEEAEDKKKVPTPEKEAPAKVEVKEDAKPKEKTEVAKKEPDDAKAKEPSKPAETIPAAQEVDAAANLVVVGG

SEQ ID NO: 814511 - protein, 348 aa, Homo sapiens
PVRLDRLSEAAKVNTDAMRSAQEEITEYRRQLQARTTELEALKSTKDSLERQRSELEDRHQADIASYQEAIQQLDAELRNTKWEMAAQLREYQDLLNVKMALDIEIAAYRKLLEGEECRIGFGPIPFSLPEGLPKIPSVSTHIKVKSEEKIKVVEKSEKETVIVEEQTEETQVTEEVTEEEEKEAKEEEGKEEEGGEEEEAEGGEEETKSPPAEEAASPEKEAKSPVKEEAKSPAEAKSPEKEEAKSPAEVKSPEKAKSPAKEEAKSPPEAKSPEKEEAKSPAEVKSPEKAKSPAKEEAKSPAEAKSPEKAKSPVKEEAKSPAEAKSPVKAKSPTKEEAKSPEKSQVP

SEQ ID NO: 814512 - protein, 375 aa, Homo sapiens
PVRLDRLSEAAKVNTDAMRSAQEEITEYRRQLQARTTELEALKSTKDSLERQRSELEDRHQADIASYQEAIQQLDAELRNTKWEMAAQLREYQDLLNVKMALDIEIAAYRKLLEGEECRIGFGPIPFSLPEGLPKIPSVSTHIKVKSEEKIKVVEKSEKETVIVEEQTEETQVTEEVTEEEEKEAKEEEGKEEEGGEEEEAEGGEEETKSPPAEEAASPEKEAKSPVKEEAKSPAEAKSPEKEEAKSPAEVKSPEKAKSPAKEEAKSPPEAKSPEKEEAKSPAEVKSPEKAKSPAKEEAKSPAEAKSPEKAKSPVKEEAKSPAEAKSPVKEEAKSPAEVKSPEKAKSPTKEEAKSPEKIITLTQPTRYENDYSLE

SEQ ID NO: 814513 - protein, 145 aa, Homo sapiens
MSSSGTICAQQSFNMEQANYTIQSLKDTKTTVDAMKLGVKEMKKAYKQVKIDQIEDLQDQLEDMMEDANEIQEALSRSYGTPELDEDDLEAELDALGDELLADEDSSYLDEAASAPAIPEGVPTDTKNKDGVLVDEFGLPQIPAS

SEQ ID NO: 814514 - protein, 158 aa, Homo sapiens
MSSSGTICAQQSFNMEQANYTIQSLKDTKTTVDAMKLGVKEMKKAYKQVKIDQIEDLQDQLEDMMEDANEIQEALSRSYGTPELDEDDLEAELDALGDELLADEDSSYLDEAASAPAIPEGVPTDTKNKGWGLVDELGCQDPGHRLVIQAFCEHTFLG

SEQ ID NO: 814515 - protein, 134 aa, Homo sapiens
MSSSGTICAQQSFNMEQANYTIQSLKDTKTTVDAMKLGVKEMKKAYKQVKIDQIEDLQDQLEDMMEDANEIQEALSRSYGTPELDEDDLEAELDALGDELLADEDSSYLDEAASAPAIPEGVPTDTKNKMESGG

SEQ ID NO: 814516 - protein, 123 aa, Homo sapiens
MNRLFGKAKPKAPPPSLTDCIGTVDSRAESIDKKISRLDAELVKYKDQIKKMREGPAKGKVGSNCCTRCWQSLVLAPIEIGPEFGWAQWLMHVIPALWEAEAGGSRGQAFETSLANIAKPCLY

SEQ ID NO: 814517 - protein, 145 aa, Homo sapiens; identical to SEQ ID NO: 814513

SEQ ID NO: 814518 - protein, 145 aa, Homo sapiens; identical to SEQ ID NO: 814513

SEQ ID NO: 814519 - protein, 145 aa, Homo sapiens; identical to SEQ ID NO: 814513

SEQ ID NO: 814520 - protein, 229 aa, Homo sapiens
MNRLFGKAKPKAPPPSLTDCIGTVDSRAESIDKKISRLDAELVKYKDQIKKMREGPAKEYGQAESLASFKAKEDVSFLCFCIRGMSSSGTICAQQSFNMEQANYTIQSLKDTKTTVDAMKLGVKEMKKAYKQVKIDQIEDLQDQLEDMMEDANEIQEALSRSYGTPELDEDDLEAELDALGDELLADEDSSYLDEAASAPAIPEGVPTDTKNKDGVLVDEFGLPQIPAS

SEQ ID NO: 814521 - protein, 145 aa, Homo sapiens; identical to SEQ ID NO: 814513

SEQ ID NO: 814522 - protein, 145 aa, Homo sapiens; identical to SEQ ID NO: 814513

SEQ ID NO: 814523 - protein, 204 aa, Homo sapiens
MNRLFGKAKPKAPPPSLTDCIGTVDSRAESIDKKISRLDAELVKYKDQIKKMREGPAKEYGQAESLASFKAKEDEQANYTIQSLKDTKTTVDAMKLGVKEMKKAYKQVKIDQIEDLQDQLEDMMEDANEIQEALSRSYGTPELDEDDLEAELDALGDELLADEDSSYLDEAASAPAIPEGVPTDTKNKDGVLVDEFGLPQIPAS

SEQ ID NO: 814524 - protein, 243 aa, Homo sapiens
  misc_feature (49)..(49): Xaa can be any naturally occurring amino acid
MNRLFGKAKPKAPPPSLTDCIGTLGDSSSRISIDRERIPSYFGMPEVLXERYHGLMNSTNEGRMQRAHSIIQLLHQVMKIASCRDSHRRQYSRECLESRQPWTNSGPNKFNSHEQANYTIQSLKDTKTTVDAMKLGVKEMKKAYKQVKIDQIEDLQDQLEDMMEDANEIQEALSRSYGTPELDEDDLEAELDALGDELLADEDSSYLDEAASAPAIPEGVPTDTKNKDGVLVDEFGLPQIPAS

SEQ ID NO: 814525 - protein, 171 aa, Homo sapiens
MSSSGTICAQQSFNMEQANYTIQSLKDTKTTVDAMKLGVKEMKKAYKQVKIDQIEDLQDQLEDMMEDANEIQEALSRSYGTPELDEDDLEAEDCGKLFFFKRGKKGQEDLGMANYKGELDALGDELLADEDSSYLDEAASAPAIPEGVPTDTKNKDGVLVDEFGLPQIPAS

SEQ ID NO: 814526 - protein, 73 aa, Homo sapiens
LPTPRPLQALSESTKSFCSPSPEDPAENPEKESGNARRHIALAHGGAGSRGGSDSASVSGFALVFGFLRGCSR

SEQ ID NO: 814527 - protein, 73 aa, Homo sapiens; identical to SEQ ID NO: 814526

SEQ ID NO: 814528 - protein, 73 aa, Homo sapiens; identical to SEQ ID NO: 814526

SEQ ID NO: 814529 - protein, 73 aa, Homo sapiens; identical to SEQ ID NO: 814526

SEQ ID NO: 814530 - protein, 118 aa, Homo sapiens
MSSSGTICAQQSFNMEQANYTIQSLKDTKTTVDAMKLGVKEMKKAYKQVKIDQIEDLQDQLEDMMEDANEIQEALSRSYGTPELDEDDLEAEVSYEKSNVYLVLESKSNSCLGPFLKC

SEQ ID NO: 814531 - protein, 73 aa, Homo sapiens; identical to SEQ ID NO: 814526

SEQ ID NO: 814532 - protein, 158 aa, Homo sapiens; identical to SEQ ID NO: 814514

SEQ ID NO: 814533 - protein, 206 aa, Homo sapiens
MGILSRNLGHAAFWPDDMWIEVLADRSVALLVVGFVPRGVVDEADSLPLVCEPVGTVAERKVGNMSLSGKSARLWLAAELSNAFQGVLESRVRSLSTCGGPWEVGNNGQSKVFCRVKLVLVETRIGGPKETNIEHGASPRVGPRDVFATSWNNGGPSVLRPLARSGRRKPEGDRRMPRKGGKLGGRGFVAVWGLGRNVRRSLRFEA

SEQ ID NO: 814534 - protein, 118 aa, Homo sapiens; identical to SEQ ID NO: 814530

SEQ ID NO: 814535 - protein, 106 aa, Homo sapiens
MNRLFGKAKPKAPPPSLTDCIGTVDSRAESIDKKISRLDAELVKYKDQIKKMREGPAKEYGQAESLASFKAKEDFLSSASAYVVCVHKLFRRNEIVVCICRFSFST

SEQ ID NO: 814536 - protein, 116 aa, Homo sapiens
LWWPLKVSGADCPEGGKGWSLGQPEAPDMRAGTPKCTRSPELVFCDFHSPWSLFPFVLKARASREGKPEIGSSGPGQTLCAAANRCSLRLSGPPPDTCGPSLSWLPVWSWRDSGSA

SEQ ID NO: 814537 - protein, 347 aa, Homo sapiens
MARFWVCVAGAGFFLAFLVLHSRFCGSPVLRNFTFAVSWRTEKILYRLDVGWPKHPEYFTGTTFCVAVDSLNGLVYIGQRGDNIPKILVFTEDGYFLRAWNYTVDTPHGIFAASTLYEQSVWITDVGSGFFGHTVKKYSSFGDLVQVLGTPGKKGTSLNPLQFDNPAELYVEDTGDIYIVDGDGGLNNRLIKLSQDFMILWLHGENGTGPAKFNIPHSVTLDSAGRVWVADRGNKRIQVFDKDTGEWLGAWNNCFTEEGPSSVRFTPDGKYLIVAQLNLSRLSVVAAPPVGSIGECSVISTIQLADQVLPHLLEVDRKTGAVYVAEIGAKQVQKYVPLNSYVPSFGS

SEQ ID NO: 814538 - protein, 150 aa, Homo sapiens
MILWLHGENGTGPAKFNIPHSVTLDSAGRVWVADRGNKRIQVFDKDTGEWLGAWNNCFTEEGPSSVRFTPDGKYLIVAQLNLSRLSVVAAPPVGSIGECSVISTIQLADQVLPHLLEVDRKTGAVYVAEIGAKQVQKYVPLNSYVPSFGS

SEQ ID NO: 814539 - protein, 116 aa, Homo sapiens; identical to SEQ ID NO: 814536

SEQ ID NO: 814540 - protein, 116 aa, Homo sapiens; identical to SEQ ID NO: 814536

SEQ ID NO: 814541 - protein, 260 aa, Homo sapiens
MARFWVCVAGAGFFLAFLVLHSRFCGSPVLRNFTFAVSWRTEKILYRLDVGWPKHPEYFTGTTFCVAVDSLNGLVYIGQRGDNIPKILVFTEDGYFLRAWNYTVDTPHGIFAASTLYEQSVWITDVGSGFFGHTVKKYSSFGDLVQVLGTPGKKGTSLNPLQFDNPAELYVEDTGDIYIVDGDGGLNNRLIKLSQDFMILWLHGENGTGPAKFNIPHSVTLDSAGRVQIQRHCVWDFVSEYVCVCVCVCVCVCVCLGMYI

SEQ ID NO: 814542 - protein, 500 aa, Homo sapiens
LKFLAVLLAAGMLAFLGAVICIIASVPLAASPARALPGGADNASVASGAAASPGPQRSLSALHGAGGSAGPPALPGAPAASAHPLPPGPLFSRFLCTPLAAACPSGAQQGDAAGAAPGEREELLLLQSTAEQLRQTALQQEARIRADQDTIRELTGKLGRCESGLPRGLQGAGPRRDTMADGPWDSPALILELEDAVRALRDRIDRLEQELPARVNLSAAPAPVSAVPTGLHSKMDQLEGQLLAQVLALEKERVALSHSSRRQRQEVEKELDVLQGRVAELEHGSSAYSPPDAFKISIPIRNNYMYARVRKALPELYAFTACMWLRSRSSGTGQGTPFSYSVPGQANEIVLLEAGHEPMELLINDKVAQLPLSLKDNGWHHICIAWTTRDGLWSAYQDGELQGSGENLAAWHPIKPHGILILGQEQDTLGGRFDATQAFVGDIAQFNLWDHALTPAQVLGIANCTAPLLGNVLPWEDKLVEAFGGATKAAFDVCKGRAKA

SEQ ID NO: 814543 - protein, 196 aa, Homo sapiens
MYARVRKALPELYAFTACMWLRSRSSGTGQGTPFSYSVPGQANEIVLLEAGHEPMELLINDKVAQLPLSLKDNGWHHICIAWTTRDGLWSAYQDGELQGSGENLAAWHPIKPHGILILGQEQDTLGGRFDATQAFVGDIAQFNLWDHALTPAQVLGIANCTAPLLGNVLPWEDKLVEAFGGATKAAFDVCKGRAKA

SEQ ID NO: 814544 - protein, 500 aa, Homo sapiens; identical to SEQ ID NO: 814542

SEQ ID NO: 814545 - protein, 102 aa, Homo sapiens [sequence omitted]

SEQ ID NO: 814546 - protein, 158 aa, Homo sapiens
APSLMDESWFVTPPACFTAEGPGLGPARLQSSPLEDLLIEHPSMSVYVTGSTIVLEPGSPSPLPDAALPDGDLSEGELTPARREPRAARHAAPLPARAALLEKAGQVRRLQRARQRAERHALSAKAVQRQNRARESRPRRSKNQSSFIYQPCQRQFNY

SEQ ID NO: 814547 - protein, 158 aa, Homo sapiens; identical to SEQ ID NO: 814546

SEQ ID NO: 814548 - protein, 158 aa, Homo sapiens; identical to SEQ ID NO: 814546

SEQ ID NO: 814549 - protein, 158 aa, Homo sapiens; identical to SEQ ID NO: 814546

SEQ ID NO: 814550 - protein, 158 aa, Homo sapiens; identical to SEQ ID NO: 814546

SEQ ID NO: 814551 - protein, 158 aa, Homo sapiens; identical to SEQ ID NO: 814546

SEQ ID NO: 814552 - protein, 3063 aa, Homo sapiens [sequence omitted]

SEQ ID NO: 814553 - protein, 153 aa, Homo sapiens
MKGTRLMVCFSVLEVPVPVVSLNIYDVGPTTMHVQWQPVGGATGYILSYKPVKDTEPTRPKEVRLGPTVNDMQLTDLVPNTEYAVTVQAVLHDLTSEPVTVREVTLPLPRPQDLKLRDVTHSTMNVFWEPVPGKVRKYIVRYKTPEEDVKEVG

SEQ ID NO: 814554 - protein, 3063 aa, Homo sapiens [sequence omitted]

SEQ ID NO: 814555 - protein, 3063 aa, Homo sapiens [sequence omitted]

SEQ ID NO: 814556 - protein, 1141 aa, Homo sapiens
MRSRLPPALAALGAALLLSSIEAEGMECLTRAEADIVLLVDGSWSIGRANFRTVRSFISRIVEVFDIGPKRVQIALAQYSGDPRTEWQLNAHRDKKSLLQAVANLPYKGGNTLTGMALNFIRQQNFRTQAGMRPRARKIGVLITDGKSQDDVEAPSKKLKDEGVELFAIGIKNADEVELKMIATDPDDTHAYNVADFESLSRIVDDLTINLCNSVKGPGDLEAPSNLVISERTHRSFRVSWTPPSDSVDRYKVEYYPVSGGKRQEFYVSRMETSTVLKDLKPETEYVVNVYSVVEDEYSEPLKGTEKTLPVPVVSLNIYDVGPTTMHVQWQPVGGATGYILSYKPVKDTEPTRPKEVRLGPTVNDMQLTDLVPNTEYAVTVQAVLHDLTSEPVTVREVTLPLPRPQDLKLRDVTHSTMNVFWEPVPGKVRKYIVRYKTPEEDVKEVEVDRSETSTSLKDLFSQTLYTVSVSAVHDEGESPPVTAQETTRPVPAPTNLKITEVTSEGFRGTWDHGASDVSLYRITWAPFGSSDKMETILNGDENTLVFENLNPNTIYEVSITAIYPDESESDDLIGSERTLPILTTQAPKSGPRNLQVYNATSNSLTVKWDPASGRVQKYRITYQPSTGEGNEQTTTIGGRQNSVVLQKLKPDTPYTITVSSLYPDGEGGRMTGRGKTKPLNTVRNLRVYDPSTSTLNVRWDHAEGNPRQYKLFYAPAAGGPEELVPIPGNTNYAILRNLQPDTSYTVTVVPVYTEGDGGRTSDTGRTLMRGLARNVQVYNPTPNSLDVRWDPAPGPVLQYRVVYSPVDGTRPSESIVVPGNTRMVHLERLIPDTLYSVNLVALYSDGEGNPSPAQGRTLPRSGPRNLRVFGETTNSLSVAWDHADGPVQQYRIIYSPTVGDPIDEYTTVPGRRNNVILQPLQPDTPYKITVIAVYEDGDGGHLTGNGRTVGLLPPQNIHISDEWYTRFRVSWDPSPSPVLGYKIVYKPVGSNEPMEAFVGEMTSYTLHNLNPSTTYDVNVYAQYDSGLSVPLTDQGTTLYLNVTDLKTYQIGWDTFCVKWSPHRAATSYRLKLSPADGTRGQEITVRGSETSHCFTGLSPDTDYGVTVFVQTPNLEGPGVSVKEHTSKFLRNLESFHKALE

SEQ ID NO: 814557 - protein, 788 aa, Homo sapiens
MCTWCVFIIIIFKFSAVKPTEAPTEPPTPPPPPTIPPARDVCKGAKADIVFLTDASWSIGDDNFNKVVKFIFNTVGGFDEISPAGIQVSFVQYSDEVKSEFKLNTYNDKALALGALQNIRYRGGNTRTGKALTFIKEKVLTWESGMRKNVPKVLVVVTDGRSQDEVKKAALVIQQSGFSVFVVGVADVDYNELANIASKPSERHVFIVDDFESFEKIEDNLITFVCETATSSCPLIYLDGYTSPGFKMLEAYNLTEKNFASVQGVSLESGSFPSYSAYRIQKNAFVNQPTADLHPNGLPPSYTIILLFRLLPETPSDPFAIWQITDRDYKPQVGVIADPSSKTLSFFNKDTRGEVQTVTFDTEEVKTLFYGSFHKVHIVVTSKSVKIYIDCYEIIEKDIKEAGNITTDGYEILGKLLKGERKSAAFQIQSFDIVCSPVWTSRDRCCDIPSRRDEGKCPAFPNSCTCTQDSVGPPGPPGPAGGPGAKGPRGERGISGAIGPPGPRGDIGPPGPQGPPGPQGPNGLSIPGEQGRQGMKGDAGEPGLPGRTGTPGLPGPPGPMGPPGDRGFTGKDGAMGPRGPPGPPGSPGSPGVTGPSGKPGKPGDHGRPGPSGLKGEKGDRGDIASQNMMRAVARQVCEQLISGQMNRFNQMLNQIPNDYQSSRNQPGPPGPPGPPGSAGARGEPGPGGRPGFPGTPGMQGPPGERGLPGEKGERGTGSSGPRGLPGPPGPQGESRTGPPGSTGSRGPPGPPGRPGNSGIRGPPGPPGYCDSSQCASIPYNGQSYPGSG

SEQ ID NO: 814558 - protein, 788 aa, Homo sapiens
MCTWCVFIIIIFKFVAVKPTEAPTEPPTPPPPPTIPPARDVCKGAKADIVFLTDASWSIGDDNFNKVVKFIFNTVGGFDEISPAGIQVSFVQYSDEVKSEFKLNTYNDKALALGALQNIRYRGGNTRTGKALTFIKEKVLTWESGMRKNVPKVLVVVTDGRSQDEVKKAALVIQQSGFSVFVVGVADVDYNELANIASKPSERHVFIVDDFESFEKIEDNLITFVCETATSSCPLIYLDGYTSPGFKMLEAYNLTEKNFASVQGVSLESGSFPSYSAYRIQKNAFVNQPTADLHPNGLPPSYTIILLFRLLPETPSDPFAIWQITDRDYKPQVGVIADPSSKTLSFFNKDTRGEVQTVTFDTEEVKTLFYGSFHKVHIVVTSKSVKIYIDCYEIIEKDIKEAGNITTDGYEILGKLLKGERKSAAFQIQSFDIVCSPVWTSRDRCCDIPSRRDEGKCPAFPNSCTCTQDSVGPPGPPGPAGGPGAKGPRGERGISGAIGPPGPRGDIGPPGPQGPPGPQGPNGLSIPGEQGRQGMKGDAGEPGLPGRTGTPGLPGPPGPMGPPGDRGFTGKDGAMGPRGPPGPPGSPGSPGVTGPSGKPGKPGDHGRPGPSGLKGEKGDRGDIASQNMMRAVARQVCEQLISGQMNRFNQMLNQIPNDYQSSRNQPGPPGPPGPPGSAGARGEPGPGGRPGFPGTPGMQGPPGERGLPGEKGERGTGSSGPRGLPGPPGPQGESRTGPPGSTGSRGPPGPPGRPGNSGIRGPPGPPGYCDSSQCASIPYNGQSYPGSG

SEQ ID NO: 814559 - protein, 550 aa, Homo sapiens
VYTEGDGGRTSNSLTVKWDPASGRVQKYRITYQPSTGEGNEQTTTIGGRQNSVVLQKLKPDTPYTITVSSLYPDGEGGRMTGRGKTKPLNTVRNLRVYDPSTSTLNVRWDHAEGNPRQYKLFYAPAAGGPEELVPIPGNTNYAILRNLQPDTSYTVTVVPVYTEGDGGRTSDTGRTLMRGLARNVQVYNPTPNSLDVRWDPAPGPVLQYRVVYSPVDGTRPSESIVVPGNTRMVHLERLIPDTLYSVNLVALYSDGEGNPSPAQGRTLPRSGPRNLRVFGETTNSLSVAWDHADGPVQQYRIIYSPTVGDPIDEYTTVPGRRNNVILQPLQPDTPYKITVIAVYEDGDGGHLTGNGRTVGLLPPQNIHISDEWYTRFRVSWDPSPSPVLGYKIVYKPVGSNEPMEAFVGEMTSYTLHNLNPSTTYDVNVYAQYDSGLSVPLTDQGTTLYLNVTDLKTYQIGWDTFCVKWSPHRAATSYRLKLSPADGTRGQEITVRGSETSHCFTGLSPDTDYGVTVFVQTPNLEGPGVSVKEHTSKFLRNLESFHKALE

SEQ ID NO: 814560 - protein, 675 aa, Homo sapiens
AVVADLDVLHLDGVLGVGLRIMELANIQQWTAVTGEGKWPRPLEPLAAVCAEVKKAALVIQQSGFSVFVVGVADVDYNELANIASKPSERHVFIVDDFESFEKIEDNLITFVCETATSSCPLIYLDGYTSPGFKMLEAYNLTEKNFASVQGVSLESGSFPSYSAYRIQKNAFVNQPTADLHPNGLPPSYTIILLFRLLPETPSDPFAIWQITDRDYKPQVGVIADPSSKTLSFFNKDTRGEVQTVTFDTEEVKTLFYGSFHKVHIVVTSKSVKIYIDCYEIIEKDIKEAGNITTDGYEILGKLLKGERKSAAFQIQSFDIVCSPVWTSRDRCCDIPSRRDEGKCPAFPNSCTCTQDSVGPPGPPGPAGGPGAKGPRGERGISGAIGPPGPRGDIGPPGPQGPPGPQGPNGLSIPGEQGRQGMKGDAGEPGLPGRTGTPGLPGPPGPMGPPGDRGFTGKDGAMGPRGPPGPPGSPGSPGVTGPSGKPGKPGDHGRPGPSGLKGEKGDRGDIASQNMMRAVARQVCEQLISGQMNRFNQMLNQIPNDYQSSRNQPGPPGPPGPPGSAGARGEPGPGGRPGFPGTPGMQGPPGERGLPGEKGERGTGSSGPRGLPGPPGPQGESRTGPPGSTGSRGPPGPPGRPGNSGIRGPPGPPGYCDSSQCASIPYNGQSYPGSG

SEQ ID NO: 814561 - protein, 220 aa, Homo sapiens
VYTEGDGGRTSNSLTVKWDPASGRVQKYRITYQPSTGEGNEQTTTIGGRQNSVVLQKLKPDTPYTITVSSLYPDGEGGRMTGRGKTKPLNTVRNLRVYDPSTSTLNVRWDHAEGNPRQYKLFYAPAAGGPEELVPIPGNTNYAILRNLQPDTHPGVPFLIVENLVSAGSLAPSTQSVDIFAFALEMLAKYFVNKSCKERTCRVPLVSTAGSLSETLRLSS

SEQ ID NO: 814562 - protein, 2305 aa, Homo sapiens
MRSRLPPALAALGAALLLSSIEAEVDPPSDLNFKIIDENTVHMSWAKPVDPIVGYRITVDPTTDGPTKEFTLSASTTETLLSELVPETEYVVTITSYDEVEESVPVIGQLTIQTGSSTKPVEKKPGKTEIQKCSVSAWTDLVFLVDGSWSVGRNNFKYILDFIAALVSAFDIGEEKTRVGVVQYSSDTRTEFNLNQYYQRDELLAAIKKIPYKGGNTMTGDAIDYLVKNTFTESAGARVGFPKVAIIITDGKSQDEVEIPARELRNVGVEVFSLGIKAADAKELKQIASTPSLNHVFNVANFDAIVDIQNEIISQVCSGVDEQLGELVSGEEVVEPPSNLIAMEVSSKYVKLNWNPSPSPVTGYKVILTPMTAGSRQHALSVGPQTTTLSVRDLSADTEYQISVSAMKGMTSSEPISIMEKTQPMKVQVECSRGVDIKADIVFLVDGSYSIGIANFVKVRAFLEVLVKSFEISPNRVQISLVQYSRDPHTEFTLKKFTKVEDIIEAINTFPYRGGSTNTGKAMTYVREKIFVPSKGSRSNVPKVMILITDGKSSDAFRDPAIKLRNSDVEIFAVGVKDAVRSELEAIASPPAETHVFTVEDFDAFQRISFELTQSICLRIEQELAAIKKKAYVPPKDLSFSEVTSYGFKTNWSPAGENVFSYHITYKEAAGDDEVTVVEPASSTSVVLSSLKPETLYLVNVTAEYEDGFSIPLAGEETTEEVKGAPRNLKVTDETTDSFKITWTQAPGRVLRYRIIYRPVAGGESREVTTPPNQRRRTLENLIPDTKYEVSVIPEYFSGPGTPLTGNAATEEVRGNPRDLRVSDPTTSTMKLSWSGAPGKVKQYLVTYTPVAGGETQEVTVRGDTTNTVLQGLKEGTQYALSVTALYASGAGDALFGEGTTLEERGSPQDLVTKDITDTSIGAYWTSAPGMVRGYRVSWKSLYDDVDTGEKNLPEDAIHTMIENLQPETKYRISVFATYSSGEGEPLTGDATTELSQDSKTLKVDEETENTMRVTWKPAPGKVVNYRVVYRPHGRGKQMVAKVPPTVTSTVLKRLQPQTTYDITVLPIYKMGEGKLRQGSGTTASRFKSPRNLKTSDPTMSSFRVTWEPAPGEVKGYKVTFHPTGDDRRLGELVVGPYDNTVVLEELRAGTTYKVNVFGMFDGGESSPLVGQEMTTLSDTTVMPILSSGMECLTRAEADIVLLVDGSWSIGRANFRTVRSFISRIVEVFDIGPKRVQIALAQYSGDPRTEWQLNAHRDKKSLLQAVANLPYKGGNTLTGMALNFIRQQNFRTQAGMRPRARKIGVLITDGKSQDDVEAPSKKLKDEGVELFAIGIKNADEVELKMIATDPDDTHAYNVADFESLSRIVDDLTINLCNSVKGPGDLEAPSNLVISERTHRSFRVSWTPPSDSVDRYKVEYYPVSGGKRQEFYVSRMETSTVLKDLKPETEYVVNVYSVVEDEYSEPLKGTEKTLPVPVVSLNIYDVGPTTMHVQWQPVGGATGYILSYKPVKDTEPTRPKEVRLGPTVNDMQLTDLVPNTEYAVTVQAVLHDLTSEPVTVREVTLPLPRPQDLKLRDVTHSTMNVFWEPVPGKVRKYIVRYKTPEEDVKEVEVDRSETSTSLKDLFSQTLYTVSVSAVHDEGESPPVTAQETTRPVPAPTNLKITEVTSEGFRGTWDHGASDVSLYRITWAPFGSSDKMETILNGDENTLVFENLNPNTIYEVSITAIYPDESESDDLIGSERTLPILTTQAPKSGPRNLQVYNATSNSLTVKWDPASGRVQKYRITYQPSTGEGNEQTTTIGGRQNSVVLQKLKPDTPYTITVSSLYPDGEGGRMTGRGKTKPLNTVRNLRVYDPSTSTLNVRWDHAEGNPRQYKLFYAPAAGGPEELVPIPGNTNYAILRNLQPDTSYTVTVVPVYTEGDGGRTSDTGRTLMRGLARNVQVYNPTPNSLDVRWDPAPGPVLQYRVVYSPVDGTRPSESIVVPGNTRMVHLERLIPDTLYSVNLVALYSDGEGNPSPAQGRTLPRSGPRNLRVFGETTNSLSVAWDHADGPVQQYRIIYSPTVGDPIDEYTTVPGRRNNVILQPLQPDTPYKITVIAVYEDGDGGHLTGNGRTVGLLPPQNIHISDEWYTRFRVSWDPSPSPVLGYKIVYKPVGSNEPMEAFVGEMTSYTLHNLNPSTTYDVNVYAQYDSGLSVPLTDQGTTLYLNVTDLKTYQIGWDTFCVKWSPHRAATSYRLKLSPADGTRGQEITVRGSETSHCFTGLSPDTDYGVTVFVQTPNLEGPGVSVKEHTSKFLRNLESFHKALE

SEQ ID NO: 814563 - protein, 2305 aa, Homo sapiens; identical to SEQ ID NO: 814562

SEQ ID NO: 814564 - protein, 1755 aa, Homo sapiens
MRSRLPPALAALGAALLLSSIEAEVDPPSDLNFKIIDENTVHMSWAKPVDPIVGYRITVDPTTDGPTKEFTLSASTTETLLSELVPETEYVVTITSYDEVEESVPVIGQLTIQTGSSTKPVEKKPGKTEIQKCSVSAWTDLVFLVDGSWSVGRNNFKYILDFIAALVSAFDIGEEKTRVGVVQYSSDTRTEFNLNQYYQRDELLAAIKKIPYKGGNTMTGDAIDYLVKNTFTESAGARVGFPKVAIIITDGKSQDEVEIPARELRNVGVEVFSLGIKAADAKELKQIASTPSLNHVFNVANFDAIVDIQNEIISQVCSGVDEQLGELVSGEEVVEPPSNLIAMEVSSKYVKLNWNPSPSPVTGYKVILTPMTAGSRQHALSVGPQTTTLSVRDLSADTEYQISVSAMKGMTSSEPISIMEKTQPMKVQVECSRGVDIKADIVFLVDGSYSIGIANFVKVRAFLEVLVKSFEISPNRVQISLVQYSRDPHTEFTLKKFTKVEDIIEAINTFPYRGGSTNTGKAMTYVREKIFVPSKGSRSNVPKVMILITDGKSSDAFRDPAIKLRNSDVEIFAVGVKDAVRSELEAIASPPAETHVFTVEDFDAFQRISFELTQSICLRIEQELAAIKKKAYVPPKDLSFSEVTSYGFKTNWSPAGENVFSYHITYKEAAGDDEVTVVEPASSTSVVLSSLKPETLYLVNVTAEYEDGFSIPLAGEETTEEVKGAPRNLKVTDETTDSFKITWTQAPGRVLRYRIIYRPVAGGESREVTTPPNQRRRTLENLIPDTKYEVSVIPEYFSGPGTPLTGNAATEEVRGNPRDLRVSDPTTSTMKLSWSGAPGKVKQYLVTYTPVAGGETQEVTVRGDTTNTVLQGLKEGTQYALSVTALYASGAGDALFGEGTTLEERGSPQDLVTKDITDTSIGAYWTSAPGMVRGYRVSWKSLYDDVDTGEKNLPEDAIHTMIENLQPETKYRISVFATYSSGEGEPLTGDATTELSQDSKTLKVDEETENTMRVTWKPAPGKVVNYRVVYRPHGRGKQMVAKVPPTVTSTVLKRLQPQTTYDITVLPIYKMGEGKLRQGSGTTASRFKSPRNLKTSDPTMSSFRVTWEPAPGEVKGYKVTFHPTGDDRRLGELVVGPYDNTVVLEELRAGTTYKVNVFGMFDGGESSPLVGQEMTTLSDTTVMPILSSGMECLTRAEADIVLLVDGSWSIGRANFRTVRSFISRIVEVFDIGPKRVQIALAQYSGDPRTEWQLNAHRDKKSLLQAVANLPYKGGNTLTGMALNFIRQQNFRTQAGMRPRARKIGVLITDGKSQDDVEAPSKKLKDEGVELFAIGIKNADEVELKMIATDPDDTHAYNVADFESLSRIVDDLTINLCNSVKGPGDLEAPSNLVISERTHRSFRVSWTPPSDSVDRYKVEYYPVSGGKRQEFYVSRMETSTVLKDLKPETEYVVNVYSVVEDEYSEPLKGTEKTLPVPVVSLNIYDVGPTTMHVQWQPVGGATGYILSYKPVKDTEPTRPKEVRLGPTVNDMQLTDLVPNTEYAVTVQAVLHDLTSEPVTVREVTLPLPRPQDLKLRDVTHSTMNVFWEPVPGKVRKYIVRYKTPEEDVKEVEVDRSETSTSLKDLFSQTLYTVSVSAVHDEGESPPVTAQETTRPVPAPTNLKITEVTSEGFRGTWDHGASDVSLYRITWAPFGSSDKMETILNGDENTLVFENLNPNTIYEVSITAIYPDESESDDLIGSERTLPILTTQGKNLI

SEQ ID NO: 814565 - protein, 126 aa, Homo sapiens
MRSRLPPALAALGAALLLSSIEAEVDPPSDLNFKIIDENTVHMSWAKPVDPIVGYRITVDPTTDGPTKEFTLSASTTETLLSELVPETEYVVTITSYDEVEESVPVIGQLTIQTGFFSTGFVEPRA

SEQ ID NO: 814566 - protein, 448 aa, Homo sapiens
MKSLSLLLAVALGLATAVSAGPAVIECWFVEDASGKGLAKRPGALLLRQGPGEPPPRPDLDPELYLSVHDPAGALQAAFRRYPRGAPAPHCEMSRFVPLPASAKWASGLTPAQNCPRALDGAWLMVSISSPVLSLSSLLRPQPEPQQEPVLITMATVVLTVLTHTPAPRVRLGQDALLDLSFAYMPPTSEAASSLAPGPPPFGLEWRRQHLGKGHLLLAATPGLNGQMPAAQEGAVAFAAWDDDEPWGPWTGNGTFWLPRVQPFQEGTYLATIHLPYLQGQVTLELAVYKPPKVSLMPATLARAAPGEAPPELLCLVSHFYPSGGLEVEWELRGGPGGRSQKAEGQRWLSALRHHSDGSVSLSGHLQPPPVTTEQHGARYACRIHHPSLPASGRSAEVTLEVAGLSGPSLEDSVGLFLSAFLLLGLFKALGWAAVYLSTCKDSKKKAE

SEQ ID NO: 814567 - protein, 111 aa, Homo sapiens
LWPGSGRPEEADPAVQSSTASAGPPSCPERLPPVPSALTGWLLVHQSPCSSHTGLFLSSNEPNASRPPPGPSPLFPLPGPPLPSLGRRRGRPRHSPQTAARPSCAVHHSCI

SEQ ID NO: 814568 - protein, 185 aa, Homo sapiens
EVAPLEPMPGWEWGRSPDIQTAPHSRPYTPGLATAVSAGPAVIECWFVEDASGKGLAKRPGALLLRQGPGEPPPRPDLDPELYLSVHDPAGALQAAFRRYPRGAPAPHCEMSRFVPLPASAKWASGLTPAQNCPRALDGAWLMVSISSPVLSLSSLLRPQPEPQQEPVLITMATGSWGGEVEKGG

SEQ ID NO: 814569 - protein, 412 aa, Homo sapiens [sequence omitted]

SEQ ID NO: 814570 - protein, 299 aa, Homo sapiens [sequence omitted]

SEQ ID NO: 814571 - protein, 299 aa, Homo sapiens [sequence omitted]

SEQ ID NO: 814572 - protein, 70 aa, Homo sapiens
FQVQKTAGFCQHLHKHKAYLTPKVRVPQLWACPASHGSGMPCYPQEGSQLPLSQAAVYLSTCKDSKKKAE

SEQ ID NO: 814573 - protein, 86 aa, Homo sapiens
ESKQCPESKQCPESKQCPESKQCPESKQCPESKQCLSSAPNPSNLSPLSGWNAFFFFFHLYKDNFSFFFFFETESHLFRPGCSAVA

SEQ ID NO: 814574 - protein, 448 aa, Homo sapiens; identical to SEQ ID NO: 814566

SEQ ID NO: 814575 - protein, 448 aa, Homo sapiens; identical to SEQ ID NO: 814566

SEQ ID NO: 814576 - protein, 299 aa, Homo sapiens [sequence omitted]

SEQ ID NO: 814577 - protein, 448 aa, Homo sapiens; identical to SEQ ID NO: 814566

SEQ ID NO: 814578 - protein, 448 aa, Homo sapiens; identical to SEQ ID NO: 814566

SEQ ID NO: 814579 - protein, 448 aa, Homo sapiens; identical to SEQ ID NO: 814566

SEQ ID NO: 814580 - protein, 448 aa, Homo sapiens; identical to SEQ ID NO: 814566

SEQ ID NO: 814581 - protein, 412 aa, Homo sapiens [sequence omitted]

SEQ ID NO: 814582 - protein, 412 aa, Homo sapiens [sequence omitted]

SEQ ID NO: 814583 - protein, 412 aa, Homo sapiens [sequence omitted]

SEQ ID NO: 814584 - protein, 412 aa, Homo sapiens [sequence omitted]

SEQ ID NO: 814585 - protein, 299 aa, Homo sapiens [sequence omitted]

SEQ ID NO: 814586 - protein, 167 aa, Homo sapiens [sequence omitted]

SEQ ID NO: 814587 - protein, 627 aa, Homo sapiens
MNLIFHKDILFGIPANKVPQDEWTGYTPRGKDDEIPCRRMRSGSYIKAMGDEDSGDSDTSPKPSPKVAARRESYLKATQPSLTELTTLKISNEHSPKLQIRSHSYLRAVSEVSINRSLDSLDPAGLLTSPKFRSRNESYMRAMSTISQVSEMEVNGQFESVCESVFSELESQAVEALDLPMPGCFRMRSHSYVRAIEKGCSQDDECVSLRSSSPPRTTTTVRTIQSSTVSSCITTYKKTPPPVPPRTTTKPFISITAQSSTESAQDAYMDGQGQRGDIISQSGLSNSTESLDSMKALTAAIEAANAQIHGPASQHMGNNTATVTTTTTIATVTTEDRKKDHFKKNRCLSIGIQVDDAEEPDKTGENKAPSKFQSVGVQVEEEKCFRRFTRSNSVTTAVQADLDFHDNLENSLESIEDNSCPGPMARQFSRDASTSTVSIQGSGNHYHACAADDDFDTDFDPSILPPPDPWIDSITEDPLEAVQRSVCHRDGHWFLKLLQAERDRMEGWCQQMEREERENNLPEDILGKIRTAVGSAQLLMAQKFYQFRELCEENLNPNAHPRPTSQDLAGFWDMLQLSIENISMKFDELHQLKANNWKQMDPLDKKVEQCRFCMVHLKTCTNTGQSK

SEQ ID NO: 814588 - protein, 977 aa, Homo sapiens
MKGLSGSRSHHHGVTCDSACDSLSHHSDRKPYLLSPVEHHPADHPYYTQRNSFQAECVGPFSDPLASSTFPRRHYTSQQELKDECALVPRTLATKANRIPANLLDQFERQLPLSRDGYHTLQYKRTAVEHRSDSPGRIRHLVHSVQKLFTKSHSLEGPSKGSVNGGKASPDEAQAARYGKRSKSKERRAEPKARPSTSPGWWSSDDNLDGDMCIYHAPSGVMTMGRCPDRSASQYFLEAYNTISEQAVKASRSNNDVKCSTCANLPVSLDTPLLKKSAWSSTLTVSRAREVYQKASVNMDQAMVKSESCQQERSCQYLQVPQDEWTGYTPRGKDDEIPCRRMRSGSYIKAMGDEDSGDSDTSPKPSPKVAARRESYLKATQPSLTELTTLKISNEHSPKLQIRSHSYLRAVSEVSINRSLDSLDPAGLLTSPKFRSRNESYMRAMSTISQVSEMEVNGQFESVCESVFSELESQAVEALDLPMPGCFRMRSHSYVRAIEKGCSQDDECVSLRSSSPPRTTTTVRTIQSSTVSSCITTYKKTPPPVPPRTTTKPFISITAQSSTESAQDAYMDGQGQRGDIISQSGLSNSTESLDSMKALTAAIEAANAQIHGPASQHMGNNTATVTTTTTIATVTTEDRKKDHFKKNRCLSIGIQVDDAEEPDKTGENKAPSKFQSVGVQVEEEKCFRRFTRSNSVTTAVQADLDFHDNLENSLESIEDNSCPGPMARQFSRDASTSTVSIQGSGNHYHACAADDDFDTDFDPSILPPPDPWIDSITEDPLEAVQRSVCHRDGHWFLKLLQAERDRMEGWCQQMEREERENNLPEDILGKIRTAVGSAQLLMAQKFYQFRELCEENLNPNAHPRPTSQDLAGFWDMLQLSIENISMKFDELHQLKANNWKQMDPLDKKERRAPPPVPKKPAKGPAPLIRERSLESSQRQEARKRLMAAKRAASVRQNSATESAESIEIYIPEAQTRL

SEQ ID NO: 814589 - protein, 675 aa, Homo sapiens
MNLIFHKDILFGIPANKVPQDEWTGYTPRGKDDEIPCRRMRSGSYIKAMGDEDSGDSDTSPKPSPKVAARRESYLKATQPSLTELTTLKISNEHSPKLQIRSHSYLRAVSEVSINRSLDSLDPAGLLTSPKFRSRNESYMRAMSTISQVSEMEVNGQFESVCESVFSELESQAVEALDLPMPGCFRMRSHSYVRAIEKGCSQDDECVSLRSSSPPRTTTTVRTIQSSTVSSCITTYKKTPPPVPPRTTTKPFISITAQSSTESAQDAYMDGQGQRGDIISQSGLSNSTESLDSMKALTAAIEAANAQIHGPASQHMGNNTATVTTTTTIATVTTEDRKKDHFKKNRCLSIGIQVDDAEEPDKTGENKAPSKFQSVGVQVEEEKCFRRFTRSNSVTTAVQADLDFHDNLENSLESIEDNSCPGPMARQFSRDASTSTVSIQGSGNHYHACAADDDFDTDFDPSILPPPDPWIDSITEDPLEAVQRSVCHRDGHWFLKLLQAERDRMEGWCQQMEREERENNLPEDILGKIRTAVGSAQLLMAQKFYQFRELCEENLNPNAHPRPTSQDLAGFWDMLQLSIENISMKFDELHQLKANNWKQMDPLDKKERRAPPPVPKKPAKGPAPLIRERSLESSQRQEARKRLMAAKRAASVRQNSATESAESIEIYIPEAQTRL

SEQ ID NO: 814590 - protein, 635 aa, Homo sapiens
MIDLFKAEWVSSVCVQVSRNGRTDQVPQDEWTGYTPRGKDDEIPCRRMRSGSYIKAMGDEDSGDSDTSPKPSPKVAARRESYLKATQPSLTELTTLKISNEHSPKLQIRSHSYLRAVSEVSINRSLDSLDPAGLLTSPKFRSRNESYMRAMSTISQVSEMEVNGQFESVCESVFSELESQAVEALDLPMPGCFRMRSHSYVRAIEKGCSQDDECVSLRSSSPPRTTTTVRTIQSSTVSSCITTYKKTPPPVPPRTTTKPFISITAQSSTESAQDAYMDGQGQRGDIISQSGLSNSTESLDSMKALTAAIEAANAQIHGPASQHMGNNTATVTTTTTIATVTTEDRKKDHFKKNRCLSIGIQVDDAEEPDKTGENKAPSKFQSVGVQVEEEKCFRRFTRSNSVTTAVQADLDFHDNLENSLESIEDNSCPGPMARQFSRDASTSTVSIQGSGNHYHACAADDDFDTDFDPSILPPPDPWIDSITEDPLEAVQRSVCHRDGHWFLKLLQAERDRMEGWCQQMEREERENNLPEDILGKIRTAVGSAQLLMAQKFYQFRELCEENLNPNAHPRPTSQDLAGFWDMLQLSIENISMKFDELHQLKANNWKQMDPLDKKVEQCRFCMVHLKTCTNTGQSK

SEQ ID NO: 814591 - protein, 635 aa, Homo sapiens; identical to SEQ ID NO: 814590

SEQ ID NO: 814592 - protein, 276 aa, Homo sapiens
MIDLFKAEWVSSVCVQVSRNGRTDQVPQDEWTGYTPRGKDDEIPCRRMRSGSYIKAMGDEDSGDSDTSPKPSPKVAARRESYLKATQPSLTELTTLKISNEHSPKLQIRSHSYLRAVSEVSINRSLDSLDPAGLLTSPKFRSRNESYMRAMSTISQVSEMEVNGQFESVCESVFSELESQAVEALDLPMPGCFRMRSHSYVRAIEKGCSQDDECVSLRSSSPPRTTTTVRTIQSSTVELETSRTSTLAGSDERKKSKIYDTTYSFCEATYPCLLLH

SEQ ID NO: 814593 - protein, 265 aa, Homo sapiens
MIDLFKAEWVSSVCVQVSRNGRTDQVPQDEWTGYTPRGKDDEIPCRRMRSGSYIKAMGDEDSGDSDTSPKPSPKVAARRESYLKATQPSLTELTTLKISNEHSPKLQIRSHSYLRAVSEVSINRSLDSLDPAGLLTSPKFRSRNESYMRAMSTISQVSEMEVNGQFESVCESVFSELESQAVEALDLPMPGCFRMRSHSYVRAIEKGCSQDDECVSLRSSSPPRTTTTVRTIQSSTGPNHNRDDRWRCPARLSCHLLAYHHFANR

SEQ ID NO: 814594 - protein, 249 aa, Homo sapiens
MIDLFKAEWVSSVCVQVSRNGRTDQVPQDEWTGYTPRGKDDEIPCRRMRSGSYIKAMGDEDSGDSDTSPKPSPKVAARRESYLKATQPSLTELTTLKISNEHSPKLQIRSHSYLRAVSEVSINRSLDSLDPAGLLTSPKFRSRNESYMRAMSTISQVSEMEVNGQFESVCESVFSELESQAVEALDLPMPGCFRMRSHSYVRAIEKGCSQDDECVSLRSSSPPRTTTTVRTIQSSTGSLDKKLESWALG

SEQ ID NO: 814595 - protein, 237 aa, Homo sapiens
MIDLFKAEWVSSVCVQVSRNGRTDQVPQDEWTGYTPRGKDDEIPCRRMRSGSYIKAMGDEDSGDSDTSPKPSPKVAARRESYLKATQPSLTELTTLKISNEHSPKLQIRSHSYLRAVSEVSINRSLDSLDPAGLLTSPKFRSRNESYMRAMSTISQVSEMEVNGQFESVCESVFSELESQAVEALDLPMPGCFRMRSHSYVRAIEKGCSQDDECVSLRSSSPPRTTTTVRTIQSSTD

SEQ ID NO: 814596 - protein, 513 aa, Homo sapiens
LLPHRPSPFVPYPGPVLSQVPDVQFQMPGPRVWGKYLWRSPHSKGCPGAMWWLLLWGVLQACPTRGSVLLAQELPQQLTSPGYPEPYGKGQESSTDIKAPEGFAVRLVFQDFDLEPSQDCAGDSVTISFVGSDPSQFCGQQGSPLGRPPGQREFVSSGRSLRLTFRTQPSSENKTAHLHKGFLALYQTVAVNYSQPISEASRGSEAINAPGDNPAKVQNHCQEPYYQAAAAGALTCATPGTWKDRQDGEEVLQCMPVCGRPVTPIAQNQTTLGSSRAKLGNFPWQAFTSIHGRGGGALLGDRWILTAAHTVYPKDSVSLRKNQSVNVFLGHTAIDEMLKLGNHPVHRVVVHPDYRQNESHNFSGDIALLELQHSIPLGPNVLPVCLPDNETLYRSGLLGYVSGFGMEMGWLTTELKYSRLPVAPREACNAWLQKRQRPEVFSDNMFCVGDETQRHSVCQGDSGSVYVVWDNHAHHWVATGIVSWGIGCGEGYDFYTKVLSYVDWIKGVMNGKN

SEQ ID NO: 814597 - protein, 316 aa, Homo sapiens
GGGVPPPPLPRGGSQKEPKKGWGGGAQNPFSKPPLGWPKTPPGTWKDRQDGEEVLQCMPVCGRPVTPIAQNQTTLGSSRAKLGNFPWQAFTSIHGRGGGALLGDRWILTAAHTVYPKDSVSLRKNQSVNVFLGHTAIDEMLKLGNHPVHRVVVHPDYRQNESHNFSGDIALLELQHSIPLGPNVLPVCLPDNETLYRSGLLGYVSGFGMEMGWLTTELKYSRLPVAPREACNAWLQKRQRPEVFSDNMFCVGDETQRHSVCQGDSGSVYVVWDNHAHHWVATGIVSWGIGCGEGYDFYTKVLSYVDWIKGVMNGKN

SEQ ID NO: 814598 - protein, 455 aa, Homo sapiens
LLPHRPSPFVPYPGPVLSQVPDVQFQMPGPRVWGKYLWRSPHSKGCPGAMWWLLLWGVLQACPTRGSVLLAQELPQQLTSPGYPEPYGKGQESSTDIKAPEGFAVRLVFQDFDLEPSQDCAGDSVTISFVGSDPSQFCGQQGSPLGRPPGQREFVSSGRSLRLTFRTQPSSENKTAHLHKGFLALYQTVAVNYSQPISEASRGSEAINAPGDNPAKVQNHCQEPYYQAAAAGALTCATPGTWKDRQDGEEVLQCMPVCGRPVTPIAQNQTTLGSSRAKLGNFPWQAFTSIHGRGGGALLGDRWILTAAHTVYPKDSVSLRKNQSVNVFLGHTAIDEMLKLGNHPVHRVVVHPDYRQNESHNFSGDIALLELQHSIPLGPNVLPVCLPDNETLYRSGLLGYVSGFGMEMGWLTTELKYSRLPVAPREACNAWLQKRQRPEVFSDNMFCVGDERRIT

SEQ ID NO: 814599 - protein, 295 aa, Homo sapiens
LLPHRPSPFVPYPGPVLSQVPDVQFQMPGPRVWGKYLWRSPHSKGCPGAMWWLLLWGVLQACPTRGSVLLAQELPQQLTSPGYPEPYGKGQESSTDIKAPEGFAVRLVFQDFDLEPSQDCAGDSVTISFVGSDPSQFCGQQGSPLGRPPGQREFVSSGRSLRLTFRTQPSSENKTAHLHKGFLALYQTVAVNYSQPISEASRGSEAINAPGDNPAKVQNHCQEPYYQAAAAGALTCATPGTWKDRQDGEEVLQCMPGTTKLSSTAAAPSYISPAIHEGSSPPFLRSTLLNESIAF

SEQ ID NO: 814600 - protein, 287 aa, Homo sapiens
LLPHRPSPFVPYPGPVLSQVPDVQFQMPGPRVWGKYLWRSPHSKGCPGAMWWLLLWGVLQACPTRGSVLLAQELPQQLTSPGYPEPYGKGQESSTDIKAPEGFAVRLVFQDFDLEPSQDCAGDSVTISFVGSDPSQFCGQQGSPLGRPPGQREFVSSGRSLRLTFRTQPSSENKTAHLHKGFLALYQTVAVNYSQPISEASRGSEAINAPGDNPAKVQNHCQEPYYQAAAAGALTCATPGTWKDRQDGEEVLQCMPAAAPSYISPAIHEGSSPPFLRSTLLNESIAF

SEQ ID NO: 814601 - protein, 164 aa, Homo sapiens
LLPHRPSPFVPYPGPVLSQVPDVQFQMPGPRVWGKYLWRSPHSKGCPGAMWWLLLWGVLQACPTRGSVLLAQELPQQLTSPGYPEPYGKGQESSTDIKAPEGFAVRLVFQDFDLEPSQDCAGDSVTVSWGWGGSRQDCGQGDSRGCGKWRCPESPIWRRDEFSM

SEQ ID NO: 814602 - protein, 164 aa, Homo sapiens; identical to SEQ ID NO: 814601

SEQ ID NO: 814603 - protein, 108 aa, Homo sapiens
STSEKQVFNQCVSDAAADCHPYPASLPVCGRPVTPIAQNQTTLGSSRAKLGNFPWQAFTSIHGRGGGALLGDRWILTAAHTVYPKDSVSLRKNQSVNVFLGHTAIDEM

SEQ ID NO: 814604 - protein, 594 aa, Homo sapiens
MASSTPSSSATSSNAGADPNTTNLRPTTYDTWCGVAHGCTRKLGLKICGFLQRTNSLEEKSRLVSAFKERQSSKNLLSCENSDRDARFRRTETDFSNLFARDLLPAKNGEEQTVQFLLEVVDILLNYVRKTFDRSTKVLDFHHPHQLLEGMEGFNLELSDHPESLEQILVDCRDTLKYGVRTGHPRFFNQLSTGLDIIGLAGEWLTSTANTNMFTYEIAPVFVLMEQITLKKMREIVGWSSKDGDGIFSPGGAISNMYSIMAARYKYFPEVKTKGMAAVPKLVLFTSEQSHYSIKKAGAALGFGTDNVILIKCNERGKIIPADFEAKILEAKQKGYVPFYVNATAGTTVYGAFDPIQEIADICEKYNLWLHVDAAWGGGLLMSRKHRHKLNGIERANSVTWNPHKMMGVLLQCSAILVKEKGILQGCNQMCAGYLFQPDKQYDVSYDTGDKAIQCGRHVDIFKFWLMWKAKGTVGFENQINKCLELAEYLYAKIKNREEFEMVFNGEPEHTNVCFWYIPQSLRGVPDSPQRREKLHKVAPKIKALMMESGTTMVGYQPQGDKANFFRMVISNPAATQSDIDFLIEEIERLGQDL

SEQ ID NO: 814605 - protein, 224 aa, Homo sapiens
MASSTPSSSATSSNAGADPNTTNLRPTTYDTWCGVAHGCTRKLGLKICGFLQRTNSLEEKSRLVSAFKERQSSKNLLSCENSDRDARFRRTETDFSNLFARDLLPAKNGEEQTVQFLLEVVDILLNYVRKTFDRSTKVLDFHHPHQLLEGMEGFNLELSDHPESLEQILVDCRDTLKYGVRTGHPRFFNQLSTGLDIIGLAGEWLTSTANTNMPSDMRECWLLR

SEQ ID NO: 814606 - protein, 594 aa, Homo sapiens; identical to SEQ ID NO: 814604

SEQ ID NO: 814607 - protein, 254 aa, Homo sapiens
SGLREPQRQRRVLPAESQAGEAERRRGRQGARRSHPPSGPRQLLTRHAMARGKAKANSVTWNPHKMMGVLLQCSAILVKEKGILQGCNQMCAGYLFQPDKQYDVSYDTGDKAIQCGRHVDIFKFWLMWKAKGTVGFENQINKCLELAEYLYAKIKNREEFEMVFNGEPEHTNVCFWYIPQSLRGVPDSPQRREKLHKVAPKIKALMMESGTTMVGYQPQGDKANFFRMVISNPAATQSDIDFLIEEIERLGQDL

SEQ ID NO: 814608 - protein, 524 aa, Homo sapiens
MADDIDIEAMLEAPYKKDENKLSSANGHEERSKKRKKSKSRSRSHERKRSKSKERKRSRDRERKKSKSRERKRSRSKERRRSRSRSRDRRFRGRYRSPYSGPKFNSAIRGKIGLPHSIKLSRRRSRSKSPFRKDKSPVREPIDNLTPEERDARTVFCMQLAARIRPRDLEEFFSTVGKVRDVRMISDRNSRRSKGIAYVEFVDVSSVPLAIGLTGQRVLGVPIIVQASQAEKNRAAAMANNLQKGSAGPMRLYVGSLHFNITEDMLRGIFEPFGRIESIQLMMDSETGRSKGYGFITFSDSECAKKALEQLNGFELAGRPMKVGHVTERTDASSASSFLDSDELERTGIDLGTTGRLQLMARLAEGTGLQIPPAAQQALQMSGSLAFGAVADLQTRLSQQTEASALAAAASVQPLATQCFQLSNMFNPQTEEEVGWDTEIKDDVIEECNKHGGVIHIYVDKNSAQGNVYVKCPSIAAAIAAVNALHGRWFAGKMITAAYVPLPTYHNLFPDSMTATQLLVPSRR

SEQ ID NO: 814609 - protein, 530 aa, Homo sapiens
MADDIDIEAMLEAPYKKDENKLSSANGHEERSKKRKKSKSRSRSHERKRSKSKERKRSRDRERKKSKSRERKRSRSKERRRSRSRSRDRRFRGRYRSPYSGPKFNSAIRGKIGLPHSIKLSRRRSRSKSPFRKDKSPVREPIDNLTPEERDARTVFCMQLAARIRPRDLEEFFSTVGKVRDVRMISDRNSRRSKGIAYVEFVDVSSVPLAIGLTGQRVLGVPIIVQASQAEKNRAAAMANNLQKGSAGPMRLYVGSLHFNITEDMLRGIFEPFGRIESIQLMMDSETGRSKGYGFITFSDSECAKKALEQLNGFELAGRPMKVGHVTERTDASSASSFLDSDELERTGIDLGTTGRLQLMARLAEGTGLQIPPAAQQALQMSGSLAFGAVAEFSFVIDLQTRLSQQTEASALAAAASVQPLATQCFQLSNMFNPQTEEEVGWDTEIKDDVIEECNKHGGVIHIYVDKNSAQGNVYVKCPSIAAAIAAVNALHGRWFAGKMITAAYVPLPTYHNLFPDSMTATQLLVPSRR

SEQ ID NO: 814610 - protein, 81 aa, Homo sapiens
  misc_feature (9)..(9): Xaa can be any naturally occurring amino acid
  misc_feature (12)..(12): Xaa can be any naturally occurring amino acid
  misc_feature (16)..(16): Xaa can be any naturally occurring amino acid
  misc_feature (19)..(19): Xaa can be any naturally occurring amino acid
QSTYCAYTXIEXTALXQYXKRQVYVDTELVDAVAGVDPELPKPPSCSPAWASLIPLFFLDSLGPSRPWNPIFGLGGSAAWA

SEQ ID NO: 814611 - protein, 81 aa, Homo sapiens; identical to SEQ ID NO: 814610
  misc_feature (9)..(9): Xaa can be any naturally occurring amino acid
  misc_feature (12)..(12): Xaa can be any naturally occurring amino acid
  misc_feature (16)..(16): Xaa can be any naturally occurring amino acid
  misc_feature (19)..(19): Xaa can be any naturally occurring amino acid

SEQ ID NO: 814612 - protein, 81 aa, Homo sapiens; identical to SEQ ID NO: 814610
  misc_feature (9)..(9): Xaa can be any naturally occurring amino acid
  misc_feature (12)..(12): Xaa can be any naturally occurring amino acid
  misc_feature (16)..(16): Xaa can be any naturally occurring amino acid
  misc_feature (19)..(19): Xaa can be any naturally occurring amino acid

SEQ ID NO: 814613 - protein, 81 aa, Homo sapiens; identical to SEQ ID NO: 814610
  misc_feature (9)..(9): Xaa can be any naturally occurring amino acid
  misc_feature (12)..(12): Xaa can be any naturally occurring amino acid
  misc_feature (16)..(16): Xaa can be any naturally occurring amino acid
  misc_feature (19)..(19): Xaa can be any naturally occurring amino acid

SEQ ID NO: 814614 - protein, 373 aa, Homo sapiens
MQLAARIRPRDLEEFFSTVGKVRDVRMISDRNSRRSKGIAYVEFVDVSSVPLAIGLTGQRVLGVPIIVQASQAEKNRAAAMANNLQKGSAGPMRLYVGSLHFNITEDMLRGIFEPFGRIESIQLMMDSETGRSKGYGFITFSDSECAKKALEQLNGFELAGRPMKVGHVTERTDASSASSFLDSDELERTGIDLGTTGRLQLMARLAEGTGLQIPPAAQQALQMSGSLAFGAVAEFSFVIDLQTRLSQQTEASALAAAASVQPLATQCFQLSNMFNPQTEEEVGWDTEIKDDVIEECNKHGGVIHIYVDKNSAQGNVYVKCPSIAAAIAAVNALHGRWFAGKMITAAYVPLPTYHNLFPDSMTATQLLVPSRR

SEQ ID NO: 814615 - protein, 81 aa, Homo sapiens; identical to SEQ ID NO: 814610
  misc_feature (9)..(9): Xaa can be any naturally occurring amino acid
  misc_feature (12)..(12): Xaa can be any naturally occurring amino acid
  misc_feature (16)..(16): Xaa can be any naturally occurring amino acid
  misc_feature (19)..(19): Xaa can be any naturally occurring amino acid

SEQ ID NO: 814616 - protein, 81 aa, Homo sapiens; identical to SEQ ID NO: 814610
  misc_feature (9)..(9): Xaa can be any naturally occurring amino acid
  misc_feature (12)..(12): Xaa can be any naturally occurring amino acid
  misc_feature (16)..(16): Xaa can be any naturally occurring amino acid
  misc_feature (19)..(19): Xaa can be any naturally occurring amino acid

SEQ ID NO: 814617 - protein, 373 aa, Homo sapiens; identical to SEQ ID NO: 814614

SEQ ID NO: 814618 - protein, 373 aa, Homo sapiens; identical to SEQ ID NO: 814614

SEQ ID NO: 814619 - protein, 373 aa, Homo sapiens; identical to SEQ ID NO: 814614

SEQ ID NO: 814620 - protein, 81 aa, Homo sapiens; identical to SEQ ID NO: 814610
  misc_feature (9)..(9): Xaa can be any naturally occurring amino acid
  misc_feature (12)..(12): Xaa can be any naturally occurring amino acid
  misc_feature (16)..(16): Xaa can be any naturally occurring amino acid
  misc_feature (19)..(19): Xaa can be any naturally occurring amino acid

SEQ ID NO: 814621 - protein, 373 aa, Homo sapiens; identical to SEQ ID NO: 814614

SEQ ID NO: 814622 - protein, 512 aa, Homo sapiens
MADDIDIEAMLEAPYKKDENKLSSANGHEERSKNKERKRSRDRERKKSKSRERKRSRSKERRRSRSRSRDRRFRGRYRSPYSGPKFNSAIRGKIGLPHSIKLSRRRSRSKSPFRKDKSPVREPIDNLTPEERDARTVFCMQLAARIRPRDLEEFFSTVGKVRDVRMISDRNSRRSKGIAYVEFVDVSSVPLAIGLTGQRVLGVPIIVQASQAEKNRAAAMANNLQKGSAGPMRLYVGSLHFNITEDMLRGIFEPFGRIESIQLMMDSETGRSKGYGFITFSDSECAKKALEQLNGFELAGRPMKVGHVTERTDASSASSFLDSDELERTGIDLGTTGRLQLMARLAEGTGLQIPPAAQQALQMSGSLAFGAVAEFSFVIDLQTRLSQQTEASALAAAASVQPLATQCFQLSNMFNPQTEEEVGWDTEIKDDVIEECNKHGGVIHIYVDKNSAQGNVYVKCPSIAAAIAAVNALHGRWFAGKMITAAYVPLPTYHNLFPDSMTATQLLVPSRR

SEQ ID NO: 814623 - protein, 81 aa, Homo sapiens; identical to SEQ ID NO: 814610
  misc_feature (9)..(9): Xaa can be any naturally occurring amino acid
  misc_feature (12)..(12): Xaa can be any naturally occurring amino acid
  misc_feature (16)..(16): Xaa can be any naturally occurring amino acid
  misc_feature (19)..(19): Xaa can be any naturally occurring amino acid

SEQ ID NO: 814624 - protein, 81 aa, Homo sapiens; identical to SEQ ID NO: 814610
  misc_feature (9)..(9): Xaa can be any naturally occurring amino acid
  misc_feature (12)..(12): Xaa can be any naturally occurring amino acid
  misc_feature (16)..(16): Xaa can be any naturally occurring amino acid
  misc_feature (19)..(19): Xaa can be any naturally occurring amino acid

SEQ ID NO: 814625 - protein, 81 aa, Homo sapiens; identical to SEQ ID NO: 814610
  misc_feature (9)..(9): Xaa can be any naturally occurring amino acid
  misc_feature (12)..(12): Xaa can be any naturally occurring amino acid
  misc_feature (16)..(16): Xaa can be any naturally occurring amino acid
  misc_feature (19)..(19): Xaa can be any naturally occurring amino acid

SEQ ID NO: 814626 - protein, 81 aa, Homo sapiens; identical to SEQ ID NO: 814610
  misc_feature (9)..(9): Xaa can be any naturally occurring amino acid
  misc_feature (12)..(12): Xaa can be any naturally occurring amino acid
  misc_feature (16)..(16): Xaa can be any naturally occurring amino acid
  misc_feature (19)..(19): Xaa can be any naturally occurring amino acid

SEQ ID NO: 814627 - protein, 81 aa, Homo sapiens; identical to SEQ ID NO: 814610
  misc_feature (9)..(9): Xaa can be any naturally occurring amino acid
  misc_feature (12)..(12): Xaa can be any naturally occurring amino acid
  misc_feature (16)..(16): Xaa can be any naturally occurring amino acid
  misc_feature (19)..(19): Xaa can be any naturally occurring amino acid

SEQ ID NO: 814628 - protein, 81 aa, Homo sapiens; identical to SEQ ID NO: 814610
  misc_feature (9)..(9): Xaa can be any naturally occurring amino acid
  misc_feature (12)..(12): Xaa can be any naturally occurring amino acid
  misc_feature (16)..(16): Xaa can be any naturally occurring amino acid
  misc_feature (19)..(19): Xaa can be any naturally occurring amino acid

SEQ ID NO: 814629 - protein, 81 aa, Homo sapiens; identical to SEQ ID NO: 814610
  misc_feature (9)..(9): Xaa can be any naturally occurring amino acid
  misc_feature (12)..(12): Xaa can be any naturally occurring amino acid
  misc_feature (16)..(16): Xaa can be any naturally occurring amino acid
  misc_feature (19)..(19): Xaa can be any naturally occurring amino acid

SEQ ID NO: 814630 - protein, 81 aa, Homo sapiens; identical to SEQ ID NO: 814610
  misc_feature (9)..(9): Xaa can be any naturally occurring amino acid
  misc_feature (12)..(12): Xaa can be any naturally occurring amino acid
  misc_feature (16)..(16): Xaa can be any naturally occurring amino acid
  misc_feature (19)..(19): Xaa can be any naturally occurring amino acid

SEQ ID NO: 814631 - protein, 81 aa, Homo sapiens; identical to SEQ ID NO: 814610
  misc_feature (9)..(9): Xaa can be any naturally occurring amino acid
  misc_feature (12)..(12): Xaa can be any naturally occurring amino acid
  misc_feature (16)..(16): Xaa can be any naturally occurring amino acid
  misc_feature (19)..(19): Xaa can be any naturally occurring amino acid

SEQ ID NO: 814632 - protein, 81 aa, Homo sapiens; identical to SEQ ID NO: 814610
  misc_feature (9)..(9): Xaa can be any naturally occurring amino acid
  misc_feature (12)..(12): Xaa can be any naturally occurring amino acid
  misc_feature (16)..(16): Xaa can be any naturally occurring amino acid
  misc_feature (19)..(19): Xaa can be any naturally occurring amino acid

SEQ ID NO: 814633 - protein, 81 aa, Homo sapiens; identical to SEQ ID NO: 814610
  misc_feature (9)..(9): Xaa can be any naturally occurring amino acid
  misc_feature (12)..(12): Xaa can be any naturally occurring amino acid
  misc_feature (16)..(16): Xaa can be any naturally occurring amino acid
  misc_feature (19)..(19): Xaa can be any naturally occurring amino acid

SEQ ID NO: 814634 - protein, 81 aa, Homo sapiens; identical to SEQ ID NO: 814610
  misc_feature (9)..(9): Xaa can be any naturally occurring amino acid
  misc_feature (12)..(12): Xaa can be any naturally occurring amino acid
  misc_feature (16)..(16): Xaa can be any naturally occurring amino acid
  misc_feature (19)..(19): Xaa can be any naturally occurring amino acid

SEQ ID NO: 814635 - protein, 81 aa, Homo sapiens; identical to SEQ ID NO: 814610
  misc_feature (9)..(9): Xaa can be any naturally occurring amino acid
  misc_feature (12)..(12): Xaa can be any naturally occurring amino acid
  misc_feature (16)..(16): Xaa can be any naturally occurring amino acid
  misc_feature (19)..(19): Xaa can be any naturally occurring amino acid

SEQ ID NO: 814636 - protein, 81 aa, Homo sapiens; identical to SEQ ID NO: 814610
  misc_feature (9)..(9): Xaa can be any naturally occurring amino acid
  misc_feature (12)..(12): Xaa can be any naturally occurring amino acid
  misc_feature (16)..(16): Xaa can be any naturally occurring amino acid
  misc_feature (19)..(19): Xaa can be any naturally occurring amino acid

SEQ ID NO: 814637 - protein, 81 aa, Homo sapiens; identical to SEQ ID NO: 814610
  misc_feature (9)..(9): Xaa can be any naturally occurring amino acid
  misc_feature (12)..(12): Xaa can be any naturally occurring amino acid
  misc_feature (16)..(16): Xaa can be any naturally occurring amino acid
  misc_feature (19)..(19): Xaa can be any naturally occurring amino acid

SEQ ID NO: 814638 - protein, 81 aa, Homo sapiens; identical to SEQ ID NO: 814610
  misc_feature (9)..(9): Xaa can be any naturally occurring amino acid
  misc_feature (12)..(12): Xaa can be any naturally occurring amino acid
  misc_feature (16)..(16): Xaa can be any naturally occurring amino acid
  misc_feature (19)..(19): Xaa can be any naturally occurring amino acid

SEQ ID NO: 814639 - protein, 81 aa, Homo sapiens; identical to SEQ ID NO: 814610
  misc_feature (9)..(9): Xaa can be any naturally occurring amino acid
  misc_feature (12)..(12): Xaa can be any naturally occurring amino acid
  misc_feature (16)..(16): Xaa can be any naturally occurring amino acid
  misc_feature (19)..(19): Xaa can be any naturally occurring amino acid

SEQ ID NO: 814640 - protein, 81 aa, Homo sapiens; identical to SEQ ID NO: 814610
  misc_feature (9)..(9): Xaa can be any naturally occurring amino acid
  misc_feature (12)..(12): Xaa can be any naturally occurring amino acid
  misc_feature (16)..(16): Xaa can be any naturally occurring amino acid
  misc_feature (19)..(19): Xaa can be any naturally occurring amino acid

SEQ ID NO: 814641 - protein, 81 aa, Homo sapiens; identical to SEQ ID NO: 814610
  misc_feature (9)..(9): Xaa can be any naturally occurring amino acid
  misc_feature (12)..(12): Xaa can be any naturally occurring amino acid
  misc_feature (16)..(16): Xaa can be any naturally occurring amino acid
  misc_feature (19)..(19): Xaa can be any naturally occurring amino acid

SEQ ID NO: 814642 - protein, 81 aa, Homo sapiens; identical to SEQ ID NO: 814610
  misc_feature (9)..(9): Xaa can be any naturally occurring amino acid
  misc_feature (12)..(12): Xaa can be any naturally occurring amino acid
  misc_feature (16)..(16): Xaa can be any naturally occurring amino acid
  misc_feature (19)..(19): Xaa can be any naturally occurring amino acid

SEQ ID NO: 814643 - protein, 81 aa, Homo sapiens; identical to SEQ ID NO: 814610
  misc_feature (9)..(9): Xaa can be any naturally occurring amino acid
  misc_feature (12)..(12): Xaa can be any naturally occurring amino acid
  misc_feature (16)..(16): Xaa can be any naturally occurring amino acid
  misc_feature (19)..(19): Xaa can be any naturally occurring amino acid

SEQ ID NO: 814644 - protein, 81 aa, Homo sapiens; identical to SEQ ID NO: 814610
  misc_feature (9)..(9): Xaa can be any naturally occurring amino acid
  misc_feature (12)..(12): Xaa can be any naturally occurring amino acid
  misc_feature (16)..(16): Xaa can be any naturally occurring amino acid
  misc_feature (19)..(19): Xaa can be any naturally occurring amino acid

SEQ ID NO: 814645 - protein, 81 aa, Homo sapiens; identical to SEQ ID NO: 814610
  misc_feature (9)..(9): Xaa can be any naturally occurring amino acid
  misc_feature (12)..(12): Xaa can be any naturally occurring amino acid
  misc_feature (16)..(16): Xaa can be any naturally occurring amino acid
  misc_feature (19)..(19): Xaa can be any naturally occurring amino acid

SEQ ID NO: 814646 - protein, 81 aa, Homo sapiens; identical to SEQ ID NO: 814610
  misc_feature (9)..(9): Xaa can be any naturally occurring amino acid
  misc_feature (12)..(12): Xaa can be any naturally occurring amino acid
  misc_feature (16)..(16): Xaa can be any naturally occurring amino acid
  misc_feature (19)..(19): Xaa can be any naturally occurring amino acid

SEQ ID NO: 814647 - protein, 81 aa, Homo sapiens; identical to SEQ ID NO: 814610
  misc_feature (9)..(9): Xaa can be any naturally occurring amino acid
  misc_feature (12)..(12): Xaa can be any naturally occurring amino acid
  misc_feature (16)..(16): Xaa can be any naturally occurring amino acid
  misc_feature (19)..(19): Xaa can be any naturally occurring amino acid

SEQ ID NO: 814648 - protein, 151 aa, Homo sapiens
SFALNAGAVTAPVFIFSPPIVSPRKTKGRPYFQRPGPKPQLESSYYYSWLFRRLYDFPHSCSLNQGTSIKDENKLSSANGHEERSKKRKKSKSRSRSHERKRSKSKERKRSRDRERKKSKSRERKRSRSKERRRSRSRSRDRRFRGRYRSP

SEQ ID NO: 814649 - protein, 539 aa, Homo sapiens
MATSAPLRSLEEEVTCSICLDYLRDPVTIDCGHVFCRSCTTDVRPISGSRPVCPLCKKPFKKENIRPVWQLASLVENIERLKVDKGRQPGEVTREQQDAKLCERHREKLHYYCEDDGKLLCVMCRESREHRPHTAVLMEKAAQPHREKILNHLSTLRRDRDKIQGFQAKGEADILAALKKLQDQRQYIVAEFEQGHQFLREREEHLLEQLAKLEQELTEGREKFKSRGVGELARLALVISELEGKAQQPAAELMQDTRDFLNRYPRKKFWVGKPIARVVKKKTGEFSDKLLSLQRGLREFQGKLLRDLEYKTVSVTLDPQSASGYLQLSEDWKCVTYTSLYKSAYLHPQQFDCEPGVLGSKGFTWGKVYWEVEVEREGWSEDEEEGDEEEEGEEEEEEEEAGYGDGYDDWETDEDEESLGDEEEEEEEEEEEVLESCMVGVARDSVKRKGDLSLRPEDGVWALRLSSSGIWANTSPEAELFPALRPRRVGIALDYEGGTVTFTNAESQELIYTFTATFTRRLVPFLWLKWPGTRLLLRP

SEQ ID NO: 814650 - protein, 148 aa, Homo sapiens
MATSAPLRSLEEEVTCSICLDYLRDPVTIDCGHVFCRSCTTDVRPISGSRPVCPLCKKPFKKENIRPVWQLASLVENIERLKVDKGRQPGEVTREQQDAKLCERHREKLHYYCEDDGKLLCVMCRESREHRPHTAVLMEKAAQPHRNI

SEQ ID NO: 814651 - protein, 539 aa, Homo sapiens; identical to SEQ ID NO: 814649

SEQ ID NO: 814652 - protein, 539 aa, Homo sapiens
MPTSAPLRSLEEEVTCSICLDYLRDPVTIDCGHVFCRSCTTDVRPISGSRPVCPLCKKPFKKENIRPVWQLASLVENIERLKVDKGRQPGEVTREQQDAKLCERHREKLHYYCEDDGKLLCVMCRESREHRPHTAVLMEKAAQPHREKILNHLSTLRRDRDKIQGFQAKGEADILAALKKLQDQRQYIVAEFEQGHQFLREREEHLLEQLAKLEQELTEGREKFKSRGVGELARLALVISELEGKAQQPAAELMQDTRDFLNRYPRKKFWVGKPIARVVKKKTGEFSDKLLSLQRGLREFQGKLLRDLEYKTVSVTLDPQSASGYLQLSEDWKCVTYTSLYKSAYLHPQQFDCEPGVLGSKGFTWGKVYWEVEVEREGWSEDEEEGDEEEEGEEEEEEEEAGYGDGYDDWETDEDEESLGDEEEEEEEEEEEVLESCMVGVARDSVKRKGDLSLRPEDGVWALRLSSSGIWANTSPEAELFPALRPRRVGIALDYEGGTVTFTNAESQELIYTFTATFTRRLVPFLWLKWPGTRLLLRP

SEQ ID NO: 814653 - protein, 539 aa, Homo sapiens; identical to SEQ ID NO: 814649

SEQ ID NO: 814654 - protein, 381 aa, Homo sapiens
MSWRVPPERLHDNLRSIFHLKKLQDQRQYIVAEFEQGHQFLREREEHLLEQLAKLEQELTEGREKFKSRGVGELARLALVISELEGKAQQPAAELMQDTRDFLNRYPRKKFWVGKPIARVVKKKTGEFSDKLLSLQRGLREFQGKLLRDLEYKTVSVTLDPQSASGYLQLSEDWKCVTYTSLYKSAYLHPQQFDCEPGVLGSKGFTWGKVYWEVEVEREGWSEDEEEGDEEEEGEEEEEEEEAGYGDGYDDWETDEDEESLGDEEEEEEEEEEEVLESCMVGVARDSVKRKGDLSLRPEDGVWALRLSSSGIWANTSPEAELFPALRPRRVGIALDYEGGTVTFTNAESQELIYTFTATFTRRLVPFLWLKWPGTRLLLRP

SEQ ID NO: 814655 - protein, 302 aa, Homo sapiens
LKSYLIHIDTCAFFFPFQDTRDFLNRYPRKKFWVGKPIARVVKKKTGEFSDKLLSLQRGLREFQGKLLRDLEYKTVSVTLDPQSASGYLQLSEDWKCVTYTSLYKSAYLHPQQFDCEPGVLGSKGFTWGKVYWEVEVEREGWSEDEEEGDEEEEGEEEEEEEEAGYGDGYDDWETDEDEESLGDEEEEEEEEEEEVLESCMVGVARDSVKRKGDLSLRPEDGVWALRLSSSGIWANTSPEAELFPALRPRRVGIALDYEGGTVTFTNAESQELIYTFTATFTRRLVPFLWLKWPGTRLLLRP

SEQ ID NO: 814656 - protein, 194 aa, Homo sapiens
GRDAWPKHLEQGTPYPLVATSPLLWPPEIITQGWSEDEEEGDEEEEGEEEEEEEEAGYGDGYDDWETDEDEESLGDEEEEEEEEEEEVLESCMVGVARDSVKRKGDLSLRPEDGVWALRLSSSGIWANTSPEAELFPALRPRRVGIALDYEGGTVTFTNAESQELIYTFTATFTRRLVPFLWLKWPGTRLLLRP

SEQ ID NO: 814657 - protein, 539 aa, Homo sapiens; identical to SEQ ID NO: 814649

SEQ ID NO: 814658 - protein, 539 aa, Homo sapiens; identical to SEQ ID NO: 814649

SEQ ID NO: 814659 - protein, 539 aa, Homo sapiens; identical to SEQ ID NO: 814649

SEQ ID NO: 814660 - protein, 539 aa, Homo sapiens; identical to SEQ ID NO: 814649

SEQ ID NO: 814661 - protein, 205 aa, Homo sapiens
MATSAPLRSLEEEVTCSICLDYLRDPVTIDCGHVFCRSCTTDVRPISGSRPVCPLCKKPFKKENIRPVWQLASLVENIERLKVDKGRQPGEVTREQQDAKLCERHREKLHYYCEDDGKLLCVMCRESREHRPHTAVLMEKAAQPHREKILNHLSTLRRDRDKIQGFQAKGEADILAALVPTALGLSGHLTTIVSELPTLCVSHAA

SEQ ID NO: 814662 - protein, 260 aa, Homo sapiens
MATSAPLRSLEEEVTCSICLDYLRDPVTIDCGHVFCRSCTTDVRPISGSRPVCPLCKKPFKKENIRPVWQLASLVENIERLKVDKGRQPGEVTREQQDAKLCERHREKLHYYCEDDGKLLCVMCRESREHRPHTAVLMEKAAQPHREKILNHLSTLRRDRDKIQGFQAKGEADILAALKKLQDQRQYIVAEFEQGHQFLREREEHLLEQLAKLEQELTEGREKFKSRGVGELARLALVISELEGKAQQPAAELMQTRETS

SEQ ID NO: 814663 - protein, 205 aa, Homo sapiens; identical to SEQ ID NO: 814661

SEQ ID NO: 814664 - protein, 355 aa, Homo sapiens [sequence omitted]

SEQ ID NO: 814665 - protein, 346 aa, Homo sapiens
SCRIGTSFRNHQSSYQTRLNALREVQPVELPNCNLVKGIETGSEDLEILPNGLAFISSGLKYPGIKSFNPNSPGKILLMDLNEEDPTVLELGITGSKFDVSSFNPHGISTFTDEDNAMYLLVVNHPDAKSTVELFKFQEEEKSLLHLKTIRHKLLPNLNDIVAVGPEHFYGTNDHYFLDPYLQSWEMYLGLAWSYVVYYSPSEVRVVAEGFDFANGINISPDGKYVYIAELLAHKIHVYEKHANWTLTPLKSLDFNTLVDNISVDPETGDLWVGCHPNGMKIFFYDSENPPASEVLRIQNILTEEPKVTQVYAENGTVLQGSTVASVYKGKLLIGTVFHKALYCEL

SEQ ID NO: 814666 - protein, 268 aa, Homo sapiens
MDLNEEDPTVLELGITGSKFDVSSFNPHGISTFTDEDNAMYLLVVNHPDAKSTVELFKFQEEEKSLLHLKTIRHKLLPNLNDIVAVGPEHFYGTNDHYFLDPYLQSWEMYLGLAWSYVVYYSPSEVRVVAEGFDFANGINISPDGKYVYIAELLAHKIHVYEKHANWTLTPLKSLDFNTLVDNISVDPETGDLWVGCHPNGMKIFFYDSENPPASEVLRIQNILTEEPKVTQVYAENGTVLQGSTVASVYKGKLLIGTVFHKALYCEL

SEQ ID NO: 814667 - protein, 328 aa, Homo sapiens
SCRIGTSFRNHQSSYQTRLNALREVQPVELPNCNLVKGIETGSEDLEILPNGLAFISSGLKYPGIKSFNPNSPGITGSKFDVSSFNPHGISTFTDEDNAMYLLVVNHPDAKSTVELFKFQEEEKSLLHLKTIRHKLLPNLNDIVAVGPEHFYGTNDHYFLDPYLQSWEMYLGLAWSYVVYYSPSEVRVVAEGFDFANGINISPDGKYVYIAELLAHKIHVYEKHANWTLTPLKSLDFNTLVDNISVDPETGDLWVGCHPNGMKIFFYDSENPPASEVLRIQNILTEEPKVTQVYAENGTVLQGSTVASVYKGKLLIGTVFHKALYCEL

SEQ ID NO: 814668 - protein, 337 aa, Homo sapiens
MAKLIALTLLGMGLALFRNHQSSYQTRLNALREVQPVELPNCNLVKGIETGSEDLEILPNGLAFISSGLKYPGIKSFNPNSPGITGSKFDVSSFNPHGISTFTDEDNAMYLLVVNHPDAKSTVELFKFQEEEKSLLHLKTIRHKLLPNLNDIVAVGPEHFYGTNDHYFLDPYLQSWEMYLGLAWSYVVYYSPSEVRVVAEGFDFANGINISPDGKYVYIAELLAHKIHVYEKHANWTLTPLKSLDFNTLVDNISVDPETGDLWVGCHPNGMKIFFYDSENPPASEVLRIQNILTEEPKVTQVYAENGTVLQGSTVASVYKGKLLIGTVFHKALYCEL

SEQ ID NO: 814669 - protein, 150 aa, Homo sapiens
MAKLIALTLLGMGLALFRNHQSSYQTRLNALREVQPVELPNCNLVKGIETGSEDLEILPNGLAFISSGLKYPGIKSFNPNSPGKILLMDLNEEDPTVLELGITGSKFDVSSFNPHGISTFTDEDNAMYLLVVNHPDAKSTVELFKFQEEV

SEQ ID NO: 814670 - protein, 169 aa, Homo sapiens
MAKLIALTLLGMGLALFRNHQSSYQTRLNALREVQPVELPNCNLVKGIETGSEDLEILPNGLAFISSGLKYPGIKSFNPNSPGKILLMDLNEEDPTVLELGITGSKFDVSSFNPHGISTFTDEDNAMYLLVVNHPDAKSTVELFKFQEEEKSLLHLKTIRHKLLPKWHK

SEQ ID NO: 814671 - protein, 152 aa, Homo sapiens
SCRIGTSFRNHQSSYQTRLNALREVQPVELPNCNLVKGIETGSEDLEILPNGLAFISSGLKYPGIKSFNPNSPGITGSKFDVSSFNPHGISTFTDEDNAMYLLVVNHPDAKSTVELFKFQEEEKSLLHLKTIRHKLLPNCLSTEIYHISIFL

SEQ ID NO: 814672 - protein, 760 aa, Homo sapiens
RKEVPLCELMKPLGFSRCTVESLMRRPRRGTHRAAARAAPPCGGPARLRPPLGQCSPGPRDEPAILNCVPAHSDSAGPGMADPVAGIAGSAAKSVRPFRSSEAYVEAMKEDLAEWLNALYGLGLPGGGDGFLTGLATGTTLCQHANAVTEAARALAAARPARGVAFQAHSVVPGSFMARDNVATFIGWCRVELGVPEVLMFETEDLVLRKNEKSVVLCLLEVARRGARLGLLAPRLVQFEQEIERELRAAPPAPNAPAAGEDTTETAPAPGTPARGPRMTPSDLRNLDELVREILGRCTCPDQFPMIKVSEGKYRVGDSSLLIFVRVLRSHVMVRVGGGWDTLEHYLDKHDPCRCSSTAHRPPQPRVCTFSPQRVSPTTSPRPASPVPGSERRGSRPEMTPVSLRSTKEGPETPPRPRDQLPPHPRSRRYSGDSDSSASSAQSGPLGTRSDDTGTGPRRERPSRRLTTGTPASPRRPPALRSQSRDRLDRGRPRGAPGGRGAQLSVPSPARRARSQSREEQAVLLVRRDRDGQHSWVPRGRGSGGSGRSTPQTPRARSPAAPRLSRVSSPSPELGTTPASIFRTPLQLDPQQEQQLFRRLEEEFLANARALEAVASVTPTGPAPDPARAPDPPAPDSAYCSSSSSSSSLSVLGGKCGQPGDSGRTANGLPGPRSQALSSSSDEGSPCPGMGGPLDAPGSPLACTEPSRTWARGRMDTQPDRKPSRIPTPRGPRRPSGPAELGTWHALHSVTPRAEPDSWM

SEQ ID NO: 814673 - protein, 836 aa, Homo sapiens
MADPVAGIAGSAAKSVRPFRSSEAYVEAMKEDLAEWLNALYGLGLPGGGDGFLTGLATGTTLCQHANAVTEAARALAAARPARGVAFQAHSVVPGSFMARDNVATFIGWCRVELGVPEVLMFETEDLVLRKNEKSVVLCLLEVARRGARLGLLAPRLVQFEQEIERELRAAPPAPNAPAAGEDTTETAPAPGTPARGPRMTPSDLRNLDELVREILGRCTCPDQFPMIKVSEGKYRVGDSSLLIFVRVLRSHVMVRVGGGWDTLEHYLDKHDPCRCSSTAHRPPQPRVCTFSPQRVSPTTSPRPASPVPGSERRGSRPEMTPVSLRSTKEGPETPPRLRCRRTRSEGSRGWGGVSPGLHDGLPVRQSDSHPGKSSRGWGRAWLPISMATQPNQQHSWGGPCGWAAASPALASSGPSWEGGCLEPRKLLLPWLLGPWAAGGSCSLLPGSPQDRPMPLTAPSTSHIPCCSSPCLFCMPVLPWYPICLYCPPAPGPRDQLPPHPRSRRYSGDSDSSASSAQSGPLGTRSDDTGTGPRRERPSRRLTTGTPASPRRPPALRSQSRDRLDRGRPRGAPGGRGAQLSVPSPARRARSQSREEQAVLLVRRDRDGQHSWVPRGRGSGGSGRSTPQTPRARSPAAPRLSRVSSPSPELGTTPASIFRTPLQLDPQQEQQLFRRLEEEFLANARALEAVASVTPTGPAPDPARAPDPPAPDSAYCSSSSSSSSLSVLGGKCGQPGDSGRTANGLPGPRSQALSSSSDEGSPCPGMGGPLDAPGSPLACTEPSRTWARGRMDTQPDRKPSRIPTPRGPRRPSGPAELGTWHALHSVTPRAEPDSWM

SEQ ID NO: 814674 - protein, 836 aa, Homo sapiens; identical to SEQ ID NO: 814673

SEQ ID NO: 814675 - protein, 329 aa, Homo sapiens
MADPVAGIAGSAAKSVRPFRSSEAYVEAMKEDLAEWLNALYGLGLPGGGDGFLTGLATGTTLCQHANAVTEAARALAAARPARGVAFQAHSVVPGSFMARDNVATFIGWCRVELGVPEVLMFETEDLVLRKNEKSVVLCLLEVARRGARLGLLAPRLVQFEQEIERELRAAPPAPNAPAAGEDTTETAPAPGTPARGPRMTPSDLRNLDELVREILGRCTCPDQFPMIKVSEGKYRVGDSSLLIFVRVLRSHVMVRVGGGWDTLEHYLDKHDPCRCSSTGPGISCPPIPAPAATPGTVTPQPPPPRAAPLVPAVMTQALAPGGSDPAGG

SEQ ID NO: 814676 - protein, 836 aa, Homo sapiens; identical to SEQ ID NO: 814673

SEQ ID NO: 814677 - protein, 681 aa, Homo sapiens
MADPVAGIAGSAAKSVRPFRSSEAYVEAMKEDLAEWLNALYGLGLPGGGDGFLTGLATGTTLCQHANAVTEAARALAAARPARGVAFQAHSVVPGSFMARDNVATFIGWCRVELGVPEVLMFETEDLVLRKNEKSVVLCLLEVARRGARLGLLAPRLVQFEQEIERELRAAPPAPNAPAAGEDTTETAPAPGTPARGPRMTPSDLRNLDELVREILGRCTCPDQFPMIKVSEGKYRVGDSSLLIFVRVLRSHVMVRVGGGWDTLEHYLDKHDPCRCSSTAHRPPQPRVCTFSPQRVSPTTSPRPASPVPGSERRGSRPEMTPVSLRSTKEGPETPPRPRDQLPPHPRSRRYSGDSDSSASSAQSGPLGTRSDDTGTGPRRERPSRRLTTGTPASPRRPPALRSQSRDRLDRGRPRGAPGGRGAQLSVPSPARRARSQSREEQAVLLVRRDRDGQHSWVPRGRGSGGSGRSTPQTPRARSPAAPRLSRVSSPSPELGTTPASIFRTPLQLDPQQEQQLFRRLEEEFLANARALEAVASVTPTGPAPDPARAPDPPAPDSAYCSSSSSSSSLSVLGGKCGQPGDSGRTANGLPGPRSQALSSSSDEGSPCPGMGGPLDAPGSPLACTEPSRTWARGRMDTQPDRKPSRIPTPRGPRRPSGPAELGTWHALHSVTPRAEPDSWM

SEQ ID NO: 814678 - protein, 715 aa, Homo sapiens
SKVTNHMLTVSCLDKLDMWLLESSDELSIMYDQYITQELVRIAGSAAKSVRPFRSSEAYVEAMKEDLAEWLNALYGLGLPGGGDGFLTGLATGTTLCQHANAVTEAARALAAARPARGVAFQAHSVVPGSFMARDNVATFIGWCRVELGVPEVLMFETEDLVLRKNEKSVVLCLLEVARRGARLGLLAPRLVQFEQEIERELRAAPPAPNAPAAGEDTTETAPAPGTPARGPRMTPSDLRNLDELVREILGRCTCPDQFPMIKVSEGKYRVGDSSLLIFVRVLRSHVMVRVGGGWDTLEHYLDKHDPCRCSSTAHRPPQPRVCTFSPQRVSPTTSPRPASPVPGSERRGSRPEMTPVSLRSTKEGPETPPRPRDQLPPHPRSRRYSGDSDSSASSAQSGPLGTRSDDTGTGPRRERPSRRLTTGTPASPRRPPALRSQSRDRLDRGRPRGAPGGRGAQLSVPSPARRARSQSREEQAVLLVRRDRDGQHSWVPRGRGSGGSGRSTPQTPRARSPAAPRLSRVSSPSPELGTTPASIFRTPLQLDPQQEQQLFRRLEEEFLANARALEAVASVTPTGPAPDPARAPDPPAPDSAYCSSSSSSSSLSVLGGKCGQPGDSGRTANGLPGPRSQALSSSSDEGSPCPGMGGPLDAPGSPLACTEPSRTWARGRMDTQPDRKPSRIPTPRGPRRPSGPAELGTWHALHSVTPRAEPDSWM

SEQ ID NO: 814679 - protein, 610 aa, Homo sapiens
MIKVSEGKYRVGDSSLLIFVRVLRSHVMVRVGGGWDTLEHYLDKHDPCRCSSTAHRPPQPRVCTFSPQRVSPTTSPRPASPVPGSERRGSRPEMTPVSLRSTKEGPETPPRLRCRRTRSEGSRGWGGVSPGLHDGLPVRQSDSHPGKSSRGWGRAWLPISMATQPNQQHSWGGPCGWAAASPALASSGPSWEGGCLEPRKLLLPWLLGPWAAGGSCSLLPGSPQDRPMPLTAPSTSHIPCCSSPCLFCMPVLPWYPICLYCPPAPGPRDQLPPHPRSRRYSGDSDSSASSAQSGPLGTRSDDTGTGPRRERPSRRLTTGTPASPRRPPALRSQSRDRLDRGRPRGAPGGRGAQLSVPSPARRARSQSREEQAVLLVRRDRDGQHSWVPRGRGSGGSGRSTPQTPRARSPAAPRLSRVSSPSPELGTTPASIFRTPLQLDPQQEQQLFRRLEEEFLANARALEAVASVTPTGPAPDPARAPDPPAPDSAYCSSSSSSSSLSVLGGKCGQPGDSGRTANGLPGPRSQALSSSSDEGSPCPGMGGPLDAPGSPLACTEPSRTWARGRMDTQPDRKPSRIPTPRGPRRPSGPAELGTWHALHSVTPRAEPDSWM

SEQ ID NO: 814680 - protein, 292 aa, Homo sapiens
MADPVAGIAGSAAKSVRPFRSSEAYVEAMKEDLAEWLNALYGLGLPGGGDGFLTGLATGTTLCQHANAVTEAARALAAARPARGVAFQAHSVVPGSFMARDNVATFIGWCRVELGVPEVLMFETEDLVLRKNEKSVVLCLLEVARRGARLGLLAPRLVQFEQEIERELRAAPPAPNAPAAGEDTTETAPAPGTPARGPRMTPSDLRNLDELVREILGRCTCPDQFPMIKVSEGKYRVGDSSLLIFVRVLRSHVMVRVGGGWDTLEHYLDTAELGTWHALHSVTPRAEPDSWM

SEQ ID NO: 814681 - protein, 143 aa, Homo sapiens
GIPRSQEAVSPGVLGQPCLPTRRMKVSVAALSCLMLVTALGSQARVTKDAETEFMMSKLPLENPVLLDRFHATSADCCISYTPRSIPCSLLESYFETNSECSKPGVIFLTKKGRRFCANPSDKQVQVCMRMLKLDTRIKTRKN

SEQ ID NO: 814682 - protein, 160 aa, Homo sapiens
GIPRSQEAVSPGVLGQPCLPTRRMKVSVAALSCLMLVTALGSQARVTKDAETEFMMSKLPLENPVLLDMLWRRKIGPQMTLSHAAGFHATSADCCISYTPRSIPCSLLESYFETNSECSKPGVIFLTKKGRRFCANPSDKQVQVCMRMLKLDTRIKTRKN

SEQ ID NO: 814683 - protein, 84 aa, Homo sapiens
GIPRSQEAVSPGVLGQPCLPTRRMKVSVAALSCLMLVTALGSQARVTKDAETGGQGGGGFHLKNQDFWTCFWREKDGALKIPLF

SEQ ID NO: 814684 - protein, 723 aa, Homo sapiens
MSLSMRDPVIPGTSMAYHPFLPHRAPDFAMSAVLGHQPPFFPALTLPPNGAAALSLPGALAKPIMDQLVGAAETGIPFSSLGPQAHLRPLKTMEPEEEVEDDPKVHLEAKELWDQFHKRGTEMVITKSGRRMFPPFKVRCSGLDKKAKYILLMDIIAADDCRYKFHNSRWMVAGKADPEMPKRMYIHPDSPATGEQWMSKVVTFHKLKLTNNISDKHGFTILNSMHKYQPRFHIVRANDILKLPYSTFRTYLFPETEFIAVTAYQNDKITQLKIDNNPFAKGFRDTGNGRREKRKQLTLQSMRVFDERHKKENGTSDESSSEQAAFNCFAQASSPAASTVGTSNLKDLCPSEGESDAEAESKEEHGPEACDAAKISTTTSEEPCRDKGSPAVKAHLFAAERPRDSGRLDKASPDSRHSPATISSSTRGLGAEERRSPVREGTAPAKVEEARALPGKEAFAPLTVQTDAAAAHLAQGPLPGLGFAPGLAGQQFFNGHPLFLHPSQFAMGGAFSSMAAAGMGPLLATVSGASTGVSGLDSTAMASAAAAQGLSGASAATLPFHLQQHVLASQGLAMSPFGSLFPYPYTYMAAAAAASSAAASSSVHRHPFLNLNTMRPRLRYSPYSIPVPVPDGSSLLTTALPSMAAAAGPLDGKVAALAASPASVAVDSGSELNSRSSTLSSSSMSLSPKLCAEKEAATSELQSIQRLVSGLEAKPDRSRSASP

SEQ ID NO: 814685 - protein, 723 aa, Homo sapiens; identical to SEQ ID NO: 814684

SEQ ID NO: 814686 - protein, 723 aa, Homo sapiens; identical to SEQ ID NO: 814684

SEQ ID NO: 814687 - protein, 723 aa, Homo sapiens; identical to SEQ ID NO: 814684

SEQ ID NO: 814688 - protein, 723 aa, Homo sapiens; identical to SEQ ID NO: 814684

SEQ ID NO: 814689 - protein, 500 aa, Homo sapiens
MSLSMRDPVIPGTSMAYHPFLPHRAPDFAMSAVLGHQPPFFPALTLPPNGAAALSLPGALAKPIMDQLVGAAETGIPFSSLGPQAHLRPLKTMEPEEEVEDDPKVHLEAKELWDQFHKRGTEMVITKSGRRMFPPFKVRCSGLDKKAKYILLMDIIAADDCRYKFHNSRWMVAGKADPEMPKRMYIHPDSPATGEQWMSKVVTFHKLKLTNNISDKHGFTLAFPSDHATWQGNYSFGTQTILNSMHKYQPRFHIVRANDILKLPYSTFRTYLFPETEFIAVTAYQNDKITQLKIDNNPFAKGFRDTGNGRREKRKQLTLQSMRVFDERHKKENGTSDESSSEQAAFNCFAQASSPAASTVGTSNLKDLCPSEGESDAEAESKEEHGPEACDAAKISTTTSEEPCRDKGSPAVKAHLFAAERPRDSGRLDKASPDSRHSPATISSSTRGLGAEERRSPVREGTAPAKVEEARALPGKEAFAPLTVQTDAPPARCTATPSSI

SEQ ID NO: 814690 - protein, 830 aa, Homo sapiens
MSLSMRDPVIPGTSMAYHPFLPHRAPDFAMSAVLGHQPPFFPALTLPPNGAAALSLPGALAKPIMDQLVGAAETGIPFSSLGPQAHLRPLKTMEPEEEVEDDPKVHLEAKELWDQFHKRGTEMVITKSGRRMFPPFKVRCSGLDKKAKYILLMDIIAADDCRYKFHNSRWMVAGKADPEMPKRMYIHPDSPATGEQWMSKVVTFHKLKLTNNISDKHGFTLAFPSDHATWQGNYSFGTQEARVQGMNDPEMVRVGGALWQLRSNLDSPEDNICGAKRTQGVLQGGGLGTSVVPCGGEDFSLAGVLKIPFVLLNPCFMYVSSSLPLQTILNSMHKYQPRFHIVRANDILKLPYSTFRTYLFPETEFIAVTAYQNDKITQLKIDNNPFAKGFRDTGNGRREKRKQLTLQSMRVFDERHKKENGTSDESSSEQAAFNCFAQASSPAASTVGTSNLKDLCPSEGESDAEAESKEEHGPEACDAAKISTTTSEEPCRDKGSPAVKAHLFAAERPRDSGRLDKASPDSRHSPATISSSTRGLGAEERRSPVREGTAPAKVEEARALPGKEAFAPLTVQTDAAAAHLAQGPLPGLGFAPGLAGQQFFNGHPLFLHPSQFAMGGAFSSMAAAGMGPLLATVSGASTGVSGLDSTAMASAAAAQGLSGASAATLPFHLQQHVLASQGLAMSPFGSLFPYPYTYMAAAAAASSAAASSSVHRHPFLNLNTMRPRLRYSPYSIPVPVPDGSSLLTTALPSMAAAAGPLDGKVAALAASPASVAVDSGSELNSRSSTLSSSSMSLSPKLCAEKEAATSELQSIQRLVSGLEAKPDRSRSASP

SEQ ID NO: 814691 - protein, 706 aa, Homo sapiens
MSLSMRDPVIPGTSMAYHPFLPHRAPDFAMSAVLGHQPPFFPALTLPPNGAAALSLPGALAKPIMDQLVGAAETGIPFSSLGPQAHLRPLKTMEPEEEVEDDPKVHLEAKELWDQFHKRGTEMVITKSGRRMFPPFKVRCSGLDKKAKYILLMDIIAADDCRYKFHNSRWMVAGKADPEMPKRMYIHPDSPATGEQWMSKVVTFHKLKLTNNISDKHGFTILNSMHKYQPRFHIVRANDILKLPYSTFRTYLFPETEFIAVTAYQNDKITQLKIDNNPFAKGFRDTGNGRREKRKQLTLQSMRVFDERHKKENGTSDESSSEQAAFNCFAQASSPAASTVGTSNLKDLCPSEGESDAEAESKEEHGPEACDAAKISTTTSEEPCRDKGSPAVKAHLFAAERPRDSGRLDKASPDSRHSPATISSSTRGLGAEERRSPVREGTAPAKVEEARALPGKEAFAPLTVQTDAAAAHLAQGPLPGLGFAPGLAGQQFFNGHPLFLHPSQFAMGGAFSSMAAAGMGPLLATVSGASTGVSGLDSTAMASAAAAQGLSGASAATLPFHLQQHVLASQGLAMSPFGSLFPYPYTYMAAAAAASSAAASSSVHRHPFLNLNTMRPRLRYSPYSIPVPVPDGSSLLTTALAASPASVAVDSGSELNSRSSTLSSSSMSLSPKLCAEKEAATSELQSIQRLVSGLEAKPDRSRSASP

SEQ ID NO: 814692 - protein, 391 aa, Homo sapiens
MNALLPWFFPSPVVDLCPSEGESDAEAESKEEHGPEACDAAKISTTTSEEPCRDKGSPAVKAHLFAAERPRDSGRLDKASPDSRHSPATISSSTRGLGAEERRSPVREGTAPAKVEEARALPGKEAFAPLTVQTDAAAAHLAQGPLPGLGFAPGLAGQQFFNGHPLFLHPSQFAMGGAFSSMAAAGMGPLLATVSGASTGVSGLDSTAMASAAAAQGLSGASAATLPFHLQQHVLASQGLAMSPFGSLFPYPYTYMAAAAAASSAAASSSVHRHPFLNLNTMRPRLRYSPYSIPVPVPDGSSLLTTALPSMAAAAGPLDGKVAALAASPASVAVDSGSELNSRSSTLSSSSMSLSPKLCAEKEAATSELQSIQRLVSGLEAKPDRSRSASP

SEQ ID NO: 814693 - protein, 150 aa, Homo sapiens [sequence omitted]

SEQ ID NO: 814694 - protein, 356 aa, Homo sapiens
ISVDPRVRSPPTSEEPCRDKGSPAVKAHLFAAERPRDSGRLDKASPDSRHSPATISSSTRGLGAEERRSPVREGTAPAKVEEARALPGKEAFAPLTVQTDAAAAHLAQGPLPGLGFAPGLAGQQFFNGHPLFLHPSQFAMGGAFSSMAAAGMGPLLATVSGASTGVSGLDSTAMASAAAAQGLSGASAATLPFHLQQHVLASQGLAMSPFGSLFPYPYTYMAAAAAASSAAASSSVHRHPFLNLNTMRPRLRYSPYSIPVPVPDGSSLLTTALPSMAAAAGPLDGKVAALAASPASVAVDSGSELNSRSSTLSSSSMSLSPKLCAEKEAATSELQSIQRLVSGLEAKPDRSRSASP

SEQ ID NO: 814695 - protein, 243 aa, Homo sapiens
MSLSMRDPVIPGTSMAYHPFLPHRAPDFAMSAVLGHQPPFFPALTLPPNGAAALSLPGALAKPIMDQLVGAAETGIPFSSLGPQAHLRPLKTMEPEEEVEDDPKVHLEAKELWDQFHKRGTEMVITKSGRRMFPPFKVRCSGLDKKAKYILLMDIIAADDCRYKFHNSRWMVAGKADPEMPKRMYIHPDSPATGEQWMSKVVTFHKLKLTNNISDKHGFVSFIALFSKIFSSFTQSKAVLPIS

SEQ ID NO: 814696 - protein, 622 aa, Homo sapiens
MSLSMRDPVIPGTSMAYHPFLPHRAPDFAMSAVLGHQPPFFPALTLPPNGAAALSLPGALAKPIMDQLVGAAETGIPFSSLGPQAHLRPLKTMEPEEEVEDDPKVHLEAKELWDQFHKRGTEMVITKSGRRMFPPFKVRCSGLDKKAKYILLMDIIAADDCRYKFHNSRWMVAGKADPEMPKRMYIHPDSPATGEQWMSKVVTFHKLKLTNNISDKHGFTILNSMHKYQPRFHIVRANDILKLPYSTFRTYLFPETEFIAVTAYQNDKITQLKIDNNPFAKGFRDTGNGRREKRKQLTLQSMRVFDERHKKENGTSDESSSEQAAFNCFAQASSPAASTVGTSNLKDLCPSEGESDAEAESKEEHGPEACDAAKISTTTSEEPCRDKGSPAVKAHLFAAERPRDSGRLDKASPDSRHSPATISSSTRGLGAEERRSPVREGTAPAKVEEARALPGKEAFAPLTVQTDAAAAHLAQGPLPGLGFAPGLAGQQFFNGHPLFLHPSQFAMGGAFSSMAAAGMGPLLATVSGASTGVSGLDSTAMASAAAAQGLSGASAATLPFHLQQHVLASQGLAMSPFGSLFPYPYTYMAAAAAASSAAASSSVHRHPFLNLNTMRPRLRYSP

SEQ ID NO: 814697 - protein, 670 aa, Homo sapiens
MSLSMRDPVIPGTSMAYHPFLPHRAPDFAMSAVLGHQPPFFPALTLPPNGAAALSLPGALAKPIMDQLVGAAETGIPFSSLGPQAHLRPLKTMEPEEEVEDDPKVHLEAKELWDQFHKRGTEMVITKSGRRMFPPFKVRCSGLDKKAKYILLMDIIAADDCRYKFHNSRWMVAGKADPEMPKRMYIHPDSPATGEQWMSKVVTFHKLKLTNNISDKHGFTILNSMHKYQPRFHIVRANDILKLPYSTFRTYLFPETEFIAVTAYQNDKITQLKIDNNPFAKGFRDTGNGRREKRKQLTLQSMRVFDERHKKENGTSDESSSEQAAFNCFAQASSPAASTVGTSNLKDLCPSEGESDAEAESKEEHGPEACDAAKISTTTSEEPCRDKGSPAVKAHLFAAERPRDSGRLDKASPDSRHSPATISSSTRGLGAEERRSPVREGTAPAKVEEARALPGKEAFAPLTVQTDAAAAHLAQGPLPGLGFAPGLAGQQFFNGHPLFLHPSQFAMGGAFSSMAAAGMGPLLATVSGASTGVSGLDSTAMASAAAAQGLSGASAATLPLPFAVASGKGPRTPSRECARDSPCLLGVVYMSGIWIRFWGLRNVGCIELLGVGVPTFMSRATSSKAGLGLCPPGGEVFKDISLSADLYIYFSFTVSSGNKNKIFQKKNRDK

SEQ ID NO: 814698 - protein, 204 aa, Homo sapiens
MSQPAGGLGLSPRPHDHPVSTPVPFPWLPGCDCHVAADPLFVLEHSLPIDTQYYLEQQLAKPLLRIFEPILGEGRAEAVLLRGDHTRCKTVLTGKVGGLLAFAKRRNCCIGCRTVLSHQGAVCEFCQPRESELYQKEVSHLNALEERFSRLWTQCQRCQGSLHEDVICTSRDCPIFYMRKKVRKDLEDQEQLLRRFGPPGPEAW

SEQ ID NO: 814699 - protein, 204 aa, Homo sapiens; identical to SEQ ID NO: 814698

SEQ ID NO: 814700 - protein, 1107 aa, Homo sapiens
MDGKRRPGPGPGVPPKRARGGLWDDDDAPRPSQFEEDLALMEEMEAEHRLQEQEEEELQSVLEGVADGQVPPSAIDPRWLRPTPPALDPQTEPLIFQQLEIDHYVGPAQPVPGGPPPSRGSVPVLRAFGVTDEGFSVCCHIHGFAPYFYTPAPPGFGPEHMGDLQRELNLAISRDSRGGRELTGPAVLAVELCSRESMFGYHGHGPSPFLRITVALPRLVAPARRLLEQGIRVAGLGTPSFAPYEANVDFEIRFMVDTDIVGCNWLELPAGKYALRLKEKATQCQLEADVLWSDVVSHPPEGPWQRIAPLRVLSFDIECAGRKGIFPEPERDPVIQICSLGLRWGEPEPFLRLALTLRPCAPILGAKVQSYEKEEDLLQAWSTFIRIMDPDVITGYNIQNFDLPYLISRAQTLKVQTFPFLGRVAGLCSNIRDSSFQSKQTGRRDTKVVSMVGRVQMDMLQVLLREYKLRSYTLNAVSFHFLGEQKEDVQHSIITDLQNGNDQTRRRLAVYCLKDAYLPLRLLERLMVLVNAVEMARVTGVPLSYLLSRGQQVKVVSQLLRQAMHEGLLMPVVKSEGGEDYTGATVIEPLKGYYDVPIATLDFSSLYPSIMMAHNLCYTTLLRPGTAQKLGLTEDQFIRTPTGDEFVKTSVRKGLLPQILENLLSARKRAKAELAKETDPLRRQVLDGRQLALKVSANSVYGFTGAQVGKLPCLEISQSVTGFGRQMIEKTKQLVESKYTVENGYSTSAKVVYGDTDSVMCRFGVSSVAEAMALGREAADWVSGHFPSPIRLEFEKVYFPYLLISKKRYAGLLFSSRPDAHDRMDCKGLEAVRRDNCPLVANLVTASLRRLLIDRDPEGAVAHAQDVISDLLCNRIDISQLVITKELTRAASDYAGKQAHVELAERMRKRDPGSAPSLGDRVPYVIISAAKGVAAYMKSEDPLFVLEHSLPIDTQYYLEQQLAKPLLRIFEPILGEGRAEAVLLRGDHTRCKTVLTGKVGGLLAFAKRRNCCIGCRTVLSHQGAVCEFCQPRESELYQKEVSHLNALEERFSRLWTQCQRCQGSLHEDVICTSRDCPIFYMRKKVRKDLEDQEQLLRRFGPPGPEAW

SEQ ID NO: 814701 - protein, 202 aa, Homo sapiens
MDGKRRPGPGPGVPPKRARGGLWDDDDAPRPSQFEEDLALMEEMEAEHRLQEQEEEELQSVLEGVADGQVPPSAIDPRWLRPTPPALDPQTEPLIFQQLEIDHYVGQTGCAGGPTFQGSGWVRARGTETVPVRPSPVVPILNQALVLATTCGARANGHRELAAEELGRCLNTPKFEEGPLKGGFTPLHKWDGATHNRMHTHN

SEQ ID NO: 814702 - protein, 189 aa, Homo sapiens
  misc_feature (29)..(29): Xaa can be any naturally occurring amino acid
VLPGREFHIRRILILNLDRILALPILCSXIILPHHRNVRPDLLPKPQHLCKHLHGVIELFGPVASRLSVGDLIDNGFARVDKWLKPADVQFGMNASWMAAVCSQGAVCEFCQPRESELYQKEVSHLNALEERFSRLWTQCQRCQGSLHEDVICTSRDCPIFYMRKKVRKDLEDQEQLLRRFGPPGPEAW

SEQ ID NO: 814703 - protein, 115 aa, Homo sapiens
LSEAGIGSGQGWGGPVPGWAPALGLTRLPTGAVCEFCQPRESELYQKEVSHLNALEERFSRLWTQCQRCQGSLHEDVICTSRDCPIFYMRKKVRKDLEDQEQLLRRFGPPGPEAW

SEQ ID NO: 814704 - protein, 86 aa, Homo sapiens
RLRLGSEALGGESELYQKEVSHLNALEERFSRLWTQCQRCQGSLHEDVICTSRDCPIFYMRKKVRKDLEDQEQLLRRFGPPGPEAW

SEQ ID NO: 814705 - protein, 1107 aa, Homo sapiens; identical to SEQ ID NO: 814700

SEQ ID NO: 814706 - protein, 1083 aa, Homo sapiens
MDGKRRPGPGPGVPPKRARGGLWDDDDAPRPSQFEEDLALMEEMEAEHRLQEQEEEELQSVLEGVADGQVPPSAIDPRWLRPTPPALDPQTEPLIFQQLEIDHYVGPAQPVPGGPPPSRGSVPVLRAFGVTDEGFSVCCHIHGFAPYFYTPAPPGFGPEHMGDLQRELNLAISRDSRGGRELTGPAVLAVELCSRESMFGYHGHGPSPFLRITVALPRLVAPARRLLEQGIRVAGLGTPSFAPYEANVDFEIRFMVDTDIVGCNWLELPAGKYALRLKEKATQCQLEADVLWSDVVSHPPEGPWQRIAPLRVLSFDIECAGRKGIFPEPERDPVIQICSLGLRWGEPEPFLRLALTLRPCAPILGAKVQSYEKEEDLLQAWSTFIRIMDPDVITGYNIQNFDLPYLISRAQTLKVQTFPFLGRVAGLCSNIRDSSFQSKQTGRRDTKVVSMVGRVQMDMLQVLLREYKLRSYTLNAVSFHFLGEQKEDVQHSIITDLQNGNDQTRRRLAVYCLKDAYLPLRLLERLMVLVNAVEMARVTGVPLSYLLSRGQQVKVVSQLLRQAMHEGLLMPVVKSEGGEDYTGATVIEPLKGYYDVPIATLDFSSLYPSIMMAHNLCYTTLLRPGTAQKLGLTEDQFIRTPTGDEFVKTSVRKGLLPQILENLLSARKRAKAELAKETDPLRRQVLDGRQLALKSVTGFGRQMIEKTKQLVESKYTVENGYSTSAKVVYGDTDSVMCRFGVSSVAEAMALGREAADWVSGHFPSPIRLEFEKVYFPYLLISKKRYAGLLFSSRPDAHDRMDCKGLEAVRRDNCPLVANLVTASLRRLLIDRDPEGAVAHAQDVISDLLCNRIDISQLVITKELTRAASDYAGKQAHVELAERMRKRDPGSAPSLGDRVPYVIISAAKGVAAYMKSEDPLFVLEHSLPIDTQYYLEQQLAKPLLRIFEPILGEGRAEAVLLRGDHTRCKTVLTGKVGGLLAFAKRRNCCIGCRTVLSHQGAVCEFCQPRESELYQKEVSHLNALEERFSRLWTQCQRCQGSLHEDVICTSRDCPIFYMRKKVRKDLEDQEQLLRRFGPPGPEAW

SEQ ID NO: 814707 - protein, 1107 aa, Homo sapiens; identical to SEQ ID NO: 814700

SEQ ID NO: 814708 - protein, 1133 aa, Homo sapiens
MDGKRRPGPGPGVPPKRARGGLWDDDDAPRPSQFEEDLALMEEMEAEHRLQEQEEEELQSVLEGVADGQVPPSAIDPRWLRPTPPALDPQTEPLIFQQLEIDHYVGPAQPVPGGPPPSRGSVPVLRAFGVTDEGFSVCCHIHGFAPYFYTPAPPGFGPEHMGDLQRELNLAISRDSRGGRELTGPAVLAVELCSRESMFGYHGHGPSPFLRITVALPRLVAPARRLLEQGIRVAGLGTPSFAPYEANVDFEIRFMVDTDIVGCNWLELPAGKYALRLKEKATQCQLEADVLWSDVVSHPPEGPWQRIAPLRVLSFDIECAGRKGIFPEPERDPVIQICSLGLRWGEPEPFLRLALTLRPCAPILGAKVQSYEKEEDLLQAWSTFIRIMDPDVITGYNIQNFDLPYLISRAQTLKVQTFPFLGRVAGLCSNIRDSSFQSKQTGRRDTKVVSMVGRVQMDMLQVLLREYKLRSYTLNAVSFHFLGEQKEDVQHSIITDLQNGNDQTRRRLAVYCLKDAYLPLRLLERLMVLVNAVEMARVTGVPLSYLLSRGQQVKVVSQLLRQAMHEGLLMPVVKSEGGEDYTGATVIEPLKGVRPQDRAGAAWELLALTPGRGCSPPRYYDVPIATLDFSSLYPSIMMAHNLCYTTLLRPGTAQKLGLTEDQFIRTPTGDEFVKTSVRKGLLPQILENLLSARKRAKAELAKETDPLRRQVLDGRQLALKVSANSVYGFTGAQVGKLPCLEISQSVTGFGRQMIEKTKQLVESKYTVENGYSTSAKVVYGDTDSVMCRFGVSSVAEAMALGREAADWVSGHFPSPIRLEFEKVYFPYLLISKKRYAGLLFSSRPDAHDRMDCKGLEAVRRDNCPLVANLVTASLRRLLIDRDPEGAVAHAQDVISDLLCNRIDISQLVITKELTRAASDYAGKQAHVELAERMRKRDPGSAPSLGDRVPYVIISAAKGVAAYMKSEDPLFVLEHSLPIDTQYYLEQQLAKPLLRIFEPILGEGRAEAVLLRGDHTRCKTVLTGKVGGLLAFAKRRNCCIGCRTVLSHQGAVCEFCQPRESELYQKEVSHLNALEERFSRLWTQCQRCQGSLHEDVICTSRDCPIFYMRKKVRKDLEDQEQLLRRFGPPGPEAW

SEQ ID NO: 814709 - protein, 1107 aa, Homo sapiens; identical to SEQ ID NO: 814700

SEQ ID NO: 814710 - protein, 1107 aa, Homo sapiens; identical to SEQ ID NO: 814700

SEQ ID NO: 814711 - protein, 706 aa, Homo sapiens
GGVGCGGKRCLKRVQTFPFLGRVAGLCSNIRDSSFQSKQTGRRDTKVVSMVGRVQMDMLQVLLREYKLRSYTLNAVSFHFLGEQKEDVQHSIITDLQNGNDQTRRRLAVYCLKDAYLPLRLLERLMVLVNAVEMARVTGVPLSYLLSRGQQVKVVSQLLRQAMHEGLLMPVVKSEGGEDYTGATVIEPLKGYYDVPIATLDFSSLYPSIMMAHNLCYTTLLRPGTAQKLGLTEDQFIRTPTGDEFVKTSVRKGLLPQILENLLSARKRAKAELAKETDPLRRQVLDGRQLALKVSANSVYGFTGAQVGKLPCLEISQSVTGFGRQMIEKTKQLVESKYTVENGYSTSAKVVYGDTDSVMCRFGVSSVAEAMALGREAADWVSGHFPSPIRLEFEKVYFPYLLISKKRYAGLLFSSRPDAHDRMDCKGLEAVRRDNCPLVANLVTASLRRLLIDRDPEGAVAHAQDVISDLLCNRIDISQLVITKELTRAASDYAGKQAHVELAERMRKRDPGSAPSLGDRVPYVIISAAKGVAAYMKSEDPLFVLEHSLPIDTQYYLEQQLAKPLLRIFEPILGEGRAEAVLLRGDHTRCKTVLTGKVGGLLAFAKRRNCCIGCRTVLSHQGAVCEFCQPRESELYQKEVSHLNALEERFSRLWTQCQRCQGSLHEDVICTSRDCPIFYMRKKVRKDLEDQEQLLRRFGPPGPEAW

SEQ ID NO: 814712 - protein, 2131 aa, Homo sapiens
ARGTVLSYCETLLEPECSSRVAGRPQCKQIDQSSSDQTRNEGEAPGFHVASLSAEAGQIDLLPDERKVQATSLSADSFESLPNTETDREPWDPVQAFSHAAPAQDRKRRTGELRQFAGASEPFICHSSSSEIIEKKKDATRTPSSADPLAPDSPRSSAPVEEVRRVVSKKVVAALPSQAPYDDPRVTLHELSQSVPQETAEGIPPGSQDSSPEHQEPRTLDTTYGEVSDNLLVTAQGEKTAHFESQSVTCDVQNSTSASGPKQDHVQCPEASTGFEEGRASPKQDTILPGALTRVALEAPTQQCVQCKESVGSGLTEVCRAGSKHSRPIPLPDQRPSANPGGIGEEAPCRHPREALDGPVFSRNPEGSRTLSPSRGKESRTLPCRQPCSSQPVATHAYSSHSSTLLCFRDGDLGKEPFKAAPHTIHPPCVVPSRAYEMDETGEISRGPDVHLTHGLEPKDVNREFRLTESSTCEPSTVAAVLSRAQGCRSPSAPDVRTGSFSHSATDGSVGLIGVPEKKVAEKQASTELEAASFPAGMYSEPLRQFRDSSVGDQNAQVCQTNPEPPATTQGPHTLDLSEGSAESKLVVEPQHECLENTTRCFLEKPQFSTELRDHNRLDSQAKFVARLKHTCSPQEDSPWQEEEQHRDQASGGGEGFAQGVNPLPDEDGLDGCQILDAGREEVAVAKPPVSKILSQGFKDPATVSLRQNETPQPAAQRSGHLYTGREQPAPNHRGSLPVTTIFSGPKHSRSSPTPQFSVVGSSRSLQELNLSVEPPSPTDEDTQGPNRLWNPHLRGYSSGKSVARTSLQAEDSNQKASSRLDDGTTDHRHLKPATPPYPMPSTLSHMPTPDFTTSWMSGTLEQAQQGKREKLGVQVRPENWCSQMDKGMLHFGSSDISPYALPWRPEEPARISWKQYMSGSAVDVSCSQKPQGLTLSNVARCSSMDNGLEDQNSPFHSHLSTYANICDLSTTHSSTENAQGSNEAWEVFRGSSSIALGDPHIPTSPEGVAPTSGHDRRPQFRGPSGEADCLRSKPPLAKGSAAGPVDEIMLLYPSEAGCPVGQTRTNTFEQGTQTLGSRRHWSSTDISFAQPEASAVSAFDLASWTSMHNLSLHLSQLLHSTSELLGSLSQPDVARREQNTKRDIPDKAPQALMMDGSTQTTVDEGSQTDLTLPTLCLQTSEAEPQGANVILEGLGSDTSTVSQEEGDVPGVPQKREAEETAQKMAQLLYLQEESTPYKPQSPSIPSSHLRFQKAPVGQHLPSVSPSVSDAFLPPSSQPEESYCLVVSSPSPSSPHSPGLFPSTSEYPGDSRVQKKLGPTSALFVDRASSPILTLSASTQEPGLSPGSLTLSAPSTHPVEGHQKLDSSPDPVDAPRTPMDNYSQTTDELGGSQRGRSSLQRSNGRSFLELHSPHSPQQSPKLQFSFLGQHPQQLQPRTTIGVQSRLLPPPLRHRSQRLGNSFVPEKVASPEHCPLSGREPSQWQSRTENGGESSASPGEPQRTLDRPSSWGGLQHLSPCPVSELTDTAGLRGSALGLPQACQPEELLCFSCQMCMAPEHQHHSLRDLPVHNKFSNWCGVQKGSPGGLDMTEEELGASGDLSSEKQEQSPPQPPNDHSQDSEWSKREQIPLQVGAQNLSLSVELTEAKLHHGFGEADALLQVLQSGTGEALAADEPVTSTWKELYARQKKAIETLRRERAERLGNFCRTRSLSPQKQLSLLPNKDLFIWDLDLPSRRREYLQQLRKDVVETTRSPESVSRSAHTPSDIELMLQDYQQAHEEAKVEIARARDQLRERTEQEKLRIHQKIISQLLKEEDKLHTLANSSSLCTSSNGSLSSGMTSGYNSSPALSGQLQFPENMGHTNLPDSRDVWIGDERGGHSAVRKNSAYSHRASLGSCCCSPSSLSSLGTCFSSSYQDLAKHVVDTSMADVMAACSDNLHNLFSCQATAGWNYQGEEQAVQLYYKVFSPTRHGFLGAGVVSQPLSRVWAAVSDPTVWPLYYKPIQTARLHQRVTNSISLVYLVCNTTLCALKQPRDFCCVCVEAKEGHLSVMAAQSVYDTSMPRPSRKMVRGEILPSAWILQPITVEGKEVTRVIYLAQVELGAPGFPPQLLSSFIKRQPLVIARLASFLGR

SEQ ID NO: 814713 - protein, 530 aa, Homo sapiens
MSSPFESPPQPPNDHSQDSEWSKREQIPLQVGAQNLSLSVELTEAKLHHGFGEADALLQVLQSGTGEALAADEPVTSTWKELYARQKKAIETLRRERAERLGNFCRTRSLSPQKQLSLLPNKDLFIWDLDLPSRRREYLQQLRKDVVETTRSPESVSRSAHTPSDIELMLQDYQQAHEEAKVEIARARDQLRERTEQEKLRIHQKIISQLLKEEDKLHTLANSSSLCTSSNGSLSSGMTSGYNSSPALSGQLQFPENMGHTNLPDSRDVWIGDERGGHSAVRKNSAYSHRASLGSCCCSPSSLSSLGTCFSSSYQDLAKHVVDTSMADVMAACSDNLHNLFSCQATAGWNYQGEEQAVQLYYKVFSPTRHGFLGAGVVSQPLSRVWAAVSDPTVWPLYYKPIQTARLHQRVTNSISLVYLVCNTTLCALKQPRDFCCVCVEAKEGHLSVMAAQSVYDTSMPRPSRKMVRGEILPSAWILQPITVEGKEVTRVIYLAQVELGAPGFPPQLLSSFIKRQPLVIARLASFLGR

SEQ ID NO: 814714 - protein, 2104 aa, Homo sapiens
ARGTVLSYCETLLEPECSSRVAGRPQCKQIDQSSSDQTRNEGEAPGFHVASLSAEAGQIDLLPDERKVQATSLSADSFESLPNTETDREPWDPVQAFSHAAPAQDRKRRTGELRQFAGASEPFICHSSSSEIIEKKKDATRTPSSADPLAPDSPRSSAPVEEVRRVVSKKVVAALPSQAPYDDPRVTLHELSQSVPQETAEGIPPGSQDSSPEHQEPRTLDTTYGEVSDNLLVTAQGEKTAHFESQSVTCDVQNSTSASGPKQDHVQCPEASTGFEEGRASPKQDTILPGALTRVALEAPTQQCVQCKESVGSGLTEVCRAGSKHSRPIPLPDQRPSANPGGIGEEAPCRHPREALDGPVFSRNPEGSRTLSPSRGKESRTLPCRQPCSSQPVATHAYSSHSSTLLCFRDGDLGKEPFKAAPHTIHPPCVVPSRAYEMDETGEISRGPDVHLTHGLEPKDVNREFRLTESSTCEPSTVAAVLSRAQGCRSPSAPDVRTGSFSHSATDGSVGLIGVPEKKVAEKQASTELEAASFPAGMYSEPLRQFRDSSVGDQNAQVCQTNPEPPATTQGPHTLDLSEGSAESKLVVEPQHECLENTTRCFLEKPQFSTELRDHNRLDSQAKFVARLKHTCSPQEDSPWQEEEQHRDQASGGGEGFAQGVNPLPDEDGLDGCQILDAGREEVAVAKPPVSKILSQGFKDPATVSLRQNETPQPAAQRSGHLYTGREQPAPNHRGSLPVTTIFSGPKHSRSSPTPQFSVVGSSRSLQELNLSVEPPSPTDEDTQGPNRLWNPHLRGYSSGKSVARTSLQAEDSNQKASSRLDDGTTDHRHLKPATPPYPMPSTLSHMPTPDFTTSWMSGTLEQAQQGKREKLGVQVRPENWCSQMDKGMLHFGSSDISPYALPWRPEEPARISWKQYMSGSAVDVSCSQKPQGLTLSNVARCSSMDNGLEDQNSPFHSHLSTYANICDLSTTHSSTENAQGSNEAWEVFRGSSSIALGDPHIPTSPEGVAPTSGHDRRPQFRGPSGEADCLRSKPPLAKGSAAGPVDEIMLLYPSEAGCPVGQTRTNTFEQGTQTLGSRRHWSSTDISFAQPEASAVSAFDLASWTSMHNLSLHLSQLLHSTSELLGSLSQPDVARREQNTKRDIPDKAPQALMMDGSTQTTVDEGSQTDLTLPTLCLQTSEAEPQGANVILEGLGSDTSTVSQEEGDVPGVPQKREAEETAQKMAQLLYLQEESTPYKPQSPSIPSSHLRFQKAPVGQHLPSVSPSVSDAFLPPSSQPEESYCLVVSSPSPSSPHSPGLFPSTSEYPGDSRVQKKLGPTSALFVDRASSPILTLSASTQEPGLSPGSLTLSAPSTHPVEGHQKLDSSPDPVDAPRTPMDNYSQTTDELGGSQRGRSSLQRSNGRSFLELHSPHSPQQSPKLQFSFLGQHPQQLQPRTTIGVQSRLLPPPLRHRSQRLGNSFVPEKVASPEHCPLSGREPSQWQSRTENGGESSASPGEPQRTLDRPSSWGGLQHLSPCPVSELTDTAGLRGSALGLPQACQPEELLCFSCQMCMAPEHQHHSLRDLPVHNKFSNWCGVQKGSPGGLDMTEEELGASGDLSSEKQEQSPPQPPNDHSQDSEWSKREQIPLQVGAQNLSLSVELTEAKLHHGFGEADALLQVLQSGTGEALAADEPVTSTWKELYARQKKAIETLRRERAERLGNFCRTRSLSPQKQLSLLPNKDLFIWDLDLPSRRREYLQQLRKDVVETTRSPESVSRSAHTPSDIELMLQDYQQAHEEAKVEIARARDQLRERTEQEKLRIHQKIISQLLKEEDKLHTLANSSSLCTSSNGSLSSGMTSGYNSSPALSGQLQFPENMGHTNLPDSRDVWIGDERGGHSAVRKNSAYSHRASLGSCCCSPSSLSSLGTCFSSSYQDLAKHVVDTSMADVMAACSDNLHNLFSCQATAGWNYQGEEQAVQLYYKVFSPTRHGFLGAGVVSQPLSRVWAAVSDPTVWPLYYKPIQTARLHQRVTNSISLVYLVCNTTLCALKQPRDFCCVCVEAKEGHLSVMAAQSVYDTSMPRPSRKMVRGEILPSAWILQPITVEGKEVTRVIYLAQEVNANT

SEQ ID NO: 814715 - protein, 469 aa, Homo sapiens
MELISPTVIIILGCLALFLLLQRKNLRRPPCIKGWIPWIGVGFEFGKAPLEFIEKARIKYGPIFTVFAMGNRMTFVTEEEGINVFLKSKKVDFELAVQNIVYRTASIPKNVFLALHEKLYIMLKGKMGTVNLHQFTGQLTEELHEQLENLGTHGTMDLNNLVRHLLYPVTVNMLFNKSLFSTNKKKIKEFHQYFQVYDEDFEYGSQLPECLLRNWSKSKKWFLELFEKNIPDIKACKSAKDNSMTLLQATLDIVETETSKENSPNYGLLLLWASLSNAVPVAFWTLAYVLSHPDIHKAIMEGISSVFGKAGKDKIKVSEDDLENLLLIKWCVLETIRLKAPGVITRKVVKPVEILNYIIPSGDLLMLSPFWLHRNPKYFPEPELFKPERWKKANLEKHSFLDCFMAFGSGKFQCPARWFALLEVQMCIILILYKYDCSLLDPLPKQSYLHLVGVPQPEGQCRIEYKQRI

SEQ ID NO: 814716 - protein, 433 aa, Homo sapiens
MELISPTVIIILGCLALFLLLQRKNLRRPPCIKGWIPWIGVGFEFGKAPLEFIEKARIKYGPIFTVFAMGNRMTFVTEEEGINVFLKSKKVDFELAVQNIVYRTASIPKNVFLALHEKLYIMLKGKMGTVNLHQFTGQLTEELHEQLENLGTHGTMDLNNLVRHLLYPVTVNMLFNKSLFSTNKKKIKEFHQYFQVYDEDFEYGSQLPECLLRNWSKSKKWFLELFEKNIPDIKACKSAKDNSMVAFWTLAYVLSHPDIHKAIMEGISSVFGKAGKDKIKVSEDDLENLLLIKWCVLETIRLKAPGVITRKVVKPVEILNYIIPSGDLLMLSPFWLHRNPKYFPEPELFKPERWKKANLEKHSFLDCFMAFGSGKFQCPARWFALLEVQMCIILILYKYDCSLLDPLPKQSYLHLVGVPQPEGQCRIEYKQRI

SEQ ID NO: 814717 - protein, 433 aa, Homo sapiens; identical to SEQ ID NO: 814716

SEQ ID NO: 814718 - protein, 433 aa, Homo sapiens; identical to SEQ ID NO: 814716

SEQ ID NO: 814719 - protein, 435 aa, Homo sapiens
MELISPTVIIILGCLALFLLLQRKNLRRPPCIKGWIPWIGVGFEFGKAPLEFIEKARIKYGPIFTVFAMGNRMTFVTEEEGINVFLKSKKVDFELAVQNIVYRTASIPKNVFLALHEKLYIMLKGKMGTVNLHQFTGQLTEELHEQLENLGTHGTMDLNNLVRHLLYPVTVNMLFNKSLFSTNKKKIKEFHQYFQVYDEDFEYGSQLPECLLRNWSKSKKWFLELFEKNIPDIKACKSAKDNSMVAFWTLAYVLSHPDIHKAIMEGISSVFGKAGKDKIKVSEDDLENLLLIKWCVLETIRLKAPGVITRKVVKPVEILNYIIPSGDLLMLSPFWLHRNPKYFPEPELFKPERWKKANLEKHSFLDCFMAFGSGKFQCPARKTNRKEQHEPPDFFRNCSLQSEESHYSRQSHIKLYDLNGGIRRRVFSVEENFFE

SEQ ID NO: 814720 - protein, 384 aa, Homo sapiens
MELISPTVIIILGCLALFLLLQRKNLRRPPCIKGWIPWIGVGFEFGKAPLEFIEKARIKYGPIFTVFAMGNRMTFVTEEEGINVFLKSKKVDFELAVQNIVYRTASIPKNVFLALHEKLYIMLKGKMGTVNLHQFTGQLTEELHEQLENLGTHGTMDLNNLVRHLLYPVTVNMLFNKSLFSTNKKKIKEFHQYFQVYDEDFEYGSQLPECLLRNWSKSKKWFLELFEKNIPDIKACKSAKDNSMVAFWTLAYVLSHPDIHKAIMEGISSVFGKAGKDKIKVSEDDLENLLLIKWCVLETIRLKAPGVITRKVVKPVEILNYIIPSGDLLMLSPFWLHRNPKYFPEPELFKPERWKKANLEKHSFLDCFMAFGSGKFQCPARKGF

SEQ ID NO: 814721 - protein, 279 aa, Homo sapiens
MSRERPPGTDIPRNLSFIAALTERAYYRSQRPSLEEEPEEEPGEGGTRFGARSRAHAPSRGRRARSAPAGGGGARAPRSRSPDTRKRVRFADALGLELAVVRRFRPGELPRVPRHVQIQLQRDALRHFAPCQPRARGLQEARAALEPASEPGFAARLLTQRICLERAEAGPLGVAGSARVVDLAYEKRVSVRWSADGWRSQREAPAAYAGPAPPPPRADRFAFRLPAPPIGGALLFALRYRVTGHEFWDNNGGRDYALRGPEHPGSGGAPEPQGWIHFI

SEQ ID NO: 814722 - protein, 279 aa, Homo sapiens; identical to SEQ ID NO: 814721

SEQ ID NO: 814723 - protein, 279 aa, Homo sapiens; identical to SEQ ID NO: 814721

SEQ ID NO: 814724 - protein, 279 aa, Homo sapiens; identical to SEQ ID NO: 814721

SEQ ID NO: 814725 - protein, 279 aa, Homo sapiens; identical to SEQ ID NO: 814721

SEQ ID NO: 814726 - protein, 279 aa, Homo sapiens; identical to SEQ ID NO: 814721

SEQ ID NO: 814727 - protein, 279 aa, Homo sapiens; identical to SEQ ID NO: 814721

SEQ ID NO: 814728 - protein, 279 aa, Homo sapiens; identical to SEQ ID NO: 814721

SEQ ID NO: 814729 - protein, 279 aa, Homo sapiens; identical to SEQ ID NO: 814721

SEQ ID NO: 814730 - protein, 279 aa, Homo sapiens; identical to SEQ ID NO: 814721

SEQ ID NO: 814731 - protein, 279 aa, Homo sapiens; identical to SEQ ID NO: 814721

SEQ ID NO: 814732 - protein, 279 aa, Homo sapiens; identical to SEQ ID NO: 814721

SEQ ID NO: 814733 - protein, 279 aa, Homo sapiens; identical to SEQ ID NO: 814721

SEQ ID NO: 814734 - protein, 279 aa, Homo sapiens; identical to SEQ ID NO: 814721

SEQ ID NO: 814735 - protein, 279 aa, Homo sapiens; identical to SEQ ID NO: 814721

SEQ ID NO: 814736 - protein, 279 aa, Homo sapiens; identical to SEQ ID NO: 814721

SEQ ID NO: 814737 - protein, 279 aa, Homo sapiens; identical to SEQ ID NO: 814721

SEQ ID NO: 814738 - protein, 279 aa, Homo sapiens; identical to SEQ ID NO: 814721

SEQ ID NO: 814739 - protein, 279 aa, Homo sapiens; identical to SEQ ID NO: 814721

SEQ ID NO: 814740 - protein, 333 aa, Homo sapiens [sequence omitted]

SEQ ID NO: 814741 - protein, 333 aa, Homo sapiens [sequence omitted]

SEQ ID NO: 814742 - protein, 151 aa, Homo sapiens
MDYAFQYVQDNGGLDSEESYPYEATEESCKYNPKYSVANDTGFVDIPKQEKALMKAVATVGPISVAIDAGHESFLFYKEGIYFEPDCSSEDMDHGVLVVGYGFESTESDNNKYWLVKNSWGEEWGMGGYVKMAKDRRNHCGIASAASYPTV

SEQ ID NO: 814743 - protein, 254 aa, Homo sapiens
MNPTLILAAFCLGIASATLTFDHSLEAQWTKWKAMHNRLYGMNEEGWRRAVWEKNMKMIELHNQEYREGKHSFTMAMNAFGDMTSEEFRQVMNGFQNRKPRKGKVFQEPLFYEAPRSVDWREKGYVTPVKNQGQCGSCWAFSATGALEGQMFRKTGRLISLSEQNLVDCSGPQGNEGCNGGLMDYAFQYVQDNGGLDSEESYPYEATVSGAPCHHSSSAFGRWTLSEITDTFFGIHILGLGGVAHACNPSPLGG

SEQ ID NO: 814744 - protein, 333 aa, Homo sapiens [sequence omitted]

SEQ ID NO: 814745 - protein, 333 aa, Homo sapiens [sequence omitted]

SEQ ID NO: 814746 - protein, 333 aa, Homo sapiens [sequence omitted]

SEQ ID NO: 814747 - protein, 333 aa, Homo sapiens [sequence omitted]

SEQ ID NO: 814748 - protein, 333 aa, Homo sapiens [sequence omitted]

SEQ ID NO: 814749 - protein, 299 aa, Homo sapiens [sequence omitted]

SEQ ID NO: 814750 - protein, 278 aa, Homo sapiens
MKMIELHNQEYREGKHSFTMAMNAFGDMTSEEFRQVMNGFQNRKPRKGKVFQEPLFYEAPRSVDWREKGYVTPVKNQGQCGSCWAFSATGALEGQMFRKTGRLISLSEQNLVDCSGPQGNEGCNGGLMDYAFQYVQDNGGLDSEESYPYEATEESCKYNPKYSVANDTGFVDIPKQEKALMKAVATVGPISVAIDAGHESFLFYKEGIYFEPDCSSEDMDHGVLVVGYGFESTESDNNKYWLVKNSWGEEWGMGGYVKMAKDRRNHCGIASAASYPTV

SEQ ID NO: 814751 - protein, 333 aa, Homo sapiens [sequence omitted]

SEQ ID NO: 814752 - protein, 366 aa, Homo sapiens
MNPTLILAAFCLGIASATLTFDHSLEAQWTKWKAMHNRLYGMNEEGWRRAVWEKNMKMIELHNQEYREGKHSFTMAMNAFGDMVSVLWTAELCASSLRFFTKVISCFSTFYFLFLKTSEEFRQVMNGFQNRKPRKGKVFQEPLFYEAPRSVDWREKGYVTPVKNQGQCGSCWAFSATGALEGQMFRKTGRLISLSEQNLVDCSGPQGNEGCNGGLMDYAFQYVQDNGGLDSEESYPYEATEESCKYNPKYSVANDTGFVDIPKQEKALMKAVATVGPISVAIDAGHESFLFYKEGIYFEPDCSSEDMDHGVLVVGYGFESTESDNNKYWLVKNSWGEEWGMGGYVKMAKDRRNHCGIASAASYPTV

SEQ ID NO: 814753 - protein, 339 aa, Homo sapiens
MNPTLILAAFCLGIASATLTFDHSLEAQWTKWKAMHNRLYGMNEEGWRRAVWEKNMKMIELHNQEYREGKHSFTMAMNAFGDMTSEEFRQVMNGFQNRKPRKGKVFQEPLFYEAPRSVDWREKGYVTPVKNQGQCGSCWAFSATGALEGQMFRKTGRLISLSEQNLVDCSGPQGNEGCNGGLMDYAFQYVQDNGGLDSEESYPYEATEESCKYNPKYSVANDTGFVDIPKQEKALMKAVATVGPISVAIDAGHESFLFYKEGIYFEPDCSSEDMDHGVLVVGYGFESTESDNNKYWLVKNRYKLPEILTFEIQKRILICKQCLDTVPHALSILLKSPEV

SEQ ID NO: 814754 - protein, 339 aa, Homo sapiens; identical to SEQ ID NO: 814753

SEQ ID NO: 814755 - protein, 315 aa, Homo sapiens
MNPTLILAAFCLGIASATLTFDHSLEAQWTKWKAMHNRLYGMNEEGWRRAVWEKNMKMIELHNQEYREGKHSFTMAMNAFGDMTSEEFRQVMNGFQNRKPRKGKVFQEPLFYEAPRSVDWREKGYVTPVKNQGQCGSCWAFSATGALEGQMFRPQGNEGCNGGLMDYAFQYVQDNGGLDSEESYPYEATEESCKYNPKYSVANDTGFVDIPKQEKALMKAVATVGPISVAIDAGHESFLFYKEGIYFEPDCSSEDMDHGVLVVGYGFESTESDNNKYWLVKNSWGEEWGMGGYVKMAKDRRNHCGIASAASYPTV

SEQ ID NO: 814756 - protein, 143 aa, Homo sapiens
TGHCGRQDIRNLSYEATEESCKYNPKYSVANDTGFVDIPKQEKALMKAVATVGPISVAIDAGHESFLFYKEGIYFEPDCSSEDMDHGVLVVGYGFESTESDNNKYWLVKNSWGEEWGMGGYVKMAKDRRNHCGIASAASYPTV

SEQ ID NO: 814757 - protein, 265 aa, Homo sapiens
MNPTLILAAFCLGIASATLTFDHSLEAQWTKWKAMHNRLYGMNEEGWRRAVWEKNMKMIELHNQEYREGKHSFTMAMNAFGDMTSEEFRQVMNGFQNRKPRKGKVFQEPLFYEAPRSVDWREKGYVTPVKNQGQCGSCWAFSATGALEGQMFRKTGRLISLSEQNLVDCSGPQGNEGCNGGLMDYAFQYVQDNGGLDSEESYPYEATEESCKYNPKYSVANDTGFVDIPKQEKALMKAVATVGTPAGKQSVTAGFPHLGNGYSCL

SEQ ID NO: 814758 - protein, 254 aa, Homo sapiens; identical to SEQ ID NO: 814743

SEQ ID NO: 814759 - protein, 167 aa, Homo sapiens
TSRGSYPFSHSMKPHLHPRLYHGCYGDIMTMKTSGATCDANSVMNCGIRGSEMFAEMDLRAIKPYQTLIKEVGQRHCVDPAVIAAIISRESHGGSVLQDGWDHRGLKFGLMQLDKQTYHPVGAWDSKEHLSQATGILTERIKAIQKKFPTWSVAQHLKGRLYSEYFV

SEQ ID NO: 814760 - protein, 115 aa, Homo sapiens
MFAEMDLRAIKPYQTLIKEVGQRHCVDPAVIAAIISRESHGGSVLQDGWDHRGLKFGLMQLDKQTYHPVGAWDSKEHLSQATGILTERIKAIQKKFPTWSVAQHLKGRLYSEYFV

SEQ ID NO: 814761 - protein, 387 aa, Homo sapiens
MEVLAAETTSQQERLQAIAEKRKRQAEIENKRRQLEDERRQLQHLKSKALRERWLLEGTPSSASEGDEDLRRQMQDDEQKTRLLEDSVSRLEKEIEVLERGDSAPAAAKENAAAPSPVRAPAPSPAKEERKTEVVMNSQQTPVGTPKDKRVSNTPLRTVDGSPMMKAAMYSVEITVEKDKVTGETRVLSSTTLLPRQPLPLGIKVYEDETKVVHAVDGTAENGIHPLSSSEVDELIHKADEVTLSEAGSTAGAAETRGAVEGAARTTPSRREITGVQAQPGEATSGPPGIQPGQEPPVTMIFMGYQNVEDEAETKKVLGLQDTITAELVVIEDAAEPKEPAPPNGSAAEPPTEAASREENQAGPEATTSDPQDLDMKKHRCKCCSIM

SEQ ID NO: 814762 - protein, 142 aa, Homo sapiens
RRQMQDDEQKTRLLEDSVSGWRRKLSVLEMEVLAAETTSQQERLQAIAEKRKRQAEIENKRRQLEDERRQLQHLKSKALRERWLLEGTPSSASEGDEDLRRQMQDDEQKTPPQPLPRRTRRPRAQSGPQPRVQPRRSARQRW

SEQ ID NO: 814763 - protein, 470 aa, Homo sapiens
WALPTPTPRTAEASAGLPSGLGLMNSSPGAGLSHALQTTPSPGPEPPTPPHAVKSIAGTGGLCAPGWASGGGRGAPGLCAAAGSQGGSETQHLPRDPQHLPWDPQQHQDRRRPELFHAFARDSAPPPSMVLAAETTSQQERLQAIAEKRKRQAEIENKRRQLEDERRQLQHLKSKALRERWLLEGTPSSASEGDEDLRRQMQDDEQKTRLLEDSVSRLEKEIEVLERGDSAPAAAKENAAAPSPVRAPAPSPAKEERKTEVVMNSQQTPVGTPKDKRVSNTPLRTVDGSPMMKAVVHAVDGTAENGIHPLSSSEVDELIHKADEVTLSEAGSTAGAAETRGAVEGAARTTPSRREITGVQAQPGEATSGPPGIQPGQEPPVTMIFMGYQNVEDEAETKKVLGLQDTITAELVVIEDAAEPKEPAPPNGSAAEPPTEAASREENQAGPEATTSDPQDLDMKKHRCKCCSIM

SEQ ID NO: 814764 - protein, 470 aa, Homo sapiens; identical to SEQ ID NO: 814763

SEQ ID NO: 814765 - protein, 227 aa, Homo sapiens
MGASARLLRAVIMGAPGSGKGTVSSRITTHFELKHLSSGDLLRDNMLRGTEIGVLAKAFIDQGKLIPDDVMTRLALHELKNLTQYSWLLDGFPRTLPQAEALDRAYQIDTVINLNVPFEVIKQRLTARWIHPASGRVYNIEFNPPKTVGIDDLTGEPLIQREDDKPETVIKRLKAYEDQTKPVLEYYQKKGVLETFSGTETNKIWPYVYAFLQTKVPQRSQKASVTP

SEQ ID NO: 814766 - protein, 157 aa, Homo sapiens
MTRLALHELKNLTQYSWLLDGFPRTLPQAEALDRAYQIDTVINLNVPFEVIKQRLTARWIHPASGRVYNIEFNPPKTVGIDDLTGEPLIQREDDKPETVIKRLKAYEDQTKPVLEYYQKKGVLETFSGTETNKIWPYVYAFLQTKVPQRSQKASVTP

SEQ ID NO: 814767 - protein, 191 aa, Homo sapiens
MGASARLLRAVIMGAPGSGKGTVSSRITTHFELKHLSSGDLLRDNMLRGTEIGVLAKAFIDQGKLIPDDVMTRLALHELKNLTQYSWLLDGFPRTLPQAEALDRAYQIDTVINLNVPFEVIKQRLTARWIHPASGRVYNIEFNPPKTVGIDDLTGEPLIQREDDKPETVIKRLKAYEDQTKPVLEYYQKGC

SEQ ID NO: 814768 - protein, 107 aa, Homo sapiens
MGASARLLRAVIMGAPGSGKGTVSSRITTHFELKHLSSGDLLRDNMLRGTASLFPENNNIEIRPTNNPTVASEVFKLKEESGTSLTLNQKLEMIKLSEEGMLKTKTG

SEQ ID NO: 814769 - protein, 227 aa, Homo sapiens; identical to SEQ ID NO: 814765

SEQ ID NO: 814770 - protein, 227 aa, Homo sapiens; identical to SEQ ID NO: 814765

SEQ ID NO: 814771 - protein, 227 aa, Homo sapiens; identical to SEQ ID NO: 814765

SEQ ID NO: 814772 - protein, 227 aa, Homo sapiens; identical to SEQ ID NO: 814765

SEQ ID NO: 814773 - protein, 227 aa, Homo sapiens; identical to SEQ ID NO: 814765

SEQ ID NO: 814774 - protein, 157 aa, Homo sapiens; identical to SEQ ID NO: 814766

SEQ ID NO: 814775 - protein, 157 aa, Homo sapiens; identical to SEQ ID NO: 814766

SEQ ID NO: 814776 - protein, 227 aa, Homo sapiens; identical to SEQ ID NO: 814765

SEQ ID NO: 814777 - protein, 227 aa, Homo sapiens; identical to SEQ ID NO: 814765

SEQ ID NO: 814778 - protein, 337 aa, Homo sapiens
MNSTCIEEQHDLDHYLFPIVYIFVIIVSIPANIGSLCVSFLQAKKESELGIYLFSLSLSDLLYALTLPLWIDYTWNKDNWTFSPALCKGSAFLMYMNFYSSTAFLTCIAVDRYLAVVYPLKFFFLRTRRFALMVSLSIWILETIFNAVMLWEDETVVEYCDAEKSNFTLCYDKYPLEKWQINLNLFRTCTGYAIPLVTILICNRKVYQAVRHNKATENKEKKRIIKLLVSITVTFVLCFTPFHVMLLIRCILEHAVNFEDHSNSGKRTYTMYRITVALTSLNCVADPILYCFVTETGRYDMWNILKFCTGRCNTSQRQRKRILSVSTKDTMELEVLE

SEQ ID NO: 814779 - protein, 242 aa, Homo sapiens
MNFYSSTAFLTCIAVDRYLAVVYPLKFFFLRTRRFALMVSLSIWILETIFNAVMLWEDETVVEYCDAEKSNFTLCYDKYPLEKWQINLNLFRTCTGYAIPLVTILICNRKVYQAVRHNKATENKEKKRIIKLLVSITVTFVLCFTPFHVMLLIRCILEHAVNFEDHSNSGKRTYTMYRITVALTSLNCVADPILYCFVTETGRYDMWNILKFCTGRCNTSQRQRKRILSVSTKDTMELEVLE

SEQ ID NO: 814780 - protein, 238 aa, Homo sapiens
MNSTCIEEQHDLDHYLFPIVYIFVIIVSIPANIGSLCVSFLQAKKESELGIYLFSLSLSDLLYALTLPLWIDYTWNKDNWTFSPALCKGSAFLMYMNFYSSTAFLTCIAVDRYLAVVYPLKFFFLRTRRFALMVSLSIWILETIFNAVMLWEDETVVEYCDAEKSNFTLCYDKYPLEKWQINLNLFRTCTGYAIPLVTILICNRKVYQAVRHNKATENKEKKRILNLFGNKKNLWVIG

SEQ ID NO: 814781 - protein, 276 aa, Homo sapiens
EGKKFVPRGFSYFASAVYTYIQSRFYRSPEVILGHPYDVAIDMWSLGCITAELYTGYPLFPGENEVEQLACIMEVLGLPPAGFIQTASRRQTFFDSKGFPKNITNNRGKKRYPDSKDLTMVLKTYDTSFLDFLRRCLVWEPSLRMTPDQALKHAWIHQSRNLKPQPRPQTLRKSNSFFPSETRKDKVQGCHHSSRKADEITKETTEKTKDSPTKHVQHSGDQQDCLQHGADTVQLPQLVDAPKKSEAAVGAEVSMTSPGQSKNFSLKNTNVLPPIV

SEQ ID NO: 814782 - protein, 165 aa, Homo sapiens
ARYEAVLIGRGRVVRVLSMSRSAITAIATSVCHGPPCRQLHHALMPHGKGGRSSVSGIVATVFGATGFLGRYVVNHLGRMGSQVIIPYRCDKYDIMHLRPMGDLGQLLFLEWDARDKDSIRRVVQHSNVVINLIGRDWETKNFDFEDVFVKIPQAMCSTVQGSWS

SEQ ID NO: 814783 - protein, 125 aa, Homo sapiens
MTQMDAKKPRKCDLTPFLVLKARKKQKFTSAKGPTLSEIYMVGSKLSVQIQKPPSNIKNSRMTQVFHKNTSVTSLPFVDTKGKKNTVSFPHISKKVLLKSSLLYQVSADGLDPEKAGERPGFSPK

SEQ ID NO: 814784 - protein, 179 aa, Homo sapiens
SLAAVVSRECCRGGLWEKMAAAAQSRVVRVLSMSRSAITAIATSVCHGPPCRQLHHALMPHGKGGRSSVSGIVATVFGATGFLGRYVVNHLGRMGSQVIIPYRCDKYDIMHLRPMGDLGQLLFLEWDARDKDSIRRVVQHSNVVINLIGRDWETKNFDFEDVFVKIPQAMCSTVQGSWS

SEQ ID NO: 814785 - protein, 179 aa, Homo sapiens; identical to SEQ ID NO: 814784

SEQ ID NO: 814786 - protein, 179 aa, Homo sapiens; identical to SEQ ID NO: 814784

SEQ ID NO: 814787 - protein, 179 aa, Homo sapiens; identical to SEQ ID NO: 814784

SEQ ID NO: 814788 - protein, 179 aa, Homo sapiens; identical to SEQ ID NO: 814784

SEQ ID NO: 814789 - protein, 179 aa, Homo sapiens; identical to SEQ ID NO: 814784

SEQ ID NO: 814790 - protein, 179 aa, Homo sapiens; identical to SEQ ID NO: 814784

SEQ ID NO: 814791 - protein, 179 aa, Homo sapiens; identical to SEQ ID NO: 814784

SEQ ID NO: 814792 - protein, 179 aa, Homo sapiens; identical to SEQ ID NO: 814784

SEQ ID NO: 814793 - protein, 179 aa, Homo sapiens; identical to SEQ ID NO: 814784

SEQ ID NO: 814794 - protein, 218 aa, Homo sapiens
STRGGYSRSAMYSRKAMYKRKYSAAKSKVEKKKKEKVLATVTKPVGGDKNGGTRDRQMAAAAQSRVVRVLSMSRSAITAIATSVCHGPPCRQLHHALMPHGKGGRSSVSGIVATVFGATGFLGRYVVNHLGRMGSQVIIPYRCDKYDIMHLRPMGDLGQLLFLEWDARDKDSIRRVVQHSNVVINLIGRDWETKNFDFEDVFVKIPQAMCSTVQGSWS

SEQ ID NO: 814795 - protein, 179 aa, Homo sapiens; identical to SEQ ID NO: 814784

SEQ ID NO: 814796 - protein, 179 aa, Homo sapiens; identical to SEQ ID NO: 814784

SEQ ID NO: 814797 - protein, 483 aa, Homo sapiens
MPASELKASEIPFHPSIKTQDPKAEEKSPKKQKVTLTAAEALKLFKNQLSPYEQSEILGYAELWFLGLEAKKLDTAPEKFSKTSFDDEHGFYLKVLHDHIAYRYEVLETIGKGSFGQVAKCLDHKNNELVALKIIRNKKRFHQQALMELKILEALRKKDKDNTYNVVHMKDFFYFRNHFCITFELLGINLYELMKNNNFQGFSLSIVRRFTLSVLKCLQMLSVEKIIHCDLKPENIVLYQKGQASVKVIDFGSSCYEHQKVYTYIQSRFYRSPEVILGHPYDVAIDMWSLGCITAELYTGYPLFPGENEVEQLACIMELTNKDVCAHMEGEVLLDVRTGSAITAIATSVCHGPPCRQLHHALMPHGKGGRSSVSGIVATVFGATGFLGRYVVNHLGRMGSQVIIPYRCDKYDIMHLRPMGDLGQLLFLEWDARDKDSIRRVVQHSNVVINLIGRDWETKNFDFEDVFVKIPQAMCSTVQGSWS

SEQ ID NO: 814798 - protein, 158 aa, Homo sapiens [sequence omitted]

SEQ ID NO: 814799 - protein, 158 aa, Homo sapiens [sequence omitted]

SEQ ID NO: 814800 - protein, 158 aa, Homo sapiens [sequence omitted]

SEQ ID NO: 814801 - protein, 179 aa, Homo sapiens; identical to SEQ ID NO: 814784

SEQ ID NO: 814802 - protein, 179 aa, Homo sapiens; identical to SEQ ID NO: 814784

SEQ ID NO: 814803 - protein, 158 aa, Homo sapiens [sequence omitted]

SEQ ID NO: 814804 - protein, 520 aa, Homo sapiens
MPASELKASEIPFHPSIKTQDPKAEEKSPKKQKVTLTAAEALKLFKNQLSPYEQSEILGYAELWFLGLEAKKLDTAPEKFSKTSFDDEHGFYLKVLHDHIAYRYEVLETIGKGSFGQVAKCLDHKNNELVALKIIRNKKRFHQQALMELKILEALRKKDKDNTYNVVHMKDFFYFRNHFCITFELLGINLYELMKNNNFQGFSLSIVRRFTLSVLKCLQMLSVEKIIHCDLKPENIVLYQKGQASVKVIDFGSSCYEHQKVYTYIQSRFYRSPEVILGHPYDVAIDMWSLGCITAELYTGYPLFPGENEVEQLACIMEVLGLPPAGFIQTASRRQTFFDSKGFPKNITNNRGKKRYPDSKDLTMVLKTYDTSFLDFLRRCLVWEPSLRMTPDQALKHAWIHQSRNLKPQPRPQTLRKSNSFFPSETRKDKVQGCHHSSRKADEITKETTEKTKDSPTKHVQHSGDQQDCLQHGADTVQLPQLVDAPKKSEAAVGAEVSMTSPGQSKNFSLKNTNVLPPIV

SEQ ID NO: 814805 - protein, 326 aa, Homo sapiens [sequence omitted]

SEQ ID NO: 814806 - protein, 234 aa, Homo sapiens
MWSLGCITAELYTGYPLFPGENEVEQLACIMEVLGLPPAGFIQTASRRQTFFDSKGFPKNITNNRGKKRYPDSKDLTMVLKTYDTSFLDFLRRCLVWEPSLRMTPDQALKHAWIHQSRNLKPQPRPQTLRKSNSFFPSETRKDKVQGCHHSSRKADEITKETTEKTKDSPTKHVQHSGDQQDCLQHGADTVQLPQLVDAPKKSEAAVGAEVSMTSPGQSKNFSLKNTNVLPPIV

SEQ ID NO: 814807 - protein, 157 aa, Homo sapiens
MVLKTYDTSFLDFLRRCLVWEPSLRMTPDQALKHAWIHQSRNLKPQPRPQTLRKSNSFFPSETRKDKVQGCHHSSRKADEITKETTEKTKDSPTKHVQHSGDQQDCLQHGADTVQLPQLVDAPKKSEAAVGAEVSMTSPGQSKNFSLKNTNVLPPIV

SEQ ID NO: 814808 - protein, 326 aa, Homo sapiens [sequence omitted]

SEQ ID NO: 814809 - protein, 272 aa, Homo sapiens
  misc_feature (198)..(198): Xaa can be any naturally occurring amino acid
SLAAVVSRECCRGGLWEKMAAAAQSRVVRVLSMSRSAITAIATSVCHGPPCRQLHHALMPHGKGGRSSVSGIVATVFGATGFLGRYVVNHLGRMGSQVIIPYRCDKYDIMHLRPMGDLGQLLFLEWDARDKDSIRRVVQHSNVVIFSILLGREEPWGKKNQKKKKLFWEIFFGNGGGTHEGYHINQRRAVFGGKHTTXANIFFSPTPPRPQKRKGAAPTTKLFCLGGRRFSPQKKTLLSVGGGCFLPHPQKKDQGGGGANTNKNAGAPLFLV

SEQ ID NO: 814810 - protein, 459 aa, Homo sapiens
MPASELKASEIPFHPSIKTQDPKAEEKSPKKQKVTLTAAEALKLFKNQLSPYEQSEILGYAELWFLGLEAKKLDTAPEKFSKTSFDDEHGFYLKVLHDHIAYRYEVLETIGKGSFGQVAKCLDHKNNELVALKIIRNKKRFHQQALMELKILEALRKKDKDNTYNVVHMKDFFYFRNHFCITFELLGINLYELMKNNNFQGFSLSIVRRFTLSVLKCLQMLSVEKIIHCDLKPENIVLYQKGQASVKVIDFGSSCYEHQKVYTYIQSRFYRSPEVILGHPYDVAIDMWSLGCITAELYTGYPLFPGENEVEQLACIMEVLGLPPAGFIQTASRRQTFFDSKGFPKNITNNRGKKRYPDSKDLTMVLKTYDTSFLDFLRRCLVWEPSLRMTPDQALKHAWIHQSRNLKPQPRPQTLRKSNSFFPSETRKDKVQGCHHSSRKAGTACQITSPSPTVRELIF

SEQ ID NO: 814811 - protein, 131 aa, Homo sapiens
SLAAVVSRECCRGGLWEKMAAAAQSRVVRVLSMSRSAITAIATSVCHGPPCRQLHHALMPHGKGGRSSVSGIVATVFGATGFLGRYVVNHLGRMGSQVIIPYRCDKYDIMHLRPMGDLGQLLFLVRAFMTE

SEQ ID NO: 814812 - protein, 326 aa, Homo sapiens [sequence omitted]

SEQ ID NO: 814813 - protein, 154 aa, Homo sapiens
MTQMDAKKPRKCDLTPFLVLKARKKQKFTSAKGPTLSEIYMVGSKLSVQIQKPPSNIKNSRMTQVFHKNTSVTSLPFVDTKGKKNTVSFPHISKKVLLKSSLLYQENQAHNQMPASELKASEIPFHPSIKTQDPKAEEKSPKKQKVTLTAAGPS

SEQ ID NO: 814814 - protein, 397 aa, Homo sapiens
MRNATSALGPELRCLGAAVHPDPEHSQAKVSLACVGRRLVCGARRAVEKSERIRMEAVATATAAKEPDKGCIEPGPGHWGELSRTPVPSKPQDKVEAAEATPVALDSDTSGAENAAVSAMLHAVAASRLPVCSQQQGEPDLTEHEKVAILAQLYHEKPLVFLERFRTGLREEHLACFGHVRGDHRADFYCAEVARQGTARPRTLRTRLRNRRYAALRELIQGGEYFSDEQMRFRAPLLYEQYIGQYLTQEELSARTPTHQPPKPGSPGRPACPLSNLLLQSYEERELQQRLLQQQEEEEACLEEEEEEEDSDEEDQRSGKDSEAWVPDSEERLILREEFTSRMHQRFLDGKDGDFDYSTVDDNPDFDNLDIVARDEEERYFDEEEPEDAPSPELDGD

SEQ ID NO: 814815 - protein, 278 aa, Homo sapiens
MLHAVAASRLPVCSQQQGEPDLTEHEKVAILAQLYHEKPLVFLERFRTGLREEHLACFGHVRGDHRADFYCAEVARQGTARPRTLRTRLRNRRYAALRELIQGGEYFSDEQMRFRAPLLYEQYIGQYLTQEELSARTPTHQPPKPGSPGRPACPLSNLLLQSYEERELQQRLLQQQEEEEACLEEEEEEEDSDEEDQRSGKDSEAWVPDSEERLILREEFTSRMHQRFLDGKDGDFDYSTVDDNPDFDNLDIVARDEEERYFDEEEPEDAPSPELDGD

SEQ ID NO: 814816 - protein, 397 aa, Homo sapiens; identical to SEQ ID NO: 814814

SEQ ID NO: 814817 - protein, 397 aa, Homo sapiens; identical to SEQ ID NO: 814814

SEQ ID NO: 814818 - protein, 109 aa, Homo sapiens [sequence omitted]

SEQ ID NO: 814819 - protein, 397 aa, Homo sapiens; identical to SEQ ID NO: 814814

SEQ ID NO: 814820 - protein, 385 aa, Homo sapiens
MRNATSALGPELRCLGAAVHPDPEHSQAKVSLACVGRRLVCGARRAVEKSERIRMEAVATATAAKEPDKGCIEPGPGHWGELSRTPVPSKPQDKVEAAEATPVALDSDTSGAENAAVSAMLHAVAASRLPVCSQQQGEPDLTEHEKVAILAQLYHEKPLVFLERFRTGLREEHLACFGHVRGDHRADFYCAEVARQGTARPRTLRTRLRNRRYAALRELIQGGEYFSDEQMRFRAPLLYEQYIGQYLTQEELSARTPTHQPPKPGSPGRPACPLSNLLLQSYEERELQQRLLQQQEEEEACLEEEEEEEDSDEEDQRSGKDSEAWVPDSEERLILREEFTSRMHQRFLDGKDGDFDYSTVDDNPDFDNLDIVARDEEEMSSDGKV

SEQ ID NO: 814821 - protein, 428 aa, Homo sapiens
MRNATSALGPELRCLGAAVHPDPEHSQAKVSLACVGRRLVCGARRAVEKSERIRMEAVATATAAKEPDKGCIEPGPGHWGELSRTPVPSKPQDKVEAAEATPVALDSDTSGAENAAVSAMLHAVAASRLPVCSQQQGEPDLTEHEKVAILAQLYHEKPLVFLERFRTGLREEHLACFGHVRGDHRADFYCAEVARQGTARPRTLRTRLRNRRYAALRELIQGGEYFSDEQMRFRAPLLYEQYIGQYLTQEELSARTPTHQPPKPGSPGRPACPLSNLLLQSYEERELQQRLLQQQEEEEACLEEEEEEEDSDEEDQRSGKDSEAWVPDSEERLILREEFTSRMHQRFLDGKDGDFDYRCSCASTSPSPSPASHGLWSHAEPLTSCGGLPLWSYKAPKQFQDVGLNSQRKRLGDLGLALSISDPQSPHL

SEQ ID NO: 814822 - protein, 138 aa, Homo sapiens
MNSLVSWQLLLFLCATHFGEPLEKVASVGNSRPTGQQLESLGLLAPGEQSLPCTERKPAATARLSRRGTSLSPPPESSGSPQQPGLSAPHSRQIPAPQGAVLVQREKDLPNYNWNSFGLRFGKREAAPGNHGRSAGRG

SEQ ID NO: 814823 - protein, 138 aa, Homo sapiens; identical to SEQ ID NO: 814822

SEQ ID NO: 814824 - protein, 138 aa, Homo sapiens; identical to SEQ ID NO: 814822

SEQ ID NO: 814825 - protein, 138 aa, Homo sapiens; identical to SEQ ID NO: 814822

SEQ ID NO: 814826 - protein, 138 aa, Homo sapiens; identical to SEQ ID NO: 814822

SEQ ID NO: 814827 - protein, 138 aa, Homo sapiens; identical to SEQ ID NO: 814822

SEQ ID NO: 814828 - protein, 162 aa, Homo sapiens
  misc_feature (143)..(144): Xaa can be any naturally occurring amino acid
  misc_feature (148)..(149): Xaa can be any naturally occurring amino acid
MNSLVSWQLLLFLCATHFGEPLEKVASVGNSRPTGQQLESLGLLAPGEQSLPCTERKPAATARLSRRGTSLSPPPESSGSPQQPGLSAPHSRQIPAPQGAVLVQREKDLPNYNWNSFGLRFGKREAAPGNHGRRRLESRRLGXXIAGXXNYTNTHKERYKKK

SEQ ID NO: 814829 - protein, 108 aa, Homo sapiens
MNSLVSWQLLLFLCATHFGEPLEKVASVGNSRPTGQQLESLGLLAPGEQSLPCTERKPAATARLSRRGTSLSPPPESSGSPQQPGLSAPHSRQIPAPQGAVLVHAGRG

SEQ ID NO: 814830 - protein, 52 aa, Homo sapiens
MNSLVSWQLLLFLCATHFGEPLEKVASVGNSRPTGQQLDHWPPAPDEPAFRT

SEQ ID NO: 814831 - protein, 138 aa, Homo sapiens; identical to SEQ ID NO: 814822

SEQ ID NO: 814832 - protein, 1080 aa, Homo sapiens
SSVPHPVRPSDGLDDQSIVTGLEAKEDLYLEPQVGHDPAGPAASPVLADGLSVSQAPAILPVSKNTVKLLESPVPAAQVLSTVPLAVSPGSSSSGPLASSPSVSSLSEQKTSSSSPLSSPSKSPILSSSASSSTLSSAKTFMSLVKSLSTEVEPKESPHPARHRHLMKTLVKSLSTDTSRQESDTVSYKPPDSKLNLHLFKQFTQPRNTGGDSKTAPSSPLTSPSDTRSFFKVPEMEAKIEDTKRRLSEVIYEPFQLLSKIIGEESGSHRPKALSSSASELSNLSSLNGHLESNNNYSIKEEECDSEGDGYGSDSNIPRSDHPKSTGEPTREIELKSSQGSSLKDLGLKTSSLVLEKCSLSALVSKEDEEFCELYTEDFDLETEGESKVDKLSDIPLKPEVLAEDGVVLDSEDEVDSAVQHPELPVKTLGFFIMCVYVYLILPLPHYVSGLFLGIGLGFMTAVCVIWFFTPPSAHKYHKLHKNLRHWNTRSLDIKEPEILKGWMNEIYNYDPETYHATLTHSVFVRLEGGTLRLSKPNKNISRRASYNEPKPEVTYISQKIYDLSDSKIYLVPKTLARKRIWNKKYPICIELGQQDDFMSKAQTDKETSEEKPPAEGSEDPKKPPRPQEGTRSSQRDQILYLFGRTGREKEEWFRRFILASKLKSEIKKSSGVSGGKPGLLPAHSRHNSPSGHLTHSRSSSKGSVEEIMSQPKQKELAGSVRQKMLLDYSVYMGRCVPQESRSPQRSPLQSAESSPTAGKKLPEVPPSEEEEQEAWVNALLGRIFWDFLGEKYWSDLVSKKIQMKLSKIKLPYFMNELTLTELDMGVAVPKILQAFKPYVDHQGLWIDLEMSYNGSFLMTLETKMNLTKLGKEPLVEALKVGEIGKEGCRPRAFCLADSDEESSSAGSSEEDDAPEPSGGDKQLLPGAEGYVGGHRTSKIMRFVDKITKSKYFQKATETEFIKKKIEEVSNTPLLLTVEVQECRGTLAVNIPPPPTDRVWYGFRKPPHVELKARPKLGEREVTLVHVTDWIEKKLEQEFQKVFVMPNMDDVYITIMHSAMDPRSTSCLLKDPPVEAADQP

SEQ ID NO: 814833 - protein, 1127 aa, Homo sapiens
MTSLYGRHAEKTTDMPKPSAPKVHVQRSVSRDTIAIHFSASGEEEEEEEEEFREYFEEGLDDQSIVTGLEAKEDLYLEPQVGHDPAGPAASPVLADGLSVSQAPAILPVSKNTVKLLESPVPAAQVLSTVPLAVSPGSSSSGPLASSPSVSSLSEQKTSSSSPLSSPSKSPILSSSASSSTLSSAKTFMSLVKSLSTEVEPKESPHPARHRHLMKTLVKSLSTDTSRQESDTVSYKPPDSKLNLHLFKQFTQPRNTGGDSKTAPSSPLTSPSDTRSFFKVPEMEAKIEDTKRRLSEVIYEPFQLLSKIIGEESGSHRPKALSSSASELSNLSSLNGHLESNNNYSIKEEECDSEGDGYGSDSNIPRSDHPKSTGEPTREIELKSSQGSSLKDLGLKTSSLVLEKCSLSALVSKEDEEFCELYTEDFDLETEGESKVDKLSDIPLKPEVLAEDGVVLDSEDEVDSAVQHPELPVKTLGFFIMCVYVYLILPLPHYVSGLFLGIGLGFMTAVCVIWFFTPPSAHKYHKLHKNLRHWNTRSLDIKEPEILKGWMNEIYNYDPETYHATLTHSVFVRLEGGTLRLSKPNKNISRRASYNEPKPEVTYISQKIYDLSDSKIYLVPKTLARKRIWNKKYPICIELGQQDDFMSKAQTDKETSEEKPPAEGSEDPKKPPRPQEGTRSSQRDQILYLFGRTGREKEEWFRRFILASKLKSEIKKSSGVSGGKPGLLPAHSRHNSPSGHLTHSRSSSKGSVEEIMSQPKQKELAGSVRQKMLLDYSVYMGRCVPQESRSPQRSPLQSAESSPTAGKKLPEVPPSEEEEQEAWVNALLGRIFWDFLGEKYWSDLVSKKIQMKLSKIKLPYFMNELTLTELDMGVAVPKILQAFKPYVDHQGLWIDLEMSYNGSFLMTLETKMNLTKLGKEPLVEALKVGEIGKEGCRPRAFCLADSDEESSSAGSSEEDDAPEPSGGDKQLLPGAEGYVGGHRTSKIMRFVDKITKSKYFQKATETEFIKKKIEEVSNTPLLLTVEVQECRGTLAVNIPPPPTDRVWYGFRKPPHVELKARPKLGEREVTLVHVTDWIEKKLEQEFQKVFVMPNMDDVYITIMHSAMDPRSTSCLLKDPPVEAADQP

SEQ ID NO: 814834 - protein, 1127 aa, Homo sapiens; identical to SEQ ID NO: 814833

SEQ ID NO: 814835 - protein, 1108 aa, Homo sapiens
MTSLYGRHAEKTTDMPKPSAPKVHVQRSVSRDTIAIHFSASGEEEEEEEEEFREYFEEGLDDQSIVTGLEAKEDLYLEPQVGHDPAGPAASPVLADGLSVSQAPAILPVSKNTVKLLESPVPAAQVLSTVPLAVSPGSSSSGPLASSPSVSSLSEQKTSSSSPLSSPSKSPILSSSASSSTLSSAKTFMSLVKSLSTEVEPKESPHPARHRHLMKTLVKSLSTDTSRQESDTVSYKPPDSKLNLHLFKQFTQPRNTGGDSKTAPSSPLTSPSDTRSFFKVPEMEAKIEDTKRRLSEVIYEPFQLLSKIIGEESGSHRPKALSSSASELSNLSSLNGHLESNNNYSIKEEECDSEGDGYGSDSNIPRSDHPKSTGEPTREIELKSSQGSSLKDLGLKTSSLVLEKCSLSALVSKEDEEFCELYTEDFDLETEGESKVDKLSDIPLKPEVLAEDGVVLDSEDEVDSAVQHPELPVKTLGFFIMCVYVYLILPLPHYVSGLFLGIGLGFMTAVCVIWFFTPPSAHKYHKLHKNLRHWNTRSLDIKEPEILKGWMNEIYNYDPETYHATLTHSVFVRLEGGTLRLSKPNKNISRRASYNEPKPEVTYISQKIYDLSDSKIYLVPKTLARKRIWNKKYPICIELGQQDDFMSKAQTDKETSEEKPPAEGSEDPKKPPRPQEGTRSSQRDQILYLFGRTGREKEEWFRRFILASKLKSEIKKSSGVSGGKPGLLPAHSRHNSPSGHLTHSRSSSKGSVEEIMSQPKQKELAGSVRQKMLLDYSVYMGRCVPQESRSPQRSPLQSAESSPTAGKKLPEVPPSEEEEQEAWVNALLGRIFWDFLGEKYWSDLVSKKIQMKLSKIKLPYFMNELTLTELDMGVAVPKILQAFKPYVDHQGLWIDLEMSYNGSFLMTLETKMNLTKLGKEPLVEALKVGEIGKEGCRPRAFCLADSDEESSSAGSSEEDDAPEPSGGDKQLLPGAEGYVGGHRTSKIMRFVDKITKSKYFQKATETEFIKKKIEEVSNTPLLLTVEVQECRGTLAVNIPPPPTDRVWYGFRKPPHVELKARPKLGEREKVFVMPNMDDVYITIMHSAMDPRSTSCLLKDPPVEAADQP

SEQ ID NO: 814836 - protein, 1127 aa, Homo sapiens; identical to SEQ ID NO: 814833

SEQ ID NO: 814837 - protein, 1127 aa, Homo sapiens; identical to SEQ ID NO: 814833

SEQ ID NO: 814838 - protein, 1127 aa, Homo sapiens; identical to SEQ ID NO: 814833

SEQ ID NO: 814839 - protein, 1053 aa, Homo sapiens
  misc_feature (1033)..(1033): Xaa can be any naturally occurring amino acid
MTSLYGRHAEKTTDMPKPSAPKVHVQRSVSRDTIAIHFSASGEEEEEEEEEFREYFEEGLDDQSIVTGLEAKEDLYLEPQVGHDPAGPAASPVLADGLSVSQAPAILPVSKNTVKLLESPVPAAQVLSTVPLAVSPGSSSSGPLASSPSVSSLSEQKTSSSSPLSSPSKSPILSSSASSSTLSSAKTFMSLVKSLSTEVEPKESPHPARHRHLMKTLVKSLSTDTSRQESDTVSYKPPDSKLNLHLFKQFTQPRNTGGDSKTAPSSPLTSPSDTRSFFKVPEMEAKIEDTKRRLSEVIYEPFQLLSKIIGEESGSHRPKALSSSASELSNLSSLNGHLESNNNYSIKEEECDSEGDGYGSDSNIPRSDHPKSTGEPTREIELKSSQGSSLKDLGLKTSSLVLEKCSLSALVSKEDEEFCELYTEDFDLETEGESKVDKLSDIPLKPEVLAEDGVVLDSEDEVDSAVQHPELPVKTLGFFIMCVYVYLILPLPHYVSGLFLGIGLGFMTAVCVIWFFTPPSAHKYHKLHKNLRHWNTRSLDIKEPEILKGWMNEIYNYDPETYHATLTHSVFVRLEGGTLRLSKPNKNISRRASYNEPKPEVTYISQKIYDLSDSKIYLVPKTLARKRIWNKKYPICIELGQQDDFMSKAQTDKETSEEKPPAEGSEDPKKPPRPQEGTRSSQRDQILYLFGRTGREKEEWFRRFILASKLKSEIKKSSGVSGGKPGLLPAHSRHNSPSGHLTHSRSSSKGSVEEIMSQPKQKELAGSVRQKMLLDYSVYMGRCVPQESRSPQRSPLQSAESSPTAGKKLPEVPPSEEEEQEAWVNALLGRIFWDFLGEKYWSDLVSKKIQMKLSKIKLPYFMNELTLTELDMGVAVPKILQAFKPYVDHQGLWIDLEMSYNGSFLMTLETKMNLTKLGKEPLVEALKVGEIGKEGCRPRAFCLADSDEESSSAGSSEEDDAPEPSGGDKQLLPGAEGYVGGHRTSKIMRFVDKITKSKYFQKATETEFIKKKIEEVSNADAPSLADIAGEEAXHFRSNSGLHIPPKHLETEWP

SEQ ID NO: 814840 - protein, 767 aa, Homo sapiens
MTSLYGRHAEKTTDMPKPSAPKVHVQRSVSRDTIAIHFSASGEEEEEEEEEFREYFEEGLDDQSIVTGLEAKEDLYLEPQVGHDPAGPAASPVLADGLSVSQAPAILPVSKNTVKLLESPVPAAQVLSTVPLAVSPGSSSSGPLASSPSVSSLSEQKTSSSSPLSSPSKSPILSSSASSSTLSSAKTFMSLVKSLSTEVEPKESPHPARHRHLMKTLVKSLSTDTSRQESDTVSYKPPDSKLNLHLFKQFTQPRNTGGDSKTAPSSPLTSPSDTRSFFKVPEMEAKIEDTKRRLSEVIYEPFQLLSKIIGEESGSHRPKALSSSASELSNLSSLNGHLESNNNYSIKEEECDSEGDGYGSDSNIPRSDHPKSTGEPTREIELKSSQGSSLKDLGLKTSSLVLEKCSLSALVSKEDEEFCELYTEDFDLETEGESKVDKLSDIPLKPEVLAEDGVVLDSEDEVDSAVQHPELPVKTLGFFIMCVYVYLILPLPHYVSGLFLGIGLGFMTAVCVIWFFTPPSAHKYHKLHKNLRHWNTRSLDIKEPEILKGWMNEIYNYDPETYHATLTHSVFVRLEGGTLRLSKPNKNISRRASYNEPKPEVTYISQKIYDLSDSKIYLVPKTLARKRIWNKKYPICIELGQQDDFMSKAQTDKETSEEKPPAEGSEDPKKPPRPQEGTRSSQRDQILYLFGRTGREKEEWFRRFILASKLKSEIKKSSGVSGGKPGLLPAHSRHNSPSGHLTHSRSSSKGSVEEIMSESTCPGHWSL

SEQ ID NO: 814841 - protein, 1127 aa, Homo sapiens; identical to SEQ ID NO: 814833

SEQ ID NO: 814842 - protein, 927 aa, Homo sapiens
MYEGGPCFNFRYRELAFHLSLLGRRCQHKSDTVSYKPPDSKLNLHLFKQFTQPRNTGGDSKTAPSSPLTSPSDTRSFFKVPEMEAKIEDTKRRLSEVIYEPFQLLSKIIGEESGSHRPKALSSSASELSNLSSLNGHLESNNNYSIKEEECDSEGDGYGSDSNIPRSDHPKSTGEPTREIELKSSQGSSLKDLGLKTSSLVLEKCSLSALVSKEDEEFCELYTEDFDLETEGESKVDKLSDIPLKPEVLAEDGVVLDSEDEVDSAVQHPELPVKTLGFFIMCVYVYLILPLPHYVSGLFLGIGLGFMTAVCVIWFFTPPSAHKYHKLHKNLRHWNTRSLDIKEPEILKGWMNEIYNYDPETYHATLTHSVFVRLEGGTLRLSKPNKNISRRASYNEPKPEVTYISQKIYDLSDSKIYLVPKTLARKRIWNKKYPICIELGQQDDFMSKAQTDKETSEEKPPAEGSEDPKKPPRPQEGTRSSQRDQILYLFGRTGREKEEWFRRFILASKLKSEIKKSSGVSGGKPGLLPAHSRHNSPSGHLTHSRSSSKGSVEEIMSQPKQKELAGSVRQKMLLDYSVYMGRCVPQESRSPQRSPLQSAESSPTAGKKLPEVPPSEEEEQEAWVNALLGRIFWDFLGEKYWSDLVSKKIQMKLSKIKLPYFMNELTLTELDMGVAVPKILQAFKPYVDHQGLWIDLEMSYNGSFLMTLETKMNLTKLGKEPLVEALKVGEIGKEGCRPRAFCLADSDEESSSAGSSEEDDAPEPSGGDKQLLPGAEGYVGGHRTSKIMRFVDKITKSKYFQKATETEFIKKKIEEVSNTPLLLTVEVQECRGTLAVNIPPPPTDRVWYGFRKPPHVELKARPKLGEREVTLVHVTDWIEKKLEQEFQKVFVMPNMDDVYITIMHSAMDPRSTSCLLKDPPVEAADQP

SEQ ID NO: 814843 - protein, 1127 aa, Homo sapiens; identical to SEQ ID NO: 814833

SEQ ID NO: 814844 - protein, 1127 aa, Homo sapiens; identical to SEQ ID NO: 814833

SEQ ID NO: 814845 - protein, 201 aa, Homo sapiens
VVVTLSLSSCRPRAFCLADSDEESSSAGSSEEDDAPEPSGGDKQLLPGAEGYVGGHRTSKIMRFVDKITKSKYFQKATETEFIKKKIEEVSNTPLLLTVEVQECRGTLAVNIPPPPTDRVWYGFRKPPHVELKARPKLGEREVTLVHVTDWIEKKLEQEFQKVFVMPNMDDVYITIMHSAMDPRSTSCLLKDPPVEAADQP

SEQ ID NO: 814846 - protein, 1127 aa, Homo sapiens; identical to SEQ ID NO: 814833

SEQ ID NO: 814847 - protein, 893 aa, Homo sapiens
MTSLYGRHAEKTTDMPKPSAPKVHVQRSVSRDTIAIHFSASGEEEEEEEEEFREYFEEGLDDQSIVTGLEAKEDLYLEPQVGHDPAGPAASPVLADGLSVSQAPAILPVSKNTVKLLESPVPAAQVLSTVPLAVSPGSSSSGPLASSPSVSSLSEQKTSSSSPLSSPSKSPILSSSASSSTLSSAKTFMSLVKSLSTEVEPKESPHPARHRHLMKTLVKSLSTDTSRQESDTVSYKPPDSKLNLHLFKQFTQPRNTGGDSKTAPSSPLTSPSDTRSFFKVPEMEAKIEDTKRRLSEVIYEPFQLLSKIIGEESGSHRPKALSSSASELSNLSSLNGHLESNNNYSIKEEECDSEGDGYGSDSNIPRSDHPKSTGEPTREIELKSSQGSSLKDLGLKTSSLVLEKCSLSALVSKEDEEFCELYTEDFDLETEGESKVDKLSDIPLKPEVLAEDGVVLDSEDEVDSAVQHPELPVKTLGFFIMCVYVYLILPLPHYVSGLFLGIGLGFMTAVCVIWFFTPPSAHKYHKLHKNLRHWNTRSLDIKEPEILKGWMNEIYNYDPETYHATLTHSVFVRLEGGTLRLSKPNKNISRRASYNEPKPEVTYISQKIYDLSDSKIYLVPKTLARKRIWNKKYPICIELGQQDDFMSKAQTDKETSEEKPPAEGSEDPKKPPRPQEGTRSSQRDQILYLFGRTGREKEEWFRRFILASKLKSEIKKSSGVSGGKPGLLPAHSRHNSPSGHLTHSRSSSKGSVEEIMSQPKQKELAGSVRQKMLLDYSVYMGRCVPQESRSPQRSPLQSAESSPTAGKKLPEVPPSEEEEQEAWVNALLGRIFWDFLGEKYWSDLVSKKIQMKLSKIKLPYFMNELTLTELDMGVAVPKILQAFKPYVDHQGNS

SEQ ID NO: 814848 - protein, 84 aa, Homo sapiens
MNPCFCAFLVLCLFFLSLLDSQLHNLIALQVTCFKDVEIPNFFCDPSQLSHLACCDTFTINIIMYFPAAIFGFLPILGTLFSFS

SEQ ID NO: 814849 - protein, 148 aa, Homo sapiens
MSTLSGRPFSSLLLEQGDHRGATWLGRGGGAGPGQSGPGHGQGTATPGPGQVRAAQARARRGGGARDAAAEGAREPGAGRRGARAGPGAHLRAGEPSEPALRRPSSAERPLAAGVLLPQMQAEPRSHGQPFRQLQSHWQAPRQGWPAQ

SEQ ID NO: 814850 - protein, 109 aa, Homo sapiens
FLKLLLENCPKHIFLTFVGPLAHQNLQNLYIRRRTDSSLMNQKKISGWSWYLHTQCIFLKLYGEVMGDLYYSEFSKVLWLLHPSKIKIKFVAVLKSSSSCLLYSFLGLL

SEQ ID NO: 814851 - protein, 78 aa, Homo sapiens
WWRGRRKCGVLAGGCFLWAGCGRLPRWGPGRDGCSGGRGWERALGGPGEAVPAGAAEFLHLQPALLAAGRRGCSESYN

SEQ ID NO: 814852 - protein, 84 aa, Homo sapiens; identical to SEQ ID NO: 814848

SEQ ID NO: 814853 - protein, 140 aa, Homo sapiens
NSRPRRHDRRAGPKMAASRYRRFLKLCEEWPVDETKRGRDLGAYLRQRVAQAFREGENTQVAEPEACDQMYESLARLHSNYYKHKYPRPRDTSFSGLSLEEYKLILSTDTLEELKEIDKGMWKKLQEKFAPKGPEEDHKA

SEQ ID NO: 814854 - protein, 250 aa, Homo sapiens [sequence omitted]

SEQ ID NO: 814855 - protein, 102 aa, Homo sapiens
EQPTGDFSLLEKLEQEGNLSGKVAEPEACDQMYESLARLHSNYYKHKYPRPRDTSFSGLSLEEYKLILSTDTLEELKEIDKGMWKKLQEKFAPKGPEEDHKA

SEQ ID NO: 814856 - protein, 99 aa, Homo sapiens
  misc_feature (15)..(15): Xaa can be any naturally occurring amino acid
YKKRLKQTIAPARVXGCPYVAEPEACDQMYESLARLHSNYYKHKYPRPRDTSFSGLSLEEYKLILSTDTLEELKEIDKGMWKKLQEKFAPKGPEEDHKA

SEQ ID NO: 814857 - protein, 86 aa, Homo sapiens
FVGLDCYLTTCATELCRVESYATPFNYYFIKYPRPRDTSFSGLSLEEYKLILSTDTLEELKEIDKGMWKKLQEKFAPKGPEEDHKA

SEQ ID NO: 814858 - protein, 250 aa, Homo sapiens [sequence omitted]

SEQ ID NO: 814859 - protein, 221 aa, Homo sapiens
MMGSDSGPRPSPSQCLLNSTACAESTHQDSNPCSTSQLCNLSKLLHCLLPQFPHLKTGDRKGCVEQAKFCDEASGSVGCTADSAGPFLCPHTEQGNEQHIPALMPRVRRGQETTDSVLGTESGTQCSVPASGHFCYLFDLLFRSWVSTFFRNTLCEKQAMLVSGKPSGSNLCHQVLDFSPSLFLSSPFADTLEELKEIDKGMWKKLQEKFAPKGPEEDHKA

SEQ ID NO: 814860 - protein, 153 aa, Homo sapiens
MSSSMGITWELVRNAESGAPPIPAFSREDSRVHYSWSCLLETVLVLARPSLDLEVALLFSLLGLLALVAQGLGEMQLESRACVLISPLPSLPFCPGDQYPRPRDTSFSGLSLEEYKLILSTDTLEELKEIDKGMWKKLQEKFAPKGPEEDHKA

SEQ ID NO: 814861 - protein, 250 aa, Homo sapiens [sequence omitted]

SEQ ID NO: 814862 - protein, 203 aa, Homo sapiens
HPVTCIYMQIYWFMQNSGGLGGGFFSLKLVQSLKKRRKAVSGVLHVRLAPGSWAGSRRTKTELARLAEKGEQRPYTESSGAPTKSRMPTPASRSTPKAGGEAECASAIRRRRLLPLRREHAGPKMAASRYRRFLKLCEEWPVDETKRGRDLGAYLRQRVAQAFREGENTQVAEPEACDQMYESLARLHSNYYKHKTPWKSLRK

SEQ ID NO: 814863 - protein, 140 aa, Homo sapiens
MSRFLNVLRSWLVMVSIIAMGNTLQSFRDHTFLYEKLYTGKPNLVNGLQARTFGIWTLLSSVIRCLCAIDIHNKTLYHITLWTFLLALGHFLSELFVYGTAAPTIGVLAPLMVASFSILGMLVGLRYLEVEPVSRQKKRN

SEQ ID NO: 814864 - protein, 140 aa, Homo sapiens; identical to SEQ ID NO: 814863

SEQ ID NO: 814865 - protein, 140 aa, Homo sapiens; identical to SEQ ID NO: 814863

SEQ ID NO: 814866 - protein, 177 aa, Homo sapiens
METAQSWSRAEGGGGDKWLRWTPGWSCPGGACLRQRLLLPLLCWGPGRQAKSPPTFEGNTLQSFRDHTFLYEKLYTGKPNLVNGLQARTFGIWTLLSSVIRCLCAIDIHNKTLYHITLWTFLLALGHFLSELFVYGTAAPTIGVLAPLMVASFSILGMLVGLRYLEVEPVSRQKKRN

SEQ ID NO: 814867 - protein, 110 aa, Homo sapiens
HVATRTSILPSQQRVNGLQARTFGIWTLLSSVIRCLCAIDIHNKTLYHITLWTFLLALGHFLSELFVYGTAAPTIGVLAPLMVASFSILGMLVGLRYLEVEPVSRQKKRN

SEQ ID NO: 814868 - protein, 122 aa, Homo sapiens
MSRFLNVLRSWLVMVSIIAMGNTLQSFRDHTFLYVGIWTLLSSVIRCLCAIDIHNKTLYHITLWTFLLALGHFLSELFVYGTAAPTIGVLAPLMVASFSILGMLVGLRYLEVEPVSRQKKRN

SEQ ID NO: 814869 - protein, 137 aa, Homo sapiens
SDEKKNMNWKQLPKKPCKNLLSTLKKLYPQLSSVHQKTQEGSAIDMTPIEADFSWQKKMTQLEMEIQEAFLRFMASILKGYRTYLRPITEAPSNKATAADSLFDRQDDLSISVAMPIYFPFGPLFTGLQCLVHLYHL

SEQ ID NO: 814870 - protein, 314 aa, Homo sapiens
MPLEQRSQHCKPEEGLEARGEALGLVGAQAPATEEQEAASSSSTLVEVTLGEVPAAESPDPPQSPQGASSLPTTMNYPLWSQSYEDSSNQEEEGPSTFPDLESEFQAALSRKVAELVHFLLLKYRAREPVTKAEMLGSVVGNWQYFFPVIFSKASSSLQLVFGIELMEVDPIGHLYIFATCLGLSYDGLLGDNQIMPKAGLLIIVLAIIAREGDCAPEEKIWEELSVLEVFEGREDSILGDPKKLLTQHFVQENYLEYRQVPGSDPACYEFLWGPRALVETSYVKVLHHMVKISGGPHISYPPLHEWVLREGEE

SEQ ID NO: 814871 - protein, 314 aa, Homo sapiens; identical to SEQ ID NO: 814870

SEQ ID NO: 814872 - protein, 314 aa, Homo sapiens; identical to SEQ ID NO: 814870

SEQ ID NO: 814873 - protein, 730 aa, Homo sapiens
MAAGVEAAAEVAATEIKMEEESGAPGVPSGNGAPGPKGEGERPAQNEKRKEKNIKRGGNRFEPYANPTKRYRAFITNIPFDVKWQSLKDLVKEKVGEVTYVELLMDAEGKSRGCAVVEFKMEESMKKAAEVLNKHSLSGRPLKVKEDPDGEHARRAMQKVMATTGGMGMGPGGPGMITIPPSILNNPNIPNEIIHALQAGRLGSTVFVANLDYKVGWKKLKEVFSMAGVVVRADILEDKDGKSRGIGTVTFEQSIEAVQAISMFNGQLLFDRPMHVKMDERALPKGDFFPPERPQQLPHGLGGIGMGLGPGGQPIDANHLNKGIGMGNIGPAGMGMEGIGFGINKMGGMEGPFGGGMENMGRFGSGMNMGRINEILSNALKRGEIIAKQGGGGGGGSVPGIERMGPGIDRLGGAGMERMGAGLGHGMDRVGSEIERMGLVMDRMGSVERMGSGIERMGPLGLDHMASSIERMGQTMERIGSGVERMGAGMGFGLERMAAPIDRVGQTIERMGSGVERMGPAIERMGLSMERMVPAGMGAGLERMGPVMDRMATGLERMGANNLERMGLERMGANSLERMGLERMGANSLERMGPAMGPALGAGIERMGLAMGGGGGASFDRAIEMERGNFGGSFAGSFGGAGGHAPGVARKACQIFVRNLPFDFTWKMLKDKFNECGHVLYADIKMENGKSKGCGVVKFESPEVAERACRMMNGMKLSGREIDVRIDRNA

SEQ ID NO: 814874 - protein, 691 aa, Homo sapiens
MAAGVEAAAEVAATEIKMEEESGAPGVPSGNGAPGPKGEGERPAQNEKRKEKNIKRGGNRFEPYANPTKRYRAFITNIPFDVKWQSLKDLVKEKVGEVTYVELLMDAEGKSRGCAVVEFKMEESMKKAAEVLNKHSLSGRPLKVKEDPDGEHARRAMQKAGRLGSTVFVANLDYKVGWKKLKEVFSMAGVVVRADILEDKDGKSRGIGTVTFEQSIEAVQAISMFNGQLLFDRPMHVKMDERALPKGDFFPPERPQQLPHGLGGIGMGLGPGGQPIDANHLNKGIGMGNIGPAGMGMEGIGFGINKMGGMEGPFGGGMENMGRFGSGMNMGRINEILSNALKRGEIIAKQGGGGGGGSVPGIERMGPGIDRLGGAGMERMGAGLGHGMDRVGSEIERMGLVMDRMGSVERMGSGIERMGPLGLDHMASSIERMGQTMERIGSGVERMGAGMGFGLERMAAPIDRVGQTIERMGSGVERMGPAIERMGLSMERMVPAGMGAGLERMGPVMDRMATGLERMGANNLERMGLERMGANSLERMGLERMGANSLERMGPAMGPALGAGIERMGLAMGGGGGASFDRAIEMERGNFGGSFAGSFGGAGGHAPGVARKACQIFVRNLPFDFTWKMLKDKFNECGHVLYADIKMENGKSKGCGVVKFESPEVAERACRMMNGMKLSGREIDVRIDRNA

SEQ ID NO: 814875 - protein, 610 aa, Homo sapiens
MEESMKKAAEVLNKHSLSGRPLKVKEDPDGEHARRAMQKVMATTGGMGMGPGGPGMITIPPSILNNPNIPNEIIHALQAGRLGSTVFVANLDYKVGWKKLKEVFSMAGVVVRADILEDKDGKSRGIGTVTFEQSIEAVQAISMFNGQLLFDRPMHVKMDERALPKGDFFPPERPQQLPHGLGGIGMGLGPGGQPIDANHLNKGIGMGNIGPAGMGMEGIGFGINKMGGMEGPFGGGMENMGRFGSGMNMGRINEILSNALKRGEIIAKQGGGGGGGSVPGIERMGPGIDRLGGAGMERMGAGLGHGMDRVGSEIERMGLVMDRMGSVERMGSGIERMGPLGLDHMASSIERMGQTMERIGSGVERMGAGMGFGLERMAAPIDRVGQTIERMGSGVERMGPAIERMGLSMERMVPAGMGAGLERMGPVMDRMATGLERMGANNLERMGLERMGANSLERMGLERMGANSLERMGPAMGPALGAGIERMGLAMGGGGGASFDRAIEMERGNFGGSFAGSFGGAGGHAPGVARKACQIFVRNLPFDFTWKMLKDKFNECGHVLYADIKMENGKSKGCGVVKFESPEVAERACRMMNGMKLSGREIDVRIDRNA

SEQ ID NO: 814876 - protein, 571 aa, Homo sapiens
MEESMKKAAEVLNKHSLSGRPLKVKEDPDGEHARRAMQKAGRLGSTVFVANLDYKVGWKKLKEVFSMAGVVVRADILEDKDGKSRGIGTVTFEQSIEAVQAISMFNGQLLFDRPMHVKMDERALPKGDFFPPERPQQLPHGLGGIGMGLGPGGQPIDANHLNKGIGMGNIGPAGMGMEGIGFGINKMGGMEGPFGGGMENMGRFGSGMNMGRINEILSNALKRGEIIAKQGGGGGGGSVPGIERMGPGIDRLGGAGMERMGAGLGHGMDRVGSEIERMGLVMDRMGSVERMGSGIERMGPLGLDHMASSIERMGQTMERIGSGVERMGAGMGFGLERMAAPIDRVGQTIERMGSGVERMGPAIERMGLSMERMVPAGMGAGLERMGPVMDRMATGLERMGANNLERMGLERMGANSLERMGLERMGANSLERMGPAMGPALGAGIERMGLAMGGGGGASFDRAIEMERGNFGGSFAGSFGGAGGHAPGVARKACQIFVRNLPFDFTWKMLKDKFNECGHVLYADIKMENGKSKGCGVVKFESPEVAERACRMMNGMKLSGREIDVRIDRNA

SEQ ID NO: 814877 - protein, 425 aa, Homo sapiens
MGLGPGGQPIDANHLNKGIGMGNIGPAGMGMEGIGFGINKMGGMEGPFGGGMENMGRFGSGMNMGRINEILSNALKRGEIIAKQGGGGGGGSVPGIERMGPGIDRLGGAGMERMGAGLGHGMDRVGSEIERMGLVMDRMGSVERMGSGIERMGPLGLDHMASSIERMGQTMERIGSGVERMGAGMGFGLERMAAPIDRVGQTIERMGSGVERMGPAIERMGLSMERMVPAGMGAGLERMGPVMDRMATGLERMGANNLERMGLERMGANSLERMGLERMGANSLERMGPAMGPALGAGIERMGLAMGGGGGASFDRAIEMERGNFGGSFAGSFGGAGGHAPGVARKACQIFVRNLPFDFTWKMLKDKFNECGHVLYADIKMENGKSKGCGVVKFESPEVAERACRMMNGMKLSGREIDVRIDRNA

SEQ ID NO: 814878 - protein, 453 aa, Homo sapiens
TIFLRSVWTKLLQQLRPSRLPHGLGGIGMGLGPGGQPIDANHLNKGIGMGNIGPAGMGMEGIGFGINKMGGMEGPFGGGMENMGRFGSGMNMGRINEILSNALKRGEIIAKQGGGGGGGSVPGIERMGPGIDRLGGAGMERMGAGLGHGMDRVGSEIERMGLVMDRMGSVERMGSGIERMGPLGLDHMASSIERMGQTMERIGSGVERMGAGMGFGLERMAAPIDRVGQTIERMGSGVERMGPAIERMGLSMERMVPAGMGAGLERMGPVMDRMATGLERMGANNLERMGLERMGANSLERMGLERMGANSLERMGPAMGPALGAGIERMGLAMGGGGGASFDRAIEMERGNFGGSFAGSFGGAGGHAPGVARKACQIFVRNLPFDFTWKMLKDKFNECGHVLYADIKMENGKSKGCGVVKFESPEVAERACRMMNGMKLSGREIDVRIDRNA

SEQ ID NO: 814879 - protein, 592 aa, Homo sapiens
MEESMKKAAEVLNKHSLSGRPLKVKEDPDGEHARRAMQKVMATTGGMGMGPGGPGMITIPPSILNNPNIPNEIIHALQAGRLGSTVFVANLDYKVGWKKLKEVFSMAGVVVRADILEDKDGKSRGIGTVTFEQSIEAVQAISMFNGQLLFDRPMHVKMDERALPKGDFFPPERPQQLPHGLGGIGMGLGPGGQPIDANHLNKGIGMGNIGPAGMGMEGIGFGINKMGGMEGPFGGGMENMGRFGSGMNMGRINGGGGGSVPGIERMGPGIDRLGGAGMERMGAGLGHGMDRVGSEIERMGLVMDRMGSVERMGSGIERMGPLGLDHMASSIERMGQTMERIGSGVERMGAGMGFGLERMAAPIDRVGQTIERMGSGVERMGPAIERMGLSMERMVPAGMGAGLERMGPVMDRMATGLERMGANNLERMGLERMGANSLERMGLERMGANSLERMGPAMGPALGAGIERMGLAMGGGGGASFDRAIEMERGNFGGSFAGSFGGAGGHAPGVARKACQIFVRNLPFDFTWKMLKDKFNECGHVLYADIKMENGKSKGCGVVKFESPEVAERACRMMNGMKLSGREIDVRIDRNA

SEQ ID NO: 814880 - protein, 577 aa, Homo sapiens
MEESMKKAAEVLNKHSLSGRPLKVKEDPDGEHARRAMQKVMATTGGMGMGPGGPGMITIPPSILNNPNIPNEIIHALQAGRLGSTVFVANLDYKVGWKKLKEVFSMAGVVVRADILEDKDGKSRGIGTVTFEQSIEAVQAISMFNGQLLFDRPMHVKMDERALPKGDFFPPERPQQLPHGLGGIGMGLGPGGQPIDANHLNKGIGMGNIGPAGMEGPFGGGMENMGRFGSGMNMGRINGGGGGSVPGIERMGPGIDRLGGAGMERMGAGLGHGMDRVGSEIERMGLVMDRMGSVERMGSGIERMGPLGLDHMASSIERMGQTMERIGSGVERMGAGMGFGLERMAAPIDRVGQTIERMGSGVERMGPAIERMGLSMERMVPAGMGAGLERMGPVMDRMATGLERMGANNLERMGLERMGANSLERMGLERMGANSLERMGPAMGPALGAGIERMGLAMGGGGGASFDRAIEMERGNFGGSFAGSFGGAGGHAPGVARKACQIFVRNLPFDFTWKMLKDKFNECGHVLYADIKMENGKSKGCGVVKFESPEVAERACRMMNGMKLSGREIDVRIDRNA

SEQ ID NO: 814881 - protein, 301 aa, Homo sapiens
MEESMKKAAEVLNKHSLSGRPLKVKEDPDGEHARRAMQKVMATTGGMGMGPGGPGMITIPPSILNNPNIPNEIIHALQAGRLGSTVFVANLDYKVGWKKLKEVFSMAGVVVRADILEDKDGKSRGIGTVTFEQSIEAVQAISMFNGQLLFDRPMHVKMDERALPKGDFFPPERPQQLPHGLGGIGMGLGPGGQPIDANHLNKGIGMGNIGPAGMGMEGIGFGINKMGGMEGPFGGGMENMGRFGSGMNMGRINAGSKRRRRWRRRRSKWRKRAARPACRAATGLRALRVKENDLLRMRRGR

SEQ ID NO: 814882 - protein, 685 aa, Homo sapiens
RPRLLLPRAILLWSGGEEEPPRRPRARSCEPEEAARTPGFPPSRGSRGAKGSPGRGTREPRPPRGAPLRVPCTMSWGTELWDQFDNLEKHTQWGIDILEKYIKFVKERTEIELSYAKQLRNLSKKYQPKKNSKEEEEYKYTSCKAFISNLNEMNDYAGQHEVISENMASQIIVDLARYVQELKQERKSNFHDGRKAQQHIETCWKQLESSKRRFERDCKEADRAQQYFEKMDADINVTKADVEKARQQAQIRHQMAEDSKADYSSILQKFNHEQHEYYHTHIPNIFQKIQEMEERRIVRMGESMKTYAEVDRQVIPIIGKCLDGIVKAAESIDQKNDSQLVIEAYKSGFEPPGDIEFEDYTQPMKRTVSDNSLSNSRGEGKPDLKFGGKSKGKLWPFIKKNKLCPFNIPPSASPSPSCLCLTLCCSQRPPVSQAAKGTPLPPLQRVHDLQTQNPLLQEPKAWVGATPEDFSNLPPEQRRKKLQQKVDELNKEIQKEMDQRDAITKMKDVYLKNPQMGDPASLDHKLAEVSQNIEKLRVETQKFEAWLAEVEGRLPARNEQARRQSGLYDSQNPPTVNNCAQDRESPDGSYTEEQSQESEMKVLATDFDDEFDDEEPLPAIGTCKALYTFEGQNEGTISVVEGETLYVIEEDKGDGWTRIRRNEDEEGYVPTSYVEVCLDKNAKDS

SEQ ID NO: 814883 - protein, 533 aa, Homo sapiens
MNDYAGQHEVISENMASQIIVDLARYVQELKQERKSNFHDGRKAQQHIETCWKQLESSKRRFERDCKEADRAQQYFEKMDADINVTKADVEKARQQAQIRHQMAEDSKADYSSILQKFNHEQHEYYHTHIPNIFQKIQEMEERRIVRMGESMKTYAEVDRQVIPIIGKCLDGIVKAAESIDQKNDSQLVIEAYKSGFEPPGDIEFEDYTQPMKRTVSDNSLSNSRGEGKPDLKFGGKSKGKLWPFIKKNKLCPFNIPPSASPSPSCLCLTLCCSQRPPVSQAAKGTPLPPLQRVHDLQTQNPLLQEPKAWVGATPEDFSNLPPEQRRKKLQQKVDELNKEIQKEMDQRDAITKMKDVYLKNPQMGDPASLDHKLAEVSQNIEKLRVETQKFEAWLAEVEGRLPARNEQARRQSGLYDSQNPPTVNNCAQDRESPDGSYTEEQSQESEMKVLATDFDDEFDDEEPLPAIGTCKALYTFEGQNEGTISVVEGETLYVIEEDKGDGWTRIRRNEDEEGYVPTSYVEVCLDKNAKDS

SEQ ID NO: 814884 - protein, 176 aa, Homo sapiens
MDQRDAITKMKDVYLKNPQMGDPASLDHKLAEVSQAWLAEVEGRLPARNEQARRQSGLYDSQNPPTVNNCAQDRESPDGSYTEEQSQESEMKVLATDFDDEFDDEEPLPAIGTCKALYTFEGQNEGTISVVEGETLYVIEEDKGDGWTRIRRNEDEEGYVPTSYVEVCLDKNAKDS

SEQ ID NO: 814885 - protein, 201 aa, Homo sapiens [sequence omitted]

SEQ ID NO: 814886 - protein, 689 aa, Homo sapiens
RPRLLLPRAILLWSGGEEEPPRRPRARSCEPEEAARTPGFPPSRGSRGAKGSPGRGTREPRPPRGAPLRVPCTMSWGTELWDQFDNLEKHTQWGIDILEKYIKFVKERTEIELSYAKQLRNLSKKYQPKKNSKEEEEYKYTSCKAFISNLNEMNDYAGQHEVISENMASQIIVDLARYVQELKQERKSNFHDGRKAQQHIETCWKQLESSKRRFERDCKEADRAQQYFEKMDADINVTKADVEKARQQAQIRHQMAEDSKADYSSILQKFNHEQHEYYHTHIPNIFQKIQEMEERRIVRMGESMKTYAEVDRQVIPIIGKCLDGIVKAAESIDQKNDSQLVIEAYKSGFEPPGDIEFEDYTQPMKRTVSDNSLSNSRGEGKPDLKFGGKSKGKLWPFIKKNKLCPFNIPPSASPSPSCLCLTLCCSQRPPVSQAAKGTPLPPLQRVHDLQTQNPLLQEPKAWVGATPEDFSNLPPEQRRKKLQQKVDELNKEIQKEMDQRDAITKMKDVYLKNPQMGDPASLDHKLAEVSQNIEKLRVETQKFEAWLAEVEGRLPARNEQARRQSGLYDSQNPPTVNNCAQDRESPDGSYTEEQSQESEMKVLATDFDDEFDDEEPLPAIGTCKALYTFEGQNEGTISVVEGETLYVIEEDKGDGWTRIRRNEDEEGYVPTSYVEVCLDKNAKGAKTYI

SEQ ID NO: 814887 - protein, 685 aa, Homo sapiens; identical to SEQ ID NO: 814882

SEQ ID NO: 814888 - protein, 685 aa, Homo sapiens; identical to SEQ ID NO: 814882

SEQ ID NO: 814889 - protein, 685 aa, Homo sapiens; identical to SEQ ID NO: 814882

SEQ ID NO: 814890 - protein, 484 aa, Homo sapiens
RPRLLLPRAILLWSGGEEEPPRRPRARSCEPEEAARTPGFPPSRGSRGAKGSPGRGTREPRPPRGAPLRVPCTMSWGTELWDQFDNLEKHTQWGIDILEKYIKFVKERTEIELSYAKQLRNLSKKYQPKKNSKEEEEYKYTSCKAFISNLNEMNDYAGQHEVISENMASQIIVDLARYVQELKQERKSNFHDGRKAQQHIETCWKQLESSKRRFERDCKEADRAQQYFEKMDADINVTKADVEKARQQAQIRHQMAEDSKADYSSILQKFNHEQHEYYHTHIPNIFQKIQEMEERRIVRMGESMKTYAEVDRQVIPIIGKCLDGIVKAAESIDQKNDSQLVIEAYKSGFEPPGDIEFEDYTQPMKRTVSDNSLSNSRGEGKPDLKFGGKSKGKLWPFIKKNKLCPFNIPPSASPSPSCLCLTLCCSQRPPVSQAAKGTPLPPLQRVHDLQTQNPLLQEPKAWGKFCSGILSLWRALVACLVLHN

SEQ ID NO: 814891 - protein, 211 aa, Homo sapiens
RPRLLLPRAILLWSGGEEEPPRRPRARSCEPEEAARTPGFPPSRGSRGAKGSPGRGTREPRPPRGAPLRVPCTMSWGTELWDQFDNLEKHTQWGIDILEKYIKFVKERTEIELSYAKQLRNLSKKYQPKKNSKEEEEYKYTSCKAFISNLNEMNDYAGQHEVISENMASQIIVDLARYVQELKQERKSVSKTLFFFFLKDGPNTVGISLED

SEQ ID NO: 814892 - protein, 75 aa, Homo sapiens
MALGWSLSLLLSPGAWLAEVEGRLPARNEQARRQSGLYDSQNPPTVNNCAQDRERYSICTAPASGKGACWLCIYF

SEQ ID NO: 814893 - protein, 685 aa, Homo sapiens; identical to SEQ ID NO: 814882

SEQ ID NO: 814894 - protein, 665 aa, Homo sapiens
MQNARLEPAPSSLTESFSFCFSLCCRFLEGSACEPRVSLPGGASVCLFPQASSALPCGQPTPPQPHPCGAVSLSLSSMLPAALPSRPARATSWGTSLASAHPHGSGQSSSLPLPTPRRPLRRWDTRPHLLLPGPSVHPGSSWQPFRASHSAFCESVITGPLRRQGGPAHIRRTEHSMSSVSMSSVCPRLPAVENTSSSPESVKSSVVLFGFYGLHLILNIDPFTMPSTWEHLAGRGAGTHTPTGTPTSTHACAYTHFGLTPCFQWPGEVHTGSRIPARLVDSPVSTGHEEPTPVLPITFLSLRTVDHALVSEALPSAPAHCKANILSFPGAPGLASEKGSTSFFVVVFFFFLRRESRSIVQTGVHGMISAHYNLHLLGSSDSPASASQIAVITGVHHHARLMFVFLVETGFHRVGQAGLKLLTSGDPPASASQSAEITGVSYRTPPRLALSSPKTPCLSWSFEGSRRHHPCILSRALQGMWNSLSLLLEPSFFPCVGFEENLRSPNLWPPPPPRRHALEQSSPSSHLVQKQSRGTIGLELLGPRAPRKPGDDVGQLYSLLGFGELGGPLKHPQFLLLFMNLRQGSPIEAKGTGTERTGPKGWGCLYLWKPGNCSSQPTKVDHTPPFRSSSVSPRGRETTSAETLRPRQVKRKWLWVFKVGEREPL

SEQ ID NO: 814895 - protein, 120 aa, Homo sapiens
FKYDHKNFMFELNHLIITQYIGTSGTNIYFVNIYVLLTSPHQPPPPPPASASPSAVPNGPQSPKQQKEPLSHRFNEFMTSKPKIHCFRSLKRGVSSAPESCLSGVLWLHVWFCITNFVCE

SEQ ID NO: 814896 - protein, 625 aa, Homo sapiens
RPRLLLPRAILLWSGGEEEPPRRPRARSCEPEEAARTPGFPPSRGSRGAKGSPGRGTREPRPPRGAPLRVPCTMSWGTELWDQFDNLEKHTQWGIDILEKYIKFVKERTEIELSYAKQLRNLSKKYQPKKNSKEEEEYKYTSCKAFISNLNEMNDYAGQHEVISENMASQIIVDLARYVQELKQERKSNFHDGRKAQQHIETCWKQLESSKRRFERDCKEADRAQQYFEKMDADINVTKADVEKARQQAQIRHQMAEDSKADYSSILQKFNHEQHEYYHTHIPNIFQKIQEMEERRIVRMGESMKTYAEVDRQVIPIIGKCLDGIVKAAESIDQKNDSQLVIEAYKSGFEPPGDIEFEDYTQPMKRTVSDNSLSNSRGEGKPDLKFGGKSKGKLWPFIKKNKLGATPEDFSNLPPEQRRKKLQQKVDELNKEIQKEMDQRDAITKMKDVYLKNPQMGDPASLDHKLAEVSQNIEKLRVETQKFEAWLAEVEGRLPARNEQARRQSGLYDSQNPPTVNNCAQDRESPDGSYTEEQSQESEMKVLATDFDDEFDDEEPLPAIGTCKALYTFEGQNEGTISVVEGETLYVIEEDKGDGWTRIRRNEDEEGYVPTSYVEVCLDKNAKDS

SEQ ID NO: 814897 - protein, 533 aa, Homo sapiens; identical to SEQ ID NO: 814883

SEQ ID NO: 814898 - protein, 431 aa, Homo sapiens
MAEDSKADYSSILQKFNHEQHEYYHTHIPNIFQKIQEMEERRIVRMGESMKTYAEVDRQVIPIIGKCLDGIVKAAESIDQKNDSQLVIEAYKSGFEPPGDIEFEDYTQPMKRTVSDNSLSNSRGEGKPDLKFGGKSKGKLWPFIKKNKLCPFNIPPSASPSPSCLCLTLCCSQRPPVSQAAKGTPLPPLQRVHDLQTQNPLLQEPKAWVGATPEDFSNLPPEQRRKKLQQKVDELNKEIQKEMDQRDAITKMKDVYLKNPQMGDPASLDHKLAEVSQNIEKLRVETQKFEAWLAEVEGRLPARNEQARRQSGLYDSQNPPTVNNCAQDRESPDGSYTEEQSQESEMKVLATDFDDEFDDEEPLPAIGTCKALYTFEGQNEGTISVVEGETLYVIEEDKGDGWTRIRRNEDEEGYVPTSYVEVCLDKNAKDS

SEQ ID NO: 814899 - protein, 309 aa, Homo sapiens
MLIFVLCLLVSDFYSVTAPSLTCSLCLCPFNIPPSASPSPSCLCLTLCCSQRPPVSQAAKGTPLPPLQRVHDLQTQNPLLQEPKAWVGATPEDFSNLPPEQRRKKLQQKVDELNKEIQKEMDQRDAITKMKDVYLKNPQMGDPASLDHKLAEVSQNIEKLRVETQKFEAWLAEVEGRLPARNEQARRQSGLYDSQNPPTVNNCAQDRESPDGSYTEEQSQESEMKVLATDFDDEFDDEEPLPAIGTCKALYTFEGQNEGTISVVEGETLYVIEEDKGDGWTRIRRNEDEEGYVPTSYVEVCLDKNAKDS

SEQ ID NO: 814900 - protein, 441 aa, Homo sapiens
KSAVSLTLLSSLSETPCMSPYGWTPQQLLGHCVVMVPILKSIFEGQVQYTCAYTHTHTHTHTHTHTHTRGSESGRLCAPGILERRPAHTLAGLCTSFTKAYKSGFEPPGDIEFEDYTQPMKRTVSDNSLSNSRGEGKPDLKFGGKSKGKLWPFIKKNKLCPFNIPPSASPSPSCLCLTLCCSQRPPVSQAAKGTPLPPLQRVHDLQTQNPLLQEPKAWVGATPEDFSNLPPEQRRKKLQQKVDELNKEIQKEMDQRDAITKMKDVYLKNPQMGDPASLDHKLAEVSQNIEKLRVETQKFEAWLAEVEGRLPARNEQARRQSGLYDSQNPPTVNNCAQDRESPDGSYTEEQSQESEMKVLATDFDDEFDDEEPLPAIGTCKALYTFEGQNEGTISVVEGETLYVIEEDKGDGWTRIRRNEDEEGYVPTSYVEVCLDKNAKDS

SEQ ID NO: 814901 - protein, 685 aa, Homo sapiens; identical to SEQ ID NO: 814882

SEQ ID NO: 814902 - protein, 689 aa, Homo sapiens; identical to SEQ ID NO: 814886

SEQ ID NO: 814903 - protein, 661 aa, Homo sapiens
RPRLLLPRAILLWSGGEEEPPRRPRARSCEPEEAARTPGFPPSRGSRGAKGSPGRGTREPRPPRGAPLRVPCTMSWGTELWDQFDNLEKHTQWGIDILEKYIKFVKERTEIELSYAKQLRNLSKKYQPKKNSKEEEEYKYTSCKAFISNLNEMNDYAGQHEVISENMASQIIVDLARYVQELKQERKSNFHDGRKAQQHIETCWKQLESSKRRFERDCKEADRAQQYFEKMDADINVTKADVEKARQQAQIRHQMAEDSKADYSSILQKFNHEQHEYYHTHIPNIFQKIQEMEERRIVRMGESMKTYAEVDRQVIPIIGKCLDGIVKAAESIDQKNDSQLVIEAYKSGFEPPGDIEFEDYTQPMKRTVSDNSLSNSRGEGKPDLKFGGKSKGKLWPFIKKNKSPKQQKEPLSHRFNEFMTSKPKIHCFRSLKRGLGATPEDFSNLPPEQRRKKLQQKVDELNKEIQKEMDQRDAITKMKDVYLKNPQMGDPASLDHKLAEVSQNIEKLRVETQKFEAWLAEVEGRLPARNEQARRQSGLYDSQNPPTVNNCAQDRESPDGSYTEEQSQESEMKVLATDFDDEFDDEEPLPAIGTCKALYTFEGQNEGTISVVEGETLYVIEEDKGDGWTRIRRNEDEEGYVPTSYVEVCLDKNAKGAKTYI

SEQ ID NO: 814904 - protein, 502 aa, Homo sapiens
RPRLLLPRAILLWSGGEEEPPRRPRARSCEPEEAARTPGFPPSRGSRGAKGSPGRGTREPRPPRGAPLRVPCTMSWGTELWDQFDNLEKHTQWGIDILEKYIKFVKERTEIELSYAKQLRNLSKKYQPKKNSKEEEEYKYTSCKAFISNLNEMNDYAGQHEVISENMASQIIVDLARYVQELKQERKSNFHDGRKAQQHIETCWKQLESSKRRFERDCKEADRAQQYFEKMDADINVTKADVEKARQQAQIRHQMAEDSKADYSSILQKFNHEQHEYYHTHIPNIFQKIQEMEERRIVRMGESMKTYAEVDRQVIPIIGKCLDGIVKAAESIDQKNDSQLVIEAYKSGFEPPGDIEFEDYTQPMKRTVSDNSLSNSRGEGKPDLKFGGKSKGKLWPFIKKNKLCPFNIPPSASPSPSCLCLTLCCSQRPPVSQAAKGTPLPPLQRVHDLQTQNPLLQEPKAWVGATPEDFSNLPPEQRRKKLQQKVDELNKEIQKEMDQRSE

SEQ ID NO: 814905 - protein, 482 aa, Homo sapiens
RPRLLLPRAILLWSGGEEEPPRRPRARSCEPEEAARTPGFPPSRGSRGAKGSPGRGTREPRPPRGAPLRVPCTMSWGTELWDQFDNLEKHTQWGIDILEKYIKFVKERTEIELSYAKQLRNLSKKYQPKKNSKEEEEYKYTSCKAFISNLNEMNDYAGQHEVISENMASQIIVDLARYVQELKQERKSNFHDGRKAQQHIETCWKQLESSKRRFERDCKEADRAQQYFEKMDADINVTKADVEKARQQAQIRHQMAEDSKADYSSILQKFNHEQHEYYHTHIPNIFQKIQEMEERRIVRMGESMKTYAEVDRQVIPIIGKCLDGIVKAAESIDQKNDSQLVIEAYKSGFEPPGDIEFEDYTQPMKRTVSDNSLSNSRGEGKPDLKFGGKSKGKLWPFIKKNKTQSFCFHKELMKRTIGKPTYAFEARDYVVSSPVMARSYSHGTATNPIHSTKTGDPEALVMLPHYEMKFLIERTGHQEKKK

SEQ ID NO: 814906 - protein, 123 aa, Homo sapiens
PGHFCAEGDGFEAVGEGSVHLRRSEWGEFCVDFIFDDTCFIAKATVCFLPAFAKNLTYPDIAFSGQNEGTISVVEGETLYVIEEDKGDGWTRIRRNEDEEGYVPTSYVEVCLDKNAKGAKTYI

SEQ ID NO: 814907 - protein, 628 aa, Homo sapiens
SGLCVRVCVQRRWRRGQVGARSCCFWFSCGRRRCPAALGCRTDKAWATAPQKPTQLDAGAGRRVGDRVSEGAARAGGRAPEGERGGGGGSAAGRAGRGMSMPDAMPLPGVGEELKQAKEIEDAEKYSFMATVTKAPKKQIQFADDMQEFTKFPTKTGRRSLSRSISQSSTDSYSSAASYTDSSDDEVSPREKQQTNSKGSSNFCVKNIKQAEFGRREIEIAEQDMSALISLRKRAQGEKPLAGAKIVGCTHITAQTAVLIETLCALGAQCRWSACNIYSTQNEVAAALAEAGVAVFAWKGESEDDFWWCIDRCVNMDGWQANMILDDGGDLTHWVYKKYPNVFKKIRGIVEESVTGVHRLYQLSKAGKLCVPAMNVNDSVTKQKFDNLYCCRESILDGLKRTTDVMFGGKQVVVCGYGEVGKGCCAALKALGAIVYITEIDPICALQACMDGFRVVKLNEVIRQVDVVITCTGNKNVVTREHLDRMKNSCIVCNMGHSNTEIDVTSLRTPELTWERVRSQVDHVIWPDGKRVVLLAEGRLLNLSCSTVPTFVLSITATTQALALIELYNAPEGRYKQDVYLLPKKMDEYVASLHLPSFDAHLTELTDDQAKYLGLNKNGPFKPNYYRY

SEQ ID NO: 814908 - protein, 628 aa, Homo sapiens; identical to SEQ ID NO: 814907

SEQ ID NO: 814909 - protein, 628 aa, Homo sapiens; identical to SEQ ID NO: 814907

SEQ ID NO: 814910 - protein, 628 aa, Homo sapiens; identical to SEQ ID NO: 814907

SEQ ID NO: 814911 - protein, 628 aa, Homo sapiens; identical to SEQ ID NO: 814907

SEQ ID NO: 814912 - protein, 628 aa, Homo sapiens; identical to SEQ ID NO: 814907

SEQ ID NO: 814913 - protein, 483 aa, Homo sapiens
MQEFTKFPTKTGRRSLSRSISQSSTDSYSSAASYTDSSDDEVSPREKQQTNSKGSSNFCVKNIKQAEFGRREIEIAEQDMSALISLRKRAQGEKPLAGAKIVGCTHITAQTAVLIETLCALGAQCRWSACNIYSTQNEVAAALAEAGVAVFAWKGESEDDFWWCIDRCVNMDGWQANMILDDGGDLTHWVYKKYPNVFKKIRGIVEESVTGVHRLYQLSKAGKLCVPAMNVNDSVTKQKFDNLYCCRESILDGLKRTTDVMFGGKQVVVCGYGEVGKGCCAALKALGAIVYITEIDPICALQACMDGFRVVKLNEVIRQVDVVITCTGNKNVVTREHLDRMKNSCIVCNMGHSNTEIDVTSLRTPELTWERVRSQVDHVIWPDGKRVVLLAEGRLLNLSCSTVPTFVLSITATTQALALIELYNAPEGRYKQDVYLLPKKMDEYVASLHLPSFDAHLTELTDDQAKYLGLNKNGPFKPNYYRY

SEQ ID NO: 814914 - protein, 483 aa, Homo sapiens; identical to SEQ ID NO: 814913

SEQ ID NO: 814915 - protein, 567 aa, Homo sapiens
KRALRACLRTAEVAARAGRSSELLLLVLLWPPSLSGCLGLPNRQGVGHSTSEADAARRRGRQEGGRSRVGGRRAGRRQIQFADDMQEFTKFPTKTGRRSLSRSISQSSTDSYSSAASYTDSSDDEVSPREKQQTNSKGSSNFCVKNIKQAEFGRREIEIAEQDMSALISLRKRAQGEKPLAGAKIVGCTHITAQTAVLIETLCALGAQCRWSACNIYSTQNEVAAALAEAGVAVFAWKGESEDDFWWCIDRCVNMDGWQANMILDDGGDLTHWVYKKYPNVFKKIRGIVEESVTGVHRLYQLSKAGKLCVPAMNVNDSVTKQKFDNLYCCRESILDGLKRTTDVMFGGKQVVVCGYGEVGKGCCAALKALGAIVYITEIDPICALQACMDGFRVVKLNEVIRQVDVVITCTGNKNVVTREHLDRMKNSCIVCNMGHSNTEIDVTSLRTPELTWERVRSQVDHVIWPDGKRVVLLAEGRLLNLSCSTVPTFVLSITATTQALALIELYNAPEGRYKQDVYLLPKKMDEYVASLHLPSFDAHLTELTDDQAKYLGLNKNGPFKPNYYRY

SEQ ID NO: 814916 - protein, 545 aa, Homo sapiens
SGLCVRVCVQRRWRRGQVGARSCCFWFSCGRRRCPAALGCRTDKAWATAPQKPTQQIQFADDMQEFTKFPTKTGRRSLSRSISQSSTDSYSSAASYTDSSDDEVSPREKQQTNSKGSSNFCVKNIKQAEFGRREIEIAEQDMSALISLRKRAQGEKPLAGAKIVGCTHITAQTAVLIETLCALGAQCRWSACNIYSTQNEVAAALAEAGVAVFAWKGESEDDFWWCIDRCVNMDGWQANMILDDGGDLTHWVYKKYPNVFKKIRGIVEESVTGVHRLYQLSKAGKLCVPAMNVNDSVTKQKFDNLYCCRESILDGLKRTTDVMFGGKQVVVCGYGEVGKGCCAALKALGAIVYITEIDPICALQACMDGFRVVKLNEVIRQVDVVITCTGNKNVVTREHLDRMKNSCIVCNMGHSNTEIDVTSLRTPELTWERVRSQVDHVIWPDGKRVVLLAEGRLLNLSCSTVPTFVLSITATTQALALIELYNAPEGRYKQDVYLLPKKMDEYVASLHLPSFDAHLTELTDDQAKYLGLNKNGPFKPNYYRY

SEQ ID NO: 814917 - protein, 603 aa, Homo sapiens
SGLCVRVCVQRRWRRGQVGARSCCFWFSCGRRRCPAALGCRTDKAWATAPQKPTQLDAGAGRRVGDRVSEGAARAGGRAPEGERGGGGGSAAGRAGRGMSMPDAMPLPGVGEELKQAKEIEDAEKYSFMATVTKAPKKQIQFADDMQEFTKFPTKTGRRSLSRSISQSSTDSYSSAASYTDSSDDEVSPREKQQTNSKGSSNFCVKNIKQAEFGRREIEIAEQDMSALISLRKRAQGEKPLAGAKIVGCTHITAQTAVLIETLCALGAQCRWSACNIYSTQNEVAAALAEAGVAVFAWKGESEDDFWWCIDRCVNMDGWQANMILDDGGDLTHWVYKKYPNVFKKIRGIVEESVTGVHRLYQLSKAGKLCVPAMNVNDSVTKQKFDNLYCCRESILDGLKRTTDVMFGGKQVVVCGYGEVGKGCCAALKALGAIVYITEIDPICALQACMDGFRVVKLNEVIRQVDVVITCTGNKNVVTREHLDRMKNSCIVCNMGHSNTEIDVTSLRTPELTWERVRSQVDHVIWPDGKRVVLLAEGRLLNLSCSTVPTFVLSITATTQALALIELYNAPEGRYKQDVYLLPKKMDTNGPYYQGPVHLNHTL

SEQ ID NO: 814918 - protein, 605 aa, Homo sapiens
SGLCVRVCVQRRWRRGQVGARSCCFWFSCGRRRCPAALGCRTDKAWATAPQKPTQLDAGAGRRVGDRVSEGAARAGGRAPEGERGGGGGSAAGRAGRGMSMPDAMPLPGVGEELKQAKEIEDAEKYSFMATVTKAPKKQIQFADDMQEFTKFPTKTGRRSLSRSISQSSTDSYSSAASYTDSSDDEVSPREKQQTNSKGSSNFCVKNIKQAEFGRREIEIAEQDMSALISLRKRAQGEKPLAGAKIVGCTHITAQTAVLIETLCALGAQCRWSACNIYSTQNEVAAALAEAGVAVFAWKGESEDDFWWCIDRCVNMDGWQANMILDDGGDLTHWVYKKYPNVFKKIRGIVEESVTGVHRLYQLSKAGKLCVPAMNVNDSVTKQKFDNLYCCRESILDGLKRTTDVMFGGKQVVVCGYGEVGKGCCAALKALGAIVYITEIDPICALQACMDGFRVVKLNEVIRQVDVVITCTGNKNVVTREHLDRMKNSCIVCNMGHSNTEIDVTSLRTPELTWERVRSQVDHVIWPDGKRVVLLAEALALIELYNAPEGRYKQDVYLLPKKMDEYVASLHLPSFDAHLTELTDDQAKYLGLNKNGPFKPNYYRY

SEQ ID NO: 814919 - protein, 550 aa, Homo sapiens
MVDVLTRIPAAMWFGYRMLMTRAQVNESVVHDSQKVTSVQWSIAHLKVARSNAKSRFADNIAGEFHRRFSLPKYVVAHVLLDHRSISQSSYLTATSSAASYTDSSDDEVSPREKQQTNSKGSSNFCVKNIKQAEFGRREIEIAEQDMSALISLRKRAQGEKPLAGAKIVGCTHITAQTAVLIETLCALGAQCRWSACNIYSTQNEVAAALAEAGVAVFAWKGESEDDFWWCIDRCVNMDGWQANMILDDGGDLTHWVYKKYPNVFKKIRGIVEESVTGVHRLYQLSKAGKLCVPAMNVNDSVTKQKFDNLYCCRESILDGLKRTTDVMFGGKQVVVCGYGEVGKGCCAALKALGAIVYITEIDPICALQACMDGFRVVKLNEVIRQVDVVITCTGNKNVVTREHLDRMKNSCIVCNMGHSNTEIDVTSLRTPELTWERVRSQVDHVIWPDGKRVVLLAEGRLLNLSCSTVPTFVLSITATTQALALIELYNAPEGRYKQDVYLLPKKMDEYVASLHLPSFDAHLTELTDDQAKYLGLNKNGPFKPNYYRY

SEQ ID NO: 814920 - protein, 470 aa, Homo sapiens
MARFSDDPLSDMPTGVTSASYTDSSDDEVSPREKQQTNSKGSSNFCVKNIKQAEFGRREIEIAEQDMSALISLRKRAQGEKPLAGAKIVGCTHITAQTAVLIETLCALGAQCRWSACNIYSTQNEVAAALAEAGVAVFAWKGESEDDFWWCIDRCVNMDGWQANMILDDGGDLTHWVYKKYPNVFKKIRGIVEESVTGVHRLYQLSKAGKLCVPAMNVNDSVTKQKFDNLYCCRESILDGLKRTTDVMFGGKQVVVCGYGEVGKGCCAALKALGAIVYITEIDPICALQACMDGFRVVKLNEVIRQVDVVITCTGNKNVVTREHLDRMKNSCIVCNMGHSNTEIDVTSLRTPELTWERVRSQVDHVIWPDGKRVVLLAEGRLLNLSCSTVPTFVLSITATTQALALIELYNAPEGRYKQDVYLLPKKMDEYVASLHLPSFDAHLTELTDDQAKYLGLNKNGPFKPNYYRY

SEQ ID NO: 814921 - protein, 480 aa, Homo sapiens
SGLCVRVCVQRRWRRGQVGARSCCFWFSCGRRRCPAALGCRTDKAWATAPQKPTQLDAGAGRRVGDRVSEGAARAGGRAPEGERGGGGGSAAGRAGRGMSMPDAMPLPGVGEELKQAKEIEDAEKYSFMATVTKAPKKQIQFADDMQEFTKFPTKTGRRSLSRSISQSSTDSYSSAASYTDSSDDEVSPREKQQTNSKGSSNFCVKNIKQAEFGRREIEIAEQDMSALISLRKRAQGEKPLAGAKIVGCTHITAQTAVLIETLCALGAQCRWSACNIYSTQNEVAAALAEAGVAVFAWKGESEDDFWWCIDRCVNMDGWQANMILDDGGDLTHWVYKKYPNVFKKIRGIVEESVTGVHRLYQLSKAGKLCVPAMNVNDSVTKQKFDNLYCCRESILDGLKRTTDVMFGGKQVVVCGYGEVGKGCCAALKALGAIVYITEIDPICALQACMDGFRVVKLNEVIRQVDVVITCTGFGTDRTL

SEQ ID NO: 814922 - protein, 79 aa, Homo sapiens
MPLESETELIPGLSLTFPGSSTQFELLHSSHLCSVHHSHNTGMWQNACLHCTAICGTGRRSVPVRVYCTMFSSSYSFLM

SEQ ID NO: 814923 - protein, 152 aa, Homo sapiens
NSSAKTAEEVIYYMVVTLRPQINTEIDVTSLRTPELTWERVRSQVDHVIWPDGKRVVLLAEGRLLNLSCSTVPTFVLSITATTQALALIELYNAPEGRYKQDVYLLPKKMDEYVASLHLPSFDAHLTELTDDQAKYLGLNKNGPFKPNYYRY

SEQ ID NO: 814924 - protein, 628 aa, Homo sapiens; identical to SEQ ID NO: 814907

SEQ ID NO: 814925 - protein, 330 aa, Homo sapiens
SGLCVRVCVQRRWRRGQVGARSCCFWFSCGRRRCPAALGCRTDKAWATAPQKPTQLDAGAGRRVGDRVSEGAARAGGRAPEGERGGGGGSAAGRAGRGMSMPDAMPLPGVGEELKQAKEIEDAEKYSFMATVTKAPKKQIQFADDMQEFTKFPTKTGRRSLSRSISQSSTDSYSSAASYTDSSDDEVSPREKQQTNSKGSSNFCVKNIKQAEFGRREIEIAEQDMSALISLRKRAQGEKPLAGAKIVGCTHITAQTAVLIETLCALGAQCRWSACNIYSTQNEVAAALAEAGVAVFAWKGESEDDFWWCIDHVYNEHGLLRSGGPLGFIV

SEQ ID NO: 814926 - protein, 588 aa, Homo sapiens
SGLCVRVCVQRRWRRGQVGARSCCFWFSCGRRRCPAALGCRTDKAWATAPQKPTQLDAGAGRRVGDRVSEGAARAGGRAPEGERGGGGGSAAGRAGRGMSMPDAMPLPGVGEELKQAKEIEDAEKYSFMATVTKAPKKQIQFADDMQEFTKFPTKTGRRSLSRSISQSSTDSYSSAASYTDSSDDEVSPREKQQTNSKGSSNFCVKNIKQAEFGRREIEIAEQDMSALISLRKRAQGEKPLAGAKIVGCTHITAQTAVLIETLCALGAQCRWSACNIYSTQNEVAAALAEAGVAVFAWKGESEDDFWWCIDRCVNMDGWQANMILDDGGDLTHWVYKKYPNVFKKIRGIVEESVTGVHRLYQLSKAGKLCVPAMNVNDSVTKQKFDNLYCCRESILDGLKRTTDVMFGGKQVVVCGYGEVGKGCCAALKALGAIVYITEIDPICALQACMDGFRVVKLNEVIRQVDVVITCTGNKNVVTREHLDRMKNSCIVCNMGHSNTEIDVTSLRTPELTWERVRSQVDHVIWPDGKRVVLLAEGRLLNLSCSTVPTFVLSITATTQALALIELYNAPEGRYKQDVYLLPKKMGE

SEQ ID NO: 814927 - protein, 513 aa, Homo sapiens
SGLCVRVCVQRRWRRGQVGARSCCFWFSCGRRRCPAALGCRTDKAWATAPQKPTQLDAGAGRRVGDRVSEGAARAGGRAPEGERGGGGGSAAGRAGRGMSMPDAMPLPGVGEELKQAKEIEDAEKYSFMATVTKAPKKQIQFADDMQEFTKFPTKTGRRSLSRSISQSSTDSYSSAASYTDSSDDEVSPREKQQTNSKGSSNFCVKNIKQAEFGRREIEIAEQDMSALISLRKRAQGEKPLAGAKIVGCTHITAQTAVLIETLCALGAQCRWSACNIYSTQNEVAAALAEAGVAVFAWKGESEDDFWWCIDRCVNMDGWQANMILDDGGDLTHWVYKKYPNVFKKIRGIVEESVTGVHRLYQLSKAGKLCVPAMNVNDSVTKQKFDNLYCCRESILDGLKRTTDVMFGGKQVVVCGYGEVGKGCCAALKALGAIVYITEIDPICALQACMDGFRVVKLNEVIRQVDVVITCTGNKNVVTREHLDRMKNSCIVCNMGHSNTEIDVVRLLSFVAR

SEQ ID NO: 814928 - protein, 438 aa, Homo sapiens
SGLCVRVCVQRRWRRGQVGARSCCFWFSCGRRRCPAALGCRTDKAWATAPQKPTQLDAGAGRRVGDRVSEGAARAGGRAPEGERGGGGGSAAGRAGRGMSMPDAMPLPGVGEELKQAKEIEDAEKYSFMATVTKAPKKQIQFADDMQEFTKFPTKTGRRSLSRSISQSSTDSYSSAASYTDSSDDEVSPREKQQTNSKGSSNFCVKNIKQAEFGRREIEIAEQDMSALISLRKRAQGEKPLAGAKIVGCTHITAQTAVLIETLCALGAQCRWSACNIYSTQNEVAAALAEAGVAVFAWKGESEDDFWWCIDRCVNMDGWQANMILDDGGDLTHWVYKKYPNVFKKIRGIVEESVTGVHRLYQLSKAGKLCVPAMNVNDSVTKQKFDNLYCCRESILDGLKRTTDVMFGGKQVVVCGYGEVNSWVSVSLSFCVLIRNIG

SEQ ID NO: 814929 - protein, 221 aa, Homo sapiens
MQEFTKFPTKTGRRSLSRSISQSSTDSYSSAASYTDSSDDEVSPREKQQTNSKGSSNFCVKNIKQAEFGRREIEIAEQDMSALISLRKRAQGEKPLAGAKIVGCTHITAQTAVLIETLCALGAQCRWSACNIYSTQNEVAAALAEAGVAVFAWKGESEDDFWWCIDRCVNMDGWQANMILDDGGDLTHWVYKKYPNVFKKIRGIVEVLDLVVTGLYSLFPL

SEQ ID NO: 814930 - protein, 649 aa, Homo sapiens [sequence omitted]

SEQ ID NO: 814931 - protein, 243 aa, Homo sapiens
  misc_feature (202)..(203): Xaa can be any naturally occurring amino acid
  misc_feature (215)..(215): Xaa can be any naturally occurring amino acid
  misc_feature (219)..(219): Xaa can be any naturally occurring amino acid
  misc_feature (227)..(227): Xaa can be any naturally occurring amino acid
  misc_feature (238)..(238): Xaa can be any naturally occurring amino acid
MAGVSFSGHRLELLAAYEEVIREESAADWALYTYEDGSDDLKLAASGEGGLQELSGHFENQKVMYGFCSVKDSQAALPKYVLINWVGEDVPDARKCACASHVAKVAEFFQGVDVIVNASSVEDIDAGAIGQRLSNGLARLSSPVLHRLRLREDENAEPVGTTYQKTDAAVEMKRINREQFWEQAKRREEELPDRKKEPEKRXXELKGSRFRSKEXGLEXRNRQGAKXGSPEAGAYRGXGEATK

SEQ ID NO: 814932 - protein, 82 aa, Homo sapiens
ERRQEEQSIFGDHRDEEEETHMKKSESEVEEAAAIIAQRPDNPREFFKQQERVAIRNQPPRVFLLNGRFWRWPGRSRFPEPL

SEQ ID NO: 814933 - protein, 649 aa, Homo sapiens [sequence omitted]

SEQ ID NO: 814934 - protein, 649 aa, Homo sapiens [sequence omitted]

SEQ ID NO: 814935 - protein, 743 aa, Homo sapiens
PLPRPLARSARDAAEAPRRRRRLPLSLPPPPSARPSARLSVRPGPARSMAGVSFSGHRLELLAAYEEVIREESAADWALYTYEDGSDDLKLAASGEGGLQELSGHFENQKVMYGFCSVKDSQAALPKYVLINWVGEDVPDARKCACASHVAKVAEFFQGVDVIVNASSVEDIDAGAIGQRLSNGLARLSSPVLHRLRLREDENAEPVGTTYQKTDAAVEMKRINREQFWEQAKKEEELRKEEERKKALDERLRFEQERMEQERQEQEERERRYREREQQIEEHRRKQQTLEAEEAKRRLKEQSIFGDHRDEEEETHMKKSESEVEEAAAIIAQRPDNPREFFKQQERVASASAGSCDVPSPFNHRPGRPYCPFIKASDSGPSSSSSSSSSPPRTPFPYITCHRTPNLSSSLPCSHLDSHRRMAPTPIPTRSPSDSSTASTPVAEQIERALDEVTSSQPPPLPPPPPPAQETQEPSPILDSEETRAAAPQAWAGPMEEPPQAQAPPRGPGSPAEDLMFMESAEQAVLAAPVEPATADATEVHDAADTIETDTATADTTVANNVPPAATSLIDLWPGNGEGASTLQGEPRAPTPPSGTEVTLAEVPLLDEVAPEPLLPAGEGCATLLNFDELPEPPATFCDPEEVEGEPLAAPQTPTLPSALEELEQEQEPEPHLLTNGETTQKEGTQASEGYFSQSQEEEFAQSEELCAKAPPPVFYNKPPEIDITCWDADPVPEEEEGFEGGD

SEQ ID NO: 814936 - protein, 854 aa, Homo sapiens
GGRTRPGGAGSRCGARGRVALREPIPHPTPRARGTGVHGAAKGTFATFERARSGRGRGGDRASGASAACPAQPGPATAQRKARAGEERSGLGAGRPAHRGASRSGPPSPRNLGWSEVEGCLLPHGDREVTPLPPRVAEEAGGRCPSGSRPPLPAGRWEQVLLEETEAKRRAGLRDPAWAGLTRTLGGQPGGDSDLGASGGEDEMAGHPWHGTAALASSQAWRDGRERQALVSCRALYTYEDGSDDLKLAASGEGGLQELSGHFENQKVMYGFCSVKDSQAALPKYVLINWVGEDVPDARKCACASHVAKVAEFFQGVDVIVNASSVEDIDAGAIGQRLSNGLARLSSPVLHRLRLREDENAEPVGTTYQKTDAAVEMKRINREQFWEQAKKEEELRKEEERKKALDERLRFEQERMEQERQEQEERERRYREREQQIEEHRRKQQTLEAEEAKRRLKEQSIFGDHRDEEEETHMKKSESEVEEAAAIIAQRPDNPREFFKQQERVASASAGSCDVPSPFNHRPGSHLDSHRRMAPTPIPTRSPSDSSTASTPVAEQIERALDEVTSSQPPPLPPPPPPAQETQEPSPILDSEETRAAAPQAWAGPMEEPPQAQAPPRGPGSPAEDLMFMESAEQAVLAAPVEPATADATEVHDAADTIETDTATADTTVANNVPPAATSLIDLWPGNGEGASTLQGEPRAPTPPSGTEVTLAEVPLLDEVAPEPLLPAGEGCATLLNFDELPEPPATFCDPEEVEGEPLAAPQTPTLPSALEELEQEQEPEPHLLTNGETTQKEGTQASEGYFSQSQEEEFAQSEELCAKAPPPVFYNKPPEIDITCWDADPVPEEEEGFEGGD

SEQ ID NO: 814937 - protein, 722 aa, Homo sapiens
PLPRPLARSARDAAEAPRRRRRLPLSLPPPPSARPSARLSVRPGPARSMAGVSFSGHRLELLAAYEEVIREESAADWALYTYEDGSDDLKLAASGEGGLQELSGHFENQKVMYGFCSVKDSQAALPKYVLINWVGEDVPDARKCACASHVAKVAEFFQGVDVIVNASSVEDIDAGAIGQRLSNGLARLSSPVLHRLRLREDENAEPVGTTYQKTDAAVEMKRINREQFWEQAKKEEELRKEEERKKALDERLRFEQERMEQERQEQEERERRYREREQQIEEHRLSLPARSAPGAPGRTLTGAGCLSSRRKQQTLEAEEAKRRLKEQSIFGDHRDEEEETHMKKSESEVEEAAAIIAQRPDNPREFFKQQERVASASAGSCDVPSPFNHRPGSHLDSHRRMAPTPIPTRSPSDSSTASTPVAEQIERALDEVTSSQPPPLPPPPPPAQETQEPSPILDSEETRAAAPQAWAGPMEEPPQAQAPPRGPGSPAEDLMFMESAEQAVLAAPVEPATADATEVHDAADTIETDTATADTTVANNVPPAATSLIDLWPGNGEGASTLQGEPRAPTPPSGTEVTLAEVPLLDEVAPEPLLPAGEGCATLLNFDELPEPPATFCDPEEVEGEPLAAPQTPTLPSALEELEQEQEPEPHLLTNGETTQKEGTQASEGYFSQSQEEEFAQSEELCAKAPPPVFYNKPPEIDITCWDADPVPEEEEGFEGGD

SEQ ID NO: 814938 - protein, 761 aa, Homo sapiens
GGRTRPGGAGSRCGARGRVALREPIPHPTPRARGTGVHGAAKGTFATFERARSGRGRGGDRASGASAACPAQPGPATAQRKARAGEERSGLGAGRPAHRGASRSGPPSPRNLGWSEVEGCLLPHGDREVTPLPPRVAEEEGALYTYEDGSDDLKLAASGEGGLQELSGHFENQKVMYGFCSVKDSQAALPKYVLINWVGEDVPDARKCACASHVAKVAEFFQGVDVIVNASSVEDIDAGAIGQRLSNGLARLSSPVLHRLRLREDENAEPVGTTYQKTDAAVEMKRINREQFWEQAKKEEELRKEEERKKALDERLRFEQERMEQERQEQEERERRYREREQQIEEHRRKQQTLEAEEAKRRLKEQSIFGDHRDEEEETHMKKSESEVEEAAAIIAQRPDNPREFFKQQERVASASAGSCDVPSPFNHRPGSHLDSHRRMAPTPIPTRSPSDSSTASTPVAEQIERALDEVTSSQPPPLPPPPPPAQETQEPSPILDSEETRAAAPQAWAGPMEEPPQAQAPPRGPGSPAEDLMFMESAEQAVLAAPVEPATADATEVHDAADTIETDTATADTTVANNVPPAATSLIDLWPGNGEGASTLQGEPRAPTPPSGTEVTLAEVPLLDEVAPEPLLPAGEGCATLLNFDELPEPPATFCDPEEVEGEPLAAPQTPTLPSALEELEQEQEPEPHLLTNGETTQKEGTQASEGYFSQSQEEEFAQSEELCAKAPPPVFYNKPPEIDITCWDADPVPEEEEGFEGGD

SEQ ID NO: 814939 - protein, 336 aa, Homo sapiens
MAGVSFSGHRLELLAAYEEVIREESAADWALYTYEDGSDDLKLAASGEGGLQELSGHFENQKVMYGFCSVKDSQAALPKYVLINWVGEDVPDARKCACASHVAKVAEFFQGVDVIVNASSVEDIDAGAIGQRLSNGLARLSSPVLHRLRLREDENAEPVGTTYQKTDAAVEMKRINREQFWEQAKKEEELRKEEERKKALDERLRFEQERMEQERQEQEERERRYREREQQIEEHRRKQQTLEAEEAKRRLKEQSIFGDHRDEEEETHMKKSESEVEEAAAIIAQRPDNPREFFKQQERVASASAGSCDVPSPFNHRPAELQLAPTQGRAAGGKAC

SEQ ID NO: 814940 - protein, 551 aa, Homo sapiens
MAGVSFSGHRLELLAAYEEVIREESAADWALYTYEDGSDDLKLAASGEGGLQELSGHFENQKVMYGFCSVKDSQAALPKYVLINWVGEDVPDARKCACASHVAKVAEFFQGVDVIVNASSVEDIDAGAIGQRLSNGLARLSSPVLHRLRLREDENAEPVGTTYQKTDAAVEMKRINREQFWEQAKKEEELRKEEERKQQERVASASAGSCDVPSPFNHRPGSHLDSHRRMAPTPIPTRSPSDSSTASTPVAEQIERALDEVTSSQPPPLPPPPPPAQETQEPSPILDSEETRAAAPQAWAGPMEEPPQAQAPPRGPGSPAEDLMFMESAEQAVLAAPVEPATADATEVHDAADTIETDTATADTTVANNVPPAATSLIDLWPGNGEGASTLQGEPRAPTPPSGTEVTLAEVPLLDEVAPEPLLPAGEGCATLLNFDELPEPPATFCDPEEVEGEPLAAPQTPTLPSALEELEQEQEPEPHLLTNGETTQKEGTQASEGYFSQSQEEEFAQSEELCAKAPPPVFYNKPPEIDITCWDADPVPEEEEGFEGGD

SEQ ID NO: 814941 - protein, 570 aa, Homo sapiens
MNRTPVKEVLLVGCAHVEDIDAGAIGQRLSNGLARLSSPVLHRLRLREDENAEPVGTTYQKTDAAVEMKRINREQFWEQAKKEEELRKEEERKKALDERLRFEQERMEQERQEQEERERRYREREQQIEEHSVSLPARSAPGAPGRTLTGAGCLSSRRKQQTLEAEEAKRRLKEQSIFGDHRDEEEETHMKKSESEVEEAAAIIAQRPDNPREFFKQQERVASASAGSCDVPSPFNHRPGSHLDSHRRMAPTPIPTRSPSDSSTASTPVAEQIERALDEVTSSQPPPLPPPPPPAQETQEPSPILDSEETRAAAPQAWAGPMEEPPQAQAPPRGPGSPAEDLMFMESAEQAVLAAPVEPATADATEVHDAADTIETDTATADTTVANNVPPAATSLIDLWPGNGEGASTLQGEPRAPTPPSGTEVTLAEVPLLDEVAPEPLLPAGEGCATLLNFDELPEPPATFCDPEEVEGEPLAAPQTPTLPSALEELEQEQEPEPHLLTNGETTQKEGTQASEGYFSQSQEEEFAQSEELCAKAPPPVFYNKPPEIDITCWDADPVPEEEEGFEGGD

SEQ ID NO: 814942 - protein, 251 aa, Homo sapiens
MAGVSFSGHRLELLAAYEEVIREESAADWALYTYEDGSDDLKLAASGEGGLQELSGHFENQKVMYGFCSVKDSQAALPKYVLINWVGEDVPDARKCACASHVAKVAEFFQGVDVIVNASSVEDIDAGAIGQRLSNGLARLSSPVLHRLRLREDENAEPVGTTYQKTDAAVEMKRINREQFWEQAKKEEELRKEEERKKALDERLRFEQERMEQERQEQEERERRYREREQQIEEHRRTPADFRSGRGMRRV

SEQ ID NO: 814943 - protein, 122 aa, Homo sapiens
MARPPRRRGPRPVRGTSVNHRRRSLPNRKSSVPRLRLLCSTTSLQRSTSHAGMQTQFQKRRRASRVVISGGASPRLPLPRPPTCISLWPDGPPCLHSQQLRLAPTPDSGPGWGLGRFPTHRA

SEQ ID NO: 814944 - protein, 241 aa, Homo sapiens
PLPRPLARSARDAAEAPRRRRRLPLSLPPPPSARPSARLSVRPGPARSMAGVSFSGHRLELLAAYEEVIREESAADWALYTYEDGSDDLKLAASGEGGLQELSGHFENQKVMYGFCSVKDSQAALPKYVLINWVGEDVPDARKCACASHVAKVAEFFQGVDVIVNASSVEDIDAGAIGQRLSNGLARLSSPVLHRLRLREDENAEPVGTTYQKTDAAVEMKRINREQFWEQAKRPRSPAPS

SEQ ID NO: 814945 - protein, 604 aa, Homo sapiens
MMKSQGLVSFKDVAVDFTQEEWQQLDPSQRTLYRDVMLENYSHLVSMGYPVSKPDVISKLEQGEEPWIIKGDISNWIYPDEYQADGRQDRKSNLHNSQSCILGTVSFHHKILKGVTRDGSLCSILKVCQGDGQLQRFLENQDKLFRQVTFVNSKTVTEASGHKYNPLGKIFQECIETDISIQRFHKYDAFKKNLKPNIDLPSCYKSNSRKKPDQSFGGGKSSSQSEPNSNLEKIHNGVIPFDDNQCGNVFRNTQSLIQYQNVETKEKSCVCVTCGKAFAKKSQLIVHQRIHTGKKPYDCGACGKAFSEKFHLVVHQRTHTGEKPYDCSECGKAFSQKSSLIIHQRVHTGEKPYECSECGKAFSQKSPLIIHQRIHTGEKPYECRECGKAFSQKSQLIIHHRAHTGEKPYECTECGKAFCEKSHLIIHKRIHTGEKPYKCAQCEEAFSRKTELITHQLVHTGEKPYECTECGKTFSRKSQLIIHQRTHTGEKPYKCSECGKAFCQKSHLIGHQRIHTGEKPYICTECGKAFSQKSHLPGHQRIHTGEKPYICAECGKAFSQKSDLVLHQRIHTGERPYQCAICGKAFIQKSQLTVHQRIHTVVKS

SEQ ID NO: 814946 - protein, 183 aa, Homo sapiens
EFRNRHRPAAMKRLVDIAAISKLEQGEEPWIIKGDISNWIYPDEYQADGRQDRKSNLHNSQSCILGTVSFHHKILKGVTRDGSLCSILKVCQGDGQLQRFLENQDKLFRQVTFVNSKTVTEASGHKYNPLGKIFQECIETDISIQRFHKYDAFKKNLKPNIDLPSCYKSQRESLAMLTRLVLN

SEQ ID NO: 814947 - protein, 604 aa, Homo sapiens; identical to SEQ ID NO: 814945

SEQ ID NO: 814948 - protein, 604 aa, Homo sapiens; identical to SEQ ID NO: 814945

SEQ ID NO: 814949 - protein, 604 aa, Homo sapiens; identical to SEQ ID NO: 814945

SEQ ID NO: 814950 - protein, 974 aa, Homo sapiens
MEERKHETMNPAHVLFDRFVQATTCKGTLKAFQELCDHLELKPKDYRSFYHKLKSKLNYWKAKALWAKLDKRGSHKDYKKGKACTMSHHWGWPLWSPYSHRLILTGGQGGCYEKRDAFSRNNVLHLWPFTIHDLRGLGAKKFYGKFCAGAIDHISIRQLQLILLKVALILGIEIHVNVEFQGLIQPPEDQENERIGWRALVHPKTHPVSEYEFEVIIGGDGRRNTLEGFRRKEFRGKLAIAITANFINRNTTAEAKVEEISGVAFIFNQKFFQELREATAGIDLENIVYYKDDTHYFVMTAKKQSLLDKGVILHDYADTELLLSRENVDQEALLSYAREAADFSTQQQLPSLDFAINHYGQPDVAMFDFTCMYASENAALVREQNGHQLLVALVGDSLLEPFWPMGTGIARGFLAAMDSAWMVRSWSLGTSPLEVLAERESIYRLLPQTTPENVSKNFSQYSIDPVTRYPNINVNFLRPSQVRHLYDTGETKDIHLEMESLVNSRTTPKLTRNESVARSSKLLGWCQRQTDGYAGVNVTDLTMSWKSGLALCAIIHRYRPDLIDFDSLDEQNVEKNNQLAFDIAEKELGISPIMTGKEMASVGEPDKLSMVMYLTQFYEMFKDSLPSSDTLDLNAEEKAVLIASTRSPISFLSKLGQTISRKRSPKDKKEKDLDGAGKRRKTSQSEEEEAPRGHRGERPTLVSTLTDRRMDVAVGNQNKVKYMATQLLAKFEENAPAQSIGIRRQLTQERGASQPSCCLPGQVRPAPTPRWKQGSMKKEFPQNLGGSDTCYFCQKRVYVMERLSAEGKFFHRSCFKCEYCATTLRLSAYAYDIEDGKFYCKPHYCYRLSGYAQRKRPAVAPLSGKEAKGPLQDGATTDANGRANAVASSTERTPGSGVNGLEEPSIAKRLRGTPERIELENYRLSLRQAEALQEVPEETQAEHNLSSVLDTGAEEDVASRSARRAAGRPPATRP

SEQ ID NO: 814951 - protein, 946 aa, Homo sapiens
MEERKHETMNPAHVLFDRFVQATTCKGTLKAFQELCDHLELKPKDYRSFYHKLKSKLNYWKAKALWAKLDKRGSHKDYKKGKACTMSHHWGWPLWSPYSHRLILTGGQGGCYEKRDAFSRNNVLHLWPFTIHDLRGLGAKKFYGKFCAGAIDHISIRQLQLILLKVALILGIEIHVNVEFQGLIQPPEDQENERIGWRALVHPKTHPVSEYEFEVIIGGDGRRNTLEGFRRKEFRGKLAIAITANFINRNTTAEAKVEEISGVAFIFNQKFFQELREATAGIDLENIVYYKDDTHYFVMTAKKQSLLDKGVILHDYADTELLLSRENVDQEALLSYAREAADFSTQQQLPSLDFAINHYGQPDVAMFDFTCMYASENAALVREQNGHQLLVALVGDSLLEPFWPMGTGIARGFLAAMDSAWMVRSWSLGTSPLEVLAERESIYRLLPQTTPENVSKNFSQYSIDPVTRYPNINVNFLRPSQVRHLYDTGETKDIHLEMESLVNSRTTPKLTRNESVARSSKLLGWCQRQTDGYAGVNVTDLTMSWKSGLALCAIIHRYRPDLIDFDSLDEQNVEKNNQLAFDIAEKELGISPIMTGKEMASVGEPDKLSMVMYLTQFYEMFKDSLPSSDTLDLNAEEKAVLIASTRSPISFLSKLGQTISRKRSPKDKKEKDLDGAGKRRKTSQSEEEEAPRGHRGERPTLVSTLTDRRMDVAVGNQNKVKYMATQLLAKFEENAPAQSIGIRRQGSMKKEFPQNLGGSDTCYFCQKRVYVMERLSAEGKFFHRSCFKCEYCATTLRLSAYAYDIEDGKFYCKPHYCYRLSGYAQRKRPAVAPLSGKEAKGPLQDGATTDANGRANAVASSTERTPGSGVNGLEEPSIAKRLRGTPERIELENYRLSLRQAEALQEVPEETQAEHNLSSVLDTGAEEDVASRSARRAAGRPPATRP

SEQ ID NO: 814952 - protein, 573 aa, Homo sapiens
VTTAPGFVNFLNGHQLLVALVGDSLLEPFWPMGTGIARGFLAAMDSAWMVRSWSLGTSPLEVLAERESIYRLLPQTTPENVSKNFSQYSIDPVTRYPNINVNFLRPSQVRHLYDTGETKDIHLEMESLVNSRTTPKLTRNESVARSSKLLGWCQRQTDGYAGVNVTDLTMSWKSGLALCAIIHRYRPDLIDFDSLDEQNVEKNNQLAFDIAEKELGISPIMTGKEMASVGEPDKLSMVMYLTQFYEMFKDSLPSSDTLDLNAEEKAVLIASTRSPISFLSKLGQTISRKRSPKDKKEKDLDGAGKRRKTSQSEEEEAPRGHRGERPTLVSTLTDRRMDVAVGNQNKVKYMATQLLAKFEENAPAQSIGIRRQGSMKKEFPQNLGGSDTCYFCQKRVYVMERLSAEGKFFHRSCFKCEYCATTLRLSAYAYDIEDGKFYCKPHYCYRLSGYAQRKRPAVAPLSGKEAKGPLQDGATTDANGRANAVASSTERTPGSGVNGLEEPSIAKRLRGTPERIELENYRLSLRQAEALQEVPEETQAEHNLSSVLDTGAEEDVASRSARRAAGRPPATRP

SEQ ID NO: 814953 - protein, 524 aa, Homo sapiens
MFMVLVPILSILLCYCRESIYRLLPQTTPENVSKNFSQYSIDPVTRYPNINVNFLRPSQVRHLYDTGETKDIHLEMESLVNSRTTPKLTRNESVARSSKLLGWCQRQTDGYAGVNVTDLTMSWKSGLALCAIIHRYRPDLIDFDSLDEQNVEKNNQLAFDIAEKELGISPIMTGKEMASVGEPDKLSMVMYLTQFYEMFKDSLPSSDTLDLNAEEKAVLIASTRSPISFLSKLGQTISRKRSPKDKKEKDLDGAGKRRKTSQSEEEEAPRGHRGERPTLVSTLTDRRMDVAVGNQNKVKYMATQLLAKFEENAPAQSIGIRRQGSMKKEFPQNLGGSDTCYFCQKRVYVMERLSAEGKFFHRSCFKCEYCATTLRLSAYAYDIEDGKFYCKPHYCYRLSGYAQRKRPAVAPLSGKEAKGPLQDGATTDANGRANAVASSTERTPGSGVNGLEEPSIAKRLRGTPERIELENYRLSLRQAEALQEVPEETQAEHNLSSVLDTGAEEDVASRSARRAAGRPPATRP

SEQ ID NO: 814954 - protein, 947 aa, Homo sapiens
MEERKHETMNPAHVLFDRFVQATTCKGTLKAFQELCDHLELKPKDYRSFYHKLKSKLNYWKAKALWAKLDKRGSHKDYKKGKACTMSHHWGWPLWSPYSHRLILTGGQGGCYEKRDAFSRNNVLHLWPFTIHDLRGLGAKKFYGKFCAGAIDHISIRQLQLILLKVALILGIEIHVNVEFQGLIQPPEDQENERIGWRALVHPKTHPVSEYEFEVIIGGDGRRNTLEGFRRKEFRGKLAIAITANFINRNTTAEAKVEEISGVAFIFNQKFFQELREATAGIDLENIVYYKDDTHYFVMTAKKQSLLDKGVILHDYADTELLLSRENVDQEALLSYAREAADFSTQQQLPSLDFAINHYGQPDVAMFDFTCMYASENAALVREQNGHQLLVALVGDSLLEPFWPMGTGIARGFLAAMDSAWMVRSWSLGTSPLEVLAERESIYRLLPQTTPENVSKNFSQYSIDPVTRYPNINVNFLRPSQVRHLYDTGETKDIHLEMESLVNSRTTPKLTRNESVARSSKLLGWCQRQTDGYAGVNVTDLTMSWKSGLALCAIIHRYRPDLIDFDSLDEQNVEKNNQLAFDIAEKELGISPIMTGKEMASVGEPDKLSMVMYLTQFYEMFKDSLPSSDTLDLNAEEKAVLIASTRSPISFLSKLGQTISRKRSPKDKKEKDLDGAGKRRKTSQSEEEEAPRGHRGERPTLVSTLTDRRMDVAVGNQNKVKYMATQLLAKFEENAPAQSIGIRRQGSMKKEFPQNLGGSDTCYFCQKRVYVMERLSAEGKFFHRSCFKCEYCATTLRLSAYAYDIEDGKFYCKPHYCYRLSGYAQRKRPAVAPLSGKEAKGPLQDGATTDANGRANAVASSTERTPGSLTSLFGWVARHSLGLCDKAKGMSQHLQSNISSFGQQVAQNPLDSFFMCQLLAFGVPFLYGLSEVLVQIRGEFHWQAVAQ

SEQ ID NO: 814955 - protein, 966 aa, Homo sapiens
MEERKHETMNPAHVLFDRFVQATTCKGTLKAFQELCDHLELKPKDYRSFYHKLKSKLNYWKAKALWAKLDKRGSHKDYKKGKACTMSHHWGWPLWSPYSHRLILTGGQGGCYEKRDAFSRNNVLHLWPFTIHDLRGLGAKKFYGKFCAGAIDHISIRQLQLILLKVALILGIEIHVNVEFQGLIQPPEDQENERIGWRALVHPKTHPVSEYEFEVIIGGDGRRNTLEGFRRKEFRGKLAIAITANFINRNTTAEAKVEEISGVAFIFNQKFFQELREATAGIDLENIVYYKDDTHYFVMTAKKQSLLDKGVILHDYADTELLLSRENVDQEALLSYAREAADFSTQQQLPSLDFAINHYGQPDVAMFDFTCMYASENAALVREQNGHQLLVALVGDSLLEPFWPMGTGIARGFLAAMDSAWMVRSWSLGTSPLEVLAERESIYRLLPQTTPENVSKNFSQYSIDPVTRYPNINVNFLRPSQVRHLYDTGETKDIHLEMESLVNSRTTPKLTRNESVARSSKLLGWCQRQTDGYAGVNVTDLTMSWKSGLALCAIIHRYRPDLIDFDSLDEQNVEKNNQLAFDIAEKELGISPIMTGKEMASVGEPDKLSMVMYLTQFYEMFKDSLPSSDTLDLNAEEKAVLIASTRSPISFLSKLGQTISRKRSPKDKKEKDLDGAGKRRKTSQSEEEEAPRGHRGERPTLVSTLTDRRMDVAVGNQNKVKYMATQLLAKFEENAPAQSIGIRRQGSMKKEFPQNLGGSDTCYFCQKRVYVMERLSAEGKFFHRSCFKCEYCATTLRLSAYAYDIEDGKFYCKPHYCYRLSGYAQRKRPAVAPLSGKEAKGPLQDGATTDANGRANAVASSTERTPGSGVNGLEEPSIAKRLRGTPERIELENYRLSLRQAEALQEVPEETQAEHNLSSVLDTGAEEDVASSLLERATDSLRVNLGGVREFTRLSIFQVNIACFPS

SEQ ID NO: 814956 - protein, 515 aa, Homo sapiens
MEERKHETMNPAHVLFDRFVQATTCKGTLKAFQELCDHLELKPKDYRSFYHKLKSKLNYWKAKALWAKLDKRGSHKDYKKGKAALCLIIGAGPCGLRTAIDLSLLGAKVVVIEKRDAFSRNNVLHLWPFTIHDLRGLGAKKFYGKFCAGAIDHISIRQLQLILLKVALILGIEIHVNVEFQGLIQPPEDQENERIGWRALVHPKTHPVSEYEFEVIIGGDGRRNTLEGFRRKEFRGKLAIAITANFINRNTTAEAKVEEISGVAFIFNQKFFQELREATAGIDLENIVYYKDDTHYFVMTAKKQSLLDKGVILHDYADTELLLSRENVDQEALLSYAREAADFSTQQQLPSLDFAINHYGQPDVAMFDFTCMYASENAALVREQNGHQLLVALVGDSLLEPFWPMGTGIARGFLAAMDSAWMVRSWSLGTSPLEVLAERESIYRLLPQTTPENVSKNFSQYSIDPVTRYPNINVNFLRPSQVRPSCQYLHLGPSAVSHHHGIIAFQPGQQSKTSS

SEQ ID NO: 814957 - protein, 161 aa, Homo sapiens
MEERKHETMNPAHVLFDRFVQATTCKGTLKAFQELCDHLELKPKDYRSFYHKLKSKLNYWKAKALWAKLDKRGSHKDYKKGKACTTGIDLENIVYYKDDTHYFVMTAKKQSLLDKGVILHVSHGFPSKLFLIEVVNITKRKNCLMGFSCKGMKMSTECIFW

SEQ ID NO: 814958 - protein, 107 aa, Homo sapiens
SIPTLLFLWRQDYADTELLLSRENVDQEALLSYAREAADFSTQQQLPSLDFAINHYGQPDVAMFDFTCMYASENAALVREQNGHQLLVALVGDSLLEVSAKHGSTLW

SEQ ID NO: 814959 - protein, 135 aa, Homo sapiens [sequence omitted]

SEQ ID NO: 814960 - protein, 367 aa, Homo sapiens
MSSTLAKIAEIEAEMARTQKNKATAHHLGLLKARLAKLRRELITPKGGGGGGPGEGFDVAKTGDARIGFVGFPSVGKSTLLSNLAGVYSEVAAYEFTTLTTVPGVIRYKGAKIQLLDLPGIIEGAKDGKGRGRQVIAVARTCNLILIVLDVLKPLGHKKIIENELEGFGIRLNSKPPNIGFKKKDKGGINLTATCPQSELDAETVKSILAEYKIHNADVTLRSDATADDLIDVVEGNRVYIPCIYVLNKIDQISIEELDIIYKVPHCVPISAHHRWNFDDLLEKIWDYLKLVRIYTKPKGQLPDYTSPVVLPYSRTTVEDFCMKIHKNLIKEFKYALVWGLSVKHNPQKVGKDHTLEDEDVIQIVKK

SEQ ID NO: 814961 - protein, 367 aa, Homo sapiens; identical to SEQ ID NO: 814960

SEQ ID NO: 814962 - protein, 168 aa, Homo sapiens
MSSTLAKIAEIEAEMARTQKNKATAHHLGLLKARLAKLRRELITPKGGGGGGPGEGFDVAKTGDARIGFVGFPSVGKSTLLSNLAGVYSEVAAYEFTTLTTVPGVIRYKGAKIQLLDLPGIIEGAKDGKGRGRQVIAVARTCNLILIVLDVLKPLGHKKIIENEDREA

SEQ ID NO: 814963 - protein, 326 aa, Homo sapiens
MSSTLAKIAEIEAEMARTQKNKATAHHLGLLKARLAKLRRELITPKGGGGGGPGEGFDVAKTGDARIGFVGFPSVGKSTLLSNLAGVYSEVAAYEFTTLTTVPGVIRYKGAKIQLLDLPGIIEGAKDGKGRGRQVIAVARTCNLILIVLDVLKPLGHKKIIENELEGFGIRLNSKPPNIGFKKKDKGGINLTATCPQSELDAETVKSILAEYKIHNADVTLRSDATADDLIDVVEGNRVYIPCIYVLNKIDQISIEELDIIYKVPHCVPISAHHRWNFDDLLEKIWDYLKLVRIYTKPKGQLPDYTSPQTGTSFVLPWCHLVCRTA

SEQ ID NO: 814964 - protein, 343 aa, Homo sapiens
MIGRLAWLLSDKDILLQTCECCEELSSATQEGFDVAKTGDARIGFVGFPSVGKSTLLSNLAGVYSEVAAYEFTTLTTVPGVIRYKGAKIQLLDLPGIIEGAKDGKGRGRQVIAVARTCNLILIVLDVLKPLGHKKIIENELEGFGIRLNSKPPNIGFKKKDKGGINLTATCPQSELDAETVKSILAEYKIHNADVTLRSDATADDLIDVVEGNRVYIPCIYVLNKIDQISIEELDIIYKVPHCVPISAHHRWNFDDLLEKIWDYLKLVRIYTKPKGQLPDYTSPVVLPYSRTTVEDFCMKIHKNLIKEFKYALVWGLSVKHNPQKVGKDHTLEDEDVIQIVKK

SEQ ID NO: 814965 - protein, 397 aa, Homo sapiens
MSSTLAKIAEIEAEMARTQKNKATAHHLGLLKARLAKLRRELITPKGGGGGGPGEGFDVAKTGDARIGFVGFPSVGKSTLLSNLAGVYSEVAAYEFTTLTTVPGVIRYKGAKIQLLDLPGIIEGAKDGKGRGRQVIAVARTCNLILIVLDVLKPLGHKKIIENELEGFGIRLNSKPPNIGFKKKDKGGINLTATKRRFAMLPRLVLNFGLSCLLLRSPKVLGLQCPQSELDAETVKSILAEYKIHNADVTLRSDATADDLIDVVEGNRVYIPCIYVLNKIDQISIEELDIIYKVPHCVPISAHHRWNFDDLLEKIWDYLKLVRIYTKPKGQLPDYTSPVVLPYSRTTVEDFCMKIHKNLIKEFKYALVWGLSVKHNPQKVGKDHTLEDEDVIQIVKK

SEQ ID NO: 814966 - protein, 177 aa, Homo sapiens
MGLQCPQSELDAETVKSILAEYKIHNADVTLRSDATADDLIDVVEGNRVYIPCIYVLNKIDQISIEELDIIYKVPHCVPISAHHRWNFDDLLEKIWDYLKLVRIYTKPKGQLPDYTSPVVLPYSRTTVEDFCMKIHKNLIKEFKYALVWGLSVKHNPQKVGKDHTLEDEDVIQIVKK

SEQ ID NO: 814967 - protein, 164 aa, Homo sapiens
MSSTLAKIAEIEAEMARTQKNKATAHHLGLLKARLAKLRRELITPKGGGGGGPGEGFDVAKTGDARIGFVGFPSVGKSTLLSNLAGVYSEVAAYEFTTLTTVPGVIRYKGAKIQLLDLPGIIEGAKDGKGRGRQVIAVARTCNLILIVLDVLKPLGHKKIIENE

SEQ ID NO: 814968 - protein, 1248 aa, Homo sapiens
MLFRTTFWSLADFPLTPENNSSLKNGNLNVCGNGLVDFFENKLEKVTYNHPFRICKATGKPLINDNQQSSVLICILNAELLGLYKQHEWFLETFKIVSKLVPKWHIIIIHFLFARKSAHRVHSQILNELTLNSFFMLKNNRTNNNTIFGQNPPYLMRTIACAQYLEMHTLHISPHFQLGLPFFARRSYPSLFRLIFYPFLKYKVLRVSEIQDILAQLTQVLYSSLHRPLAAEILFLSSGFTGFSSWVPPKLGETKAFSENLKARLTSDSDSSILHLMYFNSWVLWSVQRPWVRYIHLQYLIGITFLSSLEYSSSHSPNLTTFRFSLPGLPGEVDNLLVVEAPMNVSRDILRGKFLLIDNQDNQVVTQSSLSREHLSFSPLLQLLISGPWNKTIVPKIEHPKSSCLVETADFFDSLAAKPEIDHYGDRMFASIPTKQVKTEVKIILLLNLKSKKNHNVIFFLNPLILYTKLIITEKNDLNKKQLRLKPKTAVTPSPMSVSHHNTVSLTVLEMLNREGIQCFIEAKSQGVSAAEYLFVQIENLRRQRGQGEVFSSSEFRILRQPSYLYLENAFSPDNKTVHIWRHQPLVPNSLSSRCIPLPLYHSISQGNHQHQPAKCLYLKSLPFLKLTFYEALSFLRDLSLVVVVSFTKKNNRCNWSHFAVFKIFFLSAWLERRLEYLVFEYLNYFQLFILILSDEMQVVKNRLYSFLFEFVTSNHCFYSYTTTVLQMAHREAGYYIGKQEFIHWVPELNLENTFGMSFHTFSLKSHPNLWLHIFLSFPPSFTFWKVNSFLNPKCYKSLGEIFPQNLVKKVPHSHLLQVIISCNSFNAMEKLQLLTSQENFSRKIPATFPLSSLSSTIIKTWARSPLTSHSGKAMCCHKKTTSFGVRPEFEFQLNHVGFMVGALSVSISTLVNWGNDTYFKGFLGGLNEVYKFLASGLGLSKYSRNVQFSSSMFLFYSSNGIIETMGQNIFLYSKDCMTEFALEKKNCIKSLIQLYINYITLIQYMVVNSETLPVCLLLSIELVFSFSWLSSCLLILSHMLPSLLVPSSLLYFTRFGTCSPLDFFFNILAFPRCNIFTSLLVKLDISHDLEREEIWNDLISFNYLMLMNACIIVNKGELKILISTFCPQISVSISTRQESAGCMMPFEAASHQTEILITVHEVKQTEFNGNTFCIGPVLKGGKYKFSNKKSLLLLGAVAHTCEYQQFEKLRQVDHLRPGVRDQPGQHSETPSLLKIQEKLAGHGGARL

SEQ ID NO: 814969 - protein, 1251 aa, Homo sapiens
MLFRTTFWSLADFPLTPENNSSLKNGNLNVCGNGLVDFFENKLEKVTYNHPFRICKATGKPLINDNQQSSVLICILNAELLGLYKQHEWFLETFKIVSKLVPKWHIIIIHFLFARKSAHRVHSQILNELTLNSFFMLKNNRTNNNTIFGQNPPYLMRTIACAQYLEMHTLHISPHFQLGLPFFARRSYPSLFRLIFYPFLKYKVLRVSEIQDILAQLTQVLYSSLHRPLAAEILFLSSGFTGFSSWVPPKLGETKAFSENLKARLTSDSDSSILHLMYFNSWVLWSVQRPWVRYIHLQYLIGITFLSSLEYSSSHSPNLTTFRFSLPGLPGEVDNLLVVEAPMNVSRDILRGKFLLIDNQDNQVVTQSSLSREHLSFSPLLQLLISGPWNKTIVPKIEHPKSSCLVETADFFDSLAAKPEIDHYGDRMFASIPTKQVKTEVKIILLLNLKSKKNHNVIFFLNPLILYTKLIITEKNDLNKKQLRLVSLTVLEMLNREGIQCFIEAKSQGVSAAEYLFVQIENLRRQRGQGEVFSSSEFRILRQPSYLYLENAFSPDNKTVHIWRHQPLVPNSLSSRCIPLPLYHSISQGNHQHQPAKCLYLKSLPFLKLTFYEALSFLRDLSLVVVVSFTKKNNRCNWSHFAVFKIFFLSAWLERRLEYLVFEYLNYFQLFILILSDEMQVVKNRLYSFLFEFVTSNHCFYSYTTTVLQMAHREAGYYIGKQEFIHWVPELNLENTFGMSFHTFSLKSHPNLWLHIFLSFPPSFTFWKVNSFLNPKCYKSLGEIFPQNLVKKVPHSHLLQVIISCNSFNGMEKLQLLTSQENFSRKIPATFPLSSLSSTIIKTWARSPLTSHSGKAMCCHKKTTSFGVRPEFEFQLNHVGFMVGALSVSISTLVNWGNDTYFKGFLGGLNEVYKFLASGLGLSKYSRNVQFSSSMFLFYSSNGIIETMGQNIFLYSKDCMTEFALEKKNCIKSLIQLYINYITLIQYMVVNSETLPVCLLLSIELVFSFSWLSSCLLILSHMLPSLLVPSSLLYFTRFGTCSPLDFFFNILAFPRCNIFTSLLVKLDISHDLEREEIWNDLISFNYLMLMNACIIVNKGELKILISTFCPQISVSISTRQESAGCMMPFEAASHQTEILITVHKMKQTEFNGNTFCIGPVLKGGKYKFSNKKSLLLLGAVAHTCEYQQFEKLRQVDHLRPGVRDQPGQHSETPSLLKIKKISWAWWCTPIVPATQEAEAGESLEPGKQSLQ

SEQ ID NO: 814970 - protein, 1303 aa, Homo sapiens
MSESAEDAVYPISLLYHLNDILKVRGKGKCRHNKHCYFSLCLGKEAESYILSMLFRTTFWSLADFPLTPENNSSLKNGNLNVCGNGLVDFFENKLEKVTYNHPFRICKATGKPLINDNQQSSVLICILNAELLGLYKQHEWFLETFKIVSKLVPKWHIIIIHFLFARKSAHRVHSQILNELTLNSFFMLKNNRTNNNTIFGQNPPYLMRTFACAQYLEMHTLHISPHFQLGLPFFARRSYPSLFRLIFYPFLKYKVLRVSEIQDILAQLTQVLYSSLHRPLAAEILFLSSGFTGFSSWVPPYLGETKAFSENLKARLTSDSDSSILHLMYFNSWVLWSVQRPWVRYIHLQYLIGITFLSSLEYSSSHSPNLTTFRFSLPGLPGEVDNLLVVEAPMNVSRDILRGKFLLIDNQDNQVVTQSSLSREHLSFSPLLQLLISGPWNKTIVPKIEHPKSSCLVETADFFDSLAAKPEIDHQVTECLPVSPQNKLKLEVKIILLLNLKSKKNHNVIFFLNPLILYTKLIITEKNDLNKKQLRLVSLTVLEMLNREGIQCFIEAKSQGVSAAEYLFVQIENLRRQRGQGEVFSSSEFRILRQPSYLYLENAFSPDNKTVHIWRHQPLVPNSLSSRCIPLPLYHSISQGNHQHQPAKCLYLKSLPFLKLTFYEALSFLRDLSLVVVVSFTKKNNRCNWSHFAVFKIFFLSAWLERRLEYLVFEYLNYFQLFILILSDEMQVVKNRLYSFLFEFVTSNHCFYSYTTTVLQMAHREAGYYIGKQEFIHWVPELNLENTFGMSFHTFSLKSHPNLWLHIFLSFPPSFTFWKVNSFLNPKCYKSLGEIFPQNLVKKVPHSHLLQVIISCNSFNAMEKLQLLTSQENFSRKIPATFPLSSLSSTIIKTWARSPLTSHSGKAMCCHKKTTSFSVRPEFEFQLNHVGFMVGALSVSISTLVNWGNDTYFKGFLGGLNEVYKFLASGLGLSKYSRNVQFSSSMFLFYSSNGIIETMGQNIFLYSKDCMTEFALEKKNCIKSLIQLYINYITLIQYMVVNSETLPVCLLLSIELVFSFSWLSSCLLILSHMLPSLLVPSSLLYFTRFGTCSPLDFFFNILAFPRCNIFTSLLVKLDISHDLEREEIWNDLISFNYLMLMNACIIVNKGELKILISTFCPQISVSISTRQESAGCMMPFEAASHQTEILITVHEVKQTEFNGNTFCIGPVLKGGKYKFSNKKSLLLLGAVAHTCEYQQFEKLRQVDHLRPGVRDQPGQHSETPSLQKYKKISWAWWCTPIVPATQEAEAGESLEPGKQSLQ

SEQ ID NO: 814971 - protein, 463 aa, Homo sapiens [sequence omitted]

SEQ ID NO: 814972 - protein, 1247 aa, Homo sapiens
MLFRTTFWSLADFPLTPENNSSLKNGNLNVCGNGLVDFFENKLEKVTYNHPFRICKATGKPLINDNQQSSVLICILNAELLGLYKQHEWFLETFKIVSKLVPKWHIIIIHFLFARKSAHRVHSQILNELTLNSFFMLKNNRTNNNTIFGQNPPYLMRTIACAQYLEMHTLHISPHFQLGLPFFARRSYPSLFRLIFYPFLKYKVLRVSEIQDILAQLTQVLYSSLHRPLAAEILFLSSGFTGFSSWVPPKLGETKAFSENLKARLTSDSDSSILHLMYFNSWVLWSVQRPWVRYIHLQYLIGITFLSSLEYSSSHSPNLTTFRFSLPGLPGEVDNLLVVEAPMNVSRDILRGKFLLIDNQDNQVVTQSSLSREHLSFSPLLQLLISGPWNKTIVPKIEHPKSSCLVETADFFDSLAAKPEIDHYGDRMFASIPTKQVKTEVKIILLLNLKSKKNHNVIFFLNPLILYTKLIITEKNDLNKKQLRLVSLTVLEMLNREGIQCFIEAKSQGVSAAEYLFVQIENLRRQRGQGEVFSSSEFRILRQPSYLYLENAFSPDNKTVHIWRHQPLVPNSLSSRCIPLPLYHSISQGNHQHQPAKCLYLKSLPFLKLTFYEALSFLRDLSLVVVVSFTIICLAGKETRVSSFYVFKLLLIIYIDDSLINAGIKNRLYSFLFEFVTSNHCFYSYTTTVLQMAHREAGYYIGKQEFIHWVPELNLENTFGMSFHTFSLKSHPNLWLHIFLSFPPSFTFWKVNSFLNPKCYKSLGEIFPQNLVKKVPHSHLLQVIISCNSFNAMEKLQLLTSQENFSRKIPATFPLSSLSSTIIKTWARSPLTSHSGKAMCCHKKTTSFGVRPEFEFQLNHVGFMVGALSVSISTLVNWGNDTYFYRVFRGIEMKYTVLSLRPRIEVSTQEMCNFLVPCFFSNLQNGIIETMGQNIFLYSKDCMTEFALEKKNCIKSLIQLYINYITLIQYMVVNSETLPVCLLLSIELVFSFSWLSSCLLILSHMLPSLLVPSSLLYFTRFGTCSPLDFFFNILAFPRCNIFTSLLVKLDISHDLEREEIWNDLISFNYAMLMNACIIVNKGELKILISTFCPQISVSISTRQESAGCMMPFEAASHQTEILITVHEVKQTEFNGNTFCIGPVLKGGKYKFSNKKSLLLLGAVAHTCEYQQFEKLRQVDHLRPGVRDQPGQHSETPSLLKIQKNYWAWWCTPIVPATQEAEAGESLEPGKQSLQLSQDRGIALQPGR

SEQ ID NO: 814973 - protein, 824 aa, Homo sapiens
MFASIPTKQVKTEVKIILLLNLKSKKNHNVIFFLNPLILYTKLIITEKNDLNKKQLRLVSLTVLEMLNREGIQCFIEAKSQGVSAAEYLFVQIENLRRQRGQGEVFSSSEFRILRQPSYLYLENAFSPDNKTVHIWRHQPLVPNSLSSRCIPLPLYHSISQGNHQHQPAKCLYLKSLPFLKLTFYEALSFLRDLSLVVVVSFTKKNNRCNWSHFAVFKIFFLSAWLERRLEYLVFEYLNYFQLFILILSDEMQVVKNRLYSFLFEFVTSNHCFYSYTTTVLQMAHREAGYYIGKQEFIHWVPELNLENTFGMSFHTFSLKSHPNLWLHIFLSFPPSFTFWKVNSFLNPKCYKSLGEIFPQNLVKKVPHSHLLQVIISCNSFNAMEKLQLLTSQENFSRKIPATFPLSSLSSTIIKTWARSPLTSHSGKAMCCHKKTTSFGVRPEFEFQLNHVGFMVGALSVSISTLVNWGNDTYFKGFLGGLNEVYKFLASGLGLSKYSRNVQFSSSMFLFYSSNGIIETMGQNIFLYSKDCMTELLKKKKIVIKSLIQLYINYITLIQYMVCEFRDITSLPPSLNRTCIFIFWLSSCLLILSHMLPSLLVPSSLLYFTRFGTCSPLDFFFNILAFPRCNIFTSLLVKLDISHDLEREEIWNDLISFNYLMLMNACIIVNKGELKILISTFCPQISVSISTRQESAGCMMPFEAASHQTEILITVHEVKQTEFNGNTFCIGPVLKGGKYKFSNKKSLLLLGAVAHTCEYQQFEKLRQVDHLRPGVRDQPGQHSETPSLQKYKKISWAWWCTPIVPATQEAEAGESLEPGKQSLQ

SEQ ID NO: 814974 - protein, 461 aa, Homo sapiens
MSRINKNVVLALLTLTSSAFLLFQLYYYKHYLSTKNGAGLSKSKGSRIGFDSTQWRAVKKFIMLTSNQNVPVFLIDPLILELINKNFEQVKNTSHGSTSQCKFFCVPRDFTAFALQYHLWKNEEGWFRIAENMGFQCLKIESKDPRLDGIDSLSGTEIPLHYICKLATHAIHLVVFHERSGNYLWHGHLRLKEHIDRKFVPFRKLQFGRYPGAFDRPELQQVTVDGLEVLIPKDPMHFVEEVPHSRFIECRYKEARAFFQQYLDDNTVEAVAFRKSAKELLQLAAKTLNKLGVPFWLSSGTCLGWYRQCNIIPYSKDVDLGIFIQDYKSDIILAFQDAGLPLKHKFGKVEDSLELSFQGKDDVKLDVFFFYEETDHMWNGGTQAKTGKKFKYLFPKFTLCWTEFVDMKVHVPCETLEYIEANYGKTWKIPVKTWDWKRSPPNVQPNGIWPISEWDEVIQLY

SEQ ID NO: 814975 - protein, 533 aa, Homo sapiens
MSWAARPPFLPQRHAAGQCGPVGVRKEMHCGVASRWRRRRPWLDPAAAAAAAVAGGEQQTPEPEPGEAGRDGMGDSGRDSRSPDSSSPNPLPQGVPPPSPPGPPLPPSTAPSLGGSGAPPPPPMPPPPLGSPFPVISSSMGSPGLPPPAPPGFSGPVSSPQINSTVSLPGGGSGPPEDVKPPVLGVRGLHCPPPPGGPGAGKRLCAICGDRSSGKHYGVYSCEGCKGFFKRTIRKDLTYSCRDNKDCTVDKRQRNRCQYCRYQKCLATGMKREAVQEERQRGKDKDGDGEGAGGAPEEMPVDRILEAELAVEQKSDQGVEGPGGTGGSGSSPNDPVTNICQAADKQLFTLVEWAKRIPHFSSLPLDDQVILLRAGWNELLIASFSHRSIDVRDGILLATGLHVHRNSAHSAGVGAIFDRVLTELVSKMRDMRMDKTELGCLRAIILFNPDAKGLSNPSEVEVLREKVYASLETYCKQKYPEQQGRFAKLLLRLPALRSIGLKCLEHLFFFKLIGDTPIDTFLMEMLEAPHQLA

SEQ ID NO: 814976 - protein, 533 aa, Homo sapiens; identical to SEQ ID NO: 814975

SEQ ID NO: 814977 - protein, 533 aa, Homo sapiens; identical to SEQ ID NO: 814975

SEQ ID NO: 814978 - protein, 533 aa, Homo sapiens; identical to SEQ ID NO: 814975

SEQ ID NO: 814979 - protein, 533 aa, Homo sapiens; identical to SEQ ID NO: 814975

SEQ ID NO: 814980 - protein, 514 aa, Homo sapiens
FRSVQRWLPHWRCHFGTEQSDGLNSTQSRPESFSQGLPRAQLILRSILGNPWDLFGIPTLSQGSCLGPLARPSSLSGMPQGSVGRWGCEKKCIVGSRPGGGGDGPGWIPQRRRRRRWQAENNKPRSRSQGRLDGTGWATAGGINSTVSLPGGGSGPPEDVKPPVLGVRGLHCPPPPGGPGAGKRLCAICGDRSSGKHYGVYSCEGCKGFFKRTIRKDLTYSCRDNKDCTVDKRQRNRCQYCRYQKCLATGMKREAVQEERQRGKDKDGDGEGAGGAPEEMPVDRILEAELAVEQKSDQGVEGPGGTGGSGSSPNDPVTNICQAADKQLFTLVEWAKRIPHFSSLPLDDQVILLRAGWNELLIASFSHRSIDVRDGILLATGLHVHRNSAHSAGVGAIFDRVLTELVSKMRDMRMDKTELGCLRAIILFNPDAKGLSNPSEVEVLREKVYASLETYCKQKYPEQQGRFAKLLLRLPALRSIGLKCLEHLFFFKLIGDTPIDTFLMEMLEAPHQLA

SEQ ID NO: 814981 - protein, 397 aa, Homo sapiens [sequence omitted]

SEQ ID NO: 814982 - protein, 533 aa, Homo sapiens; identical to SEQ ID NO: 814975

SEQ ID NO: 814983 - protein, 382 aa, Homo sapiens
MSWAARPPFLPQRHAAGQCGPVGVRKEMHCGVASRWRRRRPWLDPAAAAAAAVAGGEQQTPEPEPGEAGRDGMGDSGRDSRSPDSSSPNPLPQGVPPPSPPGPPLPPSTAPSLGGSGAPPPPPMPPPPLGSPFPVISSSMGSPGLPPPAPPGFSGPVSSPQINSTVSLPGGGSGPPEDVKPPVLGVRGLHCPPPPGGPGAGKRLCAICGDRSSGKHYGVYSCEGCKGFFKRTIRKDLTYSCRDNKDCTVDKRQRNRCQYCRYQKCLATGMKREAVQEERQRGKDKDGDGEGAGGAPEEMPVDRILEAELAVEQKSDQGVEGPGGTGGSGSSVSVGVNPLSFVMGVGGGSLGLFYIPSPSFPLITFLTLLGTGGAAKQGLSNI

SEQ ID NO: 814984 - protein, 382 aa, Homo sapiens; identical to SEQ ID NO: 814983

SEQ ID NO: 814985 - protein, 246 aa, Homo sapiens [sequence omitted]

SEQ ID NO: 814986 - protein, 508 aa, Homo sapiens
MSWAARPPFLPQRHAAGQCGPVGVRKEMHCGVASRWRRRRPWLDPAAAAAAAVAGGEQQTPEPEPGEAGRDGMGDSGRDSRSPDSSSPNPLPQGVPPPSPPGPPLPPSTAPSLGGSGAPPPPPMPPPPLGSPFPVISSSMGSPGLPPPAPPGFSGPVSSPQINSTVSLPGGGSGPPEDVKPPVLGVRGLHCPPPPGGPGAGKRLCAICGDRSSGKHYGVYSCEGCKGFFKRTIRKDLTYSCRDNKDCTVDKRQRNRCQYCRYQKCLATGMKREAVQEERQRGKDKDGDGEGAGGAPEEMPVDRILEAELAVEQKSDQGVEGPGGTGGSGSSPNDPVTNICQAADKQLFTLVEWAKRIPHFSSLPLDDQVILLRAGLHVHRNSAHSAGVGAIFDRVLTELVSKMRDMRMDKTELGCLRAIILFNPDAKGLSNPSEVEVLREKVYASLETYCKQKYPEQQGRFAKLLLRLPALRSIGLKCLEHLFFFKLIGDTPIDTFLMEMLEAPHQLA

SEQ ID NO: 814987 - protein, 533 aa, Homo sapiens; identical to SEQ ID NO: 814975

SEQ ID NO: 814988 - protein, 185 aa, Homo sapiens
RITFVSQGQGNLGASSSPRLLSYPAIPLSKTLNLEISQLAEEKPTSTDPSHKPSGPCFPCQASGKGQASAAQKGHPVAHICMAILIWFVFISLPPLFPAIPDAKGLSNPSEVEVLREKVYASLETYCKQKYPEQQGRFAKLLLRLPALRSIGLKCLEHLFFFKLIGDTPIDTFLMEMLEAPHQLA

SEQ ID NO: 814989 - protein, 382 aa, Homo sapiens; identical to SEQ ID NO: 814983

SEQ ID NO: 814990 - protein, 195 aa, Homo sapiens
MSWAARPPFLPQRHAAGQCGPVGVRKEMHCGVASRWRRRRPWLDPAAAAAAAVAGGEQQTPEPEPGEAGRDGMGDSGRDSRSPDSSSPNPLPQGVPPPSPPGPPLPPSTAPSLGGSGAPPPPPMPPPPLGSPFPVISSSMGSPGLPPPAPPGFSGPVSSPQVRGCDQLTAWPLSFSCFPCNPRSLCELPHGPLTF

SEQ ID NO: 814991 - protein, 127 aa, Homo sapiens
NLGASSSPRLLSYPAIPLSKTLNLEISQLAEEKPTSTDPSHKPSGPCFPCQASGKGQASAAQKGHPVAHICMAILIWFVFISLPPLFPAIPDAKGLSNPSEVEVLREKVYASLETYCKQKYPEQQGR

SEQ ID NO: 814992 - protein, 114 aa, Homo sapiens [sequence omitted]

SEQ ID NO: 814993 - protein, 555 aa, Homo sapiens
RAAGLSPVSSSCSLGRAAVTVHRRRRGLHRRVRPPASMATTATCTRFTDDYQLFEELGKGAFSVVRRCVKKTSTQEYAAKIINTKKLSARDHQKLEREARICRLLKHPNIVRLHDSISEEGFHYLVFDLVTGGELFEDIVAREYYSEADASHCIHQILESVNHIHQHDIVHRDLKPENLLLASKCKGAAVKLADFGLAIEVQGEQQAWFGFAGTPGYLSPEVLRKDPYGKPVDIWACGVILYILLVGYPPFWDEDQHKLYQQIKAGAYDFPSPEWDTVTPEAKNLINQMLTINPAKRITADQALKHPWVCQRSTVASMMHRQETVECLRKFNARRKLKGAILTTMLVSRNFSAAKSLLNKKSDGGVKPQSNNKNSLVSPAQEPAPLQTAMEPQTTVVHNATDGIKGSTESCNTTTEDEDLKVRKQEIIKITEQLIEAINNGDFEAYTKICDPGLTSFEPEALGNLVEGMDFHKFYFENLLSKNSKPIHTTILNPHVHVIGEDAACIAYIRLTQYIDGQGRPRTSQSEETRVWHRRDGKWLNVHYHCSGAPAAPLQ

SEQ ID NO: 814994 - protein, 518 aa, Homo sapiens
MATTATCTRFTDDYQLFEELGKGAFSVVRRCVKKTSTQEYAAKIINTKKLSARDHQKLEREARICRLLKHPNIVRLHDSISEEGFHYLVFDLVTGGELFEDIVAREYYSEADASHCIHQILESVNHIHQHDIVHRDLKPENLLLASKCKGAAVKLADFGLAIEVQGEQQAWFGFAGTPGYLSPEVLRKDPYGKPVDIWACGVILYILLVGYPPFWDEDQHKLYQQIKAGAYDFPSPEWDTVTPEAKNLINQMLTINPAKRITADQALKHPWVCQRSTVASMMHRQETVECLRKFNARRKLKGAILTTMLVSRNFSAAKSLLNKKSDGGVKPQSNNKNSLVSPAQEPAPLQTAMEPQTTVVHNATDGIKGSTESCNTTTEDEDLKVRKQEIIKITEQLIEAINNGDFEAYTKICDPGLTSFEPEALGNLVEGMDFHKFYFENLLSKNSKPIHTTILNPHVHVIGEDAACIAYIRLTQYIDGQGRPRTSQSEETRVWHRRDGKWLNVHYHCSGAPAAPLQ

SEQ ID NO: 814995 - protein, 593 aa, Homo sapiens
RAAGLSPVSSSCSLGRAAVTVHRRRRGLHRRVRPPASMATTATCTRFTDDYQLFEELGKGAFSVVRRCVKKTSTQEYAAKIINTKKLSARDHQKLEREARICRLLKHPNIVRLHDSISEEGFHYLVFDLVTGGELFEDIVAREYYSEADASHCIHQILESVNHIHQHDIVHRDLKPENLLLASKCKGAAVKLADFGLAIEVQGEQQAWFGFAGTPGYLSPEVLRKDPYGKPVDIWACGVILYILLVGYPPFWDEDQHKLYQQIKAGAYDFPSPEWDTVTPEAKNLINQMLTINPAKRITADQALKHPWVCQRSTVASMMHRQETVECLRKFNARRKLKGAILTTMLVSRNFSAAKSLLNKKSDGGVKPQSNNKNSLVSPAQEPAPLQTAMEPQTTVVHNATDGIKGSTESCNTTTEDEDLKAAPLRTGNGSSVPEGRSSRDRTAPSAGMQPQPSLCSSAMRKQEIIKITEQLIEAINNGDFEAYTKICDPGLTSFEPEALGNLVEGMDFHKFYFENLLSKNSKPIHTTILNPHVHVIGEDAACIAYIRLTQYIDGQGRPRTSQSEETRVWHRRDGKWLNVHYHCSGAPAAPLQ

SEQ ID NO: 814996 - protein, 532 aa, Homo sapiens
RAAGLSPVSSSCSLGRAAVTVHRRRRGLHRRVRPPASMATTATCTRFTDDYQLFEELGKGAFSVVRRCVKKTSTQEYAAKIINTKKLSARDHQKLEREARICRLLKHPNIVRLHDSISEEGFHYLVFDLVTGGELFEDIVAREYYSEADASHCIHQILESVNHIHQHDIVHRDLKPENLLLASKCKGAAVKLADFGLAIEVQGEQQAWFGFAGTPGYLSPEVLRKDPYGKPVDIWACGVILYILLVGYPPFWDEDQHKLYQQIKAGAYDFPSPEWDTVTPEAKNLINQMLTINPAKRITADQALKHPWVCQRSTVASMMHRQETVECLRKFNARRKLKGAILTTMLVSRNFSAAKSLLNKKSDGGVKEPQTTVVHNATDGIKGSTESCNTTTEDEDLKVRKQEIIKITEQLIEAINNGDFEAYTKICDPGLTSFEPEALGNLVEGMDFHKFYFENLLSKNSKPIHTTILNPHVHVIGEDAACIAYIRLTQYIDGQGRPRTSQSEETRVWHRRDGKWLNVHYHCSGAPAAPLQ

SEQ ID NO: 814997 - protein, 541 aa, Homo sapiens
RAAGLSPVSSSCSLGRAAVTVHRRRRGLHRRVRPPASMATTATCTRFTDDYQLFEELGKGAFSVVRRCVKKTSTQEYAAKIINTKKLSARDHQKLEREARICRLLKHPNIVRLHDSISEEGFHYLVFDLVTGGELFEDIVAREYYSEADASHCIHQILESVNHIHQHDIVHRDLKPENLLLASKCKGAAVKLADFGLAIEVQGEQQAWFGFAGTPGYLSPEVLRKDPYGKPVDIWACGVILYILLVGYPPFWDEDQHKLYQQIKAGAYDFPSPEWDTVTPEAKNLINQMLTINPAKRITADQALKHPWVCQRSTVASMMHRQETVECLRKFNARRKLKGAILTTMLVSRNFSAAKSLLNKKSDGGVKPQSNNKNSLEPQTTVVHNATDGIKGSTESCNTTTEDEDLKVRKQEIIKITEQLIEAINNGDFEAYTKICDPGLTSFEPEALGNLVEGMDFHKFYFENLLSKNSKPIHTTILNPHVHVIGEDAACIAYIRLTQYIDGQGRPRTSQSEETRVWHRRDGKWLNVHYHCSGAPAAPLQ

SEQ ID NO: 814998 - protein, 570 aa, Homo sapiens
RAAGLSPVSSSCSLGRAAVTVHRRRRGLHRRVRPPASMATTATCTRFTDDYQLFEELGKGAFSVVRRCVKKTSTQEYAAKIINTKKLSARDHQKLEREARICRLLKHPNIVRLHDSISEEGFHYLVFDLVTGGELFEDIVAREYYSEADASHCIHQILESVNHIHQHDIVHRDLKPENLLLASKCKGAAVKLADFGLAIEVQGEQQAWFGFAGTPGYLSPEVLRKDPYGKPVDIWACGVILYILLVGYPPFWDEDQHKLYQQIKAGAYDFPSPEWDTVTPEAKNLINQMLTINPAKRITADQALKHPWVCQRSTVASMMHRQETVECLRKFNARRKLKGAILTTMLVSRNFSAAKSLLNKKSDGGVKPQSNNKNSLEPQTTVVHNATDGIKGSTESCNTTTEDEDLKALVPEGRSSRDRTAPSAGMQPQPSLCSSAMRKQEIIKITEQLIEAINNGDFEAYTKICDPGLTSFEPEALGNLVEGMDFHKFYFENLLSKNSKPIHTTILNPHVHVIGEDAACIAYIRLTQYIDGQGRPRTSQSEETRVWHRRDGKWLNVHYHCSGAPAAPLQ

SEQ ID NO: 814999 - protein, 579 aa, Homo sapiens
RAAGLSPVSSSCSLGRAAVTVHRRRRGLHRRVRPPASMATTATCTRFTDDYQLFEELGKGAFSVVRRCVKKTSTQEYAAKIINTKKLSARDHQKLEREARICRLLKHPNIVRLHDSISEEGFHYLVFDLVTGGELFEDIVAREYYSEADASHCIHQILESVNHIHQHDIVHRDLKPENLLLASKCKGAAVKLADFGLAIEVQGEQQAWFGFAGTPGYLSPEVLRKDPYGKPVDIWACGVILYILLVGYPPFWDEDQHKLYQQIKAGAYDFPSPEWDTVTPEAKNLINQMLTINPAKRITADQALKHPWVCQRSTVASMMHRQETVECLRKFNARRKLKGAILTTMLVSRNFSAAKSLLNKKSDGGVKPQSNNKNSLEPQTTVVHNATDGIKGSTESCNTTTEDEDLKAAPLRTGNGSSVPEGRSSRDRTAPSAGMQPQPSLCSSAMRKQEIIKITEQLIEAINNGDFEAYTKICDPGLTSFEPEALGNLVEGMDFHKFYFENLLSKNSKPIHTTILNPHVHVIGEDAACIAYIRLTQYIDGQGRPRTSQSEETRVWHRRDGKWLNVHYHCSGAPAAPLQ

SEQ ID NO: 815000 - protein, 576 aa, Homo sapiens
RAAGLSPVSSSCSLGRAAVTVHRRRRGLHRRVRPPASMATTATCTRFTDDYQLFEELGKGAFSVVRRCVKKTSTQEYAAKIINTKKLSARDHQKLEREARICRLLKHPNIVRLHDSISEEGFHYLVFDLVTGGELFEDIVAREYYSEADASHCIHQILESVNHIHQHDIVHRDLKPENLLLASKCKGAAVKLADFGLAIEVQGEQQAWFGFAGTPGYLSPEVLRKDPYGKPVDIWACGVILYILLVGYPPFWDEDQHKLYQQIKAGAYDFPSPEWDTVTPEAKNLINQMLTINPAKRITADQALKHPWVCQRSTVASMMHRQETVECLRKFNARRKLKGAILTTMLVSRNFSVGRQSSAPASPAASAAGLAGQAAKSLLNKKSDGGVKPQSNNKNSLVSPAQEPAPLQTAMEPQTTVVHNATDGIKGSTESCNTTTEDEDLKVRKQEIIKITEQLIEAINNGDFEAYTKICDPGLTSFEPEALGNLVEGMDFHKFYFENLLSKNSKPIHTTILNPHVHVIGEDAACIAYIRLTQYIDGQGRPRTSQSEETRVWHRRDGKWLNVHYHCSGAPAAPLQ

SEQ ID NO: 815001 - protein, 555 aa, Homo sapiens; identical to SEQ ID NO: 814993

SEQ ID NO: 815002 - protein, 555 aa, Homo sapiens; identical to SEQ ID NO: 814993

SEQ ID NO: 815003 - protein, 556 aa, Homo sapiens
WSSRLPIGWTTDDYQLFEELGKGAFSVVRRCVKKTSTQEYAAKIINTKKLSARDHQKLEREARICRLLKHPNIVRLHDSISEEGFHYLVFDLVTGGELFEDIVAREYYSEADASHCIHQILESVNHIHQHDIVHRDLKPENLLLASKCKGAAVKLADFGLAIEVQGEQQAWFGFAGTPGYLSPEVLRKDPYGKPVDIWACGVILYILLVGYPPFWDEDQHKLYQQIKAGAYDFPSPEWDTVTPEAKNLINQMLTINPAKRITADQALKHPWVCQRSTVASMMHRQETVECLRKFNARRKLKGAILTTMLVSRNFSAAKSLLNKKSDGGVKPQSNNKNSLVSPAQEPAPLQTAMEPQTTVVHNATDGIKGSTESCNTTTEDEDLKAAPLRTGNGSSVPEGRSSRDRTAPSAGMQPQPSLCSSAMRKQEIIKITEQLIEAINNGDFEAYTKICDPGLTSFEPEALGNLVEGMDFHKFYFENLLSKNSKPIHTTILNPHVHVIGEDAACIAYIRLTQYIDGQGRPRTSQSEETRVWHRRDGKWLNVHYHCSGAPAAPLQ

SEQ ID NO: 815004 - protein, 563 aa, Homo sapiens
FREDPPPEPRAAPFTRFTDDYQLFEELGKGAFSVVRRCVKKTSTQEYAAKIINTKKLSARDHQKLEREARICRLLKHPNIVRLHDSISEEGFHYLVFDLVTGGELFEDIVAREYYSEADASHCIHQILESVNHIHQHDIVHRDLKPENLLLASKCKGAAVKLADFGLAIEVQGEQQAWFGFAGTPGYLSPEVLRKDPYGKPVDIWACGVILYILLVGYPPFWDEDQHKLYQQIKAGAYDFPSPEWDTVTPEAKNLINQMLTINPAKRITADQALKHPWVCQRSTVASMMHRQETVECLRKFNARRKLKGAILTTMLVSRNFSAAKSLLNKKSDGGVKPQSNNKNSLVSPAQEPAPLQTAMEPQTTVVHNATDGIKGSTESCNTTTEDEDLKAAPLRTGNGSSVPEGRSSRDRTAPSAGMQPQPSLCSSAMRKQEIIKITEQLIEAINNGDFEAYTKICDPGLTSFEPEALGNLVEGMDFHKFYFENLLSKNSKPIHTTILNPHVHVIGEDAACIAYIRLTQYIDGQGRPRTSQSEETRVWHRRDGKWLNVHYHCSGAPAAPLQ

SEQ ID NO: 815005 - protein, 548 aa, Homo sapiens
MATTATCTRFTDDYQLFEELGKCVKKTSTQEYAAKIINTKKLSARDHQKLEREARICRLLKHPNIVRLHDSISEEGFHYLVFDLVTGGELFEDIVAREYYSEADASHCIHQILESVNHIHQHDIVHRDLKPENLLLASKCKGAAVKLADFGLAIEVQGEQQAWFGFAGTPGYLSPEVLRKDPYGKPVDIWACGVILYILLVGYPPFWDEDQHKLYQQIKAGAYDFPSPEWDTVTPEAKNLINQMLTINPAKRITADQALKHPWVCQRSTVASMMHRQETVECLRKFNARRKLKGAILTTMLVSRNFSAAKSLLNKKSDGGVKPQSNNKNSLVSPAQEPAPLQTAMEPQTTVVHNATDGIKGSTESCNTTTEDEDLKAAPLRTGNGSSVPEGRSSRDRTAPSAGMQPQPSLCSSAMRKQEIIKITEQLIEAINNGDFEAYTKICDPGLTSFEPEALGNLVEGMDFHKFYFENLLSKNSKPIHTTILNPHVHVIGEDAACIAYIRLTQYIDGQGRPRTSQSEETRVWHRRDGKWLNVHYHCSGAPAAPLQ

SEQ ID NO: 815006 - protein, 618 aa, Homo sapiens
RAAGLSPVSSSCSLGRAAVTVHRRRRGLHRRVRPPASMATTATCTRFTDDYQLFEELGKGAFSVVRRCVKKTSTQEYAAKIINTKKLSARDHQKLEREARICRLLKHPNIVRLHDSISEEGFHYLVFDLVTGGELFEDIVAREYYSEADASHCIHQILESVNHIHQHDIVHRDLKPENLLLASKCKGAAVKLADFGLAIEVQGEQQAWFGFAGTPGYLSPEVLRKDPYGKPVDIWACGVILYILLVGYPPFWDEDQHKLYQQIKAGAYDFPSPEWDTVTPEAKNLINQMLTINPAKRITADQALKHPWVCQRSTVASMMHRQETVECLRKFNARRKLKGAILTTMLVSRNFSAAKSLLNKKSDGGVKPQSNNKNSLVSPAQEPAPLQTAMEPQTTVVHNATDGIKGSTESCNTTTEDEDLKAAPLRTGNGSSVPEGRSSRDRTAPSAGMQPQPSLCSSAMRKQEIIKITEQLIEAINNGDFEAYTKICDPGLTSFEPEALGNLVEGMDFHKFYFENLLSKNSKPIHTTILNPHVHVIGEDAACIAYIRLTQYIDGQGRPRTSQSEETRVWHRRDGKCIDGQGRPRTSQSEETRVWHRRDGKWLNVHYHCSGAPAAPLQ

SEQ ID NO: 815007 - protein, 533 aa, Homo sapiens
SIGLGLSSTLVVVECLKSGSYLLDTPLQDSQGWVSVSLVSLLFNFSSSSVLPGQRYFSVYVGLKAVTLGVTGGELFEDIVAREYYSEADASHCIHQILESVNHIHQHDIVHRDLKPENLLLASKCKGAAVKLADFGLAIEVQGEQQAWFGFAGTPGYLSPEVLRKDPYGKPVDIWACGVILYILLVGYPPFWDEDQHKLYQQIKAGAYDFPSPEWDTVTPEAKNLINQMLTINPAKRITADQALKHPWVCQRSTVASMMHRQETVECLRKFNARRKLKGAILTTMLVSRNFSAAKSLLNKKSDGGVKPQSNNKNSLVSPAQEPAPLQTAMEPQTTVVHNATDGIKGSTESCNTTTEDEDLKAAPLRTGNGSSVPEGRSSRDRTAPSAGMQPQPSLCSSAMRKQEIIKITEQLIEAINNGDFEAYTKICDPGLTSFEPEALGNLVEGMDFHKFYFENLLSKNSKPIHTTILNPHVHVIGEDAACIAYIRLTQYIDGQGRPRTSQSEETRVWHRRDGKWLNVHYHCSGAPAAPLQ

SEQ ID NO: 815008 - protein, 452 aa, Homo sapiens
MSTSETSKHRHCIHQILESVNHIHQHDIVHRDLKPENLLLASKCKGAAVKLADFGLAIEVQGEQQAWFGFAGTPGYLSPEVLRKDPYGKPVDIWACGVILYILLVGYPPFWDEDQHKLYQQIKAGAYDFPSPEWDTVTPEAKNLINQMLTINPAKRITADQALKHPWVCQRSTVASMMHRQETVECLRKFNARRKLKGAILTTMLVSRNFSAAKSLLNKKSDGGVKPQSNNKNSLVSPAQEPAPLQTAMEPQTTVVHNATDGIKGSTESCNTTTEDEDLKAAPLRTGNGSSVPEGRSSRDRTAPSAGMQPQPSLCSSAMRKQEIIKITEQLIEAINNGDFEAYTKICDPGLTSFEPEALGNLVEGMDFHKFYFENLLSKNSKPIHTTILNPHVHVIGEDAACIAYIRLTQYIDGQGRPRTSQSEETRVWHRRDGKWLNVHYHCSGAPAAPLQ

SEQ ID NO: 815009 - protein, 204 aa, Homo sapiens
MEPQTTVVHNATDGIKGSTESCNTTTEDEDLKAAPLRTGNGSSVPEGRSSRDRTAPSAGMQPQPSLCSSAMRKQEIIKITEQLIEAINNGDFEAYTKICDPGLTSFEPEALGNLVEGMDFHKFYFENLLSKNSKPIHTTILNPHVHVIGEDAACIAYIRLTQYIDGQGRPRTSQSEETRVWHRRDGKWLNVHYHCSGAPAAPLQ

SEQ ID NO: 815010 - protein, 223 aa, Homo sapiens
  misc_feature (20)..(20): Xaa can be any naturally occurring amino acid
ASAAAWAGQVAKSFLNKNSXGVVKKRKSSSSVHLMPQSNNKNSLVSPAQEPAPLQTAMEPQTTVVHNATDGIKGSTESCNTTTEDEDLKVRKQEIIKITEQLIEAINNGDFEAYTKICDPGLTSFEPEALGNLVEGMDFHKFYFENLLSKNSKPIHTTILNPHVHVIGEDAACIAYIRLTQYIDGQGRPRTSQSEETRVWHRRDGKWLNVHYHCSGAPAAPLQ

SEQ ID NO: 815011 - protein, 141 aa, Homo sapiens
MDFFSPTVRKQEIIKITEQLIEAINNGDFEAYTKICDPGLTSFEPEALGNLVEGMDFHKFYFENLLSKNSKPIHTTILNPHVHVIGEDAACIAYIRLTQYIDGQGRPRTSQSEETRVWHRRDGKWLNVHYHCSGAPAAPLQ

SEQ ID NO: 815012 - protein, 148 aa, Homo sapiens
MRAGVKCAAFPSLEVRKQEIIKITEQLIEAINNGDFEAYTKICDPGLTSFEPEALGNLVEGMDFHKFYFENLLSKNSKPIHTTILNPHVHVIGEDAACIAYIRLTQYIDGQGRPRTSQSEETRVWHRRDGKWLNVHYHCSGAPAAPLQ

SEQ ID NO: 815013 - protein, 119 aa, Homo sapiens
MQVPRPDVLLPTPPCPAVLSKNSKPIHTTILNPHVHVIGEDAACIAYIRLTQYIDGQGRPRTSQSEETRVWHRRDGKCIDGQGRPRTSQSEETRVWHRRDGKWLNVHYHCSGAPAAPLQ

SEQ ID NO: 815014 - protein, 559 aa, Homo sapiens
RAAGLSPVSSSCSLGRAAVTVHRRRRGLHRRVRPPASMATTATCTRFTDDYQLFEELGKGAFSVVRRCVKKTSTQEYAAKIINTKKLSARDHQKLEREARICRLLKHPNIVRLHDSISEEGFHYLVFDLVTGGELFEDIVAREYYSEADASHCIHQILESVNHIHQHDIVHRDLKPENLLLASKCKGAAVKLADFGLAIEVQGEQQAWFGFAGTPGYLSPEVLRKDPYGKPVDIWACGVILYILLVGYPPFWDEDQHKLYQQIKAGAYDFPSPEWDTVTPEAKNLINQMLTINPAKRITADQALKHPWVCQRSTVASMMHRQETVECLRKFNARRKLKGAILTTMLVSRNFSAAKSLLNKKSDGGVKEPQTTVVHNATDGIKGSTESCNTTTEDEDLKVRKQEIIKITEQLIEAINNGDFEAYTKICDPGLTSFEPEALGNLVEGMDFHKFYFENREWVRAADILLPAPLPLCLCLLLTFSSQLPTFPLFDLRAALLLCMLVPLCPDGCRQAPLKALLLSSKCHSFCSCFVAVPVTTIKLTYFLPGAVAYACNPNTLGG

SEQ ID NO: 815015 - protein, 593 aa, Homo sapiens; identical to SEQ ID NO: 814995

SEQ ID NO: 815016 - protein, 373 aa, Homo sapiens
RAAGLSPVSSSCSLGRAAVTVHRRRRGLHRRVRPPASMATTATCTRFTDDYQLFEELGKGAFSVVRRCVKKTSTQEYAAKIINTKKLSARDHQKLEREARICRLLKHPNIVRLHDSISEEGFHYLVFDLVTGGELFEDIVAREYYSEADASHCIHQILESVNHIHQHDIVHRDLKPENLLLASKCKGAAVKLADFGLAIEVQGEQQAWFGFAGTPGYLSPEVLRKDPYGKPVDIWACGVILYILLVGYPPFWDEDQHKLYQQIKAGAYDFPSPEWDTVTPEAKNLINQMLTINPAKRITADQALKHPWVCQRSTVASMMHRQETVECLRKFNARRKLKGAILTTMLVSRNFSAAKSLLNKKSDGGVKVSVSSL

SEQ ID NO: 815017 - protein, 454 aa, Homo sapiens
RAAGLSPVSSSCSLGRAAVTVHRRRRGLHRRVRPPASMATTATCTRFTDDYQLFEELGKGAFSVVRRCVKKTSTQEYAAKIINTKKLSARDHQKLEREARICRLLKHPNIVRLHDSISEEGFHYLVFDLVTGGELFEDIVAREYYSEADASHCIHQILESVNHIHQHDIVHRDLKPENLLLASKCKGAAVKLADFGLAIEVQGEQQAWFGFAGTPGYLSPEVLRKDPYGKPVDIWACGVILYILLVGYPPFWDEDQHKLYQQIKAGAYDFPSPEWDTVTPEAKNLINQMLTINPAKRITADQALKHPWVCQRSTVASMMHRQETVECLRKFNARRKLKGAILTTMLVSRNFSVAKAMNKKSDGGSSHRATQNSSKPAKKPAWEGRGHNPWVTNANGSGPRKAAQEEAQGPAGKAGGKAGKTLGEQLFARKEIKTGQGGKEAPTLGEKYTTRGRR

SEQ ID NO: 815018 - protein, 289 aa, Homo sapiens
RSSQRELSTRQRSQAKPPASMASEFKKKLFWRAVVAEFLATTLFVFISIGSALGFKYPVGNNQTAVQDNVKVSLAFGLSIATLAQSVGHISGAHLNPAVTLGLLLSCQISIFRALMYIIAQCVGAIVATAILSGITSSLTGNSLGRNDLADGVNSGQGLGIEIIGTLQLVLCVLATTDRRRRDLGGSAPLAIGLSVALGHLLAIDYTGCGINPARSFGSAVITHNFSNHWIFWVGPFIGGALAVLIYDFILAPRSSDLTDRVKVWTSGQVEEYDLDADDINSRVEMKPK

SEQ ID NO: 815019 - protein, 289 aa, Homo sapiens; identical to SEQ ID NO: 815018

SEQ ID NO: 815020 - protein, 98 aa, Homo sapiens
GRLLLLNSRPRRIDYTGCGINPARSFGSAVITHNFSNHWIFWVGPFIGGALAVLIYDFILAPRSSDLTDRVKVWTSGQVEEYDLDADDINSRVEMKPK

SEQ ID NO: 815021 - protein, 120 aa, Homo sapiens
PATPISPGRAEGMTTLSCRTFQSTLKGTHLLVAPQSMMGGVPESPPSPQSCSPTHLRKCLGFYRNCFVPLGTALLLFLTCTLLPMVLGGGRDPRRCSGGGKLCSFSSACSQAPDPLGLTA

SEQ ID NO: 815022 - protein, 207 aa, Homo sapiens
RSSQRELSTRQRSQAKPPASMASEFKKKLFWRAVVAEFLATTLFVFISIGSALGFKYPVGNNQTAVQDNVKVSLAFGLSIATLAQSVGHISGAHLNPAVTLGLLLSCQISIFRALMYIIAQCVGAIVATAILSGITSSLTGNSLGRNDLADGVNSGQGLGIEIIGTLQLVLCVLATTDRRRRDLGGSAPLAIGLSVALGIVPISGPQ

SEQ ID NO: 815023 - protein, 289 aa, Homo sapiens; identical to SEQ ID NO: 815018

SEQ ID NO: 815024 - protein, 289 aa, Homo sapiens; identical to SEQ ID NO: 815018

SEQ ID NO: 815025 - protein, 289 aa, Homo sapiens; identical to SEQ ID NO: 815018

SEQ ID NO: 815026 - protein, 289 aa, Homo sapiens; identical to SEQ ID NO: 815018

SEQ ID NO: 815027 - protein, 224 aa, Homo sapiens
MAAPKGSLWVRTQLGLPPLLLLTMALAGGSGTASAEAFDSVLGDTASCHRACQLTYPLHTYPKEEELYACQRGCRLFSICQFVDDGIDLNRTKLECESACTEAYSQSDEQYACHLGCQNQLPFAELRQEQLMSLMPKMHLLFPLTLVRSFWSDMMDSAQSFITSSWTFYLQADDGKIVIFQSKPEIQYAPHLEQEPTNLRESSLSKMSSKRSANEKFTSAQEFS

SEQ ID NO: 815028 - protein, 91 aa, Homo sapiens
MAAPKGSLWVRTQLGLPPLLLLTMALAGGSGTASAEAFDSVLGDTASCHRACQLTYPLHTYPKNRRRPHVNRLKIAKIWIGKPYLKADGQT

SEQ ID NO: 815029 - protein, 224 aa, Homo sapiens; identical to SEQ ID NO: 815027

SEQ ID NO: 815030 - protein, 224 aa, Homo sapiens; identical to SEQ ID NO: 815027

SEQ ID NO: 815031 - protein, 224 aa, Homo sapiens; identical to SEQ ID NO: 815027

SEQ ID NO: 815032 - protein, 224 aa, Homo sapiens; identical to SEQ ID NO: 815027

SEQ ID NO: 815033 - protein, 112 aa, Homo sapiens [sequence omitted]

SEQ ID NO: 815034 - protein, 170 aa, Homo sapiens
MAAPKGSLWEEELYACQRGCRLFSICQFVDDGIDLNRTKLECESACTEAYSQSDEQYACHLGCQNQLPFAELRQEQLMSLMPKMHLLFPLTLVRSFWSDMMDSAQSFITSSWTFYLQADDGKIVIFQSKPEIQYAPHLEQEPTNLRESSLSKMSSKRSANEKFTSAQEFS

SEQ ID NO: 815035 - protein, 178 aa, Homo sapiens
RASGTTPLSVDTTPLHTEEELYACQRGCRLFSICQFVDDGIDLNRTKLECESACTEAYSQSDEQYACHLGCQNQLPFAELRQEQLMSLMPKMHLLFPLTLVRSFWSDMMDSAQSFITSSWTFYLQADDGKIVIFQSKPEIQYAPHLEQEPTNLRESSLSKMSSKRSANEKFTSAQEFS

SEQ ID NO: 815036 - protein, 224 aa, Homo sapiens; identical to SEQ ID NO: 815027

SEQ ID NO: 815037 - protein, 224 aa, Homo sapiens; identical to SEQ ID NO: 815027

SEQ ID NO: 815038 - protein, 157 aa, Homo sapiens
MAAPKGSLWVRTQLGLPPLLLLTMALAGGSGTASAEAFDSVLGDTASCHRACQLTYPLHTYPKLMSLMPKMHLLFPLTLVRSFWSDMMDSAQSFITSSWTFYLQADDGKIVIFQSKPEIQYAPHLEQEPTNLRESSLSKMSSKRSANEKFTSAQEFS

SEQ ID NO: 815039 - protein, 224 aa, Homo sapiens; identical to SEQ ID NO: 815027

SEQ ID NO: 815040 - protein, 112 aa, Homo sapiens [sequence omitted]

SEQ ID NO: 815041 - protein, 118 aa, Homo sapiens
RASGTTPLSVDTTPLHTEEELYACQRGCRLFSICQFVDDGIDLNRTKLECESACTEAYSQSDEQYACHLGCQNQLPFAELRQEQLMSLMPKMHLLFPLTLVRSFWSDMMDSAQSFITS

SEQ ID NO: 815042 - protein, 213 aa, Homo sapiens
MAAPKGSLWVRTQLGLPPLLLLTMALAGGSGTASAEAFDSVLGDTASCHRACQLTYPLHTYPKEEELYACQRGCRLFSICQFVDDGIDLNRTKLECESACTEAYSQSDEQYACHLGCQNQLPFAELRQEQLMSLMPKMHLLFPLTLVRSFWSDMMDSAQSFITSSWTFYLQADDGKIVIFQSKPEIQYAPHLEQEPTNLRESSLSKMSSVMAF

SEQ ID NO: 815043 - protein, 105 aa, Homo sapiens
MAAPKGSLWVRTQLGLPPLLLLTMALAGGSGTASAEAFDSVLGDTASCHRACQLTYPLHTYPKVGPVRSGLRPFPCSPFLGSPHVMSALATWLLNRPFNRCLPSV

SEQ ID NO: 815044 - protein, 205 aa, Homo sapiens
MAAPKGSLWVRTQLGLPPLLLLTMALAGGSGTASAEAFDSVLGDTASCHRACQLTYPLHTYPKEEELYACQRGCRLFSICQFVDDGIDLNRTKLECESACTEAYSQSDEQYACHLGCQNQLPFAELRQEQLMSLMPKMHLLFPLTLVRSFWSDMMDSAQSFITSSWTFYLQADDGKIVIFQSKPEIQYFNLFPVEIARNVDAFTA

SEQ ID NO: 815045 - protein, 145 aa, Homo sapiens
MAAPKGSLWVRTQLGLPPLLLLTMALAGGSGTASAEAFDSVLGDTASCHRACQLTYPLHTYPKEEELYACQRGCRLFSICQFVDDGIDLNRTKLECESACTEAYSQSDEQYACHLGCQNQLPFAELRQEQPAMILSVTLVNKLNI

SEQ ID NO: 815046 - protein, 105 aa, Homo sapiens; identical to SEQ ID NO: 815043

SEQ ID NO: 815047 - protein, 105 aa, Homo sapiens; identical to SEQ ID NO: 815043

SEQ ID NO: 815048 - protein, 461 aa, Homo sapiens
MDRGSLLPFQLWCPRPFGTYSQNQPRPPSAALKPSACPEPGGGAEPDHGPAHSENTPPALATEVPASQPAPLLSAAAAGDEGRVLLDTWYVIKPGNTKEKVAFFVAHQCGGGSRASSMKVKGHWGSDSSKAKRRRRCLDPTKAPPDPGGREGPPAAEEGPASAGEDVDLLSVAEMVALVEQRAALALQSYPRPTTPAPVVFVSAEQGGPAKGVGSERRSGGGDCSRVAEAVAHFEAQRDSPPTKNVKEETVCLTVSPEEPPPPGQLFFLQNRGPDGPPEPPPADSPATAPGPDDAEGTADTSLCRLYRHVSHDFLEIRFKIQRLLEPRQYMLLLPEHVLVKIFSFLPTRALAALKCTCHHFKGIIEAFGVRATDSRWSRDPLYRDDPCKQCRKRYEKGDVSLCRWHPKPYHHDLPYGRSYWMCCRRADRETPGCRLGLHDNNWVLPCNGPGGGRAGREEGR

SEQ ID NO: 815049 - protein, 603 aa, Homo sapiens
MDRGSLLPFQLWCPRPFGTYSQNQPRPPSAALKPSACPEPGGGAEPDHGPAHSENTPPALATEVPASQPAPLLSAAAAGDEGRVLLDTWYVIKPGNTKEKVAFFVAHQCGGGSRASSMKVKGHWGSDSSKAKRRRRCLDPTKAPPDPGGREGPPAAEEGPASAGEDVDLLSVAEMVALVEQRAALALQSYPRPTTPAPVVFVSAEQGGPAKGVGSERRSGGGDCSRVAEAVAHFEAQRDSPPTKGLRKEERPGPGPGEVRIAFRISNGREPRAPDSGLPSGGGGRPGCAYPGSPGPGARAKDKITCDLYQLISPSRDALPSNVEFLLARADEASEGDSPAPARPEDTPPAPPPPPARDCGASGFHVDVVVTGVVDECIFFGKDGTKNVKEETVCLTVSPEEPPPPGQLFFLQNRGPDGPPEPPPADSPATAPGPDDAEGTADTSLCRLYRHVSHDFLEIRFKIQRLLEPRQYMLLLPEHVLVKIFSFLPTRALAALKCTCHHFKGIIEAFGVRATDSRWSRDPLYRDDPCKQCRKRYEKGDVSLCRWHPKPYHHDLPYGRSYWMCCRRADRETPGCRLGLHDNNWVLPCNGPGGGRAGREEGR

SEQ ID NO: 815050 - protein, 603 aa, Homo sapiens; identical to SEQ ID NO: 815049

SEQ ID NO: 815051 - protein, 603 aa, Homo sapiens; identical to SEQ ID NO: 815049

SEQ ID NO: 815052 - protein, 529 aa, Homo sapiens [sequence omitted]

SEQ ID NO: 815053 - protein, 76 aa, Homo sapiens
ITFSSAVFLSSGSEGTVLFKKFIQKPMHPLDITGNPTWFLLYHCTEMVISLFHPKIWAMTIAIYKIQVKFTFFQRN

SEQ ID NO: 815054 - protein, 673 aa, Homo sapiens
MAKLETLPVRADPGRDPLLAFAPRPSELGPPDPRLAMGSVGSGVAHAQEFAMKSVGTRTGGGGSQGSFPGPRGSGSGASRERPGRYPSEDKGLANSLYLNGELRGSDHTDVCGNVVGSSGGSSSSGGSDKAPPQYREPSHPPKLLATSGKLDQCSEPLVRPSAFKPVVPKNFHSMQNLCPPQTNGTPEGRQGPGGLKGGLDKSRTMTPAGGSGSGLSDSGRNSLTSLPTYSSSYSQHLAPLSASTSHINRIGTASYGSGSGGSSGGGSGYQDLGTSDSGRASSKSGSSSSMGRPGHLGSGEGGGGGLPFAACSPPSPSALIQELEERLWEKEQEVAALRRSLEQSEAAVAQVLEERQKAWERELAELRQGCSGKLQQVARRAQRAQQGLQLQVLRLQQDKKQLQEEAARLMRQREELEDKVAACQKEQADFLPRIEETKWEVCQKAGEISLLKQQLKDSQADVSQKLSEIVGLRSQLREGRASLREKEEQLLSLRDSFSSKQASLELGEGELPAACLKPALTPVDPAEPQDALATCESDEAKMRRQAGVAAAASLVSVDGEAEAGGESGTRALRREVGRLQAELAAERRARERQGASFAEERRVWLEEKEKVIEYQKQLQLSYVEMYQRNQQLERRLRERGAAGGASTPTPQHGEEKKAWTPSRLERIESTEI

SEQ ID NO: 815055 - protein, 673 aa, Homo sapiens; identical to SEQ ID NO: 815054

SEQ ID NO: 815056 - protein, 673 aa, Homo sapiens; identical to SEQ ID NO: 815054

SEQ ID NO: 815057 - protein, 291 aa, Homo sapiens
SGVLRFAPGSADSGPKMATELEYESVLCVKPDVSVYRIPPRASNRGYRASDWKLDQPDWTGRLRITSKGKTAYIKLEDKVSGELFAQAPVEQYPGIAVETVTDSSRYFVIRIQDGTGRSAFIGIGFTDRGDAFDFNVSLQDHFKWVKQESEISKESQEMDARPKLDLGFKEGQTIKLCIGNITNKKGGASKPRTARGGGLSLLPPPPGGKVTIPPPSSSVAISNHVTPPPIPKSNHGGSDADILLDLDSPAPVTTPAPTPVSVSNDLWGDFSTASSSVPNQAPQPSNWVQF

SEQ ID NO: 815058 - protein, 118 aa, Homo sapiens
SGVLRFAPGSADSGPKMATELEYESVLCVKPDVSVYRIPPRASNRGYRASDWKLDQPDWTGRLRITSKGKTAYIKLEDKVSGELFAQAPVEQYPGIAVETVTDSSRYFVIRIQDGTGG

SEQ ID NO: 815059 - protein, 136 aa, Homo sapiens
SGVLRFAPGSADSGPKMATELEYESVLCVKPDVSVYRIPPRASNRGYRASDWKLDQPDWTGRLRITSKGKTAYIKLEDKVSGELFAQAPVEQYPGIAVETVTDSSRYFVIRIQDGTGKRTGILSGTKLGKQVNAQP

SEQ ID NO: 815060 - protein, 291 aa, Homo sapiens; identical to SEQ ID NO: 815057

SEQ ID NO: 815061 - protein, 287 aa, Homo sapiens
SGVLRFAPGSADSGPKMATELEYESVLCVKPDVSVYRIPPRASNRGYRASDWKLDQPDWTGRLRITSKGKTAYIKLEDKVSGELFAQAPVEQYPGIAVETVTDSSRYFVIRIQDGTGRSAFIGIGFTDRGDAFDFNVSLQDHFKWVKQESEISKESQEMDARPKLDLGFKEGQTIKLCIGNITNKKGGASKPRTARGGGLSLLPPPPGGKVTIPPPSSSVAISNHVTPPPIPKSNHGGSDADILLDLDSPAPVTTTTAIQLGPVLNGIGRTLRTDLRNKNDLEGTNL

SEQ ID NO: 815062 - protein, 306 aa, Homo sapiens
THTHTHTHTHTHTFPVPHAHLWVIVLLATLDYLIYFCTVVNFVTNCHHPPFGFSFSSFTSEQRASDWKLDQPDWTGRLRITSKGKTAYIKLEDKVSGELFAQAPVEQYPGIAVETVTDSSRYFVIRIQDGTGRSAFIGIGFTDRGDAFDFNVSLQDHFKWVKQESEISKESQEMDARPKLDLGFKEGQTIKLCIGNITNKKGGASKPRTARGGGLSLLPPPPGGKVTIPPPSSSVAISNHVTPPPIPKSNHGGSDADILLDLDSPAPVTTPAPTPVSVSNDLWGDFSTASSSVPNQAPQPSNWVQF

SEQ ID NO: 815063 - protein, 275 aa, Homo sapiens
SGVLRFAPGSADSGPKMATELEYESVLCVKPDVSVYRIPPRASNRGYRASDWKLDQPDWTGRLRIRELFAQAPVEQYPGIAVETVTDSSRYFVIRIQDGTGRSAFIGIGFTDRGDAFDFNVSLQDHFKWVKQESEISKESQEMDARPKLDLGFKEGQTIKLCIGNITNKKGGASKPRTARGGGLSLLPPPPGGKVTIPPPSSSVAISNHVTPPPIPKSNHGGSDADILLDLDSPAPVTTPAPTPVSVSNDLWGDFSTASSSVPNQAPQPSNWVQF

SEQ ID NO: 815064 - protein, 276 aa, Homo sapiens
SGVLRFAPGSADSGPKMATELEYESVLCVKPDVSVYRIPPRASNRGYRASDWKLDQPDWTGRLRITSKGKTAYIKLEDKVSGELFAQAPVEQYPGIAVETVTDSSRYFVIRIQDGTGRSAFIGIGFTDRGDAFDFNVSLQDHFKWVKQESEISKESQEMDARPKLDLGFKEGQTIKLCIGNITNKKGGASKPRTARGGGLSLLPPPPGGKVTIPPPSSSVAISNHVTPPPIPKSNHGGSDADILLDLDSPAPVTTPAPTPVSVSNDLWGDFSTASR

SEQ ID NO: 815065 - protein, 153 aa, Homo sapiens
SGVLRFAPGSADSGPKMATELEYESVLCVKPDVSVYRIPPRASNRGYRASDWKLDQPDWTGRLRITSKGKTAYIKLEDKVSGELFAQAPVEQYPGIAVETVTDSSRYFVIRIQDGTGRSAFIGIGFTDRGDAFDFNVSLQDHFNSLQVSEACP

SEQ ID NO: 815066 - protein, 91 aa, Homo sapiens
HRGSLPKWLFPNADSKALDLLDKMLTFNPHKRIEVEQALAHPYLEQYYDPSDEPIAEAPFKFDMELDDLPKEKLKELIFEETARFQPGYRS

SEQ ID NO: 815067 - protein, 360 aa, Homo sapiens [sequence omitted]

SEQ ID NO: 815068 - protein, 700 aa, Homo sapiens
MVPQMSSRFALHVVTCVRAVSCSSSCMGMSVLLGFSRWFFRPSPVGGGVGGAHAHLLILLNFCNPTAGQTSWATPFFRARSHKDRISWTFGSYQYWALCNDLFTKQRYWKMFWMWCYGKSTGLGPIQLGSELPPAYNCGWLWASHSASLLSSSASDCQLESGSNITCLVYGKDYKNTFQLFSIVLQSKYSVNSKSFYMLLYFTKFCCEVSLKCLQTNVTANLRGNPLTNQRRNPPVRNLQGSELITPKLGVCNGVFEALWEYSTGPSLRDLTVFPVVQILYKAIRIIIFLVQQRSLVPFSPLCDGLLSAVAQQFQMAVVDQHLRLASSLCLLRTNTFRAGLDHLRGTGNTPRLWKQVQTPTPGPEAKGAGFGSGQREAVQGWVFLGTGLAFLTLEEGAVRRRNSGGDGGIGPHGAEMDTGLVLLSLVPRTAEDDIIFRWRGESGGRSCPVMCLLQVKVGDKVSADDEAEATVKVVIGGLPAAGRACSDAEDTLCLHVTLAGLGEVEDQGEEVQWGDQVGCNHRTSGGAVARGRRLSGWACVVAEHVVWAVVLDPAMSGQGYRASQHRQSRLSMESRKLSGAAWGTVRPAISPSLMVTLRWWQEQGEREEGPRPALVTKYPMEDASANPVGFLGTSHWLSYLLQIHSVVTEFLPNTLERQKPGAGSAAGQSPFSGNAWSCWSLRERKTSFSRTQAKKANVQ

SEQ ID NO: 815069 - protein, 755 aa, Homo sapiens
MGMSVLLGFSRWFFRPSPVGGGVGGAHAHLLILLNFCNPTAGQTSWATPFFRARSHKDRISWTFGSYQYWALCNDLFTKQRYWKMFWMWCYGKSTGLGPIQLGSELPPAYNCGWLWASHSASLLSSSASDCQLESGSNITCLVYGKDYKNTFQLFSIVLQSKYSVNSKSFYMLLYFTKFCCEVSLKCLQTNVTANLRGNPLTNQRRNPPVRNLQGSELITPKLGVCNGVFEALWEYSTGPSLRDLTVFPVVQILYKAIRIIIFLVQQRSLVPFSPLCDGLLSAVAQQFQMAVWTSIWLASSLCLLRTNTFRAGLDHLRGTGNTPRLWKQVQTPTPGPEAKGAGFGSGQREAVQGWVFLGTGLAFLTLEEGAVRRRNSGGDGGIGPHGAEMDTGLVLLSLVPRTAEDDIIFRWRGESGGRSCPVMCLLQVKVGDKVSADDEAEATVKVVIGGLPAAGRACSDAEDTLCLHVTLAGLGEVEDQGEEVQWGDQVGCNHRTSGGAVARGRRLSGWACVVAEHVVWAVVLDPAMSGQWYRASQHRQSRLSMESRKLSGAAWGTVRPAISPSLMVTLRWWQEQGEREEGPRPALVTKYPMEDASANPVGFLGTSHWLSYLLQIHSVVTEFLPNTLERQKPGAGSAAGQSPFSGNAWSCWSLRERKTSFSRTQAKKANVQSFVIFFIFFYLFIFEIESCSVAQAGVQWRDLHSLQLPPPGVKQFCLSLPSSWDYRHTPPHPANFCVFSRDGFTMSARLVSNS

SEQ ID NO: 815070 - protein, 360 aa, Homo sapiens [sequence omitted]

SEQ ID NO: 815071 - protein, 360 aa, Homo sapiens [sequence omitted]

SEQ ID NO: 815072 - protein, 360 aa, Homo sapiens [sequence omitted]

SEQ ID NO: 815073 - protein, 740 aa, Homo sapiens
MSSSFVIFFIFFYLFIFEIESCSVAQAGVQWRDLHSLQLPPPGVKQFCLSLPSSWDYRHTPPHPANFCVFSRDGFTMSARLVIKLLTSDDSASQSAGITGVSHCTQPVMFLWGSTNVCVLKADDYSKNVNSSSFPFEGKFCLYLGIRRTLWAIVASCTQSHPSTTGTHRKQQPAYFQRKGIFNHQCLEKLFCFPLPSVLFPNFLPKFRVCVFRIIMSHIHTSGLQMLSLESTGNMTPVPCSGTVTCDVLGCVPSTGIPAVSARCRTTMLQTQAWERHVKIKILGKKAPDWVEVGEESWNFVARRSHCPFCLVRLDSNRSQLSAMKVVGEAGEAPLWWDPGQGKPECVKKGCGGVRCPRTLGQRFQTWNKALEEDLLPVSSAGPRVSSPCAEGPVLRPVWRVRQGPIGHVIIPSACLLFNPRECSFFILPLKSKLFPFHGELARLYRLGNVGFLRWNHLHKEEEGTKTTDETHDRAEHLEANPGCFSRIALWLGAVVHTCELQHFGRLRQVDCLNPGVRDQPGQHMGHPTAPGSAKKLKISQAWCHEPVVSTTQEAEAGGSLEPGRSRLQCTIIVPLHCSLGDNLFSKLLLKVYCITYSKKQWFSNTFITDILLLNEISRTFSALNKQGWEPVYLPQKHNVPAIEEPKNGDGKLRGEQMSQKTEQLRKQNKTTDDCERLHSGPRKDRELAAWASLSGRQQEGLARELSTVIYTSLKVQEEMIKAIGEVIQIGEGQAMADKT

SEQ ID NO: 815074 - protein, 360 aa, Homo sapiens [sequence omitted]

SEQ ID NO: 815075 - protein, 233 aa, Homo sapiens
MAAAAAAGAGPEMVRGQVFDVGPRYTNLSYIGEGAYGMVCSAYDNVNKVRVAIKKISPFEHQTYCQRTLREIKILLRFRHENIIGINDIIRAPTIEQMKDVYIVQDLMETDLYKLLKTQHLSNDHICYFLYQILRGLKYIHSANVLHRDLKPSNLLLNTTCDLKICDFGLARVADPDHDHTGFLTEYVATRWYRAPEIMLNSKGYTKSIDIWSVGCILADFGILDPIQETLMI

SEQ ID NO: 815076 - protein, 785 aa, Homo sapiens
MAAFPAALNRPTGARARRRRISAHSAASAAAAVVVAGTARGMVPGSEGPARAGSVVADVVFVIEGTANLGPYFEGLRKHYLLPAIEYFNGGPPAETDFGGDYGGTQYSLVVFNTVDCAPESYVQCHAPTSSAYEFVTWLDGIKFMGGGGESCSLIAEGLSTALQLFDDFKKMREQIGQTHRVCLLICNSPPYLLPAVESTTYSGCTTENLVQQIGERGIHFSIVSPRKLPALRLLFEKAAPPALLEPLQPPTDVSQDPRHMVLVRGLVLPVGGGSAPGPLQSKQPVPLPPAAPSGATLSAAPQQPLPPVPPQYQVPGNLSAAQVAAQNAVEAAKNQKAGLGPRFSPITPLQQAAPGVGPPFSQAPAPQLPPGPPGAPKPPPASQPSLVSTVAPGSGLAPTAQPGAPSMAGTVAPGGVSGPSPAQLGAPALGGQQSVSNKLLAWSGVLEWQEKPKPASVDANTKLTRSLPCQVYVNHGENLKTEQWPQKLIMQLIPQQLLTTLGPLFRNSRMVQFHFTNKDLESLKGLYRIMGNGFAGCVHFPHTAPCEVRVLMLLYSSKKKIFMGLIPYDQSGFVNGIRQVITNHKQVQQQKLEQQQRGMGGQQAPPGLGPILEDQARPSQNLLQLRPPQPQPQGTVGASGATGQPQPQGTAQPPPGAPQGPPGAASGPPPPGPILRPQNPGANPQLRSLLLNPPPPQTGVPPPQASLHHLPSPGPHNFPLGLHCQVRGPGGGQRSGLSVPAAPGLEHQDRVLLGSKDIGSKNEGSPMPGLQPSVMEDDILMDLI

SEQ ID NO: 815077 - protein, 636 aa, Homo sapiens
NKSWYWAAPRRLRPLRGIHFSIVSPRKLPALRLLFEKAAPPALLEPLQPPTDVSQDPRHMVLVRGLVLPVGGGSAPGPLQSKQPVPLPPAAPSGATLSAAPQQPLPPVPPQYQVPGNLSAAQVAAQNAVEAAKNQKAGLGPRFSPITPLQQAAPGVGPPFSQAPAPQLPPGPPGAPKPPPASQPSLVSTVAPGSGLAPTAQPGAPSMAGTVAPGGVSGPSPAQLGAPALGGQQSVSNKLLAWSGVLEWQEKPKPASVDANTKLTRSLPCQVYVNHGENLKTEQWPQKLIMQLIPQQLLTTLGPLFRNSRMVQFHFTNKDLESLKGLYRIMGNGFAGCVHFPHTAPCEVRVLMLLYSSKKKIFMGLIPYDQSGFVNGIRQVITNHKQVQQQKLEQQQRGMGGQQAPPGLGPILEDQARPSQNLLQLRPPQPQPQGTVGASGATGQPQPQGTAQPPPGAPQGPPGAASGPPPPGPILRPQNPGANPQLRSLLLNPPPPQTGVPPPQASLHHLQPPGAPALLPPPHQGLGQPQLGPPLLHPPPAQSWPAQLPPRAPLPAAKRKREGEGRVFREKWERAYFFVEVKSMPMCLICKQIVSVLKEYNLKRHYESKHSKSYDQYTEQTRDAILNELKKGLKCQ

SEQ ID NO: 815078 - protein, 837 aa, Homo sapiens
MAAFPAALNRPTGARARRRRISAHSAASAAAAVVVAGTARGMVPGSEGPARAGSVVADVVFVIEGTANLGPYFEGLRKHYLLPAIEYFNGGPPAETDFGGDYGGTQYSLVVFNTVDCAPESYVQCHAPTSSAYEFVTWLDGIKFMGGGGESCSLIAEGLSTALQLFDDFKKMREQIGQTHRVCLLICNSPPYLLPAVESTTYSGCTTENLVQQIGERGIHFSIVSPRKLPALRLLFEKAAPPALLEPLQPPTDVSQDPRHMVLVRGLVLPVGGGSAPGPLQSKQPVPLPPAAPSGATLSAAPQQPLPPVPPQYQVPGNLSAAQVAAQNAVEAAKNQKAGLGPRFSPITPLQQAAPGVGPPFSQAPAPQLPPGPPGAPKPPPASQPSLVSTVAPGSGLAPTAQPGAPSMAGTVAPGGVSGPSPAQLGAPALGGQQSVSNKLLAWSGVLEWQEKPKPASVDANTKLTRSLPCQVYVNHGENLKTEQWPQKLIMQLIPQQLLTTLGPLFRNSRMVQFHFTNKDLESLKGLYRIMGNGFAGCVHFPHTAPCEVRVLMLLYSSKKKIFMGLIPYDQSGFVNGIRQVITNHKQVQQQKLEQQQRGMGGQQAPPGLGPILEDQARPSQNLLQLRPPQPQPQGTVGASGATGQPQPQGTAQPPPGAPQGPPGAASGPPPPGPILRPQNPGANPQLRSLLLNPPPPQTGVPPPQASLHHLQPPGAPALLPPPHQGLGQPQLGPPLLHPPPAQSWPAQLPPRAPLPAAKRKREGEGRVFREKWERAYFFVEVKSMPMCLICKQIVSVLKEYNLKRHYESKHSKSYDQYTEQTRDAILNELKKGLKCQ

SEQ ID NO: 815079 - protein, 666 aa, Homo sapiens
MREQIGQTHRVCLLICNSPPYLLPAVESTTYSGCTTENLVQQIGERGIHFSIVSPRKLPALRLLFEKAAPPALLEPLQPPTDVSQDPRHMVLVRGLVLPVGGGSAPGPLQSKQPVPLPPAAPSGATLSAAPQQPLPPVPPQYQVPGNLSAAQVAAQNAVEAAKNQKAGLGPRFSPITPLQQAAPGVGPPFSQAPAPQLPPGPPGAPKPPPASQPSLVSTVAPGSGLAPTAQPGAPSMAGTVAPGGVSGPSPAQLGAPALGGQQSVSNKLLAWSGVLEWQEKPKPASVDANTKLTRSLPCQVYVNHGENLKTEQWPQKLIMQLIPQQLLTTLGPLFRNSRMVQFHFTNKDLESLKGLYRIMGNGFAGCVHFPHTAPCEVRVLMLLYSSKKKIFMGLIPYDQSGFVNGIRQVITNHKQVQQQKLEQQQRGMGGQQAPPGLGPILEDQARPSQNLLQLRPPQPQPQGTVGASGATGQPQPQGTAQPPPGAPQGPPGAASGPPPPGPILRPQNPGANPQLRSLLLNPPPPQTGVPPPQASLHHLQPPGAPALLPPPHQGLGQPQLGPPLLHPPPAQSWPAQLPPRAPLPAAKRKREGEGRVFREKWERAYFFVEVKSMPMCLICKQIVSVLKEYNLKRHYESKHSKSYDQYTEQTRDAILNELKKGLKCQ

SEQ ID NO: 815080 - protein, 844 aa, Homo sapiens
MAAFPAALNRPTGARARRRRISAHSAASAAAAVVVAGTARGMVPGSEGPARAGSVVADVVFVIEGTANLGPYFEGLRKHYLLPAIEYFNGGPPAETDFGGDYGGTQYSLVVFNTVDCAPESYVQCHAPTSSAYEFVTWLDGIKGAFPHLGFMGGGGESCSLIAEGLSTALQLFDDFKKMREQIGQTHRVCLLICNSPPYLLPAVESTTYSGCTTENLVQQIGERGIHFSIVSPRKLPALRLLFEKAAPPALLEPLQPPTDVSQDPRHMVLVRGLVLPVGGGSAPGPLQSKQPVPLPPAAPSGATLSAAPQQPLPPVPPQYQVPGNLSAAQVAAQNAVEAAKNQKAGLGPRFSPITPLQQAAPGVGPPFSQAPAPQLPPGPPGAPKPPPASQPSLVSTVAPGSGLAPTAQPGAPSMAGTVAPGGVSGPSPAQLGAPALGGQQSVSNKLLAWSGVLEWQEKPKPASVDANTKLTRSLPCQVYVNHGENLKTEQWPQKLIMQLIPQQLLTTLGPLFRNSRMVQFHFTNKDLESLKGLYRIMGNGFAGCVHFPHTAPCEVRVLMLLYSSKKKIFMGLIPYDQSGFVNGIRQVITNHKQVQQQKLEQQQRGMGGQQAPPGLGPILEDQARPSQNLLQLRPPQPQPQGTVGASGATGQPQPQGTAQPPPGAPQGPPGAASGPPPPGPILRPQNPGANPQLRSLLLNPPPPQTGVPPPQASLHHLQPPGAPALLPPPHQGLGQPQLGPPLLHPPPAQSWPAQLPPRAPLPAAKRKREGEGRVFREKWERAYFFVEVKSMPMCLICKQIVSVLKEYNLKRHYESKHSKSYDQYTEQTRDAILNELKKGLKCQ

SEQ ID NO: 815081 - protein, 764 aa, Homo sapiens
  misc_feature (9)..(9): Xaa can be any naturally occurring amino acid
YYCQVLYPXSNGISSTTASLLETDFGGDYGGTQYSLVVFNTVDCAPESYVQCHAPTSSAYEFVTWLDGIKFMGGGGESCSLIAEGLSTALQLFDDFKKMREQIGQTHRVCLLICNSPPYLLPAVESTTYSGCTTENLVQQIGERGIHFSIVSPRKLPALRLLFEKAAPPALLEPLQPPTDVSQDPRHMVLVRGLVLPVGGGSAPGPLQSKQPVPLPPAAPSGATLSAAPQQPLPPVPPQYQVPGNLSAAQVAAQNAVEAAKNQKAGLGPRFSPITPLQQAAPGVGPPFSQAPAPQLPPGPPGAPKPPPASQPSLVSTVAPGSGLAPTAQPGAPSMAGTVAPGGVSGPSPAQLGAPALGGQQSVSNKLLAWSGVLEWQEKPKPASVDANTKLTRSLPCQVYVNHGENLKTEQWPQKLIMQLIPQQLLTTLGPLFRNSRMVQFHFTNKDLESLKGLYRIMGNGFAGCVHFPHTAPCEVRVLMLLYSSKKKIFMGLIPYDQSGFVNGIRQVITNHKQVQQQKLEQQQRGMGGQQAPPGLGPILEDQARPSQNLLQLRPPQPQPQGTVGASGATGQPQPQGTAQPPPGAPQGPPGAASGPPPPGPILRPQNPGANPQLRSLLLNPPPPQTGVPPPQASLHHLQPPGAPALLPPPHQGLGQPQLGPPLLHPPPAQSWPAQLPPRAPLPAAKRKREGEGRVFREKWERAYFFVEVKSMPMCLICKQIVSVLKEYNLKRHYESKHSKSYDQYTEQTRDAILNELKKGLKCQ

SEQ ID NO: 815082 - protein, 636 aa, Homo sapiens; identical to SEQ ID NO: 815077

SEQ ID NO: 815083 - protein, 459 aa, Homo sapiens
RGGRHLQSQLLGRLRQENGVNPGGGVCSEPRWHHCTPARANGAKTLSQKKNKDPKQSVSNKLLAWSGVLEWQEKPKPASVDANTKLTRSLPCQVYVNHGENLKTEQWPQKLIMQLIPQQLLTTLGPLFRNSRMVQFHFTNKDLESLKGLYRIMGNGFAGCVHFPHTAPCEVRVLMLLYSSKKKIFMGLIPYDQSGFVNGIRQVITNHKQVQQQKLEQQQRGMGGQQAPPGLGPILEDQARPSQNLLQLRPPQPQPQGTVGASGATGQPQPQGTAQPPPGAPQGPPGAASGPPPPGPILRPQNPGANPQLRSLLLNPPPPQTGVPPPQASLHHLQPPGAPALLPPPHQGLGQPQLGPPLLHPPPAQSWPAQLPPRAPLPAAKRKREGEGRVFREKWERAYFFVEVKSMPMCLICKQIVSVLKEYNLKRHYESKHSKSYDQYTEQTRDAILNELKKGLKCQ

SEQ ID NO: 815084 - protein, 636 aa, Homo sapiens; identical to SEQ ID NO: 815077

SEQ ID NO: 815085 - protein, 101 aa, Homo sapiens
VLWEHSEESEIFLVPMSLSQAAKRKREGEGRVFREKWERAYFFVEVKSMPMCLICKQIVSVLKEYNLKRHYESKHSKSYDQYTEQTRDAILNELKKGLKCQ

SEQ ID NO: 815086 - protein, 636 aa, Homo sapiens; identical to SEQ ID NO: 815077

SEQ ID NO: 815087 - protein, 636 aa, Homo sapiens; identical to SEQ ID NO: 815077

SEQ ID NO: 815088 - protein, 788 aa, Homo sapiens
MAAFPAALNRPTGARARRRRISAHSAASAAAAVVVAGTARGMVPGSEGPARAGSVVADVVFVIEGTANLGPYFEGLRKHYLLPAIEYFNGGPPAETDFGGDYGGTQYSLVVFNTVDCAPESYVQCHAPTSSAYEFVTWLDGIKFMGGGGESCSLIAEGLSTALQLFDDFKKMREQIGQTHRVCLLICNSPPYLLPAVESTTYSGCTTENLVQQIGERGIHFSIVSPRKLPALRLLFEKAAPPALLEPLQPPTDVSQDPRHMVLVRGLVLPVGGGSAPGPLQSKQPVPLPPAAPSGATLSAAPQQPLPPVPPQYQVPGNLSAAQVAAQNAVEAAKNQKAGLGPRFSPITPLQQAAPGVGPPFSQAPAPQLPPGPPGAPKPPPASQPSLVSTVAPGSGLAPTAQPGAPSMAGTVAPGGVSGPSPAQLGAPALGGQQSVSNKLLAWSGVLEWQEKPKPASVDANTKLTRSLPCQVYVNHGENLKTEQWPQKLIMQLIPQQLLTTLGPLFRNSRMVQFHFTNKDLESLKGLYRIMGNGFAGCVHFPHTAPCEVRVLMLLYSSKKKIFMGLIPYDQSGFVNGIRQVITNHKQVQQQKLEQQQRGMGGQQAPPGLGPILEDQARPSQNLLQLRPPQPQPQGTVGASGATGQPQPQGTAQPPPGAPQGPPGAASGPPPPGPILRPQNPGANPQLRSLLLNPPPPQTGVPPPQASLHHLQPPGAPALLPPPHQGLGQPQLGPPLLHPPPAQSWPAQLPPRAPLPGQMLLSGGPRGPVPQPGLQPSVMEDDILMDLI

SEQ ID NO: 815089 - protein, 786 aa, Homo sapiens
MAAFPAALNRPTGARARRRRISAHSAASAAAAVVVAGTARGMVPGSEGPARAGSVVADVVFVIEGTANLGPYFEGLRKHYLLPAIEYFNGGPPAETDFGGDYGGTQYSLVVFNTVDCAPESYVQCHAPTSSAYEFVTWLDGIKFMGGGGESCSLIAEGLSTALQLFDDFKKMREQIGQTHRVCLLICNSPPYLLPAVESTTYSGCTTENLVQQIGERGIHFSIVSPRKLPALRLLFEKAAPPALLEPLQPPTDVSQDPRHMVLVRGLVLPVGGGSAPGPLQSKQPVPLPPAAPSGATLSAAPQQPLPPVPPQYQVPGNLSAAQVAAQNAVEAAKNQKAGLGPRFSPITPLQQAAPGVGPPFSQAPAPQLPPGPPGAPKPPPASQPSLVSTVAPGSGLAPTAQPGAPSMAGTVAPGGVSGPSPAQLGAPALGGQQSVSNKLLAWSGVLEWQEKPKPASVDANTKLTRSLPCQVYVNHGENLKTEQWPQKLIMQLIPQQLLTTLGPLFRNSRMVQFHFTNKDLESLKGLYRIMGNGFAGCVHFPHTAPCEVRVLMLLYSSKKKIFMGLIPYDQSGFVNGIRQVITNHKQVQQQKLEQQQRGMGGQQAPPGLGPILEDQARPSQNLLQLRPPQPQPQGTVGASGATGQPQPQGTAQPPPGAPQGPPGAASGPPPPGPILRPQNPGANPQLRSLLLNPPPPQTGVPPPQASLHHLQPPGAPALLPPPHQGLGQPQLGPPLLHPPPAQSWPAQLPPRAPLPGKGTRGRAEVWTECPSSSWARAPRPSAPGK

SEQ ID NO: 815090 - protein, 303 aa, Homo sapiens
MAAFPAALNRPTGARARRRRISAHSAASAAAAVVVAGTARGMVPGSEGPARAGSVVADVVFVIEGTANLGPYFEGLRKHYLLPAIEYFNGGPPAETDFGGDYGGTQYSLVVFNTVDCAPESYVQCHAPTSSAYEFVTWLDGIKFMGGGGESCSLIAEGLSTALQLFDDFKKMREQIGQTHRVCLLICNSPPYLLPAVESTTYSGCTTENLVQQIGERGIHFSIVSPRKLPALRLLFEKAAPPALLEPLQPPTDVSQDPRHMVLVRGLVLPVGGGSAPGPLQSKQPVPLPPAAPSGATLSAART

SEQ ID NO: 815091 - protein, 143 aa, Homo sapiens
MAAFPAALNRPTGARARRRRISAHSAASAAAAVVVAGTARGMVPGSEGPARAGSVVADVVFVIEGTANLGPYFEGLRKHYLLPAIEYFNGGPPAETDFGGDYGGTQYSLVVFNTVDCAPESYVQCHAPTSSAYEFVTWLDGIK

SEQ ID NO: 815092 - protein, 30 aa, Homo sapiens
MLGWGSESSRSWPWWFWSCCLGGGRLTVVS

SEQ ID NO: 815093 - protein, 36 aa, Homo sapiens
MGSVSPSTLSQEAAGVSLGDAWPVPGLSIPIRKQCQ

SEQ ID NO: 815094 - protein, 184 aa, Homo sapiens
MLGWPGPPAGGWGPGAASHDGPSRESLAVPTFPALGESPGRFRTHPQRNPAHARRLLRPLRSLPSHVTWPSLGNRTPPSPASPPGTMAEECPRACAEPVAPKATAPPERTSDYYRVSADLPGRFNNPGWFRGYRTQKAVSVYRTSNQAYGSRAPTVHEMPCSGWNVPEQYSQCLPGEKHRDWPR

SEQ ID NO: 815095 - protein, 116 aa, Homo sapiens
EVGIRAVGGRAVGGESPVVVSAPLICVGTQKAVSVYRTSNQAYGSRAPTVHEMPKVFYPNSNKFSQQLAAGGMFRNNTLNVYLEKSIVTGPDNCITSCDRLNFHPSYNINRPSICD

SEQ ID NO: 815096 - protein, 136 aa, Homo sapiens
MAEECPRACAEPVAPKATAPPERTSDYYRVSADLPGRFNNPGWFRGYRTQKAVSVYRTSNQAYGSRAPTVHEMPKVFYPNSNKFSQQLAAGGMFRNNTLNVYLEKSIVTGPDNCITSCDRLNFHPSYNINRPSICD

SEQ ID NO: 815097 - protein, 107 aa, Homo sapiens
GLEAKPPLLQARLPRNCSMCRGPARAGDQHLLAACSLGLWPALEEQGQWQAEGAGEAGPFRTVISQVLPEAAFEATSPARAYCSFHGGISRGVPSTKYKAVACAELE

SEQ ID NO: 815098 - protein, 154 aa, Homo sapiens
GEPGAQQPQERPGSTGTFSGNRGLEPGSDPDLAPGHVTWPSLGNRTPPSPASPPGTMAEECPRACAEPVAPKATAPPERTSDYYRVSADLPGRFNNPGWFRGYRTQKAVSVYRTSNQAYGSRAPTVHEMPCSGWNVPEQYSQCLPGEKHRDWPR

SEQ ID NO: 815099 - protein, 163 aa, Homo sapiens
MAEECPRACAEPVAPKATAPPERTSDYYRVSADLPGRFNNPGWFRGYRTQKAVSVYRTSNQAYGSRAPTVHEMPKVFYPNSNKFSQQLAAGGMFRNNTLNVYLEKSIVTGPDNCITSWKIIIPHHPQSPDCDGTDCAAFPENIIRLRSRKICKRGREVLPFHI

SEQ ID NO: 815100 - protein, 100 aa, Homo sapiens
MAEECPRACAEPVAPKATAPPERTSDYYRVSADLPGRFNNPGWFRGYRTQKAVSVYRTSNQAYGSRAPTVHEMPTQKAVSVYRTSNQAYGSRAPTVHEMP

SEQ ID NO: 815101 - protein, 200 aa, Homo sapiens [sequence omitted]

SEQ ID NO: 815102 - protein, 176 aa, Homo sapiens
MKVLLCDLLLLSLFSSVFSSCQRDCLTCQEKLHPALDSFDLEVCILECEEKVFPSPLWTPCTKVMARSSWQLSPAAPEHVAAALYQPRASEMQHLRRMPRVRSLFQEQEEPEPGMEEAGEMEQKQLQKRFGGFTGARKSARKLANQKRFSEFMRQYLVLSMQSSQRRRTLHQNGNV

SEQ ID NO: 815103 - protein, 112 aa, Homo sapiens
MARSSWQLSPAAPEHVAAALYQPRASEMQHLRRMPRVRSLFQEQEEPEPGMEEAGEMEQKQLQKRFGGFTGARKSARKLANQKRFSEFMRQYLVLSMQSSQRRRTLHQNGNV

SEQ ID NO: 815104 - protein, 112 aa, Homo sapiens; identical to SEQ ID NO: 815103

SEQ ID NO: 815105 - protein, 112 aa, Homo sapiens; identical to SEQ ID NO: 815103

SEQ ID NO: 815106 - protein, 112 aa, Homo sapiens; identical to SEQ ID NO: 815103

SEQ ID NO: 815107 - protein, 584 aa, Homo sapiens
LVPAREHIRGLEASGKGLRQCRTRNARGTKAPQSVAPASSSRKSVSRHWHPGTSGAAELGGRSSCEDPGCPRDEERAPRMGCMKSKFLQVGGNTFSKTETSASPHCPVYVPDPTSTIKPGPNSHNSNTPGIREAGSEDIIVVALYDYEAIHHEDLSFQKGDQMVVLEESGEWWKARSLATRKEGYIPSNYVARVDSLETEEWFFKGISRKDAERQLLAPGNMLGSFMIRDSETTKGSYSLSVRDYDPRQGDTVKHYKIRTLDNGGFYISPRSTFSTLQELVDHYKKGNDGLCQKLSVPCMSSKPQKPWEKDAWEIPRESLKLEKKLGAGQFGEVWMATYNKHTKVAVKTMKPGSMSVEAFLAEANVMKTLQHDKLVKLHAVVTKEPIYIITEFMAKGSLLDFLKSDEGSKQPLPKLIDFSAQIAEGMAFIEQRNYIHRDLRAANILVSASLVCKIADFGLARVIEDNEYTAREGAKFPIKWTAPEAINFGSFTIKSDVWSFGILLMEIVTYGRIPYPGMSNPEVIRALERGYRMPRPENCPEELYNIMMRCWKNRPEERPTFEYIQSVLDDFYTATESQYQQQP

SEQ ID NO: 815108 - protein, 561 aa, Homo sapiens
GGTEDEEDDQEDDEGEEGDEDDDDDGSEGTSGAAELGGRSSCEDPGCPRDEERAPRMGCMKSKFLQVGGNTFSKTETSASPHCPVYVPDPTSTIKPGPNSHNSNTPGIREAGSEDIIVVALYDYEAIHHEDLSFQKGDQMVVLEESGEWWKARSLATRKEGYIPSNYVARVDSLETEEWFFKGISRKDAERQLLAPGNMLGSFMIRDSETTKGSYSLSVRDYDPRQGDTVKHYKIRTLDNGGFYISPRSTFSTLQELVDHYKKGNDGLCQKLSVPCMSSKPQKPWEKDAWEIPRESLKLEKKLGAGQFGEVWMATYNKHTKVAVKTMKPGSMSVEAFLAEANVMKTLQHDKLVKLHAVVTKEPIYIITEFMAKGSLLDFLKSDEGSKQPLPKLIDFSAQIAEGMAFIEQRNYIHRDLRAANILVSASLVCKIADFGLARVIEDNEYTAREGAKFPIKWTAPEAINFGSFTIKSDVWSFGILLMEIVTYGRIPYPGMSNPEVIRALERGYRMPRPENCPEELYNIMMRCWKNRPEERPTFEYIQSVLDDFYTATESQYQQQP

SEQ ID NO: 815109 - protein, 530 aa, Homo sapiens
EFLSKIQPFQEIEISTWGLPENVRLMGCMKSKFLQVGGNTFSKTETSASPHCPVYVPDPTSTIKPGPNSHNSNTPGIREAGSEDIIVVALYDYEAIHHEDLSFQKGDQMVVLEESGEWWKARSLATRKEGYIPSNYVARVDSLETEEWFFKGISRKDAERQLLAPGNMLGSFMIRDSETTKGSYSLSVRDYDPRQGDTVKHYKIRTLDNGGFYISPRSTFSTLQELVDHYKKGNDGLCQKLSVPCMSSKPQKPWEKDAWEIPRESLKLEKKLGAGQFGEVWMATYNKHTKVAVKTMKPGSMSVEAFLAEANVMKTLQHDKLVKLHAVVTKEPIYIITEFMAKGSLLDFLKSDEGSKQPLPKLIDFSAQIAEGMAFIEQRNYIHRDLRAANILVSASLVCKIADFGLARVIEDNEYTAREGAKFPIKWTAPEAINFGSFTIKSDVWSFGILLMEIVTYGRIPYPGMSNPEVIRALERGYRMPRPENCPEELYNIMMRCWKNRPEERPTFEYIQSVLDDFYTATESQYQQQP

SEQ ID NO: 815110 - protein, 92 aa, Homo sapiens
AAAYYYYCSEFKLLTMYGAMIGRTRAGPGGAQVVAARWLQHHPPGPTPPSYSQTPTLASATVSSSVQWVGWTGKSLFDSCNPQSDILRKPPS

SEQ ID NO: 815111 - protein, 382 aa, Homo sapiens
ALLPRSQWVRVGLEAIAAGPYSSPPTQTMESALAVPRLPPHDPGTPVLSVVDMHTGGEPLRIVLAGCPEVSGPTLLAKRRYMRQHLDHVRRRLMFEPRGHRDMYGAVLVPSELPDAHLGVLFLHNEGYSSMCGHAVLALGRFALDFGLVPAPPAGTREARVNIHCPCGLVTAFVACEDGRSHGPVRFHSVPAFVLATDLMVDVPGHGKVMVDIAYGGAFYAFVTAEKLGLDICSAKTRDLVDAASAVTEAVKAQFKINHPDSEDLAFLYGTILTDGKDAYTKEPTTNICVFADEQVDRSPTGSGVTARIALQYHKGLLELNQMRAFKSSATGSVFTGKAVREAKCGDFKAVIVEVSGQAHYTGTASFIIEDDDPLRDGFLLK

SEQ ID NO: 815112 - protein, 382 aa, Homo sapiens; identical to SEQ ID NO: 815111

SEQ ID NO: 815113 - protein, 237 aa, Homo sapiens
ALLPRSQWVRVGLEAIAAGPYSSPPTQTMESALAVPRLPPHDPGTPVLSVVDMHTGGEPLRIVLAGCPEVSGPTLLAKRRYMRQHLDHVRRRLMFEPRGHRDMYGAVLVPSELPDAHLGVLFLHNEGYSSMCGHAVLALGRFALDFGLVPAPPAGTREARVNIHCPCGLVTAFVACEDGRSHGPVRFHSVPAFVLATGNGRDLSSPGQSCNRDATNYINGFSGLELWQLTYSAKPCN

SEQ ID NO: 815114 - protein, 237 aa, Homo sapiens; identical to SEQ ID NO: 815113

SEQ ID NO: 815115 - protein, 220 aa, Homo sapiens
ALLPRSQWVRVGLEAIAAGPYSSPPTQTMESALAVPRLPPHDPGTPVLSVVDMHTGGEPLRIVLAGCPEVSGPTLLAKRRYMRQHLDHVRRRLMFEPRGHRDMYGAVLVPSELPDAHLGVLFLHNEGYSSMCGHAVLALGRFALDFGLVPAPPAGTREARVNIHCPCGLVTAFVACEDGRSHGPVRFHSVMGGTFPAQGRAATGTRLTTLTVFLGWNSGN

SEQ ID NO: 815116 - protein, 344 aa, Homo sapiens
ALLPRSQWVRVGLEAIAAGPYSSPPTQTMESALAVPRLPPHDPGTPVLSVVDMHTGGEPLRIVLAGCPEVSGPTLLAKRRYMRQHLDHVRRRLMFEPRGHRDMYGAVLVPSELPDAHLGVLFLHNEGYSSMCGHAVLALGRFALDFGLVPAPPAGTREARVNIHCPCGLVTAFVACEDGRSHGPVRFHSVPAFVLATDLMVDVPGHGKVMVDIAYGGAFYAFVTAEKLGLDICSAKTRDLVDAASAVTEAVKAQFKINHPDSEDLAFLYGTILTDGKDAYTKEPTTNICVFADEQVDRSPTGSGVTARIALQYHKGLLELNQMRAFKSSATGSVFTGKAVRELL

SEQ ID NO: 815117 - protein, 344 aa, Homo sapiens; identical to SEQ ID NO: 815116

SEQ ID NO: 815118 - protein, 237 aa, Homo sapiens; identical to SEQ ID NO: 815113

SEQ ID NO: 815119 - protein, 237 aa, Homo sapiens; identical to SEQ ID NO: 815113

SEQ ID NO: 815120 - protein, 2230 aa, Homo sapiens
MFKKLKQKISEEQQQLQQALAPAQASSNSSTPTRMRSRTSSFTEQLDEGTPNRESGDTQSFAQKLQLRVPSVESLFRSPIKESLFRSSSKESLVRTSSRESLNRLDLDSSTASFDPPSDMDSEAEDLVGNSDSLNKEQLIQRLRRMERSLSSYRGKYSELVTAYQMLQREKKKLQGILSQSQDKSLRRIAELREELQMDQQAKKHLQEEFDASLEEKDQYISVLQTQVSLLKQRLRNGPMNVDVLKPLPQLEPQAEVFTKEENPESDGEPVVEDGTSVKTLETLQQRVKRQENLLKRCKETIQSHKEQCTLLTSEKEALQEQLDERLQELEKIKDLHMAEKTKLITQLRDAKNLIEQLEQDKGMVIAETKRQMHETLEMKEEEIAQLRSRIKQMTTQGEELREQKEKSERAAFEELEKALSTAQKTEEARRKLKAEMDEQIKTIEKTSEEERISLQQELSRVKQEVVDVMKKSSEEQIAKLQKLHEKELARKEQELTKKLQTREREFQEQMKVALEKSQSEYLKISQEKEQQESLALEELELQKKAILTESENKLRDLQQEAETYRTRILELESSLEKSLQENKNQSKDLAVHLEAEKNKHNKEITVMVEKHKTELESLKHQQDALWTEKLQVLKQQYQTEMEKLREKCEQEKETLLKDKEIIFQAHIEEMNEKTLEKLDVKQTELESLSSELSEVLKARHKLEEELSVLKDQTDKMKQELEAKMDEQKNHHQQQVDSIIKEHEVSIQRTEKALKDQINQLELLLKERDKHLKEHQAHVENLEADIKRSEGELQQASAKLDVFQSYQSATHEQTKAYEEQLAQLQQKLLDLETERILLTKQVAEVEAQKKDVCTELDAHKIQVQDLMQQLEKQNSEMEQKVKSLTQVYESKLEDGNKEQEQTKQILVEKENMILQMREGQKKEIEILTQKLSAKEDSIHILNEEYETKFKNQEKKMEKVKQKAKEMQETLKKKLLDQEAKLKKELENTALELSQKEKQFNAKMLEMAQANSAGISDAVSRLETNQKEQIESLTEVHRRELNDVISIWEKKLNQQAEELQEIHEIQLQEKEQEVAELKQKILLFGCEKEEMNKEITWLKEEGVKQDTTLNELQEQLKQKSAHVNSLAQDETKLKAHLEKLEVDLNKSLKENTFLQEQLVELKMLAEEDKRKVSELTSKLKTTDEEFQSLKSSHEKSNKSLEDKSLEFKKLSEELAIQLDICCKKTEALLEAKTNELINISSSKTNAILSRISHCQHRTTKVKEALLIKTCTVSELEAQLRQLTEEQNTLNISFQQATHQLEEKENQIKSMKADIESLVTEKEALQKEGGNQQQAASEKESCITQLKKELSENINAVTLMKEELKEKKVEISSLSKQLTDLNVQLQNSISLSEKEAAISSLRKQYDEEKCELLDQVQDLSFKVDTLSKEKISALEQVDDWSNKFSEWKKKAQSRFTQHQNTVKELQIQLELKSKEAYEKDEQINLLKEELDQQNKRFDCLKGEMEDDKSKMEKKESNLETELKSQTARIMELEDHITQKTIEIESLNEVLKNYNQQKDIEHKELVQKLQHFQELGEEKDNRVKEAEEKILTLENQVYSMKAELETKKKELEHVNLSVKSKEEELKALEDRLESESAAKLAELKRKAEQKIAAIKKQLLSQMEEKEEQYKKGTESHLSELNTKLQEREREVHILEEKLKSVESSQSETLIVPRSAKNVAAYTEQEEADSQGCVQKTYEEKISVLQRNLTEKEKLLQRVGQEKEETVSSHFEMRCQYQERLIKLEHAEAKQHEDQSMIGHLQEELEEKNKKYSLIVAQHVEKEGGKNNIQAKQNLENVFDDVQKTLQEKELTCQILEQKIKELDSCLVRQKEVHRVEMEELTSKYEKLQALQQMDGRNKPTELLEENTEEKSKSHLVQPKLLSNMEAQHNDLEFKLAGAEREKQKLGKEIVRLQKDLRMLRKEHQQELEILKKEYDQEREEKIKQEQEDLELKHNSTLKQLMREFNTQLAQKEQELEMTIKETINKAQEVEAELLESHQEETNQLLKKIAEKDDDLKRTAKRYEEILDAREEEMTAKVRDLQTQLEELQKKYQQKLEQEENPGNDNVTIMELQTQLAQKTTLISDSKLKEQEFREQIHNLEDRLKKYEKNVYATTVGTPYKGGNLYHTDVSLFGEPTEFEYLRKVLFEYMMGRETKTMAKVITTVLKFPDDQTQKILEREDARLMFTSPRSGIF

SEQ ID NO: 815121 - protein, 248 aa, Homo sapiens
MFKKLKQKISEEQQQLQQALAPAQASSNSSTPTRMRSRTSSFTEQLDEGTPNRENASTHASKSPDSVNGSEPSIPQSGDTQSLAQKLQLRVPSVESLFRSPIKESLFRSSSKESLVRTSSRESLNRLDLDSSTASFDPPSDMDSEAEDLVGNSDSLNKEQLIQLVRRMERSLSSYRGKYTGGDIRSSQGESLAGIAAHRGSPQGPLRPRQLLSQRTMEAPFSGHTSIRGVRTSVFTTTPYEGAEQLVT

SEQ ID NO: 815122 - protein, 97 aa, Homo sapiens
DPSEQLGRKIKQEQEDLELKHNSTLKQLMREFNTQLAQKEQELEMTIKETINKAQEVEADHVLGEQEVSYYGQDLDLGPGLGLDLGPGLGLDLALEA

SEQ ID NO: 815123 - protein, 2250 aa, Homo sapiens
MFKKLKQKISEEQQQLQQALAPAQASSNSSTPTRMRSRTSSFTEQLDEGTPNRENASTHASKSPDSVNGSEPSIPQSGDTQSFAQKLQLRVPSVESLFRSPIKESLFRSSSKESLVRTSSRESLNRLDLDSSTASFDPPSDMDSEAEDLVGNSDSLNKEQLIQRLRRMERSLSSYRGKYSELVTAYQMLQREKKKLQGILSQSQDKSLRRIAELREELQMDQQAKKHLQEEFDASLEEKDQYISVLQTQVSLLKQRLRNGPMNVDVLKPLPQLEPQAEVFTKEENPESDGEPVVEDGTSVKTLETLQQRVKRQENLLKRCKETIQSHKEQCTLLTSEKEALQEQLDERLQELEKIKDLHMAEKTKLITQLRDAKNLIEQLEQDKGMVIAETKRQMHETLEMKEEEIAQLRSRIKQMTTQGEELREQKEKSERAAFEELEKALSTAQKTEEARRKLKAEMDEQIKTIEKTSEEERISLQQELSRVKQEVVDVMKKSSEEQIAKLQKLHEKELARKEQELTKKLQTREREFQEQMKVALEKSQSEYLKISQEKEQQESLALEELELQKKAILTESENKLRDLQQEAETYRTRILELESSLEKSLQENKNQSKDLAVHLEAEKNKHNKEITVMVEKHKTELESLKHQQDALWTEKLQVLKQQYQTEMEKLREKCEQEKETLLKDKEIIFQAHIEEMNEKTLEKLDVKQTELESLSSELSEVLKARHKLEEELSVLKDQTDKMKQELEAKMDEQKNHHQQQVDSIIKEHEVSIQRTEKALKDQINQLELLLKERDKHLKEHQAHVENLEADIKRSEGELQQASAKLDVFQSYQSATHEQTKAYEEQLAQLQQKLLDLETERILLTKQVAEVEAQKKDVCTELDAHKIQVQDLMQQLEKQNSEMEQKVKSLTQVYESKLEDGNKEQEQTKQILVEKENMILQMREGQKKEIEILTQKLSAKEDSIHILNEEYETKFKNQEKKMEKVKQKAKEMQETLKKKLLDQEAKLKKELENTALELSQKEKQFNAKMLEMAQANSAGISDAVSRLETNQKEQIESLTEVHRRELNDVISIWEKKLNQQAEELQEIHEIQLQEKEQEVAELKQKILLFGCEKEEMNKEITWLKEEGVKQDTTLNELQEQLKQKSAHVNSLAQDETKLKAHLEKLEVDLNKSLKENTFLQEQLVELKMLAEEDKRKVSELTSKLKTTDEEFQSLKSSHEKSNKSLEDKSLEFKKLSEELAIQLDICCKKTEALLEAKTNELINISSSKTNAILSRISHCQHRTTKVKEALLIKTCTVSELEAQLRQLTEEQNTLNISFQQATHQLEEKENQIKSMKADIESLVTEKEALQKEGGNQQQAASEKESCITQLKKELSENINAVTLMKEELKEKKVEISSLSKQLTDLNVQLQNSISLSEKEAAISSLRKQYDEEKCELLDQVQDLSFKVDTLSKEKISALEQVDDWSNKFSEWKKKAQSRFTQHQNTVKELQIQLELKSKEAYEKDEQINLLKEELDQQNKRFDCLKGEMEDDKSKMEKKESNLETELKSQTARIMELEDHITQKTIEIESLNEVLKNYNQQKDIEHKELVQKLQHFQELGEEKDNRVKEAEEKILTLENQVYSMKAELETKKKELEHVNLSVKSKEEELKALEDRLESESAAKLAELKRKAEQKIAAIKKQLLSQMEEKEEQYKKGTESHLSELNTKLQEREREVHILEEKLKSVESSQSETLIVPRSAKNVAAYTEQEEADSQGCVQKTYEEKISVLQRNLTEKEKLLQRVGQEKEETVSSHFEMRCQYQERLIKLEHAEAKQHEDQSMIGHLQEELEEKNKKYSLIVAQHVEKEGGKNNIQAKQNLENVFDDVQKTLQEKELTCQILEQKIKELDSCLVRQKEVHRVEMEELTSKYEKLQALQQMDGRNKPTELLEENTEEKSKSHLVQPKLLSNMEAQHNDLEFKLAGAEREKQKLGKEIVRLQKDLRMLRKEHQQELEILKKEYDQEREEKIKQEQEDLELKHNSTLKQLMREFNTQLAQKEQELEMTIKETINKAQEVEAELLESHQEETNQLLKKIAEKDDDLKRTAKRYEEILDAREEEMTAKVRDLQTQLEELQKKYQQKLEQEENPGNDNVTIMELQTQLAQKTTLISDSKLKEQEFREQIHNLEDRLKKYEKNVYATTVGTPYKGGNLYHTDVSLFGEPTEFEYLRKVLFEYMMGRETKTMAKVITTVLKFPDDQTQKILEREDARLMSWLRSSS

SEQ ID NO: 815124 - protein, 2250 aa, Homo sapiens
MFKKLKQKISEEQQQLQQALAPAQASSNSSTPTRMRSRTSSFTEQLDEGTPNRENASTHASKSPDSVNGSEPSIPQSGDTQSLAQKLQLRVPSVESLFRSPIKESLFRSSSKESLVRTSSRESLNRLDLDSSTASFDPPSDMDSEAEDLVGNSDSLNKEQLIQRLRRMERSLSSYRGKYSELVTAYQMLQREKKKLQGILSQSQDKSLRRIAELREELQMDQQAKKHLQEEFDASLEEKDQYISVLQTQVSLLKQRLRNGPMNVDVLKPLPQLEPQAEVFTKEENPESDGEPVVEDGTSVKTLETLQQRVKRQENLLKRCKETIQSHKEQCTLLTSEKEALQEQLDERLQELEKIKDLHMAEKTKLITQLRDAKNLIEQLEQDKGMVIAETKRQMHETLEMKEEEIAQLRSRIKQMTTQGEELREQKEKSERAAFEELEKALSTAQKTEEARRKLKAEMDEQIKTIEKTSEEERISLQQELSRVKQEVVDVMKKSSEEQIAKLQKLHEKELARKEQELTKKLQTREREFQEQMKVALEKSQSEYLKISQEKEQQESLALEELELQKKAILTESENKLRDLQQEAETYRTRILELESSLEKSLQENKNQSKDLAVHLEAEKNKHNKEITVMVEKHKTELESLKHQQDALWTEKLQVLKQQYQTEMEKLREKCEQEKETLLKDKEIIFQAHIEEMNEKTLEKLDVKQTELESLSSELSEVLKARHKLEEELSVLKDQTDKMKQELEAKMDEQKNHHQQQVDSIIKEHEVSIQRTEKALKDQINQLELLLKERDKHLKEHQAHVENLEADIKRSEGELQQASAKLDVFQSYQSATHEQTKAYEEQLAQLQQKLLDLETERILLTKQVAEVEAQKKDVCTELDAHKIQVQDLMQQLEKQNSEMEQKVKSLTQVYESKLEDGNKEQEQTKQILVEKENMILQMREGQKKEIEILTQKLSAKEDSIHILNEEYETKFKNQEKKMEKVKQKAKEMQETLKKKLLDQEAKLKKELENTALELSQKEKQFNAKMLEMAQANSAGISDAVSRLETNQKEQIESLTEVHRRELNDVISIWEKKLNQQAEELQEIHEIQLQEKEQEVAELKQKILLFGCEKEEMNKEITWLKEEGVKQDTTLNELQEQLKQKSAHVNSLAQDETKLKAHLEKLEVDLNKSLKENTFLQEQLVELKMLAEEDKRKVSELTSKLKTTDEEFQSLKSSHEKSNKSLEDKSLEFKKLSEELAIQLDICCKKTEALLEAKTNELINISSSKTNAILSRISHCQHRTTKVKEALLIKTCTVSELEAQLRQLTEEQNTLNISFQQATHQLEEKENQIKSMKADIESLVTEKEALQKEGGNQQQAASEKESCITQLKKELSENINAVTLMKEELKEKKVEISSLSKQLTDLNVQLQNSISLSEKEAAISSLRKQYDEEKCELLDQVQDLSFKVDTLSKEKISALEQVDDWSNKFSEWKKKAQSRFTQHQNTVKELQIQLELKSKEAYEKDEQINLLKEELDQQNKRFDCLKGEMEDDKSKMEKKESNLETELKSQTARIMELEDHITQKTIEIESLNEVLKNYNQQKDIEHKELVQKLQHFQELGEEKDNRVKEAEEKILTLENQVYSMKAELETKKKELEHVNLSVKSKEEELKALEDRLESESAAKLAELKRKAEQKIAAIKKQLLSQMEEKEEQYKKGTESHLSELNTKLQEREREVHILEEKLKSVESSQSETLIVPRSAKNVAAYTEQEEADSQGCVQKTYEEKISVLQRNLTEKEKLLQRVGQEKEETVSSHFEMRCQYQERLIKLEHAEAKQHEDQSMIGHLQEELEEKNKKYSLIVAQHVEKEGGKNNIQAKQNLENVFDDVQKTLQEKELTCQILEQKIKELDSCLVRQKEVHRVEMEELTSKYEKLQALQQMDGRNKPTELLEENTEEKSKSHLVQPKLLSNMEAQHNDLEFKLAGAEREKQKLGKEIVRLQKDLRMLRKEHQQELEILKKEYDQEREEKIKQEQEDLELKHNSTLKQLMREFNTQLAQKEQELEMTIKETINKAQEVEAELLESHQEETNQLLKKIAEKDDDLKRTAKRYEEILDAREEEMTAKVRDLQTQLEELQKKYQQKLEQEENPGNDNVTIMELQTQLAQKTTLISDSKLKEQEFREQIHNLEDRLKKYEKNVYATTVGTPYKGGNLYHTDVSLFGEPTEFEYLRKVLFEYMMGRETKTMAKVITTVLKFPDDQTQKILEREDARLMSWLRSSS

SEQ ID NO: 815125 - protein, 2250 aa, Homo sapiens; identical to SEQ ID NO: 815123

SEQ ID NO: 815126 - protein, 2109 aa, Homo sapiens
MDSEAEDLVGNSDSLNKEQLIQRLRRMERSLSSYRGKYSELVTAYQMLQREKKKLQGILSQSQDKSLRRIAELREELQMDQQAKKHLQEEFDASLEEKDQYISVLQTQVSLLKQRLRNGPMNVDVLKPLPQLEPQAEVFTKEENPESDGEPVVEDGTSVKTLETLQQRVKRQENLLKRCKETIQSHKEQCTLLTSEKEALQEQLDERLQELEKIKDLHMAEKTKLITQLRDAKNLIEQLEQDKGMVIAETKRQMHETLEMKEEEIAQLRSRIKQMTTQGEELREQKEKSERAAFEELEKALSTAQKTEEARRKLKAEMDEQIKTIEKTSEEERISLQQELSRVKQEVVDVMKKSSEEQIAKLQKLHEKELARKEQELTKKLQTREREFQEQMKVALEKSQSEYLKISQEKEQQESLALEELELQKKAILTESENKLRDLQQEAETYRTRILELESSLEKSLQENKNQSKDLAVHLEAEKNKHNKEITVMVEKHKTELESLKHQQDALWTEKLQVLKQQYQTEMEKLREKCEQEKETLLKDKEIIFQAHIEEMNEKTLEKLDVKQTELESLSSELSEVLKARHKLEEELSVLKDQTDKMKQELEAKMDEQKNHHQQQVDSIIKEHEVSIQRTEKALKDQINQLELLLKERDKHLKEHQAHVENLEADIKRSEGELQQASAKLDVFQSYQSATHEQTKAYEEQLAQLQQKLLDLETERILLTKQVAEVEAQKKDVCTELDAHKIQVQDLMQQLEKQNSEMEQKVKSLTQVYESKLEDGNKEQEQTKQILVEKENMILQMREGQKKEIEILTQKLSAKEDSIHILNEEYETKFKNQEKKMEKVKQKAKEMQETLKKKLLDQEAKLKKELENTALELSQKEKQFNAKMLEMAQANSAGISDAVSRLETNQKEQIESLTEVHRRELNDVISIWEKKLNQQAEELQEIHEIQLQEKEQEVAELKQKILLFGCEKEEMNKEITWLKEEGVKQDTTLNELQEQLKQKSAHVNSLAQDETKLKAHLEKLEVDLNKSLKENTFLQEQLVELKMLAEEDKRKVSELTSKLKTTDEEFQSLKSSHEKSNKSLEDKSLEFKKLSEELAIQLDICCKKTEALLEAKTNELINISSSKTNAILSRISHCQHRTTKVKEALLIKTCTVSELEAQLRQLTEEQNTLNISFQQATHQLEEKENQIKSMKADIESLVTEKEALQKEGGNQQQAASEKESCITQLKKELSENINAVTLMKEELKEKKVEISSLSKQLTDLNVQLQNSISLSEKEAAISSLRKQYDEEKCELLDQVQDLSFKVDTLSKEKISALEQVDDWSNKFSEWKKKAQSRFTQHQNTVKELQIQLELKSKEAYEKDEQINLLKEELDQQNKRFDCLKGEMEDDKSKMEKKESNLETELKSQTARIMELEDHITQKTIEIESLNEVLKNYNQQKDIEHKELVQKLQHFQELGEEKDNRVKEAEEKILTLENQVYSMKAELETKKKELEHVNLSVKSKEEELKALEDRLESESAAKLAELKRKAEQKIAAIKKQLLSQMEEKEEQYKKGTESHLSELNTKLQEREREVHILEEKLKSVESSQSETLIVPRSAKNVAAYTEQEEADSQGCVQKTYEEKISVLQRNLTEKEKLLQRVGQEKEETVSSHFEMRCQYQERLIKLEHAEAKQHEDQSMIGHLQEELEEKNKKYSLIVAQHVEKEGGKNNIQAKQNLENVFDDVQKTLQEKELTCQILEQKIKELDSCLVRQKEVHRVEMEELTSKYEKLQALQQMDGRNKPTELLEENTEEKSKSHLVQPKLLSNMEAQHNDLEFKLAGAEREKQKLGKEIVRLQKDLRMLRKEHQQELEILKKEYDQEREEKIKQEQEDLELKHNSTLKQLMREFNTQLAQKEQELEMTIKETINKAQEVEAELLESHQEETNQLLKKIAEKDDDLKRTAKRYEEILDAREEEMTAKVRDLQTQLEELQKKYQQKLEQEENPGNDNVTIMELQTQLAQKTTLISDSKLKEQEFREQIHNLEDRLKKYEKNVYATTVGTPYKGGNLYHTDVSLFGEPTEFEYLRKVLFEYMMGRETKTMAKVITTVLKFPDDQTQKILEREDARLMSWLRSSS

SEQ ID NO: 815127 - protein, 1238 aa, Homo sapiens
MLRPTLRIPCSSSCAQANSAGISDAVSRLETNQKEQIESLTEVHRRELNDVISIWEKKLNQQAEELQEIHEIQLQEKEQEVAELKQKILLFGCEKEEMNKEITWLKEEGVKQDTTLNELQEQLKQKSAHVNSLAQDETKLKAHLEKLEVDLNKSLKENTFLQEQLVELKMLAEEDKRKVSELTSKLKTTDEEFQSLKSSHEKSNKSLEDKSLEFKKLSEELAIQLDICCKKTEALLEAKTNELINISSSKTNAILSRISHCQHRTTKVKEALLIKTCTVSELEAQLRQLTEEQNTLNISFQQATHQLEEKENQIKSMKADIESLVTEKEALQKEGGNQQQAASEKESCITQLKKELSENINAVTLMKEELKEKKVEISSLSKQLTDLNVQLQNSISLSEKEAAISSLRKQYDEEKCELLDQVQDLSFKVDTLSKEKISALEQVDDWSNKFSEWKKKAQSRFTQHQNTVKELQIQLELKSKEAYEKDEQINLLKEELDQQNKRFDCLKGEMEDDKSKMEKKESNLETELKSQTARIMELEDHITQKTIEIESLNEVLKNYNQQKDIEHKELVQKLQHFQELGEEKDNRVKEAEEKILTLENQVYSMKAELETKKKELEHVNLSVKSKEEELKALEDRLESESAAKLAELKRKAEQKIAAIKKQLLSQMEEKEEQYKKGTESHLSELNTKLQEREREVHILEEKLKSVESSQSETLIVPRSAKNVAAYTEQEEADSQGCVQKTYEEKISVLQRNLTEKEKLLQRVGQEKEETVSSHFEMRCQYQERLIKLEHAEAKQHEDQSMIGHLQEELEEKNKKYSLIVAQHVEKEGGKNNIQAKQNLENVFDDVQKTLQEKELTCQILEQKIKELDSCLVRQKEVHRVEMEELTSKYEKLQALQQMDGRNKPTELLEENTEEKSKSHLVQPKLLSNMEAQHNDLEFKLAGAEREKQKLGKEIVRLQKDLRMLRKEHQQELEILKKEYDQEREEKIKQEQEDLELKHNSTLKQLMREFNTQLAQKEQELEMTIKETINKAQEVEAELLESHQEETNQLLKKIAEKDDDLKRTAKRYEEILDAREEEMTAKVRDLQTQLEELQKKYQQKLEQEENPGNDNVTIMELQTQLAQKTTLISDSKLKEQEFREQIHNLEDRLKKYEKNVYATTVGTPYKGGNLYHTDVSLFGEPTEFEYLRKVLFEYMMGRETKTMAKVITTVLKFPDDQTQKILEREDARLMFTSPRSGIF

SEQ ID NO: 815128 - protein, 1219 aa, Homo sapiens
PALAYQDTESKTPYVKKIESLTEVHRRELNDVISIWEKKLNQQAEELQEIHEIQLQEKEQEVAELKQKILLFGCEKEEMNKEITWLKEEGVKQDTTLNELQEQLKQKSAHVNSLAQDETKLKAHLEKLEVDLNKSLKENTFLQEQLVELKMLAEEDKRKVSELTSKLKTTDEEFQSLKSSHEKSNKSLEDKSLEFKKLSEELAIQLDICCKKTEALLEAKTNELINISSSKTNAILSRISHCQHRTTKVKEALLIKTCTVSELEAQLRQLTEEQNTLNISFQQATHQLEEKENQIKSMKADIESLVTEKEALQKEGGNQQQAASEKESCITQLKKELSENINAVTLMKEELKEKKVEISSLSKQLTDLNVQLQNSISLSEKEAAISSLRKQYDEEKCELLDQVQDLSFKVDTLSKEKISALEQVDDWSNKFSEWKKKAQSRFTQHQNTVKELQIQLELKSKEAYEKDEQINLLKEELDQQNKRFDCLKGEMEDDKSKMEKKESNLETELKSQTARIMELEDHITQKTIEIESLNEVLKNYNQQKDIEHKELVQKLQHFQELGEEKDNRVKEAEEKILTLENQVYSMKAELETKKKELEHVNLSVKSKEEELKALEDRLESESAAKLAELKRKAEQKIAAIKKQLLSQMEEKEEQYKKGTESHLSELNTKLQEREREVHILEEKLKSVESSQSETLIVPRSAKNVAAYTEQEEADSQGCVQKTYEEKISVLQRNLTEKEKLLQRVGQEKEETVSSHFEMRCQYQERLIKLEHAEAKQHEDQSMIGHLQEELEEKNKKYSLIVAQHVEKEGGKNNIQAKQNLENVFDDVQKTLQEKELTCQILEQKIKELDSCLVRQKEVHRVEMEELTSKYEKLQALQQMDGRNKPTELLEENTEEKSKSHLVQPKLLSNMEAQHNDLEFKLAGAEREKQKLGKEIVRLQKDLRMLRKEHQQELEILKKEYDQEREEKIKQEQEDLELKHNSTLKQLMREFNTQLAQKEQELEMTIKETINKAQEVEAELLESHQEETNQLLKKIAEKDDDLKRTAKRYEEILDAREEEMTAKVRDLQTQLEELQKKYQQKLEQEENPGNDNVTIMELQTQLAQKTTLISDSKLKEQEFREQIHNLEDRLKKYEKNVYATTVGTPYKGGNLYHTDVSLFGEPTEFEYLRKVLFEYMMGRETKTMAKVITTVLKFPDDQTQKILEREDARLMFTSPRSGIF

SEQ ID NO: 815129 - protein, 1112 aa, Homo sapiens
SVVAAEVRGDETKLKAHLEKLEVDLNKSLKENTFLQEQLVELKMLAEEDKRKVSELTSKLKTTDEEFQSLKSSHEKSNKSLEDKSLEFKKLSEELAIQLDICCKKTEALLEAKTNELINISSSKTNAILSRISHCQHRTTKVKEALLIKTCTVSELEAQLRQLTEEQNTLNISFQQATHQLEEKENQIKSMKADIESLVTEKEALQKEGGNQQQAASEKESCITQLKKELSENINAVTLMKEELKEKKVEISSLSKQLTDLNVQLQNSISLSEKEAAISSLRKQYDEEKCELLDQVQDLSFKVDTLSKEKISALEQVDDWSNKFSEWKKKAQSRFTQHQNTVKELQIQLELKSKEAYEKDEQINLLKEELDQQNKRFDCLKGEMEDDKSKMEKKESNLETELKSQTARIMELEDHITQKTIEIESLNEVLKNYNQQKDIEHKELVQKLQHFQELGEEKDNRVKEAEEKILTLENQVYSMKAELETKKKELEHVNLSVKSKEEELKALEDRLESESAAKLAELKRKAEQKIAAIKKQLLSQMEEKEEQYKKGTESHLSELNTKLQEREREVHILEEKLKSVESSQSETLIVPRSAKNVAAYTEQEEADSQGCVQKTYEEKISVLQRNLTEKEKLLQRVGQEKEETVSSHFEMRCQYQERLIKLEHAEAKQHEDQSMIGHLQEELEEKNKKYSLIVAQHVEKEGGKNNIQAKQNLENVFDDVQKTLQEKELTCQILEQKIKELDSCLVRQKEVHRVEMEELTSKYEKLQALQQMDGRNKPTELLEENTEEKSKSHLVQPKLLSNMEAQHNDLEFKLAGAEREKQKLGKEIVRLQKDLRMLRKEHQQELEILKKEYDQEREEKIKQEQEDLELKHNSTLKQLMREFNTQLAQKEQELEMTIKETINKAQEVEAELLESHQEETNQLLKKIAEKDDDLKRTAKRYEEILDAREEEMTAKVRDLQTQLEELQKKYQQKLEQEENPGNDNVTIMELQTQLAQKTTLISDSKLKEQEFREQIHNLEDRLKKYEKNVYATTVGTPYKGGNLYHTDVSLFGEPTEFEYLRKVLFEYMMGRETKTMAKVITTVLKFPDDQTQKILEREDARLMFTSPRSGIF

SEQ ID NO: 815130 - protein, 2252 aa, Homo sapiens
MFKKLKQKISEEQQQLQQALAPAQASSNSSTPTRMRSRTSSFTEQLDEGTPNRENASTHASKSPDSVNGSEPSIPQSGDTQSFAQKLQLRVPSVESLFRSPIKESLFRSSSKESLVRTSSRESLNRLDLDSSTASFDPPSDMDSEAEDLVGNSDSLNKEQLIQRLRRMERSLSSYRGKYSELVTAYQMLQREKKKLQGILSQSQDKSLRRIAELREELQMDQQAKKHLQEEFDASLEEKDQYISVLQTQVSLLKQRLRNGPMNVDVLKPLPQLEPQAEVFTKEENPESDGEPVVEDGTSVKTLETLQQRVKRQENLLKRCKETIQSHKEQCTLLTSEKEALQEQLDERLQELEKIKDLHMAEKTKLITQLRDAKNLIEQLEQDKGMVIAETKRQMHETLEMKEEEIAQLRSRIKQMTTQGEELREQKEKSERAAFEELEKALSTAQKTEEARRKLKAEMDEQIKTIEKTSEEERISLQQELSRVKQEVVDVMKKSSEEQIAKLQKLHEKELARKEQELTKKLQTREREFQEQMKVALEKSQSEYLKISQEKEQQESLALEELELQKKAILTESENKLRDLQQEAETYRTRILELESSLEKSLQENKNQSKDLAVHLEAEKNKHNKEITVMVEKHKTELESLKHQQDALWTEKLQVLKQQYQTEMEKLREKCEQEKETLLKDKEIIFQAHIEEMNEKTLEKLDVKQTELESLSSELSEVLKARHKLEEELSVLKDQTDKMKQELEAKMDEQKNHHQQQVDSIIKEHEVSIQRTEKALKDQINQLELLLKERDKHLKEHQAHVENLEADIKRSEGELQQASAKLDVFQSYQSATHEQTKAYEEQLAQLQQKLLDLETERILLTKQVAEVEAQKKDVCTELDAHKIQVQDLMQQLEKQNSEMEQKVKSLTQVYESKLEDGNKEQEQTKQILVEKENMILQMREGQKKEIEILTQKLSAKEDSIHILNEEYETKFKNQEKKMEKVKQKAKEMQETLKKKLLDQEAKLKKELENTALELSQKEKQFNAKMLEMAQANSAGISDAVSRLETNQKEQIESLTEVHRRELNDVISIWEKKLNQQAEELQEIHEIQLQEKEQEVAELKQKILLFGCEKEEMNKEITWLKEEGVKQDTTLNELQEQLKQKSAHVNSLAQDETKLKAHLEKLEVDLNKSLKENTFLQEQLVELKMLAEEDKRKVSELTSKLKTTDEEFQSLKSSHEKSNKSLEDKSLEFKKLSEELAIQLDICCKKTEALLEAKTNELINISSSKTNAILSRISHCQHRTTKVKEALLIKTCTVSELEAQLRQLTEEQNTLNISFQQATHQLEEKENQIKSMKADIESLVTEKEALQKEGGNQQQAASEKESCITQLKKELSENINAVTLMKEELKEKKVEISSLSKQLTDLNVQLQNSISLSEKEAAISSLRKQYDEEKCELLDQVQDLSFKVDTLSKEKISALEQVDDWSNKFSEWKKKAQSRFTQHQNTVKELQIQLELKSKEAYEKDEQINLLKEELDQQNKRFDCLKGEMEDDKSKMEKKESNLETELKSQTARIMELEDHITQKTIEIESLNEVLKNYNQQKDIEHKELVQKLQHFQELGEEKDNRVKEAEEKILTLENQVYSMKAELETKKKELEHVNLSVKSKEEELKALEDRLESESAAKLAELKRKAEQKIAAIKKQLLSQMEEKEEQYKKGTESHLSELNTKLQEREREVHILEEKLKSVESSQSETLIVPRSAKNVAAYTEQEEADSQGCVQKTYEEKISVLQRNLTEKEKLLQRVGQEKEETVSSHFEMRCQYQERLIKLEHAEAKQHEDQSMIGHLQEELEEKNKKYSLIVAQHVEKEGGKNNIQAKQNLENVFDDVQKTLQEKELTCQILEQKIKELDSCLVRQKEVHRVEMEELTSKYEKLQALQQMDGRNKPTELLEENTEEKSKSHLVQPKLLSNMEAQHNDLEFKLAGAEREKQKLGKEIVRLQKDLRMLRKEHQQELEILKKEYDQEREEKIKQEQEDLELKHNSTLKQLMREFNTQLAQKEQELEMTIKETINKAQEVEAELLESHQEETNQLLKKIAEKDDDLKRTAKRYEEILDAREEEMTAKVRDLQTQLEELQKKYQQKLEQEENPGNDNVTIMELQTQLAQKTTLISDSKLKEQEFREQIHNLEDRLKKYEKNVYATTVGTPYKGGNLYHTDVSLFGEPTEFEYLRKVLFEYMMGRETKTMAKVITTVLKFPDDQTQKILEREDARLMFTSPRSGIF

SEQ ID NO: 815131 - protein, 2252 aa, Homo sapiens; identical to SEQ ID NO: 815130

SEQ ID NO: 815132 - protein, 2252 aa, Homo sapiens; identical to SEQ ID NO: 815130

SEQ ID NO: 815133 - protein, 2252 aa, Homo sapiens; identical to SEQ ID NO: 815130

SEQ ID NO: 815134 - protein, 2252 aa, Homo sapiens; identical to SEQ ID NO: 815130

SEQ ID NO: 815135 - protein, 521 aa, Homo sapiens
EEEMTAKVRDLQTQLEELQKKYQQKLEQEENPGNDNVTIMELQTQLAQKTTLISDSKLKEQEFREQIHNLEDRLKKYEKNVYATTVGTPYKGGNLYHTDVSLFGEPTEFEYLRKVLFEYMMGRETKTMAKVITTVLKFPDDQTQKILEREDARLMSWLRSSSSRRVTLGDCCLENCPHLLLFENEVVIQGPSSSQKTKKNLAHRKLQTAFNMEAQHNDLEFKLAGAEREKQKLGKEIVRLQKDLRMLRKEHQQELEILKKEYDQEREEKIKQEQEDLELKHNSTLKQLMREFNTQLAQKEQELEMTIKETINKAQEVEAELLESHQEETNQLLKKIAEKDDDLKRTAKRYEEILDAREEEMTAKVRDLQTQLEELQKKYQQKLEQEENPGNDNVTIMELQTQLAQKTTLISDSKLKEQEFREQIHNLEDRLKKYEKNVYATTVGTPYKGGNLYHTDVSLFGEPTEFEYLRKVLFEYMMGRETKTMAKVITTVLKFPDDQTQKILEREDARLMFTSPRSGIF

SEQ ID NO: 815136 - protein, 2215 aa, Homo sapiens
MFKKLKQKISEEQQQLQQALAPAQASSNSSTPTRMRSRTSSFTEQLDEGTPNRENASTHASKSPDSVNGSEPSIPQSGDTQSFAQKLQLRVPSVESLFRSPIKESLFRSSSKESLVRTSSRESLNRLDLDSSTASFDPPSDMDSEAEDLVGNSDSLNKEQLIQRLRRMERSLSSYRGKYSELVTAYQMLQREKKKLQGILSQSQDKSLRRIAELREELQMDQQAKKHLQEEFDASLEEKDQYISVLQTQVSLLKQRLRNGPMNVDVLKPLPQLEPQAEVFTKEENPESDGEPVVEDGTSVKTLETLQQRVKRQENLLKRCKETIQSHKEQCTLLTSEKEALQEQLDERLQELEKIKDLHMAEKTKLITQLRDAKNLIEQLEQDKGMVIAETKRQMHETLEMKEEEIAQLRSRIKQMTTQGEELREQKEKSERAAFEELEKALSTAQKTEEARRKLKAEMDEQIKTIEKTSEEERISLQQELSRVKQEVVDVMKKSSEEQIAKLQKLHEKELARKEQELTKKLQTREREFQEQMKVALEKSQSEYLKISQEKEQQESLALEELELQKKAILTESENKLRDLQQEAETYRTRILELESSLEKSLQENKNQSKDLAVHLEAEKNKHNKEITVMVEKHKTELESLKHQQDALWTEKLQVLKQQYQTEMEKLREKCEQEKETLLKDKEIIFQAHIEEMNEKTLEKLDVKQTELESLSSELSEVLKARHKLEEELSVLKDQTDKMKQELEAKMDEQKNHHQQQVDSIIKEHEVSIQRTEKALKDQINQLELLLKERDKHLKEHQAHVENLEADIKRSEGELQQASAKLDVFQSYQSATHEQTKAYEEQLAQLQQKLLDLETERILLTKQVAEVEAQKKDVCTELDAHKIQVQDLMQQLEKQNSEMEQKVKSLTQVYESKLEDGNKEQEQTKQILVEKENMILQMREGQKKEIEILTQKLSAKEDSIHILNEEYETKFKNQEKKMEKVKQKAKEMQETLKKKLLDQEAKLKKELENTALELSQKEKQFNAKMLEMAQANSAGISDAVSRLETNQKEQIESLTEVHRRELNDVISIWEKKLNQQAEELQEIHEIQLQEKEQEVAELKQKILLFGCEKEEMNKEITWLKEEGVKQDTTLNELQEQLKQKSAHVNSLAQDETKLKAHLEKLEVDLNKSLKENTFLQEQLVELKMLAEEDKRKVSELTSKLKTTDEEFQSLKSSHEKSNKSLEDKSLEFKKLSEELAIQLDICCKKTEALLEAKTNELINISSSKTNAILSRISHCQHRTTKVKEALLIKTCTVSELEAQLRQLTEEQNTLNISFQQATHQLEEKENQIKSMKADIESLVTEKEALQKEGGNQQQAASEKESCITQLKKELSENINAVTLMKEELKEKKVEISSLSKQLTDLNVQLQNSISLSEKEAAISSLRKQYDEEKCELLDQVQDLSFKVDTLSKEKISALEQVDDWSNKFSEWKKKAQSRFTQHQNTVKELQIQLELKSKEAYEKDEQINLLKEELDQQNKRFDCLKGEMEDDKSKMEKKESNLETELKSQTARIMELEDHITQKTIEIESLNEVLKNYNQQKDIEHKELVQKLQHFQELGEEKDNRVKEAEEKILTLENQVYSMKAELETKKKELEHVNLSVKSKEEELKALEDRLESESAAKLAELKRKAEQKIAAIKKQLLSQMEEKEEQYKKGTESHLSELNTKLQEREREVHILEEKLKSVESSQSETLIVPRSAKNVAAYTEQEEADSQGCVQKTYEEKISVLQRNLTEKEKLLQRVGQEKEETVSSHFEMRCQYQERLIKLEHAEAKQHEDQSMIGHLQEELEEKNKKYSLIVAQHVEKEGGKNNIQAKQNLENVFDDVQKTLQEKELTCQILEQKIKELDSCLVRQKEVHRVEMEELTSKYEKLQALQQMDGRNKPTELLEENTEEKSKSHLVQPKLLSNMEAQHNDLEFKLAGAEREKQKLGKEIVRLQKDLRMLRKEHQQELEILKKEYDQEREEKIKQEQEDLELKHNSTLKQLMREFNTQLAQKEQELEMTIKETINKAQEVEAELLESHQEETNQLLKKIAEKDDDLKRTAKRYEEILDAREEEMTAKVRDLQTQLEELQKKYQQKLEQEENPGNDNVTIMELQTQLAQKTTLISDSKLKEQEFREQIHNLEDRLKKYEKNVYATTVGTPYKGGNLYHTDVSLFGEPTEFEYLRKVLFEYMMGRETKV

SEQ ID NO: 815137 - protein, 235 aa, Homo sapiens
IRGWESLAKLAQKEQELEMTIKETINKAQEVEAELLESHQEETNQLLKKIAEKDDDLKRTAKRYEEILDAREEEMTAKVRDLQTQLEELQKKYQQKLEQEENPGNDNVTIMELQTQLAQKTTLISDSKLKEQEFREQIHNLEDRLKKYEKNVYATTVGTPYKGGNLYHTDVSLFGEPTEFEYLRKVLFEYMMGRETKTMAKVITTVLKFPDDQTQKILEREDARLMFTSPRSGIF

SEQ ID NO: 815138 - protein, 2154 aa, Homo sapiens
MFKKLKQKISEEQQQLQQALAPAQASSNSSTPTRMRSRTSSFTEQLDEGTPNRENASTHASKSPDSVNGSEPSIPQSGDTQSFAQKLQLRVPSVESLFRSPIKESLFRSSSKESLVRTSSRESLNRLDLDSSTASFDPPSDMDSEAEDLVGNSDSLNKEQLIQRLRRMERSLSSYRGKYSELVTAYQMLQREKKKLQGILSQSQDKSLRRIAELREELQMDQQAKKHLQEEFDASLEEKDQYISVLQTQVSLLKQRLRNGPMNVDVLKPLPQLEPQAEVFTKEENPESDGEPVVEDGTSVKTLETLQQRVKRQENLLKRCKETIQSHKEQCTLLTSEKEALQEQLDERLQELEKIKDLHMAEKTKLITQLRDAKNLIEQLEQDKGMVIAETKRQMHETLEMKEEEIAQLRSRIKQMTTQGEELREQKEKSERAAFEELEKALSTAQKTEEARRKLKAEMDEQIKTIEKTSEEERISLQQELSRVKQEVVDVMKKSSEEQIAKLQKLHEKELARKEQELTKKLQTREREFQEQMKVALEKSQSEYLKISQEKEQQESLALEELELQKKAILTESENKLRDLQQEAETYRTRILELESSLEKSLQENKNQSKDLAVHLEAEKNKHNKEITVMVEKHKTELESLKHQQDALWTEKLQVLKQQYQTEMEKLREKCEQEKETLLKDKEIIFQAHIEEMNEKTLEKLDVKQTELESLSSELSEVLKARHKLEEELSVLKDQTDKMKQELEAKMDEQKNHHQQQVDSIIKEHEVSIQRTEKALKDQINQLELLLKERDKHLKEHQAHVENLEADIKRSEGELQQASAKLDVFQSYQSATHEQTKAYEEQLAQLQQKLLDLETERILLTKQVAEVEAQKKDVCTELDAHKIQVQDLMQQLEKQNSEMEQKVKSLTQVYESKLEDGNKEQEQTKQILVEKENMILQMREGQKKEIEILTQKLSAKEDSIHILNEEYETKFKNQEKKMEKVKQKAKEMQETLKKKLLDQEAKLKKELENTALELSQKEKQFNAKMLEMAQANSAGISDAVSRLETNQKEQIESLTEVHRRELNDVISIWEKKLNQQAEELQEIHEIQLQEKEQEVAELKQKILLFGCEKEEMNKEITWLKEEGVKQDTTLNELQEQLKQKSAHVNSLAQDETKLKAHLEKLEVDLNKSLKENTFLQEQLVELKMLAEEDKRKVSELTSKLKTTDEEFQSLKSSHEKSNKSLEDKSLEFKKLSEELAIQLDICCKKTEALLEAKTNELINISSSKTNAILSRISHCQHRTTKVKEALLIKTCTVSELEAQLRQLTEEQNTLNISFQQATHQLEEKENQIKSMKADIESLVTEKEALQKEGGNQQQAASEKESCITQLKKELSENINAVTLMKEELKEKKVEISSLSKQLTDLNVQLQNSISLSEKEAAISSLRKQYDEEKCELLDQVQDLSFKVDTLSKEKISALEQVDDWSNKFSEWKKKAQSRFTQHQNTVKELQIQLELKSKEAYEKDEQINLLKEELDQQNKRFDCLKGEMEDDKSKMEKKESNLETELKSQTARIMELEDHITQKTIEIESLNEVLKNYNQQKDIEHKELVQKLQHFQELGEEKDNRVKEAEEKILTLENQVYSMKAELETKKKELEHVNLSVKSKEEELKALEDRLESESAAKLAELKRKAEQKIAAIKKQLLSQMEEKEEQYKKGTESHLSELNTKLQEREREVHILEEKLKSVESSQSETLIVPRSAKNVAAYTEQEEADSQGCVQKTYEEKISVLQRNLTEKEKLLQRVGQEKEETVSSHFEMRCQYQERLIKLEHAEAKQHEDQSMIGHLQEELEEKNKKYSLIVAQHVEKEGGKNNIQAKQNLENVFDDVQKTLQEKELTCQILEQKIKELDSCLVRQKEVHRVEMEELTSKYEKLQALQQMDGRNKPTELLEENTEEKSKSHLVQPKLLSNMEAQHNDLEFKLAGAEREKQKLGKEIVRLQKDLRMLRKEHQQELEILKKEYDQEREEKIKQEQEDLELKHNSTLKQLMREFNTQLAQKEQELEMTIKETINKAQEVEAELLESHQEETNQLLKKIAEKDDDLKRTAKRYEEILDAREEEMTAKVRDLQTQLEELQKKYQQKLEQEENPGNDNVTNYGAYRHSTHRQSDYHLCFVYCKTPRVP

SEQ ID NO: 815139 - protein, 2057 aa, Homo sapiens
MFKKLKQKISEEQQQLQQALAPAQASSNSSTPTRMRSRTSSFTEQLDEGTPNRENASTHASKSPDSVNGSEPSIPQSGDTQSFAQKLQLRVPSVESLFRSPIKESLFRSSSKESLVRTSSRESLNRLDLDSSTASFDPPSDMDSEAEDLVGNSDSLNKEQLIQRLRRMERSLSSYRGKYSELVTAYQMLQREKKKLQGILSQSQDKSLRRIAELREELQMDQQAKKHLQEEFDASLEEKDQYISVLQTQVSLLKQRLRNGPMNVDVLKPLPQLEPQAEVFTKEENPESDGEPVVEDGTSVKTLETLQQRVKRQENLLKRCKETIQSHKEQCTLLTSEKEALQEQLDERLQELEKIKDLHMAEKTKLITQLRDAKNLIEQLEQDKGMVIAETKRQMHETLEMKEEEIAQLRSRIKQMTTQGEELREQKEKSERAAFEELEKALSTAQKTEEARRKLKAEMDEQIKTIEKTSEEERISLQQELSRVKQEVVDVMKKSSEEQIAKLQKLHEKELARKEQELTKKLQTREREFQEQMKVALEKSQSEYLKISQEKEQQESLALEELELQKKAILTESENKLRDLQQEAETYRTRILELESSLEKSLQENKNQSKDLAVHLEAEKNKHNKEITVMVEKHKTELESLKHQQDALWTEKLQVLKQQYQTEMEKLREKCEQEKETLLKDKEIIFQAHIEEMNEKTLEKLDVKQTELESLSSELSEVLKARHKLEEELSVLKDQTDKMKQELEAKMDEQKNHHQQQVDSIIKEHEVSIQRTEKALKDQINQLELLLKERDKHLKEHQAHVENLEADIKRSEGELQQASAKLDVFQSYQSATHEQTKAYEEQLAQLQQKLLDLETERILLTKQVAEVEAQKKDVCTELDAHKIQVQDLMQQLEKQNSEMEQKVKSLTQVYESKLEDGNKEQEQTKQILVEKENMILQMREGQKKEIEILTQKLSAKEDSIHILNEEYETKFKNQEKKMEKVKQKAKEMQETLKKKLLDQEAKLKKELENTALELSQKEKQFNAKMLEMAQANSAGISDAVSRLETNQKEQIESLTEVHRRELNDVISIWEKKLNQQAEELQEIHEIQLQEKEQEVAELKQKILLFGCEKEEMNKEITWLKEEGVKQDTTLNELQEQLKQKSAHVNSLAQDETKLKAHLEKLEVDLNKSLKENTFLQEQLVELKMLAEEDKRKVSELTSKLKTTDEEFQSLKSSHEKSNKSLEDKSLEFKKLSEELAIQLDICCKKTEALLEAKTNELINISSSKTNAILSRISHCQHRTTKVKEALLIKTCTVSELEAQLRQLTEEQNTLNISFQQATHQLEEKENQIKSMKADIESLVTEKEALQKEGGNQQQAASEKESCITQLKKELSENINAVTLMKEELKEKKVEISSLSKQLTDLNVQLQNSISLSEKEAAISSLRKQYDEEKCELLDQVQDLSFKVDTLSKEKISALEQVDDWSNKFSEWKKKAQSRFTQHQNTVKELQIQLELKSKEAYEKDEQINLLKEELDQQNKRFDCLKGEMEDDKSKMEKKESNLETELKSQTARIMELEDHITQKTIEIESLNEVLKNYNQQKDIEHKELVQKLQHFQELGEEKDNRVKEAEEKILTLENQVYSMKAELETKKKELEHVNLSVKSKEEELKALEDRLESESAAKLAELKRKAEQKIAAIKKQLLSQMEEKEEQYKKGTESHLSELNTKLQEREREVHILEEKLKSVESSQSETLIVPRSAKNVAAYTEQEEADSQGCVQKTYEEKISVLQRNLTEKEKLLQRVGQEKEETVSSHFEMRCQYQERLIKLEHAEAKQHEDQSMIGHLQEELEEKNKKYSLIVAQHVEKEGGKNNIQAKQNLENVFDDVQKTLQEKELTCQILEQKIKELDSCLVRQKEVHRVEMEELTSKYEKLQALQQMDGRNKPTELLEENTEEKSKSHLVQPKLLSNMEAQHNDLEFKLAGAEREKQKLGKEIVRLQKDLRMLRKEHQQELEILKKEYDQEREEKIKQEQEDLELKHNSTLKQLMREFNTQLAQKEQELEMTIKETINKAQEGGSKCNHDCI

SEQ ID NO: 815140 - protein, 164 aa, Homo sapiens
EEEMTAKVRDLQTQLEELQKKYQQKLEQEENPGNDNVTIMELQTQLAQKTTLISDSKLKEQEFREQIHNLEDRLKKYEKNVYATTVGTPYKGGNLYHTDVSLFGEPTEFEYLRKVLFEYMMGRETKTMAKVITTVLKFPDDQTQKILEREDARLMFTSPRSGIF

SEQ ID NO: 815141 - protein, 114 aa, Homo sapiens
MQHYNPNDNTNRQHQQSIYTKNRGRRRTDLKHETNKLNELNRRGAERQDNNKEEHQTPKSRERHETDKGEEKEDTREDSSSELDEEERDKPRDTREYEQAGRNSRAQKDSNNRE

SEQ ID NO: 815142 - protein, 183 aa, Homo sapiens
MSSPSPGKRRMDTDVVKLIESKHEVTILGGLNEFVVKFYGPQGTPYEGGVWKVRVDLPDKYPFKSPSIGFMNKIFHPNIDEASGTVCLDVINQTWTALYDLTNIFESFLPQLLAYPNPIDPLNGDAAAMYLHRPEEYKQKIKEYIQKYATEEALKEQEEGTGDSSSESSMSDFSEDEAQDMEL

SEQ ID NO: 815143 - protein, 183 aa, Homo sapiens; identical to SEQ ID NO: 815142

SEQ ID NO: 815144 - protein, 183 aa, Homo sapiens; identical to SEQ ID NO: 815142

SEQ ID NO: 815145 - protein, 113 aa, Homo sapiens
MNKIFHPNIDEASGTVCLDVINQTWTALYDLTNIFESFLPQLLAYPNPIDPLNGDAAAMYLHRPEEYKQKIKEYIQKYATEEALKEQEEGTGDSSSESSMSDFSEDEAQDMEL

SEQ ID NO: 815146 - protein, 152 aa, Homo sapiens
MSSPSPGKRRMDTDVVKLIESKHEVTILGGLNEFVVKFYGPQGTPYEGGVWKVRVDLPDKYPFKSPSIDLTNIFESFLPQLLAYPNPIDPLNGDAAAMYLHRPEEYKQKIKEYIQKYATEEALKEQEEGTGDSSSESSMSDFSEDEAQDMEL

SEQ ID NO: 815147 - protein, 113 aa, Homo sapiens; identical to SEQ ID NO: 815145

SEQ ID NO: 815148 - protein, 103 aa, Homo sapiens
VNFEVNLHFPCVTCLFGFSDLTNIFESFLPQLLAYPNPIDPLNGDAAAMYLHRPEEYKQKIKEYIQKYATEEALKEQEEGTGDSSSESSMSDFSEDEAQDMEL

SEQ ID NO: 815149 - protein, 183 aa, Homo sapiens; identical to SEQ ID NO: 815142

SEQ ID NO: 815150 - protein, 101 aa, Homo sapiens
SWGAAAHTFPCKLSLLCCSSQYPFPQGAKCRNPVPKKSPMGFSLAVVIMITVIFVPPGVQEYIQKYATEEALKEQEEGTGDSSSESSMSDFSEDEAQDMEL

SEQ ID NO: 815151 - protein, 183 aa, Homo sapiens; identical to SEQ ID NO: 815142

SEQ ID NO: 815152 - protein, 183 aa, Homo sapiens; identical to SEQ ID NO: 815142

SEQ ID NO: 815153 - protein, 183 aa, Homo sapiens; identical to SEQ ID NO: 815142

SEQ ID NO: 815154 - protein, 183 aa, Homo sapiens; identical to SEQ ID NO: 815142

SEQ ID NO: 815155 - protein, 183 aa, Homo sapiens; identical to SEQ ID NO: 815142

SEQ ID NO: 815156 - protein, 183 aa, Homo sapiens; identical to SEQ ID NO: 815142

SEQ ID NO: 815157 - protein, 130 aa, Homo sapiens
MSSPSPGKRRMDTDVVKLGPCWRLELLVLEKRMQAKGRRHRSSALIGRPVTTRKRRRGGATKQLMDIESKHEVTILGGLNEFVVKFYGPQGTPYEGGVWKVRVDLPDKYPFKSPSIGFMNKIFHPNIDEA

SEQ ID NO: 815158 - protein, 190 aa, Homo sapiens
RPRAPQSRGPGPVTDGPRKGERRRRHHVISQSGQEADGHGRGQAVSFVEGNSGCVWGAVWGCPGHPRNHCKGPGALQATVRDSPPPPVPTAAPWHLPGAESLFSSPFLRSTPKYALLLALPVSPEPVTFLRDVWTPETAFFLFARPVASLSTTEPIFRVSLSCLLALDLGNQGRNSREGSLSPFLEMPPF

SEQ ID NO: 815159 - protein, 277 aa, Homo sapiens
MALVHKLLRGTYFLRKFSKPTSALYPFLGIRFAEYSSSLQKPVASPGKASSQRKTEGDLQGDHQKEVALDITSSEEKPDVSFDKAIRDEAIYHFRLLKDEIVDHWRGPEGHPLHEVLLEQAKVVWQFRGKEDLDKWTVTSDKTIGGRSEVFLKMGKNNQSALLYGTLSSEAPQDGESTRSGYCAMISRIPRGAFERKMSYDWSQFNTLYLRVRGDGRPWMVNIKEDTDFFQRTNQMYSYFMFTRGGPYWQEVKFFPISLNQETGATNRESYCEKGNR

SEQ ID NO: 815160 - protein, 110 aa, Homo sapiens
RPCLKKKNFFFLTGSSLCTCRFRLFSEFSTVGTNSEIPFSKFFFSNRGRIRDVQHELPLDKISSIGFTLADKVDGPFFLEIDFIGVFTDPAHTEEFAYENSPELNPRLFK

SEQ ID NO: 815161 - protein, 327 aa, Homo sapiens
MALVHKLLRGTYFLRKFSKPTSALYPFLGIRFAEYSSSLQKPVASPGKASSQRKTEGDLQGDHQKEVALDITSSEEKPDVSFDKAIRDEAIYHFRLLKDEIVDHWRGPEGHPLHEVLLEQAKVVWQFRGKEDLDKWTVTSDKTIGGRSEVFLKMGKNNQSALLYGTLSSEAPQDGESTRSGYCAMISRIPRGAFERKMSYDWSQFNTLYLRVRGDGRPWMVNIKEDTDFFQRTNQMYSYFMFTRGGPYWQEVKIPFSKFFFSNRGRIRDVQHELPLDKISSIGFTLADKVDGPFFLEIDFIGVFTDPAHTEEFAYENSPELNPRLFK

SEQ ID NO: 815162 - protein, 327 aa, Homo sapiens; identical to SEQ ID NO: 815161

SEQ ID NO: 815163 - protein, 327 aa, Homo sapiens; identical to SEQ ID NO: 815161

SEQ ID NO: 815164 - protein, 327 aa, Homo sapiens; identical to SEQ ID NO: 815161

SEQ ID NO: 815165 - protein, 327 aa, Homo sapiens; identical to SEQ ID NO: 815161

SEQ ID NO: 815166 - protein, 327 aa, Homo sapiens; identical to SEQ ID NO: 815161

SEQ ID NO: 815167 - protein, 674 aa, Homo sapiens
MHHRMNEMNLSPVGMEQLTSSSVSNALPVSGSHLGLAASPTHSAIPAPGLPVAIPNLGPSLSSLPSALSLMLPMGIGDRGVMCGLPERNYTLPPPPYPHLESSYFRTILPGILSYLADRPPPQYIHPNSINVDGNTALSITNNPSALDPYQSNGNVGLEPGIVSIDSRSVNTHGAQSLHPSDGHEVALDTAITMENVSRVTSPISTDGMAEELTMDGVAGEHSQIPNGSRSHEPLSVDSVSNNLAADAVGHGGVIPMHGNGLELPVVMETDHIASRVNGMSDSALSDSIHTVAMSTNSVSVALSTSHNLASLESVSLHEVGLSLEPVAVSSITQEVAMGTGHVDVSSDSLSFVSPSLQMEDSNSNKENMATLFTIWCTLCDRAYPSDCPEHGPVTFVPDTPIESRARLSLPKQLVLRQSIVGAEVGVWTGETIPVRTCFGPLIGQQSHSMEVAEWTDKAVNHIWKIYHNGVLEFCIITTDENECNWMMFVRKARNREEQNLVAYPHDGKIFFCTSQDIPPENELLFYYSRDYAQQIGVPEHPDVHLCNCGKECNSYTEFKAHLTSHIHNHLPTQGHSGSHGPSHSKERKWKCSMCPQAFISPSKLHVHFMGHMGMKPHKCDFCSKAFSDPSNLRTHLKIHTGQKNYRCTLCDKSFTQKAHLGVPHGYPHWGEES

SEQ ID NO: 815168 - protein, 674 aa, Homo sapiens; identical to SEQ ID NO: 815167

SEQ ID NO: 815169 - protein, 674 aa, Homo sapiens; identical to SEQ ID NO: 815167

SEQ ID NO: 815170 - protein, 674 aa, Homo sapiens; identical to SEQ ID NO: 815167

SEQ ID NO: 815171 - protein, 137 aa, Homo sapiens
MVIHTGEKNLKCDYCDKLFMRRQDLKQHVLIHTQERQIKCPKCDKLFLRTNHLKKHLNSHEGKRDYVCEKCTKAYLTKYHLTRHLKTCKGPTSSSSAPEEEEEDDSEEEDLADSVGTEDCRINSAVYSADESLSAHK

SEQ ID NO: 815172 - protein, 137 aa, Homo sapiens; identical to SEQ ID NO: 815171

SEQ ID NO: 815173 - protein, 674 aa, Homo sapiens; identical to SEQ ID NO: 815167

SEQ ID NO: 815174 - protein, 674 aa, Homo sapiens; identical to SEQ ID NO: 815167

SEQ ID NO: 815175 - protein, 126 aa, Homo sapiens
SSFRLPRGVTIRAVASRLQGTTILISLTSVLHDNKEFPNPEMFDPHHFLDEGGNFKKSKYFMPFSAGKRICVGEALAGMELFLFLTSILQNFNLKSLVDPKNLDTTPVVNGFASVPPFYQLCFIPV

SEQ ID NO: 815176 - protein, 490 aa, Homo sapiens [sequence omitted]

SEQ ID NO: 815177 - protein, 490 aa, Homo sapiens [sequence omitted]

SEQ ID NO: 815178 - protein, 472 aa, Homo sapiens
MDSLVVLVLCLSCLLLLSLWRQSSGRGSIKDISKSLTNLSKVYGPVFTLYFGLKPIVVLHGYEAVKEALIDLGEEFSGRGIFPLAERANRGFGIVFSNGKKWKEIRRFSLMTLRNFGMGKRSIEDRVQEEARCLVEELRKTKASPCDPTFILGCAPCNVICSIIFHKRFDYKDQQFLNLMEKLNENIKILSSPWIQICNNFSPIIDYFPGTHNKLLKNVAFMKSYILEKVKEHQESMDMNNPQDFIDCFLMKMEKEKHNQPSEFTIESLENTAVDLFGAGTETTSTTLRYALLLLLKHPEVTAKVQEEIERVIGRNRSPCMQDRSHMPYTDAVVHEVQRYIDLLPTSLPHAVTCDIKFRNYLIPKGTTILISLTSVLHDNKEFPNPEMFDPHHFLDEGGNFKKSKYFMPFSAGKRICVGEALAGMELFLFLTSILQNFNLKSLVDPKNLDTTPVVNGFASVPPFYQLCFIPV

SEQ ID NO: 815179 - protein, 362 aa, Homo sapiens
MTLRNFGMGKRSIEDRVQEEARCLVEELRKTKASPCDPTFILGCAPCNVICSIIFHKRFDYKDQQFLNLMEKLNENIKILSSPWIQICNNFSPIIDYFPGTHNKLLKNVAFMKSYILEKVKEHQESMDMNNPQDFIDCFLMKMEKEKHNQPSEFTIESLENTAVDLFGAGTETTSTTLRYALLLLLKHPEVTAKVQEEIERVIGRNRSPCMQDRSHMPYTDAVVHEVQRYIDLLPTSLPHAVTCDIKFRNYLIPKGTTILISLTSVLHDNKEFPNPEMFDPHHFLDEGGNFKKSKYFMPFSAGKRICVGEALAGMELFLFLTSILQNFNLKSLVDPKNLDTTPVVNGFASVPPFYQLCFIPV

SEQ ID NO: 815180 - protein, 362 aa, Homo sapiens; identical to SEQ ID NO: 815179

SEQ ID NO: 815181 - protein, 293 aa, Homo sapiens
MEKLNENIKILSSPWIQICNNFSPIIDYFPGTHNKLLKNVAFMKSYILEKVKEHQESMDMNNPQDFIDCFLMKMEKEKHNQPSEFTIESLENTAVDLFGAGTETTSTTLRYALLLLLKHPEVTAKVQEEIERVIGRNRSPCMQDRSHMPYTDAVVHEVQRYIDLLPTSLPHAVTCDIKFRNYLIPKGTTILISLTSVLHDNKEFPNPEMFDPHHFLDEGGNFKKSKYFMPFSAGKRICVGEALAGMELFLFLTSILQNFNLKSLVDPKNLDTTPVVNGFASVPPFYQLCFIPV

SEQ ID NO: 815182 - protein, 293 aa, Homo sapiens; identical to SEQ ID NO: 815181

SEQ ID NO: 815183 - protein, 472 aa, Homo sapiens
MDSLVVLVLCLSCLLLLSLWRQSSGRGKLPPGPTPLPVIGNILQIGIKDISKSLTNLSKVYGPVFTLYFGLKPIVVLHGYEAVKEALIDLGEEFSGRGIFPLAERANRGFGIVFSNGKKWKEIRRFSLMTLRNFGMGKRSIEDRVQEEARCLVEELRKTKASPCDPTFILGCAPCNVICSIIFHKRFDYKDQQFLNLMEKLNAIIDYFPGTHNKLLKNVAFMKSYILEKVKEHQESMDMNNPQDFIDCFLMKMEKEKHNQPSEFTIESLENTAVDLFGAGTETTSTTLRYALLLLLKHPEVTAKVQEEIERVIGRNRSPCMQDRSHMPYTDAVVHEVQRYIDLLPTSLPHAVTCDIKFRNYLIPKGTTILISLTSVLHDNKEFPNPEMFDPHHFLDEGGNFKKSKYFMPFSAGKRICVGEALAGMELFLFLTSILQNFNLKSLVDPKNLDTTPVVNGFASVPPFYQLCFIPV

SEQ ID NO: 815184 - protein, 472 aa, Homo sapiens; identical to SEQ ID NO: 815178

SEQ ID NO: 815185 - protein, 472 aa, Homo sapiens; identical to SEQ ID NO: 815178

SEQ ID NO: 815186 - protein, 454 aa, Homo sapiens
MDSLVVLVLCLSCLLLLSLWRQSSGRGSIKDISKSLTNLSKVYGPVFTLYFGLKPIVVLHGYEAVKEALIDLGEEFSGRGIFPLAERANRGFGIVFSNGKKWKEIRRFSLMTLRNFGMGKRSIEDRVQEEARCLVEELRKTKASPCDPTFILGCAPCNVICSIIFHKRFDYKDQQFLNLMEKLNENIKILSSPWIQICNNFSPIIDYFPGTHNKLLKNVAFMKSYILEKVKEHQESMDMNNPQDFIDCFLMKMEKEKHNQPSEFTIESLVRYALLLLLKHPEVTAKVQEEIERVIGRNRSPCMQDRSHMPYTDAVVHEVQRYIDLLPTSLPHAVTCDIKFRNYLIPKGTTILISLTSVLHDNKEFPNPEMFDPHHFLDEGGNFKKSKYFMPFSAGKRICVGEALAGMELFLFLTSILQNFNLKSLVDPKNLDTTPVVNGFASVPPFYQLCFIPV

SEQ ID NO: 815187 - protein, 490 aa, Homo sapiens [sequence omitted]

SEQ ID NO: 815188 - protein, 436 aa, Homo sapiens
MDSLVVLVLCLSCLLLLSLWRQSSGRGSIKDISKSLTNLSKVYGPVFTLYFGLKPIVVLHGYEAVKEALIDLGEEFSGRGIFPLAERANRGFGIVFSNGKKWKEIRRFSLMTLRNFGMGKRSIEDRVQEEARCLVEELRKTKASPCDPTFILGCAPCNVICSIIFHKRFDYKDQQFLNLMEKLNENIKILSSPWIQICNNFSPIIDYFPGTHNKLLKNVAFMKSYILEKVKEHQESMDMNNPQDFIDCFLMKMEKEKHNQPSEFTIESLVRYALLLLLKHPEVTAKVQEEIERVIGRNRSPCMQDRSHMPYTDAVVHEVQRYIDLLPTSLPHAVTCDIKFRNYLIPKGTTILISLTSVLHDNKEFPNPEMFDPHHFLDEGGNFKKSKYFMPFSAVTSILQNFNLKSLVDPKNLDTTPVVNGFASVPPFYQLCFIPV

SEQ ID NO: 815189 - protein, 454 aa, Homo sapiens
MDSLVVLVLCLSCLLLLSLWRQSSGRGSIKDISKSLTNLSKVYGPVFTLYFGLKPIVVLHGYEAVKEALIDLGEEFSGRGIFPLAERANRGFGIVFSNGKKWKEIRRFSLMTLRNFGMGKRSIEDRVQEEARCLVEELRKTKASPCDPTFILGCAPCNVICSIIFHKRFDYKDQQFLNLMEKLNENIKILSSPWIQICNNFSPIIDYFPGTHNKLLKNVAFMKSYILEKVKEHQESMDMNNPQDFIDCFLMKMEKEKHNQPSEFTIESLENTAVDLFGAGTETTSTTLRYALLLLLKHPEVTAKVQEEIERVIGRNRSPCMQDRSHMPYTDAVVHEVQRYIDLLPTSLPHAVTCDIKFRNYLIPKGTTILISLTSVLHDNKEFPNPEMFDPHHFLDEGGNFKKSKYFMPFSAVTSILQNFNLKSLVDPKNLDTTPVVNGFASVPPFYQLCFIPV

SEQ ID NO: 815190 - protein, 169 aa, Homo sapiens
MDSLVVLVLCLSCLLLLSLWRQSSGRGKLPPGPTPLPVIGNILQIGIKDISKSLTNLSKVYGPVFTLYFGLKPIVVLHGYEAVKEALIDLGEEFSGRGIFPLAERANRGFGIVFSNGKKWKEIRRFSLMTLRNFGMGKRSIEDRVQEEARCLVEELRKTKGVGDPTPYH

SEQ ID NO: 815191 - protein, 273 aa, Homo sapiens
MDSLVVLVLCLSCLLLLSLWRQSSGRGSIKDISKSLTNLSKVYGPVFTLYFGLKPIVVLHGYEAVKEALIDLGEEFSGRGIFPLAERANRGFGIVFSNGKKWKEIRRFSLMTLRNFGMGKRSIEDRVQEEARCLVEELRKTKASPCDPTFILGCAPCNVICSIIFHKRFDYKDQQFLNLMEKLNENIKILSSPWIQICNNFSPIIDYFPGTHNKLLKNVAFMKSYILEKVKEHQESMDMNNPQDFIDCFLMKMEKVKCKQKLSYVTACEFVIC

SEQ ID NO: 815192 - protein, 169 aa, Homo sapiens; identical to SEQ ID NO: 815190

SEQ ID NO: 815193 - protein, 512 aa, Homo sapiens
MTAPWVALALLWGSLWPGSGRGEAETRECIYYNANWELERTNQSGLERCEGEQDKRLHCYASWRNSSGTIELVKKGCWLDDFNCYDRQECVATEENPQVYFCCCEGNFCNERFTHLPEAGGPEVTYEPPPTAPTLLTVLAYSLLPIGGLSLIVLLAFWMYRHRKPPYGHVDIHEDPGPPPPSPLVGLKPLQLLEIKARGRFGCVWKAQLMNDFVAVKIFPLQDKQSWQSEREIFSTPGMKHENLLQFIAAEKRGSNLEVELWLITAFHDKGSLTDYLKGNIITWNELCHVAETMSRGLSYLHEDVPWCRGEGHKPSIAHRDFKSKNVLLKSDLTAVLADFGLAVRFEPGKPPGDTHGQVGTRRYMAPEVLEGAINFQRDAFLRIDMYAMGLVLWELVSRCKAADGPVDEYMLPFEEEIGQHPSLEELQEVVVHKKMRPTIKDHWLKHPGLAQLCVTIEECWDHDAEARLSAGCVEERVSLIRRSVNGTTSDCLVSLVTSVTNVDLPPKESSI

SEQ ID NO: 815194 - protein, 554 aa, Homo sapiens
VTFLVSLPSWVDKLRVEDTSDVNKMEIDIVQKKKQLEAESHAAQLQILMEFLKVARRNKREQLEQIQKELSVLEEDIKRVEEMSGLYSPVSEDSTVPQFEAPSPSHSSIIDSTEYSQPPGFSGSSQAGVQWRYLGSLQPPPPRYKRFSCLTLPSSWDYRRLPPHLTKKQPWYNSTLASRRKRLTAHFEDLEQCYFSTRMSRISDDSRTASQLDEFQECLSKFTRYNSVRPLATLSYASDLYNGSSIVSSIEFDRDCDYFAIAGVTKKIKVYEYDTVIQDAVDIHYPENEMTCNSKISCISWSSYHKNLLASSDYEGTVILWDGFTGQRSKVYQEHEKRCWSVDFNLMDPKLLASGSDDAKVKLWSTNLDNSVASIEAKANVCCVKFSPSSRYHLAFGCADHCVHYYDLRNTKQPIMVFKGHRKAVSYAKFVSGEEIVSASTDSQLKLWNVGKPYCLRSFKGHINEKNFVGLASNGDYIACGSENNSLYLYYKGLSKTLLTFKFDTVKSVLDKDRKEDDTNEFVSAVCWRALPDGESNVLIAANSQGTIKVLELV

SEQ ID NO: 815195 - protein, 711 aa, Homo sapiens
MSGSRQAGSGSAGTSPGSSAASSVTSASSSLSSSPSPPSVAVSAAALVSGGVAQAAGSGGLGGPVRPVLVAPAVSGSGGGAVSTGLSRHSCAARPSAGVGGSSSSLGSGSRKRPLLAPLCNGLINSYEDKSNDFVCPICFDMIEEAYMTKCGHSFCYKCIHQSLEDNNRCPKCNYVVDNIDHLYPNFLVNELILKQKQRFEEKRFKLDHSVSSTNGHRWQIFQDWLGTDQDNLDLANVNLMLELLVQKKKQLEAESHAAQLQILMEFLKVARRNKREEMSGLYSPVSEDSTVPQFEAPSPSHSSIIDSTEYSQPPGFSGSSQTKKQPWYNSTLASRRKRLTAHFEDLEQCYFSTRMSRISDDSRTASQLDEFQECLSKFTRYNSVRPLATLSYASDLYNGSSIVSSIEFDRDCDYFAIAGVTKKIKVYEYDTVIQDAVDIHYPENEMTCNSKISCISWSSYHKNLLASSDYEGTVILWDGFTGQRSKVYQEHEKRCWSVDFNLMDPKLLASGSDDAKVKLWSTNLDNSVASIEAKANVCCVKFSPSSRYHLAFGCADHCVHYYDLRNTKQPIMVFKGHRKAVSYAKFVSGEEIVSASTDSQLKLWNVGKPYCLRSFKGHINEKNFVGLASNGDYIACGSENNSLYLYYKGLSKTLLTFKFDTVKSVLDKDRKEDDTNEFVSAVCWRALPDGESNVLIAANSQGTIKVLELV

SEQ ID NO: 815196 - protein, 770 aa, Homo sapiens
MSGSRQAGSGSAGTSPGSSAASSVTSASSSLSSSPSPPSVAVSAAALVSGGVAQAAGSGGLGGPVRPVLVAPAVSGSGGGAVSTGLSRHSCAARPSAGVGGSSSSLGSGSRKRPLLAPLCNGLINSYEDKSNDFVCPICFDMIEEAYMTKCGHSFCYKCIHQSLEDNNRCPKCNYVVDNIDHLYPNFLVNELILKQKQRFEEKRFKLDHSVSSTNGHRWQIFQDWLGTDQDNLDLANVNLMLELLVQKKKQLEAESHAAQLQILMEFLKVARRNKREQLEQIQKELSVLEEDIKRVEEMSGLYSPVSEDSTVPQFEAPSPSHSSIIDSTEYSQPPGFSGSSQAGVQWRYLGSLQPPPPRYKRFSCLTLPSSWDYRRLPPHLTKKQPWYNSTLASRRKRLTAHFEDLEQCYFSTRMSRISDDSRTASQLDEFQECLSKFTRYNSVRPLATLSYASDLYNGSSIVSSIEFDRDCDYFAIAGVTKKIKVYEYDTVIQDAVDIHYPENEMTCNSKISCISWSSYHKNLLASSDYEGTVILWDGFTGQRSKVYQEHEKRCWSVDFNLMDPKLLASGSDDAKVKLWSTNLDNSVASIEAKANVCCVKFSPSSRYHLAFGCADHCVHYYDLRNTKQPIMVFKGHRKAVSYAKFVSGEEIVSASTDSQLKLWNVGKPYCLRSFKGHINEKNFVGLASNGDYIACGSENNSLYLYYKGLSKTLLTFKFDTVKSVLDKDRKEDDTNEFVSAVCWRALPDGESNVLIAANSQGTIKVLELV

SEQ ID NO: 815197 - protein, 570 aa, Homo sapiens [sequence omitted]

SEQ ID NO: 815198 - protein, 731 aa, Homo sapiens
MSGSRQAGSGSAGTSPGSSAASSVTSASSSLSSSPSPPSVAVSAAALVSGGVAQAAGSGGLGGPVRPVLVAPAVSGSGGGAVSTGLSRHSCAARPSAGVGGSSSSLGSGSRKRPLLAPLCNGLINSYEDKSNDFVCPICFDMIEEAYMTKCGHSFCYKCIHQSLEDNNRCPKCNYVVDNIDHLYPNFLVNELILKQKQRFEEKRFKLDHSVSSTNGHRWQIFQDWLGTDQDNLDLANVNLMLELLVQKKKQLEAESHAAQLQILMEFLKVARRNKREQLEQIQKELSVLEEDIKRVEEMSGLYSPVSEDSTVPQFEAPSPSHSSIIDSTEYSQPPGFSGSSQTKKQPWYNSTLASRRKRLTAHFEDLEQCYFSTRMSRISDDSRTASQLDEFQECLSKFTRYNSVRPLATLSYASDLYNGSSIVSSIEFDRDCDYFAIAGVTKKIKVYEYDTVIQDAVDIHYPENEMTCNSKISCISWSSYHKNLLASSDYEGTVILWDGFTGQRSKVYQEHEKRCWSVDFNLMDPKLLASGSDDAKVKLWSTNLDNSVASIEAKANVCCVKFSPSSRYHLAFGCADHCVHYYDLRNTKQPIMVFKGHRKAVSYAKFVSGEEIVSASTDSQLKLWNVGKPYCLRSFKGHINEKNFVGLASNGDYIACGSENNSLYLYYKGLSKTLLTFKFDTVKSVLDKDRKEDDTNEFVSAVCWRALPDGESNVLIAANSQGTIKVLELV

SEQ ID NO: 815199 - protein, 757 aa, Homo sapiens
MSGSRQAGSGSAGTSPGSSAASSVTSASSSLSSSPSPPSVAVSAAALVSGGVAQAAGSGGLGGPVRPVLVAPAVSGSGGGAVSTGLSRHSCAARPSAGVGGSSSSLGSGSRKRPLLAPLCNGLINSYEDKSNDFVCPICFDMIEEAYMTKCGHSFCYKCIHQSLEDNNRCPKCNYVVDNIDHLYPNFLVNELILKQKQRFEEGHRWQIFQDWLGTDQDNLDLANVNLMLELLVQKKKQLEAESHAAQLQILMEFLKVARRNKREQLEQIQKELSVLEEDIKRVEEMSGLYSPVSEDSTVPQFEAPSPSHSSIIDSTEYSQPPGFSGSSQAGVQWRYLGSLQPPPPRYKRFSCLTLPSSWDYRRLPPHLTKKQPWYNSTLASRRKRLTAHFEDLEQCYFSTRMSRISDDSRTASQLDEFQECLSKFTRYNSVRPLATLSYASDLYNGSSIVSSIEFDRDCDYFAIAGVTKKIKVYEYDTVIQDAVDIHYPENEMTCNSKISCISWSSYHKNLLASSDYEGTVILWDGFTGQRSKVYQEHEKRCWSVDFNLMDPKLLASGSDDAKVKLWSTNLDNSVASIEAKANVCCVKFSPSSRYHLAFGCADHCVHYYDLRNTKQPIMVFKGHRKAVSYAKFVSGEEIVSASTDSQLKLWNVGKPYCLRSFKGHINEKNFVGLASNGDYIACGSENNSLYLYYKGLSKTLLTFKFDTVKSVLDKDRKEDDTNEFVSAVCWRALPDGESNVLIAANSQGTIKVLELV

SEQ ID NO: 815200 - protein, 749 aa, Homo sapiens
MSGSRQAGSGSAGTSPGSSAASSVTSASSSLSSSPSPPSVAVSAAALVSGGVAQAAGSGGLGGPVRPVLVAPAVSGSGGGAVSTGLSRHSCAARPSAGVGGSSSSLGSGSRKRPLLAPLCNGLINSYEDKSNDFVCPICFDMIEEAYMTKCGHSFCYKCIHQSLEDNNRCPKCNYVVDNIDHLYPNFLVNELILKQKQRFEEKRFKLDHSVSSTNGHRWQIFQDWLGTDQDNLDLANVNLMLELLVQKKKQLEAESHAAQLQILMEFLKVARRNKREQLEQIQKELSVLEEDIKRVEEMSGLYSPVSEDSTVPQFEAPSPSHSLEFSSDMHRIFVNGILIISIIDSTEYSQPPGFSGSSQTKKQPWYNSTLASRRKRLTAHFEDLEQCYFSTRMSRISDDSRTASQLDEFQECLSKFTRYNSVRPLATLSYASDLYNGSSIVSSIEFDRDCDYFAIAGVTKKIKVYEYDTVIQDAVDIHYPENEMTCNSKISCISWSSYHKNLLASSDYEGTVILWDGFTGQRSKVYQEHEKRCWSVDFNLMDPKLLASGSDDAKVKLWSTNLDNSVASIEAKANVCCVKFSPSSRYHLAFGCADHCVHYYDLRNTKQPIMVFKGHRKAVSYAKFVSGEEIVSASTDSQLKLWNVGKPYCLRSFKGHINEKNFVGLASNGDYIACGSENNSLYLYYKGLSKTLLTFKFDTVKSVLDKDRKEDDTNEFVSAVCWRALPDGESNVLIAANSQGTIKVLELV

SEQ ID NO: 815201 - protein, 491 aa, Homo sapiens
MLWTILTICILISWESHAAQLQILMEFLKVARRNKREQLEQIQKELSVLEEDIKRVEEMSGLYSPVSEDSTVPQFEAPSPSHSSIIDSTEYSQPPGFSGSSQTKKQPWYNSTLASRRKRLTAHFEDLEQCYFSTRMSRISDDSRTASQLDEFQECLSKFTRYNSVRPLATLSYASDLYNGSSIVSSIEFDRDCDYFAIAGVTKKIKVYEYDTVIQDAVDIHYPENEMTCNSKISCISWSSYHKNLLASSDYEGTVILWDGFTGQRSKVYQEHEKRCWSVDFNLMDPKLLASGSDDAKVKLWSTNLDNSVASIEAKANVCCVKFSPSSRYHLAFGCADHCVHYYDLRNTKQPIMVFKGHRKAVSYAKFVSGEEIVSASTDSQLKLWNVGKPYCLRSFKGHINEKNFVGLASNGDYIACGSENNSLYLYYKGLSKTLLTFKFDTVKSVLDKDRKEDDTNEFVSAVCWRALPDGESNVLIAANSQGTIKVLELV

SEQ ID NO: 815202 - protein, 530 aa, Homo sapiens
MLELLVQKKKQLEAESHAAQLQILMEFLKVARRNKREQLEQIQKELSVLEEDIKRVEEMSGLYSPVSEDSTVPQFEAPSPSHSSIIDSTEYSQPPGFSGSSQAGVQWRYLGSLQPPPPRYKRFSCLTLPSSWDYRRLPPHLTKKQPWYNSTLASRRKRLTAHFEDLEQCYFSTRMSRISDDSRTASQLDEFQECLSKFTRYNSVRPLATLSYASDLYNGSSIVSSIEFDRDCDYFAIAGVTKKIKVYEYDTVIQDAVDIHYPENEMTCNSKISCISWSSYHKNLLASSDYEGTVILWDGFTGQRSKVYQEHEKRCWSVDFNLMDPKLLASGSDDAKVKLWSTNLDNSVASIEAKANVCCVKFSPSSRYHLAFGCADHCVHYYDLRNTKQPIMVFKGHRKAVSYAKFVSGEEIVSASTDSQLKLWNVGKPYCLRSFKGHINEKNFVGLASNGDYIACGSENNSLYLYYKGLSKTLLTFKFDTVKSVLDKDRKEDDTNEFVSAVCWRALPDGESNVLIAANSQGTIKVLELV

SEQ ID NO: 815203 - protein, 463 aa, Homo sapiens
GWRSRGSRKQLEQIQKELSVLEEDIKRVEEMSGLYSPVSEDSTVPQFEAPSPSHSSIIDSTEYSQPPGFSGSSQTKKQPWYNSTLASRRKRLTAHFEDLEQCYFSTRMSRISDDSRTASQLDEFQECLSKFTRYNSVRPLATLSYASDLYNGSSIVSSIEFDRDCDYFAIAGVTKKIKVYEYDTVIQDAVDIHYPENEMTCNSKISCISWSSYHKNLLASSDYEGTVILWDGFTGQRSKVYQEHEKRCWSVDFNLMDPKLLASGSDDAKVKLWSTNLDNSVASIEAKANVCCVKFSPSSRYHLAFGCADHCVHYYDLRNTKQPIMVFKGHRKAVSYAKFVSGEEIVSASTDSQLKLWNVGKPYCLRSFKGHINEKNFVGLASNGDYIACGSENNSLYLYYKGLSKTLLTFKFDTVKSVLDKDRKEDDTNEFVSAVCWRALPDGESNVLIAANSQGTIKVLELV

SEQ ID NO: 815204 - protein, 457 aa, Homo sapiens
SRGSPCQSLWELSVLEEDIKRVEEMSGLYSPVSEDSTVPQFEAPSPSHSSIIDSTEYSQPPGFSGSSQTKKQPWYNSTLASRRKRLTAHFEDLEQCYFSTRMSRISDDSRTASQLDEFQECLSKFTRYNSVRPLATLSYASDLYNGSSIVSSIEFDRDCDYFAIAGVTKKIKVYEYDTVIQDAVDIHYPENEMTCNSKISCISWSSYHKNLLASSDYEGTVILWDGFTGQRSKVYQEHEKRCWSVDFNLMDPKLLASGSDDAKVKLWSTNLDNSVASIEAKANVCCVKFSPSSRYHLAFGCADHCVHYYDLRNTKQPIMVFKGHRKAVSYAKFVSGEEIVSASTDSQLKLWNVGKPYCLRSFKGHINEKNFVGLASNGDYIACGSENNSLYLYYKGLSKTLLTFKFDTVKSVLDKDRKEDDTNEFVSAVCWRALPDGESNVLIAANSQGTIKVLELV

SEQ ID NO: 815205 - protein, 437 aa, Homo sapiens
IIFYCRNHMQPNYRFLWNSSRLQEEIRESSIIDSTEYSQPPGFSGSSQTKKQPWYNSTLASRRKRLTAHFEDLEQCYFSTRMSRISDDSRTASQLDEFQECLSKFTRYNSVRPLATLSYASDLYNGSSIVSSIEFDRDCDYFAIAGVTKKIKVYEYDTVIQDAVDIHYPENEMTCNSKISCISWSSYHKNLLASSDYEGTVILWDGFTGQRSKVYQEHEKRCWSVDFNLMDPKLLASGSDDAKVKLWSTNLDNSVASIEAKANVCCVKFSPSSRYHLAFGCADHCVHYYDLRNTKQPIMVFKGHRKAVSYAKFVSGEEIVSASTDSQLKLWNVGKPYCLRSFKGHINEKNFVGLASNGDYIACGSENNSLYLYYKGLSKTLLTFKFDTVKSVLDKDRKEDDTNEFVSAVCWRALPDGESNVLIAANSQGTIKVLELV

SEQ ID NO: 815206 - protein, 770 aa, Homo sapiens; identical to SEQ ID NO: 815196

SEQ ID NO: 815207 - protein, 770 aa, Homo sapiens; identical to SEQ ID NO: 815196

SEQ ID NO: 815208 - protein, 172 aa, Homo sapiens
DSRGLPQSRYHLAFGCADHCVHYYDLRNTKQPIMVFKGHRKAVSYAKFVSGEEIVSASTDSQLKLWNVGKPYCLRSFKGHINEKNFVGLASNGDYIACGSENNSLYLYYKGLSKTLLTFKFDTVKSVLDKDRKEDDTNEFVSAVCWRALPDGESNVLIAANSQGTIKVLELV

SEQ ID NO: 815209 - protein, 729 aa, Homo sapiens
MSGSRQAGSGSAGTSPGSSAASSVTSASSSLSSSPSPPSVAVSAAALVSGGVAQAAGSGGLGGPVRPVLVAPAVSGSGGGAVSTGLSRHSCAARPSAGVGGSSSSLGSGSRKRPLLAPLCNGLINSYEDKSNDFVCPICFDMIEEAYMTKCGHSFCYKCIHQSLEDNNRCPKCNYVVDNIDHLYPNFLVNELILKQKQRFEEKRFKLDHSVSSTNGHRWQIFQDWLGTDQDNLDLANVNLMLELLVQKKKQLEAESHAAQLQILMEFLKVARRNKREQLEQIQKELSVLEEDIKRVEEMSGLYSPVSEDSTVPQFEAPSPSHSSIIDSTEYSQPPGFSGSSQTKKQPWYNSTLASRRKRLTAHFEDLEQCYFSTRMSRISDDSRTASQLDEFQECLSKFTRYNSVRPLATLSYASDLYNGSSIVSSIEFDRDCDYFAIAGVTKKIKVYEYDTVIQDAVDIHYPENEMTCNSKISCISWSSYHKNLLASSDYEGTVILWDGFTGQRSKVYQEHEKRCWSVDFNLMDPKLLASGSDDAKVKLWSTNLDNSVASIEAKANVCCVKFSPSSRYHLAFGCADHCVHYYDLRNTKQPIMVFKGHRKAVSYAKFVSGEEIVSASTDSQLKLWNVGKPYCLRSFKGHINEKNFVGLASNGDYIACGSENNSLYLYYKGLSKTLLTFKFDTVKSVLDKDRKEDDTNEFVSAVCWRALPDGESNVLIAANIQSVCPPLS

SEQ ID NO: 815210 - protein, 658 aa, Homo sapiens
MSGSRQAGSGSAGTSPGSSAASSVTSASSSLSSSPSPPSVAVSAAALVSGGVAQAAGSGGLGGPVRPVLVAPAVSGSGGGAVSTGLSRHSCAARPSAGVGGSSSSLGSGSRKRPLLAPLCNGLINSYEDKSNDFVCPICFDMIEEAYMTKCGHSFCYKCIHQSLEDNNRCPKCNYVVDNIDHLYPNFLVNELILKQKQRFEEKRFKLDHSVSSTNGHRWQIFQDWLGTDQDNLDLANVNLMLELLVQKKKQLEAESHAAQLQILMEFLKVARRNKREQLEQIQKELSVLEEDIKRVEEMSGLYSPVSEDSTVPQFEAPSPSHSSIIDSTEYSQPPGFSGSSQTKKQPWYNSTLASRRKRLTAHFEDLEQCYFSTRMSRISDDSRTASQLDEFQECLSKFTRYNSVRPLATLSYASDLYNGSSIVSSIEFDRDCDYFAIAGVTKKIKVYEYDTVIQDAVDIHYPENEMTCNSKISCISWSSYHKNLLASSDYEGTVILWDGFTGQRSKVYQEHEKRCWSVDFNLMDPKLLASGSDDAKVKLWSTNLDNSVASIEAKANVCCVKFSPSSRYHLAFGCADHCVHYYDLRNTKQPIMVFKGHRKAVSYAKFVSGEEIVSASTDSQLKLWNVGKPYCLRSFKGHINEKNFVGLASNGDYIACG

SEQ ID NO: 815211 - protein, 86 aa, Homo sapiens
MRLARLLRGAALAGPGPGLRAAGFSRSFSSDSGSSPASERGVPGQVDFYARFSPSPLSMKQFLDFGECGPGPWAFLRGPGRGAAAA

SEQ ID NO: 815212 - protein, 443 aa, Homo sapiens
IPAPAARHVPHVPLGRGAGKPGVLAVASLAGLGMRLARLLRGAALAGPGPGLRAAGFSRSFSSDSGSSPASERGVPGQVDFYARFSPSPLSMKQFLDFGSVNACEKTSFMFLRQELPVRLANIMKEISLLPDNLLRTPSVQLVQSWYIQSLQELLDFKDKSAEDAKAIYDFTDTVIRIRNRHNDVIPTMAQGVIEYKESFGVDPVTSQNVQYFLDRFYMSRISIRMLLNQHSLLFGGKGKGSPSHRKHIGSINPNCNVLEVIKDGYENARRLCDLYYINSPELELEELNAKSPGQPIQVVYVPSHLYHMVFELFKNPFSYLQMSDRGGGVPLRKIDRLFNYMYSTAPRPRVETSRAVPLAGFGYGLPISRLYAQYFQGDLKLYSLEGYGTDAVIYIKALSTDSIERLPVYNKAAWKHYNTNHEADDWCVPSREPKDMTTFRSA

SEQ ID NO: 815213 - protein, 329 aa, Homo sapiens
PARYPVQLVQSWYIQSLQELLDFKDKSAEDAKAIYERPRRTWLQVSSLCCMACKMIFTDTVIRIRNRHNDVIPTMAQGVIEYKESFGVDPVTSQNVQYFLDRFYMSRISIRMLLNQHSLLFGGKGKGSPSHRKHIGSINPNCNVLEVIKDGYENARRLCDLYYINSPELELEELNAKSPGQPIQVVYVPSHLYHMVFELFKNPFSYLQMSDRGGGVPLRKIDRLFNYMYSTAPRPRVETSRAVPLAGFGYGLPISRLYAQYFQGDLKLYSLEGYGTDAVIYIKALSTDSIERLPVYNKAAWKHYNTNHEADDWCVPSREPKDMTTFRSA

SEQ ID NO: 815214 - protein, 121 aa, Homo sapiens
MSDRGGGVPLRKIDRLFNYMYSTAPRPRVETSRAVPLAGFGYGLPISRLYAQYFQGDLKLYSLEGYGTDAVIYIKALSTDSIERLPVYNKAAWKHYNTNHEADDWCVPSREPKDMTTFRSA

SEQ ID NO: 815215 - protein, 108 aa, Homo sapiens
PARYPVQLVQSWYIQSLQELLDFKDKSAEDAKAIYERPRRTWLQVSSLCCMACKMIFTDTVIRIRNRHNDVIPTMAQGVIEYKESFGVDPVTSQNVHTLFIVFTKLFE

SEQ ID NO: 815216 - protein, 443 aa, Homo sapiens; identical to SEQ ID NO: 815212

SEQ ID NO: 815217 - protein, 469 aa, Homo sapiens
IPAPAARHVPHVPLGRGAGKPGVLAVASLAGLGMRLARLLRGAALAGPGPGLRAAGFSRSFSSDSGSSPASERGVPGQVDFYARFSPSPLSMKQFLDFGSVNACEKTSFMFLRQELPVRLANIMKEISLLPDNLLRTPSVQLVQSWYIQSLQELLDFKDKSAEDAKAIYDFTDTVIRIRNRHNDVIPTMAQGVIEYKESFGVDPVTSQNVQYFLDRFYMSRISIRMLLNQHSLLFGGKGKGSPSHRKHIGSINPNCNVLEVIKDGYENARRLCDLYYINSPELELEELNAKSPGQPIQVVYVPSHLYHMVFELFKNAMRATMEHHANRGVYPPIQVHVTLGNEDLTVKMSDRGGGVPLRKIDRLFNYMYSTAPRPRVETSRAVPLAGFGYGLPISRLYAQYFQGDLKLYSLEGYGTDAVIYIKALSTDSIERLPVYNKAAWKHYNTNHEADDWCVPSREPKDMTTFRSA

SEQ ID NO: 815218 - protein, 456 aa, Homo sapiens
IPAPAARHVPHVPLGRGAGKPGVLAVASLAGLGMRLARLLRGAALAGPGPGLRAAGFSRSFSSDSGSSPASERGVPGQVDFYARFSPSPLSMKQFLDFGSVNACEKTSFMFLRQELPVRLANIMKEISLLPDNLLRTPSVQLVQSWYIQSLQELLDFKDKSAEDAKAIYDFTDTVIRIRNRHNDVIPTMAQGVIEYKESFGVDPVTSQNVQYFLDRFYMSRISIRMLLNQHSLLFGGKGKGSPSHRKHIGSINPNCNVLEVIKDGYENARRLCDLYYINSPELELEELNAKSPGQPIQVVYVPSHLYHMVFELFKNAMRATMEHHANRGVYPPIQVHVTLGNEDLTVKMSDRGGGVPLRKIDRLFNYMYSTAPRPRVETSRAVPLAGFGYGLPISRLYAQYFQGDLKLYSLEGYGTDAVIYIKALSTDSIERLPVYNKAAWKHYNTNHEADDWCVP

SEQ ID NO: 815219 - protein, 86 aa, Homo sapiens; identical to SEQ ID NO: 815211

SEQ ID NO: 815220 - protein, 436 aa, Homo sapiens
MRLARLLRGAALAGPGPGLRAAGFSRSFSSDSGSSPASERGVPGQVDFYARFSPSPLSMKQFLDFGSVNACEKTSFMFLRQELPVRLANIMKEISLLPDNLLRTPSVQLVQSWYIQSLQELLDFKDKSAEDAKAIYDFTDTVIRIRNRHNDVIPTMAQGVIEYKESFGVDPVTSQNVQYFLDRFYMSRISIRMLLNQHSLLFGGKGKGSPSHRKHIGSINPNCNVLEVIKDGYENARRLCDLYYINSPELELEELNAKSPGQPIQVVYVPSHLYHMVFELFKNAMRATMEHHANRGVYPPIQVHVTLGNEDLTVKMSDRGGGVPLRKIDRLFNYMYSTAPRPRVETSRAVPLAGFGYGLPISRLYAQYFQGDLKLYSLEGYGTDAVIYIKALSTDSIERLPVYNKAAWKHYNTNHEADDWCVPSREPKDMTTFRSA

SEQ ID NO: 815221 - protein, 430 aa, Homo sapiens
MRLARLLRGAALAGPGPGLRAAGFSRSFSSDSGSSPASERGVPGQVDFYARFSPSPLSMKQFLDFGSVNACEKTSFMFLRQELPVRLANIMKEISLLPDNLLRTPSVQLVQSWYIQSLQELLDFKDKSAEDAKAIYERPRRTWLQVSSLCCMACKMIFTDTVIRIRNRHNDVIPTMAQGVIEYKESFGVDPVTSQNVQYFLDRFYMSRISIRMLLNQHSLLFGGKGKGSPSHRKHIGSINPNCNVLEVIKDGYENARRLCDLYYINSPELELEELNAKSPGQPIQVVYVPSHLYHMVFELFKNPFSYLKMSDRGGGVPLRKIDRLFNYMYSTAPRPRVETSRAVPLAGFGYGLPISRLYAQYFQGDLKLYSLEGYGTDAVIYIKALSTDSIERLPVYNKAAWKHYNTNHEADDWCVPSREPKDMTTFRSA

SEQ ID NO: 815222 - protein, 443 aa, Homo sapiens; identical to SEQ ID NO: 815212

SEQ ID NO: 815223 - protein, 436 aa, Homo sapiens; identical to SEQ ID NO: 815220

SEQ ID NO: 815224 - protein, 469 aa, Homo sapiens; identical to SEQ ID NO: 815217

SEQ ID NO: 815225 - protein, 41 aa, Homo sapiens
NHQKGNSRGNVFRYCSSDCFVHVTIALKPSTVLRNEYRVST

SEQ ID NO: 815226 - protein, 532 aa, Homo sapiens
MEKSNETNGYLDSAQAGPAAGPGAPGTAAGRARRCAGFLRRQALVLLTVSGVLAGAGLGAALRGLSLSRTQVTYLAFPGEMLLRMLRMIILPLVVCSLVSGAASLDASCLGRLGGIAVAYFGLTTLSASALAVALAFIIKPGSGAQTLQSSDLGLEDSGPPPVPKETVDSFLDLARNLFPSNLVVAAFRTYATDYKVVTQNSSSGNVTHEKIPIGTEIEGMNILGLVLFALVLGVALKKLGSEGEDLIRFFNSLNEATMVLVSWIMWYVPVGIMFLVGSKIVEMKDIIVLVTSLGKYIFASILGHVIHGGIVLPLIYFVFTRKNPFRFLLGLLAPFATAFATCSSSATLPSMMKCIEENNGVDKRISRFILPIGATVNMDGAAIFQCVAAVFIAQLNNVELNAGQIFTILVTATASSVGAAGVPAGGVLTIAIILEAIGLPTHDLPLILAVDWIVDRTTTVVNVEGDALGAGILHHLNQKATKKGEQELAEVKVEAIPNCKSEEETSPLVTHQNPAGPVASAPELESKESVL

SEQ ID NO: 815227 - protein, 180 aa, Homo sapiens
MKCIEENNGVDKRISRFILPIGATVNMDGAAIFQCVAAVFIAQLNNVELNAGQIFTILVTATASSVGAAGVPAGGVLTIAIILEAIGLPTHDLPLILAVDWIVDRTTTVVNVEGDALGAGILHHLNQKATKKGEQELAEVKVEAIPNCKSEEETSPLVTHQNPAGPVASAPELESKESVL

SEQ ID NO: 815228 - protein, 532 aa, Homo sapiens; identical to SEQ ID NO: 815226

SEQ ID NO: 815229 - protein, 532 aa, Homo sapiens; identical to SEQ ID NO: 815226

SEQ ID NO: 815230 - protein, 532 aa, Homo sapiens; identical to SEQ ID NO: 815226

SEQ ID NO: 815231 - protein, 532 aa, Homo sapiens; identical to SEQ ID NO: 815226

SEQ ID NO: 815232 - protein, 663 aa, Homo sapiens
MSARLPVLSPPRWPRLLLLSLLLLGAVPGPRRSGAFYLPGLAPVNFCDEEKKSDECKAEIELFVNRLDSVESVLPYEYTAFDFCQASEGKRPSENLGQVLFGERIEPSPYKFTFNKKETCKLVCTKTYHTEKAEDKQKLEFLKKSMLLNYQHHWIVDNMPVTWCYDVEDGQRFCNPGFPIGCYITDKGHAKDACVISSDFHERDTFYIFNHVDIKIYYHVVETGSMGARLVAAKLEPKSFKHTHIDKPDCSGPPMDISNKASGEIKIAYTYSVSFEEDDKIRWASRWDYILESMPHTHIQWFSIMNSLVIVLFLSGMVAMIMLRTLHKDIARYNQMDSTEDAQEEFGWKLVHGDIFRPPRKGMLLSVFLGSGTQILIMTFVTLFFACLGFLSPANRGALMTCAVVLWVLLGTPAGYVAARFYKSFGGEKWKTNVLLTSFLCPGIVFADFFIMNLILWGEGSSAAIPFGTLVAILALWFCISVPLTFIGAYFGFKKNAIEHPVRTNQIPRQIPEQSFYTKPLPGIIMGGILPFGCIFIQLFFILNSIWSHQMYYMFGFLFLVFIILVITCSEATILLCYFHLCAEDYHWQWRSFLTSGFTAVYFLIYAVHYFFSKLQITGTASTILYFGYTMIMVLIFFLFTGTIGFFACFWFVTKIYSVVKVD

SEQ ID NO: 815233 - protein, 663 aa, Homo sapiens; identical to SEQ ID NO: 815232

SEQ ID NO: 815234 - protein, 663 aa, Homo sapiens; identical to SEQ ID NO: 815232

SEQ ID NO: 815235 - protein, 303 aa, Homo sapiens
MSARLPVLSPPRWPRLLLLSLLLLGAVPGPRRSGAFYLPGLAPVNFCDEEKKSDECKAEIELFVNRLDSVESVLPYEYTAFDFCQASEGKRPSENLGQVLFGERIEPSPYKFTFNKKETCKLVCTKTYHTEKAEDKQKLEFLKKSMLLNYQHHWIVDNMPVTWCYDVEDGQRFCNPGFPIGCYITDKGHAKDACVISSDFHERDTFYIFNHVDIKIYYHVVETGSMGARLVAAKLEPKSFKHTHIDKPDCSGPPMDISNKASGEIKIAYTYSVSFEEDDKIRWASRWDYILESMPHTHIQWFR

SEQ ID NO: 815236 - protein, 644 aa, Homo sapiens
MSARLPVLSPPRWPRLLLLSLLLLGAVPGPRRSGAFYLPGLAPVNFCDEEKKSDECKAEIELFVNRLDSVESVLPYEYTAFDFCQASEGKRPSENLGQVLFGERIEPSPYKFTFNKKETCKLVCTKTYHTEKAEDKQKLEFLKWCYDVEDGQRFCNPGFPIGCYITDKGHAKDACVISSDFHERDTFYIFNHVDIKIYYHVVETGSMGARLVAAKLEPKSFKHTHIDKPDCSGPPMDISNKASGEIKIAYTYSVSFEEDDKIRWASRWDYILESMPHTHIQWFSIMNSLVIVLFLSGMVAMIMLRTLHKDIARYNQMDSTEDAQEEFGWKLVHGDIFRPPRKGMLLSVFLGSGTQILIMTFVTLFFACLGFLSPANRGALMTCAVVLWVLLGTPAGYVAARFYKSFGGEKWKTNVLLTSFLCPGIVFADFFIMNLILWGEGSSAAIPFGTLVAILALWFCISVPLTFIGAYFGFKKNAIEHPVRTNQIPRQIPEQSFYTKPLPGIIMGGILPFGCIFIQLFFILNSIWSHQMYYMFGFLFLVFIILVITCSEATILLCYFHLCAEDYHWQWRSFLTSGFTAVYFLIYAVHYFFSKLQITGTASTILYFGYTMIMVLIFFLFTGTIGFFACFWFVTKIYSVVKVD

SEQ ID NO: 815237 - protein, 663 aa, Homo sapiens; identical to SEQ ID NO: 815232

SEQ ID NO: 815238 - protein, 642 aa, Homo sapiens
RTVCKSTVVYSSVLGLHIHSPLTHPEQLPALQVLFMAEIELFVNRLDSVESVLPYEYTAFDFCQASEGKRPSENLGQVLFGERIEPSPYKFTFNKKETCKLVCTKTYHTEKAEDKQKLEFLKKSMLLNYQHHWIVDNMPVTWCYDVEDGQRFCNPGFPIGCYITDKGHAKDACVISSDFHERDTFYIFNHVDIKIYYHVVETGSMGARLVAAKLEPKSFKHTHIDKPDCSGPPMDISNKASGEIKIAYTYSVSFEEDDKIRWASRWDYILESMPHTHIQWFSIMNSLVIVLFLSGMVAMIMLRTLHKDIARYNQMDSTEDAQEEFGWKLVHGDIFRPPRKGMLLSVFLGSGTQILIMTFVTLFFACLGFLSPANRGALMTCAVVLWVLLGTPAGYVAARFYKSFGGEKWKTNVLLTSFLCPGIVFADFFIMNLILWGEGSSAAIPFGTLVAILALWFCISVPLTFIGAYFGFKKNAIEHPVRTNQIPRQIPEQSFYTKPLPGIIMGGILPFGCIFIQLFFILNSIWSHQMYYMFGFLFLVFIILVITCSEATILLCYFHLCAEDYHWQWRSFLTSGFTAVYFLIYAVHYFFSKLQITGTASTILYFGYTMIMVLIFFLFTGTIGFFACFWFVTKIYSVVKVD

SEQ ID NO: 815239 - protein, 645 aa, Homo sapiens
MSARLPVLSPPRWPRLLLLSLLLLGAVPGPRRSGAFYLPGLAPVNFCDEETVESVLPYEYTAFDFCQASEGKRPSENLGQVLFGERIEPSPYKFTFNKKETCKLVCTKTYHTEKAEDKQKLEFLKKSMLLNYQHHWIVDNMPVTWCYDVEDGQRFCNPGFPIGCYITDKGHAKDACVISSDFHERDTFYIFNHVDIKIYYHVVETGSMGARLVAAKLEPKSFKHTHIDKPDCSGPPMDISNKASGEIKIAYTYSVSFEEDDKIRWASRWDYILESMPHTHIQWFSIMNSLVIVLFLSGMVAMIMLRTLHKDIARYNQMDSTEDAQEEFGWKLVHGDIFRPPRKGMLLSVFLGSGTQILIMTFVTLFFACLGFLSPANRGALMTCAVVLWVLLGTPAGYVAARFYKSFGGEKWKTNVLLTSFLCPGIVFADFFIMNLILWGEGSSAAIPFGTLVAILALWFCISVPLTFIGAYFGFKKNAIEHPVRTNQIPRQIPEQSFYTKPLPGIIMGGILPFGCIFIQLFFILNSIWSHQMYYMFGFLFLVFIILVITCSEATILLCYFHLCAEDYHWQWRSFLTSGFTAVYFLIYAVHYFFSKLQITGTASTILYFGYTMIMVLIFFLFTGTIGFFACFWFVTKIYSVVKVD

SEQ ID NO: 815240 - protein, 518 aa, Homo sapiens [sequence omitted]

SEQ ID NO: 815241 - protein, 409 aa, Homo sapiens [sequence omitted]

SEQ ID NO: 815242 - protein, 658 aa, Homo sapiens
MSARLPVLSPPRWPRLLLLSLLLLGAVPGPRRSGAFYLPGLAPVNFCDEEKKSDECKAEIELFVNRLDSVESVLPYEYTAFDFCQASEGKRPSENLGQVLFGERIEPSPYKFTFNKKETCKLVCTKTYHTEKAEDKQKLEFLKKSMLLNYQHHWIVDNMPVTWCYDVEDGQRFCNPGFPIGCYITDKGHAKDACVISSDFHERDTFYIFNHVDIKIYYHVVETGSMGARLVAAKLEPKSFKHTHIDKPDCSGPPMDISNKASGEIKIAYTYSVSFEEDDKIRWASRWDYILESMPHTHIQWFSIMNSLVIVLFLSGMVAMIMLRTLHKDIARYNQMDSTEDAQEEFGWKLVHGDIFRPPRKGMLLSVFLGSGTQILIMTFVTLFFACLGFLSPANRGALMTCAVVLWVLLGTPAGYVAARFYKSFGGEKWKTNVLLTSFLCPGIVFADFFIMNLILWGEGSSAAIPFGTLVAILALWFCISVPLTFIGAYFGFKKNAIEHPVRTNQIPRQIPEQSFYTKPLPGILPFGCIFIQLFFILNSIWSHQMYYMFGFLFLVFIILVITCSEATILLCYFHLCAEDYHWQWRSFLTSGFTAVYFLIYAVHYFFSKLQITGTASTILYFGYTMIMVLIFFLFTGTIGFFACFWFVTKIYSVVKVD

SEQ ID NO: 815243 - protein, 602 aa, Homo sapiens
MSARLPVLSPPRWPRLLLLSLLLLGAVPGPRRSGAFYLPGLAPVNFCDEEKKSDECKAEIELFVNRLDSVESVLPYEYTAFDFCQASEGKRPSENLGQVLFGERIEPSPYKFTFNKKETCKLVCTKTYHTEKAEDKQKLEFLKKSMLLNYQHHWIVDNMPVTWCYDVEDGQRFCNPGFPIGCYITDKGHAKDACVISSDFHERDTFYIFNHVDIKIYYHVVETGSMGARLVAAKLEPKSFKHTHIDKPDCSGPPMDISNKASGEIKIAYTYSVSFEEDDKIRWASRWDYILESMPHTHIQWFSIMNSLVIVLFLSGMVAMIMLRTLHKDIARYNQMDSTEDAQEEFGWKLVHGDIFRPPRKGMLLSVFLGSGTQILIMTFVTLFFACLGFLSPANRGALMTCAVVLWVLLGTPAGYVAARFYKSFGGEKWKTNVLLTSFLCPGIVFADFFIMNLILWGEGSSAAIPFGTLVAILALWFCISVPLTFIGAYFGFKKNAIEHPVRTNQIPRQIPEQSFYTKPLPGIIMGGILPFGCIFIQLFFILNSIWSHQMYYMFGFLFLVFIILVITCSEATILLCYFHLCAEEQLASLHAFGLLPKYTVW

SEQ ID NO: 815244 - protein, 212 aa, Homo sapiens [sequence omitted]

SEQ ID NO: 815245 - protein, 663 aa, Homo sapiens; identical to SEQ ID NO: 815232

SEQ ID NO: 815246 - protein, 138 aa, Homo sapiens
MGGILPFGCIFIQLFFILNSIWSHQMYYMFGFLFLVFIILVITCSEATILLCYFHLCAEDYHWQWRSFLTSGFTAVYFLIYAVHYFFSKLQITGTASTILYFGYTMIMVLIFFLFTGTIGFFACFWFVTKIYSVVKVD

SEQ ID NO: 815247 - protein, 131 aa, Homo sapiens
MTWTHYPLVPPWAFAWNGRIPGNPGQPRLPAPPKGPCKLALLKLFLETWRQLPRLETVDGEPSLEDLEESTTCLGTRDGFQPCLEDPEGIMLTFPCSFKVYNSRNSVPGKKAWDHLNHCSNIQFLSNFLVN

SEQ ID NO: 815248 - protein, 602 aa, Homo sapiens
ASRMRRARSREGMAGAVPGAIMDEDYYGSAAEWGDEADGGQQEDDSGEGEDDAEVQQECLHKFSTRDYIMEPSIFNTLKRYFQAGGSPENVIQLLSENYTAVAQTVNLLAEWLIQTGVEPVQVQETVENHLKSLLIKHFDPRKADSIFTEEGETPAWLEQMIAHTTWRDLFYKLAEAHPDCLMLNFTVKLISDAGYQGEITSVSTACQQLEVFSRVLRTSLATILDGGEENLEKNLPEFAKMVCHGEHTYLFAQAMMSVLAQEEQGGSAVRRIAQEVQRFAQEKGHDASQITLALGTAASYPRACQALGAMLSKGALNPADITVLFKMFTSMDPPPVELIRVPAFLDLFMQSLFKPGARINQDHKHKYIHILAYAASVVETWKKNKRVSINKDELKSTSKAVETVHNLCCNENKGASELVAELSTLYQCIRFPVVAMGVLKWVDWTVSEPRYFQLQTDHTPVHLALLDEISTCHQLLHPQVLQLLVKLFETEHSQLDVMEQLELKKTLLDRMVHLLSRGYVLPVVSYIRKCLEKLDTDISLIRYFVTEVLDVIAPPYTSDFVQLFLPILENDSIAGTIKTEGEHDPVTEFIAHCKSNFIMVN

SEQ ID NO: 815249 - protein, 420 aa, Homo sapiens
MLNFTVKLISDAGYQGEITSVSTACQQLEVFSRVLRTSLATILDGGEENLEKNLPEFAKMVCHGEHTYLFAQAMMSVLAQEEQGGSAVRRIAQEVQRFAQEKGHDASQITLALGTAASYPRACQALGAMLSKGALNPADITVLFKMFTSMDPPPVELIRVPAFLDLFMQSLFKPGARINQDHKHKYIHILAYAASVVETWKKNKRVSINKDELKSTSKAVETVHNLCCNENKGASELVAELSTLYQCIRFPVVAMGVLKWVDWTVSEPRYFQLQTDHTPVHLALLDEISTCHQLLHPQVLQLLVKLFETEHSQLDVMEQLELKKTLLDRMVHLLSRGYVLPVVSYIRKCLEKLDTDISLIRYFVTEVLDVIAPPYTSDFVQLFLPILENDSIAGTIKTEGEHDPVTEFIAHCKSNFIMVN

SEQ ID NO: 815250 - protein, 361 aa, Homo sapiens
MVCHGEHTYLFAQAMMSVLAQEEQGGSAVRRIAQEVQRFAQEKGHDASQITLALGTAASYPRACQALGAMLSKGALNPADITVLFKMFTSMDPPPVELIRVPAFLDLFMQSLFKPGARINQDHKHKYIHILAYAASVVETWKKNKRVSINKDELKSTSKAVETVHNLCCNENKGASELVAELSTLYQCIRFPVVAMGVLKWVDWTVSEPRYFQLQTDHTPVHLALLDEISTCHQLLHPQVLQLLVKLFETEHSQLDVMEQLELKKTLLDRMVHLLSRGYVLPVVSYIRKCLEKLDTDISLIRYFVTEVLDVIAPPYTSDFVQLFLPILENDSIAGTIKTEGEHDPVTEFIAHCKSNFIMVN

SEQ ID NO: 815251 - protein, 133 aa, Homo sapiens
EHDPVTEFIAHCKSKLVHHDEVRFAVSYKLRHRVMLAFRFDGTCDAVILQNILLLAVPGAIMDEDYYGSAAEWGDEADGGQQEDDSGEGEDDAEVQQECLHKFSTRDYIMEPSIFNTLKRYVRKVSVLGGGWG

SEQ ID NO: 815252 - protein, 387 aa, Homo sapiens
MLNFTVKLISDAGYQGEITSVSTACQQLEVFSRVLRTSLATILDGGEENLEKNLPEFAKMVCHGEHTYLFAQAMMSVLAQEEQGGSAVRRIAQEVQRFAQEKGHDASQITLALGTAASYPRACQALGAMLSKGALNPADITVLFKMFTSMDPPPVELIRVPAFLDLFMQSLFKPGARINQDHKHKYIHILAYAASVVETWKKNKRVSINKDELKSTSKAVETVHNLCCNENKGASELVAELSTLYQCIRFPVVAMGVLKWVDWTVSEPRYFQLQTDHTPVHLALLDEISTCHQLLHPQVLQLLVKLFETEHSQLDVMEQLELKKTLLDRMVHLLSRGYVLPVVSYIRKCLEKLDTDISLIRYFVTEVSNAPLVSCFILFTLALPFLA

SEQ ID NO: 815253 - protein, 133 aa, Homo sapiens; identical to SEQ ID NO: 815251

SEQ ID NO: 815254 - protein, 292 aa, Homo sapiens
MLSKGALNPADITVLFKMFTSMDPPPVELIRVPAFLDLFMQSLFKPGARINQDHKHKYIHILAYAASVVETWKKNKRVSINKDELKSTSKAVETVHNLCCNENKGASELVAELSTLYQCIRFPVVAMGVLKWVDWTVSEPRYFQLQTDHTPVHLALLDEISTCHQLLHPQVLQLLVKLFETEHSQLDVMEQLELKKTLLDRMVHLLSRGYVLPVVSYIRKCLEKLDTDISLIRYFVTEVLDVIAPPYTSDFVQLFLPILENDSIAGTIKTEGEHDPVTEFIAHCKSNFIMVN

SEQ ID NO: 815255 - protein, 312 aa, Homo sapiens
MVCHGEHTYLFAQAMMSVLAQEEQGALNPADITVLFKMFTSMDPPPVELIRVPAFLDLFMQSLFKPGARINQDHKHKYIHILAYAASVVETWKKNKRVSINKDELKSTSKAVETVHNLCCNENKGASELVAELSTLYQCIRFPVVAMGVLKWVDWTVSEPRYFQLQTDHTPVHLALLDEISTCHQLLHPQVLQLLVKLFETEHSQLDVMEQLELKKTLLDRMVHLLSRGYVLPVVSYIRKCLEKLDTDISLIRYFVTEVLDVIAPPYTSDFVQLFLPILENDSIAGTIKTEGEHDPVTEFIAHCKSNFIMVN

SEQ ID NO: 815256 - protein, 133 aa, Homo sapiens; identical to SEQ ID NO: 815251

SEQ ID NO: 815257 - protein, 133 aa, Homo sapiens; identical to SEQ ID NO: 815251

SEQ ID NO: 815258 - protein, 347 aa, Homo sapiens
MLNFTVKLISDAGYQGEITSVSTACQQLEVFSRVLRTSLATILDGGEENLEKNLPEFAKMVCHGEHTYLFAQAMMSVLAQEEQGGSAVRRIAQEVQRFAQEKGHDASQITLALGTAASYPRACQALGAMLSKGALNPADITVLFKMFTSMDPPPVELIRVPAFLDLFMQSLFKPGARINQDHKHKYIHILAYAASVVETWKKNKRVSINKDELKSTSKAVETVHNLCCNENKGASELVAELSTLYQCIRFPVVAMGVLKWVDWTVSEPRYFQLQTDHTPVHLALLDEISTCHQLLHPQVLQLLVKLFETEHSQLDVMEQLELKKTLLDRMVHLLSRGAGRHCSSLYL

SEQ ID NO: 815259 - protein, 350 aa, Homo sapiens
MVCHGEHTYLFAQAMMSVLAQEEQGGSAVRRIAQEVQRFAQEKGHDASQITLALGTAASYPRACQALGAMLSKGALNPADITVLFKMFTSMDPPPVELIRVPAFLDLFMQSLFKPGARINQDHKHKYIHILAYAASVVETWKKNKRVSINKDELKSTSKAVETVHNLCCNENKGASELVAELSTLYQCIRFPVVAMGVLKWVDWTVSEPRYFQLQTDHTPVHLALLDEVLQLLVKLFETEHSQLDVMEQLELKKTLLDRMVHLLSRGYVLPVVSYIRKCLEKLDTDISLIRYFVTEVLDVIAPPYTSDFVQLFLPILENDSIAGTIKTEGEHDPVTEFIAHCKSNFIMVN

SEQ ID NO: 815260 - protein, 420 aa, Homo sapiens; identical to SEQ ID NO: 815249

SEQ ID NO: 815261 - protein, 387 aa, Homo sapiens; identical to SEQ ID NO: 815252

SEQ ID NO: 815262 - protein, 420 aa, Homo sapiens; identical to SEQ ID NO: 815249

SEQ ID NO: 815263 - protein, 420 aa, Homo sapiens; identical to SEQ ID NO: 815249

SEQ ID NO: 815264 - protein, 420 aa, Homo sapiens; identical to SEQ ID NO: 815249

SEQ ID NO: 815265 - protein, 420 aa, Homo sapiens; identical to SEQ ID NO: 815249

SEQ ID NO: 815266 - protein, 387 aa, Homo sapiens; identical to SEQ ID NO: 815252

SEQ ID NO: 815267 - protein, 387 aa, Homo sapiens; identical to SEQ ID NO: 815252

SEQ ID NO: 815268 - protein, 347 aa, Homo sapiens; identical to SEQ ID NO: 815258

SEQ ID NO: 815269 - protein, 387 aa, Homo sapiens; identical to SEQ ID NO: 815252

SEQ ID NO: 815270 - protein, 399 aa, Homo sapiens
MLNFTVKLISDAGYQGEITSVSTACQQLEVFSRVLRTSLATILDGGEENLEKNLPEFAKMVCHGEHTYLFAQAMMSVLAQEEQGGSAVRRIAQEVQRFAQEKGHDASQITLALGTAASYPRACQALGAMLSKGALNPADITVLFKMFTSMDPPPVELIRVPAFLDLFMQSLFKPGARINQDHKHKYIHILAYAASVVETWKKNKRVSINKDELKSTSKAVETVHNLCCNENKGASELVAELSTLYQCIRFPVVAMGVLKWVDWTVSEPRYFQLQTDHTPVHLALLDEISTCHQLLHPQVLQLLVKLFETEHSQLDVMEQLELKKTLLDRMVHLLSRGYVLPVVSYIRKCLEKLDTDISLIRYFVTEVSNAPLAVSRGPLGTPLGELLSKLTSVFSQEPS

SEQ ID NO: 815271 - protein, 371 aa, Homo sapiens
MLNFTVKLISDAGYQGEITSVSTACQQLEVFSRVLRTSLATILDGGEENLEKNLPEFAKMVCHGEHTYLFAQAMMSVLAQEEQGGSAVRRIAQEVQRFAQEKGHDASQITLALGTAASYPRACQALGAMLSKGALNPADITVLFKMFTSMDPPPVELIRVPAFLDLFMQSLFKPGARINQDHKHKYIHILAYAASVVETWKKNKRVSINKDELKSTSKAVETVHNLCCNENKGASELVAELSTLYQCIRFPVVAMGVLKWVDWTVSEPRYFQLQTDHTPVHLALLDEISTCHQLLHPQVLQLLVKLFETEHSQLDVMEQLELKKTLLDRMVHLLSRELDVIAPPYTSDCGSRRGSQESECVHKSPIKKAAP

SEQ ID NO: 815272 - protein, 133 aa, Homo sapiens; identical to SEQ ID NO: 815251

SEQ ID NO: 815273 - protein, 253 aa, Homo sapiens
PVVSVSLPCQQKMAVPPTYADLGKSARDVFTKGYGFGLIKLDLKTKSENGLEFTSSGSANTETTKVTGSLETKYRWTEYGLTFTEKWNTDNTLGTEITVEDQLARGLKLTFDSSFSPNTGKKNAKIKTGYKREHINLGCDMDFDIAGPSIRGALVLGYEGWLAGYQMNFETAKSRVTQSNFAVGYKTDEFQLHTNVNDGTEFGGSIYQKVNKKLETAVNLAWTAGNSNTRFGIAAKYQIDPDACFSAKVNNSS

SEQ ID NO: 815274 - protein, 352 aa, Homo sapiens
TLSRAGPGGGARRAGRAGGEAGPRRRRPRRPALGPAARSAPLPGSAPCLRVAAPAVAASEPAATSSEQKMAVPPTYADLGKSARDVFTKGYGFGLIKLDLKTKSENGLEFTSSGSANTETTKVTGSLETKYRWTEYGLTFTEKWNTDNTLGTEITVEDQLARGLKLTFDSSFSPNTGKKNAKIKTGYKREHINLGCDMDFDIAGPSIRGALVLGYEGWLAGYQMNFETAKSRVTQSNFAVGYKTDEFQLHTNVNDGTEFGGSIYQKVNKKLETAVNLAWTAGNSNTRFGIAAKYQIDPDACFSAKVNNSSLIGLGYTQTLKPGIKLTLSALLDGKNVNAGGHKLGLGLEFQA

SEQ ID NO: 815275 - protein, 352 aa, Homo sapiens; identical to SEQ ID NO: 815274

SEQ ID NO: 815276 - protein, 283 aa, Homo sapiens
MAVPPTYADLGKSARDVFTKGYGFGLIKLDLKTKSENGLEFTSSGSANTETTKVTGSLETKYRWTEYGLTFTEKWNTDNTLGTEITVEDQLARGLKLTFDSSFSPNTGKKNAKIKTGYKREHINLGCDMDFDIAGPSIRGALVLGYEGWLAGYQMNFETAKSRVTQSNFAVGYKTDEFQLHTNVNDGTEFGGSIYQKVNKKLETAVNLAWTAGNSNTRFGIAAKYQIDPDACFSAKVNNSSLIGLGYTQTLKPGIKLTLSALLDGKNVNAGGHKLGLGLEFQA

SEQ ID NO: 815277 - protein, 313 aa, Homo sapiens
VGNLVLNGEGLAPVSPAYPLRARRTSSEQKMAVPPTYADLGKSARDVFTKGYGFGLIKLDLKTKSENGLEFTSSGSANTETTKVTGSLETKYRWTEYGLTFTEKWNTDNTLGTEITVEDQLARGLKLTFDSSFSPNTGKKNAKIKTGYKREHINLGCDMDFDIAGPSIRGALVLGYEGWLAGYQMNFETAKSRVTQSNFAVGYKTDEFQLHTNVNDGTEFGGSIYQKVNKKLETAVNLAWTAGNSNTRFGIAAKYQIDPDACFSAKVNNSSLIGLGYTQTLKPGIKLTLSALLDGKNVNAGGHKLGLGLEFQA

SEQ ID NO: 815278 - protein, 335 aa, Homo sapiens
RKRTPASLRPGRRGPGPWGAEREALREERARGPGSPAAGRDRERPARAWLQKMAVPPTYADLGKSARDVFTKGYGFGLIKLDLKTKSENGLEFTSSGSANTETTKVTGSLETKYRWTEYGLTFTEKWNTDNTLGTEITVEDQLARGLKLTFDSSFSPNTGKKNAKIKTGYKREHINLGCDMDFDIAGPSIRGALVLGYEGWLAGYQMNFETAKSRVTQSNFAVGYKTDEFQLHTNVNDGTEFGGSIYQKVNKKLETAVNLAWTAGNSNTRFGIAAKYQIDPDACFSAKVNNSSLIGLGYTQTLKPGIKLTLSALLDGKNVNAGGHKLGLGLEFQA

SEQ ID NO: 815279 - protein, 259 aa, Homo sapiens
CSVASLGGAKSENGLEFTSSGSANTETTKVTGSLETKYRWTEYGLTFTEKWNTDNTLGTEITVEDQLARGLKLTFDSSFSPNTGKKNAKIKTGYKREHINLGCDMDFDIAGPSIRGALVLGYEGWLAGYQMNFETAKSRVTQSNFAVGYKTDEFQLHTNVNDGTEFGGSIYQKVNKKLETAVNLAWTAGNSNTRFGIAAKYQIDPDACFSAKVNNSSLIGLGYTQTLKPGIKLTLSALLDGKNVNAGGHKLGLGLEFQA

SEQ ID NO: 815280 - protein, 308 aa, Homo sapiens
  misc_feature (26)..(26): Xaa can be any naturally occurring amino acid
  misc_feature (28)..(28): Xaa can be any naturally occurring amino acid
  misc_feature (30)..(30): Xaa can be any naturally occurring amino acid
  misc_feature (53)..(53): Xaa can be any naturally occurring amino acid
AGCSQPPFPEPAATSSEKMAVPPTYXRXFXLAKSARDVFTKGYGFGLITTGPXGNLKTKSENGLEFTSSGSANTETTKVTGSLETKYRWTEYGLTFTEKWNTDNTLGTEITVEDQLARGLKLTFDSSFSPNTGKKNAKIKTGYKREHINLGCDMDFDIAGPSIRGALVLGYEGWLAGYQMNFETAKSRVTQSNFAVGYKTDEFQLHTNVNDGTEFGGSIYQKVNKKLETAVNLAWTAGNSNTRFGIAAKYQIDPDACFSAKVNNSSLIGLGYTQTLKPGIKLTLSALLDGKNVNAGGHKLGLGLEFQA

SEQ ID NO: 815281 - protein, 210 aa, Homo sapiens
PVINGCYTEARDFVEDQLARGLKLTFDSSFSPNTGKKNAKIKTGYKREHINLGCDMDFDIAGPSIRGALVLGYEGWLAGYQMNFETAKSRVTQSNFAVGYKTDEFQLHTNVNDGTEFGGSIYQKVNKKLETAVNLAWTAGNSNTRFGIAAKYQIDPDACFSAKVNNSSLIGLGYTQTLKPGIKLTLSALLDGKNVNAGGHKLGLGLEFQA

SEQ ID NO: 815282 - protein, 219 aa, Homo sapiens
MAWVNRSLSGKKFPTECQYVVDHASQLARGLKLTFDSSFSPNTGKKNAKIKTGYKREHINLGCDMDFDIAGPSIRGALVLGYEGWLAGYQMNFETAKSRVTQSNFAVGYKTDEFQLHTNVNDGTEFGGSIYQKVNKKLETAVNLAWTAGNSNTRFGIAAKYQIDPDACFSAKVNNSSLIGLGYTQTLKPGIKLTLSALLDGKNVNAGGHKLGLGLEFQA

SEQ ID NO: 815283 - protein, 203 aa, Homo sapiens
MRGFCDSRDVHSLTFSDSIRFLNLNNFGKKNAKIKTGYKREHINLGCDMDFDIAGPSIRGALVLGYEGWLAGYQMNFETAKSRVTQSNFAVGYKTDEFQLHTNVNDGTEFGGSIYQKVNKKLETAVNLAWTAGNSNTRFGIAAKYQIDPDACFSAKVNNSSLIGLGYTQTLKPGIKLTLSALLDGKNVNAGGHKLGLGLEFQA

SEQ ID NO: 815284 - protein, 375 aa, Homo sapiens
TLSRAGPGGGARRAGRAGGEAGPRRRRPRRPALGPAARSAPLPGSAPCLRVAAPAVAASEPAATSSEQKMAVPPTYADLGKSARDVFTKGYGFGLIKLDLKTKSENGLEFTSSGSANTETTKVTGSLETKYRWTEYGLTFTEKWNTDNTLGTEITVEDQLARGLKLTFDSSFSPNTGKKNAKIKTGYKREHINLGCDMDFDIAGPSIRGALVLGYEGWLAGYQMNFETAKSRVTQSNFAVGYKTDEFQLHTNVNDGTEFGGSIYQKVNKKLETAVNLAWTAGNSNTRFGIAAKYQIDPDACFSAKVNNSSLIGLGYTQTLKPGIKLTLSALLDGKHVVFGKVKEGMNIVEAMERFGSRNGKTSKKITIADCGQLE

SEQ ID NO: 815285 - protein, 194 aa, Homo sapiens
PEGGNSRGTRYQIQKRKCNHGKLNQWWILEPGFQARANLVDLMKALSEYFPWYDSLVSKKLSPEVSSIGFGDTKVISLESTMGKDGLDFCQHVMKNDGTEFGGSIYQKVNKKLETAVNLAWTAGNSNTRFGIAAKYQIDPDACFSAKVNNSSLIGLGYTQTLKPGIKLTLSALLDGKNVNAGGHKLGLGLEFQA

SEQ ID NO: 815286 - protein, 283 aa, Homo sapiens
TLSRAGPGGGARRAGRAGGEAGPRRRRPRRPALGPAARSAPLPGSAPCLRVAAPAVAASEPAATSSEQKMAVPPTYADLGKSARDVFTKGYGFGLIKLDLKTKSENGLEFTSSGSANTETTKVTGSLETKYRWTEYGLTFTEKWNTDNTLGTEITVEDQLARGLKLTFDSSFSPNTGKKNAKIKTGYKREHINLGCDMDFDIAGPSIRGALVLGYEGWLAGYQMNFETAKSRVTQSNFAVGYKTDEFQLHTNVWTVYEIDDRFHGKKKEVACQKSLDSVTVPD

SEQ ID NO: 815287 - protein, 118 aa, Homo sapiens
MAVPPTYADLGKSARDVFTKGYGFGLIKLDLKTKSENGLEFTSSGSANTETTKVTGSLETKYRWTEYGLTFTEKWNTDNTLGTEITVEDQLARGLKLTFDSSFSPNTGKKNAKIKTGV

SEQ ID NO: 815288 - protein, 115 aa, Homo sapiens
MAVPPTYADLGKSARDVFTKGYGFGLIKLDLKTKSENGLEFTSSGSANTETTKVTGSLETKYRWTEYGLTFTEKWNTDNTLGTEITVEDQLARGLKLTFDSSFSPNTGPHHECKA

SEQ ID NO: 815289 - protein, 148 aa, Homo sapiens [sequence omitted]

SEQ ID NO: 815290 - protein, 633 aa, Homo sapiens
MPSCGACTCGAAAVRLITSSLASAQRGISGGRIHMSVLGRLGTFETQILQRAPLRSFTETPAYFASKDGISKDGSGDGNKKSASEGSSKKSGSGNSGKGGNQLRCPKCGDLCTHVETFVSSTRFVKCEKCHHFFVVLSEADSKKSIIKEPESAAEAVKLAFQQKPPPPPKKIYNYLDKYVVGQSFAKKVLSVAVYNHYKRIYNNIPANLRQQAEVEKQTSLTPRELEIRRREDEYRFTKLLQIAGISPHGNALGASMQQQVNQQIPQEKRGGEVLDSSHDDIKLEKSNILLLGPTGSGKTLLAQTLAKCLDVPFAICDCTTLTQAGYVGEDIESVIAKLLQDANYNVEKAQQGIVFLDEVDKIGSVPGIHQLRDVGGEGVQQGLLKLLEGTIVNVPEKNSRKLRGETVQVDTTNILFVASGAFNGLDRIISRRKNEKYLGFGTPSNLGKGRRAAAAADLANRSGESNTHQDIEEKDRLLRHVEARDLIEFGMIPEFVGRLPVVVPLHSLDEKTLVQILTEPRNAVIPQYQALFSMDKCELNVTEDALKAIARLALERKTGARGLRSIMEKLLLEPMFEVPNSDIVCVEVDKEVVEGKKEPGYIRAPTKESSEEEYDSGVEEEGWPRQADAANS

SEQ ID NO: 815291 - protein, 582 aa, Homo sapiens
MPSCGACTCGAAAVRLITSSLASAQRGISGGRIHMSVLGRLGTFETQILQRAPLRSFTETPAYFASKDGISKDGSGDGNKKSASEGSSKKSGSGNSGKGGNQLRCPKCGDLCTHVETFVSSTRFVKCEKCHHFFVVLSEADSKKSIIKEPESAAEAVKLAFQQKPPPPPKKIYNYLDKYVVGQSFAKKVLSVAVYNHYKRIYNNIPANLRQQAEVEKQTSLTPRELEIRRREDEYRFTKLLQIAGISPHGNALGASMQQQVNQQIPQEKRGGEVLDSSHDDIKLEKSNILLLGPTGSGKTLLAQTLAKCLDVPFAICDCTTLTQAGYVGEDIESVIAKLLQDANYNVEKAQQGIVFLDEVDKIGSVPGIHQLRDVGGEGVQQGLLKLLEGTIVNVPEKNSRKLRGETVQVDTTNILFVASGAFNGLDRIISRRKNEKYLGFGTPSNLGKGRRAAAAADLANRSGESNTHQDIEEKDRLLRHVEARDLIEFGMIPEFVGRLPVVVPLHSLDEKTLVQILTDHHTRPYLPSLIHFSTMGEYMELKSGLNLQKVIYLFYFIFLRQSLAVSPRLEYSATILAHCNL

SEQ ID NO: 815292 - protein, 385 aa, Homo sapiens
MPSCGACTCGAAAVRLITSSLASAQRGISGGRIHMSVLGRLGTFETQILQRAPLRSFTETPAYFASKDGISKDGSGDGNKKSASEGSSKKSGSGNSGKGGNQLRCPKCGDLCTHVETFVSSTRFVKCEKCHHFFVVLSEADSKKSIIKEPESAAEAVKLAFQQKPPPPPKKIYNYLDKYVVGQSFAKKVLSVAVYNHYKRIYNNIPANLRQQAEVEKQTSLTPRELEIRRREDEYRFTKLLQIAGISPHGNALGASMQQQVNQQIPQEKRGGEVLDSSHDDIKLEKSNILLLGPTGSGKTLLAQTLAKCLDVPFAICDCTTLTQAGYVGEDIESVIAKLLQDANYNVEKAQQGIVFLDEVDKIGSVPGIHQLRDVGGEGVQQVSS

SEQ ID NO: 815293 - protein, 153 aa, Homo sapiens
MVINKYLLLHWMLLKHYHVGCSSNLKQQVNQQIPQEKRGGEVLDSSHDDIKLEKSNILLLGPTGSGKTLLAQTLAKCLDVPFAICDCTTLTQAGYVGEDIESVIAKLLQDANYNVEKAQQGIVFLDEVDKIGSVPGIHQLRDVGGEGVQQVSS

SEQ ID NO: 815294 - protein, 582 aa, Homo sapiens; identical to SEQ ID NO: 815291

SEQ ID NO: 815295 - protein, 582 aa, Homo sapiens; identical to SEQ ID NO: 815291

SEQ ID NO: 815296 - protein, 401 aa, Homo sapiens
TGVTPVLNLETKQNFKVHQNRTSLKHKSHGGRQWSHLEGLAASGRSHRPRPTMAEELVLERCDLELETNGRDHHTADLCREKLVVRRGQPFWLTLHFEGRNYEASVDSLTFSVVTGPAPSQEAGTKARFPLRDAVEEGDWTATVVDQQDCTLSLQLTTPANAPIGLYRLSLEASTGYQGSSFVLGHFILLFNAWCPADAVYLDSEEERQEYVLTQQGFIYQGSAKFIKNIPWNFGQFEDGILDICLILLDVNPKFLKNAGRDCSRRSSPVYVGRVVSGMVNCNDDQGVLLGRWDNNYGDGVSPMSWIGSVDILRRWKNHGCQRVKYGQCWVFAAVACTGELHAGMWVMSPGRGHEEHWSRNQDIPALVLPPATNTLNALCGLEPVTTLSGPLSNSHPSSGC

SEQ ID NO: 815297 - protein, 245 aa, Homo sapiens
MAEELVLERCDLELETNGRDHHTADLCREKLVVRRGQPFWLTLHFEGRNYEASVDSLTFSVVTGPAPSQEAGTKARFPLRDAVEEGDWTATVVDQQDCTLSLQLTTPANAPIGLYRLSLEASTGYQGSSFVLGHFILLFNAWCPADAVYLDSEEERQEYVLTQQGFIYQGSAKFIKNIPWNFGQFEDGILDICLILLDVNPKFLKNAGRDCSRRSSPVYVGRVVSGMVNCNDDRCLLDLGHTRDG

SEQ ID NO: 815298 - protein, 144 aa, Homo sapiens
MQQLPATNQIHITTTNRKRRRHARRIKAERKATNTQGAAARSKTEHLQKRNQNHDNEAKEELNRRDTHTGRRKKHQSKEDGEAKTESEEAQAHEREHKGDQDNVTNKRQHKTKTNKQRQTAITTQKRENSKKTRRNTATLPRDR

SEQ ID NO: 815299 - protein, 739 aa, Homo sapiens
TGVTPVLNLETKQNFKVHQNRTSLKHKSHGGRQWSHLEGLAASGRSHRPRPTMAEELVLERCDLELETNGRDHHTADLCREKLVVRRGQPFWLTLHFEGRNYEASVDSLTFSVVTGPAPSQEAGTKARFPLRDAVEEGDWTATVVDQQDCTLSLQLTTPANAPIGLYRLSLEASTGYQGSSFVLGHFILLFNAWCPADAVYLDSEEERQEYVLTQQGFIYQGSAKFIKNIPWNFGQFEDGILDICLILLDVNPKFLKNAGRDCSRRSSPVYVGRVVSGMVNCNDDQGVLLGRWDNNYGDGVSPMSWIGSVDILRRWKNHGCQRVKYGQCWVFAAVACTVLRCLGIPTRVVTNYNSAHDQNSNLLIEYFRNEFGEIQGDKSEMIWNFHCWVESWMTRPDLQPGYEGWQALDPTPQEKSEGTYCCGPVPVRAIKEGDLSTKYDAPFVFAEVNADVVDWIQQDDGSVHKSINRSLIVGLKISTKSVGRDEREDITHTYKYPEGSSEEREAFTRANHLNKLAEKEETGMAMRIRVGQSMNMGSDFDVFAHITNNTAEEYVCRLLLCARTVSYNGILGPECGTKYLLNLNLEPFSEKSVPLCILYEKYRDCLTESNLIKVRALLVEPVINSYLLAERDLYLENPEIKIRILGEPKQKRKLVAEVSLQNPLPVALEGCTFTVEGAGLTEEQKTVEIPDPVEAGEEVKVRMDLLPLHMGLHKLVVNFESDKLKAVKGFRNVIIGPA

SEQ ID NO: 815300 - protein, 687 aa, Homo sapiens
MAEELVLERCDLELETNGRDHHTADLCREKLVVRRGQPFWLTLHFEGRNYEASVDSLTFSVVTGPAPSQEAGTKARFPLRDAVEEGDWTATVVDQQDCTLSLQLTTPANAPIGLYRLSLEASTGYQGSSFVLGHFILLFNAWCPADAVYLDSEEERQEYVLTQQGFIYQGSAKFIKNIPWNFGQFEDGILDICLILLDVNPKFLKNAGRDCSRRSSPVYVGRVVSGMVNCNDDQGVLLGRWDNNYGDGVSPMSWIGSVDILRRWKNHGCQRVKYGQCWVFAAVACTVLRCLGIPTRVVTNYNSAHDQNSNLLIEYFRNEFGEIQGDKSEMIWNFHCWVESWMTRPDLQPGYEGWQALDPTPQEKSEGTYCCGPVPVRAIKEGDLSTKYDAPFVFAEVNADVVDWIQQDDGSVHKSINRSLIVGLKISTKSVGRDEREDITHTYKYPEGSSEEREAFTRANHLNKLAEKEETGMAMRIRVGQSMNMGSDFDVFAHITNNTAEEYVCRLLLCARTVSYNGILGPECGTKYLLNLNLEPFSEKSVPLCILYEKYRDCLTESNLIKVRALLVEPVINSYLLAERDLYLENPEIKIRILGEPKQKRKLVAEVSLQNPLPVALEGCTFTVEGAGLTEEQKTVEIPDPVEAGEEVKVRMDLLPLHMGLHKLVVNFESDKLKAVKGFRNVIIGPA

SEQ ID NO: 815301 - protein, 687 aa, Homo sapiens; identical to SEQ ID NO: 815300

SEQ ID NO: 815302 - protein, 847 aa, Homo sapiens
TGVTPVLNLETKQNFKVHQNRTSLKHKSHGGRQWSHLEGLAASGRSHRPRPTMAEELVLERCDLELETNGRDHHTADLCREKLVVRRGQPFWLTLHFEGRNYEASVDSLTFSVVTESDQPLLALPMTQTCLWGRALPSTWKSSCFESVPITVPLRTRLGSVLFGKKRHRRRQLRAKDPLQMRPLPQTPRISLGDRFALSLSFLTWARGLKGSRCFMKCKRLYEGPAPSQEAGTKARFPLRDAVEEGDWTATVVDQQDCTLSLQLTTPANAPIGLYRLSLEASTGYQGSSFVLGHFILLFNAWCPADAVYLDSEEERQEYVLTQQGFIYQGSAKFIKNIPWNFGQFEDGILDICLILLDVNPKFLKNAGRDCSRRSSPVYVGRVVSGMVNCNDDQGVLLGRWDNNYGDGVSPMSWIGSVDILRRWKNHGCQRVKYGQCWVFAAVACTVLRCLGIPTRVVTNYNSAHDQNSNLLIEYFRNEFGEIQGDKSEMIWNFHCWVESWMTRPDLQPGYEGWQALDPTPQEKSEGTYCCGPVPVRAIKEGDLSTKYDAPFVFAEVNADVVDWIQQDDGSVHKSINRSLIVGLKISTKSVGRDEREDITHTYKYPEGSSEEREAFTRANHLNKLAEKEETGMAMRIRVGQSMNMGSDFDVFAHITNNTAEEYVCRLLLCARTVSYNGILGPECGTKYLLNLNLEPFSEKSVPLCILYEKYRDCLTESNLIKVRALLVEPVINSYLLAERDLYLENPEIKIRILGEPKQKRKLVAEVSLQNPLPVALEGCTFTVEGAGLTEEQKTVEIPDPVEAGEEVKVRMDLLPLHMGLHKLVVNFESDKLKAVKGFRNVIIGPA

SEQ ID NO: 815303 - protein, 578 aa, Homo sapiens
MQAPQHCAGHGGEDPALAILDALAEVVLPAPQDVHAADPGHGADAVPELYVLTQQGFIYQGSAKFIKNIPWNFGQFEDGILDICLILLDVNPKFLKNAGRDCSRRSSPVYVGRVVSGMVNCNDDQGVLLGRWDNNYGDGVSPMSWIGSVDILRRWKNHGCQRVKYGQCWVFAAVACTVLRCLGIPTRVVTNYNSAHDQNSNLLIEYFRNEFGEIQGDKSEMIWNFHCWVESWMTRPDLQPGYEGWQALDPTPQEKSEGTYCCGPVPVRAIKEGDLSTKYDAPFVFAEVNADVVDWIQQDDGSVHKSINRSLIVGLKISTKSVGRDEREDITHTYKYPEGSSEEREAFTRANHLNKLAEKEETGMAMRIRVGQSMNMGSDFDVFAHITNNTAEEYVCRLLLCARTVSYNGILGPECGTKYLLNLNLEPFSEKSVPLCILYEKYRDCLTESNLIKVRALLVEPVINSYLLAERDLYLENPEIKIRILGEPKQKRKLVAEVSLQNPLPVALEGCTFTVEGAGLTEEQKTVEIPDPVEAGEEVKVRMDLLPLHMGLHKLVVNFESDKLKAVKGFRNVIIGPA

SEQ ID NO: 815304 - protein, 656 aa, Homo sapiens
TGVTPVLNLETKQNFKVHQNRTSLKHKSHGGRQWSHLEGLAASGRSHRPRPTMAEELVLERCDLELETNGRDHHTADLCREKLVVRRGQPFWLTLHFEGRNYEASVDSLTFSVVTGPAPSQEAGTKARFPLRDAVEEGDWTATVVDQQDCTLSLQLTTPANAPIGLYRLSLEASTGYQGSSFVLGHFILLFNAWCPADAVYLDSEEERQEYVLTQQGFIYQGSAKFIKNIPWNFGQFEDGILDICLILLDVNPKFLKNAGRDCSRRSSPVYVGRVVSGMVNCNDDQGVLLGRWDNNYGDGVSPMSWIGSVDILRRWKNHGCQRVKYGQCWVFAAVACTVLRCLGIPTRVVTNYNSAHDQNSNLLIEYFRNEFGEIQGDKSEMIWNFHCWVESWMTRPDLQPGYEGWQALDPTPQEKSEGTYCCGPVPVRAIKEGDLSTKYDAPFVFAEVNADVVDWIQQDDGSVHKSINRSLIVGLKISTKSVGRDEREDITHTYKYPEGSSEEREAFTRANHLNKLAEKEETGMAMRIRVGQSMNMGSDFDVFAHITNNTAEEYVCRLLLCARTVSYNGILGPECGTKYLLNLNLEPFSEKSVPLCILYEKYRDCLTESNLIKVRALLVEPVINSYLLAERDLYLENPEIKIRILGEPKQKRNWW

SEQ ID NO: 815305 - protein, 739 aa, Homo sapiens; identical to SEQ ID NO: 815299

SEQ ID NO: 815306 - protein, 335 aa, Homo sapiens
ERLMPVPTPQEKSEGTYCCGPVPVRAIKEGDLSTKYDAPFVFAEVNADVVDWIQQDDGSVHKSINRSLIVGLKISTKSVGRDEREDITHTYKYPEGSSEEREAFTRANHLNKLAEKEETGMAMRIRVGQSMNMGSDFDVFAHITNNTAEEYVCRLLLCARTVSYNGILGPECGTKYLLNLNLEPFSEKSVPLCILYEKYRDCLTESNLIKVRALLVEPVINSYLLAERDLYLENPEIKIRILGEPKQKRKLVAEVSLQNPLPVALEGCTFTVEGAGLTEEQKTVEIPDPVEAGEEVKVRMDLLPLHMGLHKLVVNFESDKLKAVKGFRNVIIGPA

SEQ ID NO: 815307 - protein, 343 aa, Homo sapiens
TSSRSQCVSSLIGRPSLQEKSEGTYCCGPVPVRAIKEGDLSTKYDAPFVFAEVNADVVDWIQQDDGSVHKSINRSLIVGLKISTKSVGRDEREDITHTYKYPEGSSEEREAFTRANHLNKLAEKEETGMAMRIRVGQSMNMGSDFDVFAHITNNTAEEYVCRLLLCARTVSYNGILGPECGTKYLLNLNLEPFSEKSVPLCILYEKYRDCLTESNLIKVRALLVEPVINSYLLAERDLYLENPEIKIRILGEPKQKRKLVAEVSLQNPLPVALEGCTFTVEGAGLTEEQKTVEIPDPVEAGEEVKVRMDLLPLHMGLHKLVVNFESDKLKAVKGFRNVIIGPA

SEQ ID NO: 815308 - protein, 332 aa, Homo sapiens
MAHPFPFLPLPGTYCCGPVPVRAIKEGDLSTKYDAPFVFAEVNADVVDWIQQDDGSVHKSINRSLIVGLKISTKSVGRDEREDITHTYKYPEGSSEEREAFTRANHLNKLAEKEETGMAMRIRVGQSMNMGSDFDVFAHITNNTAEEYVCRLLLCARTVSYNGILGPECGTKYLLNLNLEPFSEKSVPLCILYEKYRDCLTESNLIKVRALLVEPVINSYLLAERDLYLENPEIKIRILGEPKQKRKLVAEVSLQNPLPVALEGCTFTVEGAGLTEEQKTVEIPDPVEAGEEVKVRMDLLPLHMGLHKLVVNFESDKLKAVKGFRNVIIGPA

SEQ ID NO: 815309 - protein, 707 aa, Homo sapiens
TGVTPVLNLETKQNFKVHQNRTSLKHKSHGGRQWSHLEGLAASGRSHRPRPTMAEELVLERCDLELETNGRDHHTADLCREKLVVRRGQPFWLTLHFEGRNYEASVDSLTFSVVTGPAPSQEAGTKARFPLRDAVEEGDWTATVVDQQDCTLSLQLTTPANAPIGLYRLSLEASTGYQGSSFVLGHFILLFNAWCPADAVYLDSEEERQEYVLTQQGFIYQGSAKFIKNIPWNFGQFEDGILDICLILLDVNPKFLKNAGRDCSRRSSPVYVGRVVSGMVNCNDDQGVLLGRWDNNYGDGVSPMSWIGSVDILRRWKNHGCQRVKYGQCWVFAAVACTVLRCLGIPTRVVTNYNSAHDQNSNLLIEYFRNEFGEIQGDKSEMIWNFHCWVESWMTRPDLQPGYEGWQALDPTPQEKSEGTYCCGPVPVRAIKEGDLSTKYDAPFVFAEVNADVVDWIQQDDGSVHKSINRSLIVGLKISTKSVGRDEREDITHTYKYPEGSSEEREAFTRANHLNKLAEKEETGMAMRIRVGQSMNMGSDFDVFAHITNNTAEEYVCRLLLCARTVSYNGILGPECGTKYLLNLNLEPFSEKSVPLCILYEKYRDCLTESNLIKVRALLVEPVINSYLLAERDLYLENPEIKIRILGEPKQKRKLVAEVSLQNPLPVPETVGALTLADWGWGERGKTYIPSPAQMPFGKPLTTHHIV

SEQ ID NO: 815310 - protein, 206 aa, Homo sapiens
SSLGTLEPQWGVQGSAQPFPRCVTPSTFLPLSVPLGVARELGGVILHHEHPPFSPSAEKSVPLCILYEKYRDCLTESNLIKVRALLVEPVINSYLLAERDLYLENPEIKIRILGEPKQKRKLVAEVSLQNPLPVALEGCTFTVEGAGLTEEQKTVEIPDPVEAGEEVKVRMDLLPLHMGLHKLVVNFESDKLKAVKGFRNVIIGPA

SEQ ID NO: 815311 - protein, 154 aa, Homo sapiens
MTRISEKSVPLCILYEKYRDCLTESNLIKVRALLVEPVINSYLLAERDLYLENPEIKIRILGEPKQKRKLVAEVSLQNPLPVALEGCTFTVEGAGLTEEQKTVEIPDPVEAGEEVKVRMDLLPLHMGLHKLVVNFESDKLKAVKGFRNVIIGPA

SEQ ID NO: 815312 - protein, 739 aa, Homo sapiens; identical to SEQ ID NO: 815299

SEQ ID NO: 815313 - protein, 739 aa, Homo sapiens; identical to SEQ ID NO: 815299

SEQ ID NO: 815314 - protein, 124 aa, Homo sapiens
HALGVKSATHPGMLLSNGADSLTSLGFVTAVTERVVLKPLRVGIQFCCSPPHRESVDALSVEGAGLTEEQKTVEIPDPVEAGEEVKVRMDLLPLHMGLHKLVVNFESDKLKAVKGFRNVIIGPA

SEQ ID NO: 815315 - protein, 254 aa, Homo sapiens
MAEELVLERCDLELETNGRDHHTADLCREKLVVRRGQPFWLTLHFEGRNYEASVDSLTFSVVTGPAPSQEAGTKARFPLRDAVEEGDWTATVVDQQDCTLSLQLTTPANAPIGLYRLSLEASTGYQGSSFVLGHFILLFNAWCPADAVYLDSEEERQEYVLTQQGFIYQGSAKFIKNIPWNFGQSRKWNVPLAHLSLLSLWVPTHPLCCEECSVPETVGALTLADWGWGERGKTYIPSPAQMPFGKPLTTHHIV

SEQ ID NO: 815316 - protein, 739 aa, Homo sapiens; identical to SEQ ID NO: 815299

SEQ ID NO: 815317 - protein, 739 aa, Homo sapiens; identical to SEQ ID NO: 815299

SEQ ID NO: 815318 - protein, 739 aa, Homo sapiens; identical to SEQ ID NO: 815299

SEQ ID NO: 815319 - protein, 660 aa, Homo sapiens
TGVTPVLNLETKQNFKVHQNRTSLKHKSHGGRQWSHLEGLAASGRSHRPRPTMAEELVLERCDLELETNGRDHHTADLCREKLVVRRGQPFWLTLHFEGRNYEASVDSLTFSVVTGPAPSQEAGTKARFPLRDAVEEGDWTATVVDQQDCTLSLQLTTPANAPIGLYRLSLEASTGYQGSSFVLGHFILLFNAWCPADAVYLDSEEERQEYVLTQQGFIYQGSAKFIKNIPWNFGQFEDGILDICLILLDVNPKFLKNAGRDCSRRSSPVYVGRVVSGMVNCNDDQGVLLGRWDNNYGDGVSPMSWIGSVDILRRWKNHGCQRVKYGQCWVFAAVACTVLRCLGIPTRVVTNYNSAHDQNSNLLIEYFRNEFGEIQGDKSEMIWNFHCWVESWMTRPDLQPGYEGWQALDPTPQEKSEGTYCCGPVPVRAIKEGDLSTKYDAPFVFAEVNADVVDWIQQDDGSVHKSINRSLIVGLKISTKSVGRDEREDITHTYKYPEGSSEEREAFTRANHLNKLAEKEETGMAMRIRVGQSMNMGSDFDVFAHITNNTAEEYVCRLLLCARTVSYNGILGPECGTKYLLNLNLEPFSEKSVPLCILYEKYRDCLTESNLIKVRALLVEPVINSYLLAERDLYLENPEIKIRDPLHSMFAMLLYGPAL

SEQ ID NO: 815320 - protein, 739 aa, Homo sapiens; identical to SEQ ID NO: 815299

SEQ ID NO: 815321 - protein, 127 aa, Homo sapiens
SSLGTLEPQWGVQGSAQPFPRCVTPSTFLPLSVPLGVARELGGVILHHEHPPFSPSAEKSVPLCILYEKYRDCLTESNLIKVRALLVEPVINSYLLAERDLYLENPEIKIRDPLHSMFAMLLYGPAL

SEQ ID NO: 815322 - protein, 739 aa, Homo sapiens; identical to SEQ ID NO: 815299

SEQ ID NO: 815323 - protein, 600 aa, Homo sapiens
TGVTPVLNLETKQNFKVHQNRTSLKHKSHGGRQWSHLEGLAASGRSHRPRPTMAEELVLERCDLELETNGRDHHTADLCREKLVVRRGQPFWLTLHFEGRNYEASVDSLTFSVVTGPAPSQEAGTKARFPLRDAVEEGDWTATVVDQQDCTLSLQLTTPANAPIGLYRLSLEASTGYQGSSFVLGHFILLFNAWCPADAVYLDSEEERQEYVLTQQGFIYQGSAKFIKNIPWNFGQFEDGILDICLILLDVNPKFLKNAGRDCSRRSSPVYVGRVVSGMVNCNDDQGVLLGRWDNNYGDGVSPMSWIGSVDILRRWKNHGCQRVKYGQCWVFAAVACTVLRCLGIPTRVVTNYNSAHDQNSNLLIEYFRNEFGEIQGDKSEMIWNFHCWVESWMTRPDLQPGYEGWQALDPTPQEKSEGTYCCGPVPVRAIKEGDLSTKYDAPFVFAEVNADVVDWIQQDDGSVHKSINRSLIVGLKISTKSVGRDEREDITHTYKYPEGSSEEREAFTRANHLNKLAEKEETGMAMRIRVGQSMNMGSDFDVFAHITNNTAEEYVCRLLLCARTVSYNGILGPECGTKYLLNLNLEPFSGKALCSWSIC

SEQ ID NO: 815324 - protein, 600 aa, Homo sapiens; identical to SEQ ID NO: 815323

SEQ ID NO: 815325 - protein, 690 aa, Homo sapiens
TGVTPVLNLETKQNFKVHQNRTSLKHKSHGGRQWSHLEGLAASGRSHRPRPTMAEELVLERCDLELETNGRDHHTADLCREKLVVRRGQPFWLTLHFEGRNYEASVDSLTFSVVTGPAPSQEAGTKARFPLRDAVEEGDWTATVVDQQDCTLSLQLTTPANAPIGLYRLSLEASTGYQGSSFVLGHFILLFNAWCPADAVYLDSEEERQEYVLTQQGFIYQGSAKFIKNIPWNFGQFEDGILDICLILLDVNPKFLKNAGRDCSRRSSPVYVGRVVSGMVNCNDDQGVLLGRWDNNYGDGVSPMSWIGSVDILRRWKNHGCQRVKYGQCWVFAAVACTVLRCLGIPTRVVTNYNSAHDQNSNLLIEYFRNEFGEIQGDKSEMIWNFHCWVESWMTRPDLQPGYEGWQALDPTPQEKSEGTYCCGPVPVRAIKEGDLSTKYDAPFVFAEVNADVVDWIQQDDGSVHKSINRSLIVGLKISTKSVGRDEREDITHTYKYPEGSSEEREAFTRANHLNKLAEKEETGMAMRIRVGQSMNMGSDFDVFAHITNNTAEEYVCRLLLCARTVSYNGILGPECGTKYLLNLNLEPFSEKSVPLCILYEKYRDCLTESNLIKVRALLVEPVINSYLLAERDLYLENPEIKIRILGEPKQKRKLVAEVSLQNPLPVALEGCTFTVEGAGLTEEQKTVEM

SEQ ID NO: 815326 - protein, 109 aa, Homo sapiens
MLWRRVTGQPPWWTSKTAPSRCSSPPRPTPPSACIASAWRPPLATRDPALCWATSFCSSTPGAQRMLCTWTRKRSGRSMSSPSRALSTRARPSSSRTYLGILGSLKMGS

SEQ ID NO: 815327 - protein, 595 aa, Homo sapiens
TGVTPVLNLETKQNFKVHQNRTSLKHKSHGGRQWSHLEGLAASGRSHRPRPTMAEELVLERCDLELETNGRDHHTADLCREKLVVRRGQPFWLTLHFEGRNYEASVDSLTFSVVTGPAPSQEAGTKARFPLRDAVEEGDWTATVVDQQDCTLSLQLTTPANAPIGLYRLSLEASTGYQGSSFVLGHFILLFNAWCPADAVYLDSEEERQEYVLTQQGFIYQGSAKFIKNIPWNFGQFEDGILDICLILLDVNPKFLKNAGRDCSRRSSPVYVGRVVSGMVNCNDDQGVLLGRWDNNYGDGVSPMSWIGSVDILRRWKNHGCQRVKYGQCWVFAAVACTVLRCLGIPTRVVTNYNSAHDQNSNLLIEYFRNEFGEIQGDKSEMIWNFHCWVESWMTRPDLQPGYEGWQALDPTPQEKSEGTYCCGPVPVRAIKEGDLSTKYDAPFVFAEVNADVVDWIQQDDGSVHKSINRSLIVGLKISTKSVGRDEREDITHTYKYPEGSSEEREAFTRANHLNKLAEKEETGMAMRIRVGQSMNMGSDFDVFAHITNNHIMHDVICHNSEVHGPRDVETSVYPCIMCRKPECVLISGSQTGLL

SEQ ID NO: 815328 - protein, 501 aa, Homo sapiens
TGVTPVLNLETKQNFKVHQNRTSLKHKSHGGRQWSHLEGLAASGRSHRPRPTMAEELVLERCDLELETNGRDHHTADLCREKLVVRRGQPFWLTLHFEGRNYEASVDSLTFSVVTGPAPSQEAGTKARFPLRDAVEEGDWTATVVDQQDCTLSLQLTTPANAPIGLYRLSLEASTGYQGSSFVLGHFILLFNAWCPADAVYLDSEEERQEYVLTQQGFIYQGSAKFIKNIPWNFGQFEDGILDICLILLDVNPKFLKNAGRDCSRRSSPVYVGRVVSGMVNCNDDQGVLLGRWDNNYGDGVSPMSWIGSVDILRRWKNHGCQRVKYGQCWVFAAVACTVLRCLGIPTRVVTNYNSAHDQNSNLLIEYFRNEFGEIQGDKSEMIWNFHCWVESWMTRPDLQPGYEGWQALDPTPQEKSEGTYCCGPVPVRAIKEGDLSTKYDAPFVFAEVNADVVDWIQQDDGSVHKSINRSLIVGLKISTKSVVTNYNSAHDQNSNLLIEY

SEQ ID NO: 815329 - protein, 102 aa, Homo sapiens
AASGRTWRVSPPVEGATAPARPWPRVSIRVTAAATQGPRGIGGQDPVGAESLSPDLESNRQTGLGEEASQCCLEPQFPHPHCITINPCLPGSGEAMERDGVL

SEQ ID NO: 815330 - protein, 103 aa, Homo sapiens
CLTESNLIKVRALLVEPVINSYLLAERDLYLENPEIKIRGKGRLGKGQGPRAAQRWGEGRSLPPPHTPASLQAPDLWCLSDPQILASSKKSIMKPRELGTRSL

SEQ ID NO: 815331 - protein, 103 aa, Homo sapiens
RPPKALRRPALSPPSSTERMKEHGKRKTHRTPQRSFENWAVWLSHHPFGHQLWSQLLCPRGMHYGPERGPCPFLGCHPGWVVWISAVNMAHLGEAQVPRFEQL

SEQ ID NO: 815332 - protein, 300 aa, Homo sapiens
RRFLFRRQEEPRAAGAVAAAALAAVSQAAPASSGPSPSDPSPLLDPTAVSDIAGKMSDEFSLADALPEHSPAKTSAVSNTKPGQPPQGWPGSNPWNNPSAPSSVPSGLPPSATPSTVPFGPAPTGMYPSVPPTGPPPGPPAPFPPSGPSCPPPGGPYPAPTVPGPGPTGPYPTPNMPFPELPRPYGAPTDPAAAGPLGPWGSMSSGPWAPGMGGQYPTPNMPYPSPGPYPAPPPPQAPGAAPPVPWGTVPPGAWGPPAPYPAPTGSYPTPGLYPTPSNPFQVPSGPSGAPPMPGGPHSYH

SEQ ID NO: 815333 - protein, 300 aa, Homo sapiens; identical to SEQ ID NO: 815332

SEQ ID NO: 815334 - protein, 300 aa, Homo sapiens; identical to SEQ ID NO: 815332

SEQ ID NO: 815335 - protein, 300 aa, Homo sapiens; identical to SEQ ID NO: 815332

SEQ ID NO: 815336 - protein, 314 aa, Homo sapiens
RRFLFRRQEEPRAAGAVAAAALAAVSQAAPASSGPSPSDPSPLLDPTAVSDIAGKMSDEFSLADALPEHSPAKTSAVSNTKPGQPPQGWPGSNPWNNPSAPSSVPSGLPPSATPSTVPFGPAPTGMYPSVPPTGPPPGPPAPFPPSGPSCPPPGGPYPAPTVPGPGPTGPYPTPNMPFPELPRPYGAPTDPAAAGPLGPWGSMSSGPWAPGMGGQYPTPNMPYPSPGPYPAPPPPQAPGAAPPVPWGTVPPGAWGPPAPYPAPTGSYPTPGLYPTPSNPFQVPSGPSGAPPMPGGPHTTQCGVNILVEEPALVI

SEQ ID NO: 815337 - protein, 304 aa, Homo sapiens
RRFLFRRQEEPRAAGAVAAAALAAVSQAAPASSGPSPSDPSPLLDPTAVSDIAGKMSDEFSLADALPEHSPAKTSAVSNTKPGQPPQGWPGSNPWNNPSAPSSVPSGLPPSATPSTVPFGPAPTGMYPSVPPTGPPPGPPAPFPPSGPSCPPPGGPYPAPTVPGPGPTGPYPTPNMPFPELPRPYGAPTDPAAAGPLGPWGSMSSGPWAPGMGGQYPTPNMPYPSPGPYPAPPPPQAPGAAPPVPWGTVPPGAWGPPAPYPAPTGSYPTPGLYPTPSNPFQVPSGPSGAPPMPGGPHVSVQFVI

SEQ ID NO: 815338 - protein, 239 aa, Homo sapiens
RRFLFRRQEEPRAAGAVAAAALAAVSQAAPASSGPSPSDPSPLLDPTAVSDIAGKDYLFCFQLADALPEHSPAKTSAVSNTKPGQPPQGWPGSNPWNNPSAPSSVPSGLPPSATPSTVPFGPAPTGMYPSVPPTGPPPGPPAPFPPSGPSCPPPGGPYPAPTVPGPGPTGPYPPQAPGAAPPVPWGTVPPGAWGPPAPYPAPTGSYPTPGLYPTPSNPFQVPSGPSGAPPMPGGPHSYH

SEQ ID NO: 815339 - protein, 300 aa, Homo sapiens; identical to SEQ ID NO: 815332

SEQ ID NO: 815340 - protein, 304 aa, Homo sapiens; identical to SEQ ID NO: 815337

SEQ ID NO: 815341 - protein, 300 aa, Homo sapiens; identical to SEQ ID NO: 815332

SEQ ID NO: 815342 - protein, 300 aa, Homo sapiens; identical to SEQ ID NO: 815332

SEQ ID NO: 815343 - protein, 293 aa, Homo sapiens
AALPVPAPGGAARCWCCCRRCSSCRQSGCARVFRAQSLGPIAASRPYCGLGYCRLADALPEHSPAKTSAVSNTKPGQPPQGWPGSNPWNNPSAPSSVPSGLPPSATPSTVPFGPAPTGMYPSVPPTGPPPGPPAPFPPSGPSCPPPGGPYPAPTVPGPGPTGPYPTPNMPFPELPRPYGAPTDPAAAGPLGPWGSMSSGPWAPGMGGQYPTPNMPYPSPGPYPAPPPPQAPGAAPPVPWGTVPPGAWGPPAPYPAPTGSYPTPGLYPTPSNPFQVPSGPSGAPPMPGGPHSYH

SEQ ID NO: 815344 - protein, 229 aa, Homo sapiens
MPGKCLMNFRWQMHYLNTPLPLCCEQYSAPSSVPSGLPPSATPSTVPFGPAPTGMYPSVPPTGPPPGPPAPFPPSGPSCPPPGGPYPAPTVPGPGPTGPYPTPNMPFPELPRPYGAPTDPAAAGPLGPWGSMSSGPWAPGMGGQYPTPNMPYPSPGPYPAPPPPQAPGAAPPVPWGTVPPGAWGPPAPYPAPTGSYPTPGLYPTPSNPFQVPSGPSGAPPMPGGPHSYH

SEQ ID NO: 815345 - protein, 300 aa, Homo sapiens; identical to SEQ ID NO: 815332

SEQ ID NO: 815346 - protein, 85 aa, Homo sapiens
GHKQLFQWPHRFHTGEVWSTTLACILHAPLTRVSVITQPSRGIFLSLTSTGQLRCVTTVAVSVNLYWMTASQLTVDGPRHFLPLS

SEQ ID NO: 815347 - protein, 300 aa, Homo sapiens; identical to SEQ ID NO: 815332

SEQ ID NO: 815348 - protein, 109 aa, Homo sapiens [sequence omitted]

SEQ ID NO: 815349 - protein, 202 aa, Homo sapiens
MSGRSVRAETRSRAKDDIKKVMAAIEKVRKWEKKWVTVGDTSLRIFKWVPVTDSKEKEKSKSNSSAAREPNGFPSDASANSSLLLEFQDENSNQSSVSDVYQLKVDSSTNSSPSPQQSESLSPAHTSDFRTDDSQPPTLGQEILEEPSLPSSEVADEPPTLTKEEPVPLETQVVEEEEDSGAPPLKRFCVDQPTVPQTASES

SEQ ID NO: 815350 - protein, 202 aa, Homo sapiens; identical to SEQ ID NO: 815349

SEQ ID NO: 815351 - protein, 238 aa, Homo sapiens
GDSGFRPGLELPGVGARARPSPGPALPSSWAVAPPAFPGFLLIIASSPGVVSARQAERSAYSGVEVGEKKWVTVGDTSLRIFKWVPVTDSKEKEKSKSNSSAAREPNGFPSDASANSSLLLEFQDENSNQSSVSDVYQLKVDSSTNSSPSPQQSESLSPAHTSDFRTDDSQPPTLGQEILEEPSLPSSEVADEPPTLTKEEPVPLETQVVEEEEDSGAPPLKRFCVDQPTVPQTASES

SEQ ID NO: 815352 - protein, 213 aa, Homo sapiens
MTESRSVTQAGVHWRNLGSLQPLPLRFKQFSCLSLLSSWDYREKKWVTVGDTSLRIFKWVPVTDSKEKEKSKSNSSAAREPNGFPSDASANSSLLLEFQDENSNQSSVSDVYQLKVDSSTNSSPSPQQSESLSPAHTSDFRTDDSQPPTLGQEILEEPSLPSSEVADEPPTLTKEEPVPLETQVVEEEEDSGAPPLKRFCVDQPTVPQTASES

SEQ ID NO: 815353 - protein, 205 aa, Homo sapiens
MAGVHWRNLGSLQPLPLRFKQFSCLSLLSSWDYREKKWVTVGDTSLRIFKWVPVTDSKEKEKSKSNSSAAREPNGFPSDASANSSLLLEFQDENSNQSSVSDVYQLKVDSSTNSSPSPQQSESLSPAHTSDFRTDDSQPPTLGQEILEEPSLPSSEVADEPPTLTKEEPVPLETQVVEEEEDSGAPPLKRFCVDQPTVPQTASES

SEQ ID NO: 815354 - protein, 145 aa, Homo sapiens
MSGRSVRAETRSRAKDDIKKVMAAIEKVRKWEKKWVTVGDTSLRIFKWVPVTDSKEKEKSKSNSSAAREPNGFPSDASANSSLLLEFQEPSLPSSEVADEPPTLTKEEPVPLETQVVEEEEDSGAPPLKRFCVDQPTVPQTASES

SEQ ID NO: 815355 - protein, 124 aa, Homo sapiens
GDSGFRPGLELPGVGARARPSPGPALPSSWAVAPPAFPGFLLIIASSPGVVSARQAERSAYSGVEVGEKKWVTVGDTSLRIFKWVPVTDSKETKTATRVPCLTSISLRWTAAPTQAPAPSRVSP

SEQ ID NO: 815356 - protein, 142 aa, Homo sapiens
MPGPWLCPEFLLRKMTTLSCCLCSVWFSDENSNQSSVSDVYQLKVDSSTNSSPSPQQSESLSPAHTSDFRTDDSQPPTLGQEILEEPSLPSSEVADEPPTLTKEEPVPLETQVVEEEEDSGAPPLKRFCVDQPTVPQTASES

SEQ ID NO: 815357 - protein, 192 aa, Homo sapiens
MTESRSVTQAGVHWRNLGSLQPLPLRFKQFSCLSLLSSWDYREKKWVTVGDTSLRIFKWVPVTDSKEKEKSKSNSSAAREPNGFPSDASANSSLLLEFQDSSPSPQQSESLSPAHTSDFRTDDSQPPTLGQEILEEPSLPSSEVADEPPTLTKEEPVPLETQVVEEEEDSGAPPLKRFCVDQPTVPQTASES

SEQ ID NO: 815358 - protein, 202 aa, Homo sapiens; identical to SEQ ID NO: 815349

SEQ ID NO: 815359 - protein, 163 aa, Homo sapiens
MSGRSVRAETRSRAKDDIKKVMAAIEKVRKWEKKWVTVGDTSLRIFKWVPVTDSKEKEKSKSNSSAAREPNGFPSDASANSSLLLEFQDENSNQSSVSDVYQLKVDSSTNSSPSPQQSESLSPAHTSDFRTDDSQPPTLGQEILEEPSLPSSEVADEPPTLTF

SEQ ID NO: 815360 - protein, 163 aa, Homo sapiens; identical to SEQ ID NO: 815359

SEQ ID NO: 815361 - protein, 198 aa, Homo sapiens
MSGRSVRAETRSRAKDDIKKVMAAIEKVRKWEKKWVTVGDTSLRIFKWVPVTDSKEKEKSKSNSSAAREPNGFPSDASANSSLLLEFQDENSNQSSVSDVYQLKVDSSTNSSPSPQQSESLSPAHTSDFRTDDSQPPTLGQEILEEPSLPSSEVADEPPTLCKEPTQAHAGRQPLDAHDLAFVHAAGHQLLARGGTEL

SEQ ID NO: 815362 - protein, 1290 aa, Homo sapiens
MIQTPKEEGANVLTTEALLQHLDSALQASRVHVYMYNRQWKLEHLCYKSGELITETGYMDQIIEYLYPCLIITPLDCFWEGAKLQSGTAYLLGKPPLRWTNFDPLEFLEELKKINYQVDSWEEMLNKAEVGHGYMDRPCLNPADPDCPATAPNKNSTKPLDMALVLNGGCHGLSRKYMHWQEELIVGGTVKNSTGKLVSAHALQTMFQLMTPKQMYEHFKGYEYVSHINWNEDKAAAILEAWQRTYVEVVHQSVAQNSTQKVLSFTTTTLDDILKSFSDVSVIRVASGYLLMLAYACLTMLRWDCSKSQGAVGLAGVLLVALSVAAGLGLCSLIGISFNAATTQVLPFLALGVGVDDVFLLAHAFSETGQNKRIPFEDRTGECLKRTGASVALTSISNVTAFFMAALIPIPALRAFSLQAAVVVVFNFAMVLLIFPAILSMDLYRREDRRLDIFCCFTSPCVSRVIQVEPQAYTDTHDNTRYSPPPPYSSHSFAHETQITMQSTVQLRTEYDPHTHVYYTTAEPRSEISVQPVTVTQDTLSCQSPESTSSTRDLLSQFSDSSLHCLEPPCTKWTLSSFAEKHYAPFLLKPKAKVVVIFLFLGLLGVSLYGTTRVRDGLDLTDIVPRETREYDFIAAQFKYFSFYNMYIVTQKADYPNIQHLLYDLHRSFSNVKYVMLEENKQLPKMWLHYFRDWLQGLQDAFDSDWETGKIMPNNYKNGSDDGVLAYKLLVQTGSRDKPIDISQLTKQRLVDADGIINPSAFYIYLTAWVSNDPVAYAASQANIRPHRPEWVHDKADYMPETRLRIPAAEPIEYAQFPFYLNGLRDTSDFVEAIEKVRTICSNYTSLGLSSYPNGYPFLFWEQYIGLRHWLLLFISVVLACTFLVCAVFLLNPWTAGIIVMVLALMTVELFGMMGLIGIKLSAVPVVILIASVGIGVEFTVHVALAFLTAIGDKNRRAVLALEHMFAPVLDGAVSTLLGVLMLAGSEFDFIVRYFFAVLAILTILGVLNGLVLLPVLLSFFGPYPEVSPANGLNRLPTPSPEPPPSVVRFAMPPGHTHSGSDSSDSEYSSQTTVSGLSEELRHYEAQQGAGGPAHQVIVEATENPVFAHSTVVHPESRHHPPSNPRQQPHLDSGSLPPGRQGQQPRRDPPREGLWPPLYRPRRDAFEISTEGHSGPSNRARWGPRGARSHNPRNPASTAMGSSVPGYCQPITTVTASASVTVAVHPPPVPGPGRNPRGGLCPGYPETDHGLFEDPHVPFHVRCERRDSKVEVIELQDVECEERPRGSSSN

SEQ ID NO: 815363 - protein, 68 aa, Homo sapiens
MSPRCSSHAAARLYDRAPHDAQIRRGCSLEGESVCRGHPRPHGCWGLTGRVRASGRGRAGRDSPALTP

SEQ ID NO: 815364 - protein, 1515 aa, Homo sapiens
GRSGSSARRVSSSSGWSVNRSPSPSSLRPAASSQAERPGAPGARSSGSSAPGRPGSLRPRGGGGGGGNMASAGNAAEPQDRGGGGSGCIGAPGRPAGGGRRRRTGGLRRAAAPDRDYLHRPSYCDAAFALEQISKGKATGRKAPLWLRAKFQRLLFKLGCYIQKNCGKFLVVGLLIFGAFAVGLKAANLETNVEELWVEVGGRVSRELNYTRQKIGEEAMFNPQLMIQTPKEEGANVLTTEALLQHLDSALQASRVHVYMYNRQWKLEHLCYKSGELITETGYMDQIIEYLYPCLIITPLDCFWEGAKLQSGTAYLLGKPPLRWTNFDPLEFLEELKKINYQVDSWEEMLNKAEVGHGYMDRPCLNPADPDCPATAPNKNSTKPLDMALVLNGGCHGLSRKYMHWQEELIVGGTVKNSTGKLVSAHALQTMFQLMTPKQMYEHFKGYEYVSHINWNEDKAAAILEAWQRTYVEVVHQSVAQNSTQKVLSFTTTTLDDILKSFSDVSVIRVASGYLLMLAYACLTMLRWDCSKSQGAVGLAGVLLVALSVAAGLGLCSLIGISFNAATTQVLPFLALGVGVDDVFLLAHAFSETGQNKRIPFEDRTGECLKRTGASVALTSISNVTAFFMAALIPIPALRAFSLQAAVVVVFNFAMVLLIFPAILSMDLYRREDRRLDIFCCFTSPCVSRVIQVEPQAYTDTHDNTRYSPPPPYSSHSFAHETQITMQSTVQLRTEYDPHTHVYYTTAEPRSEISVQPVTVTQDTLSCQSPESTSSTRDLLSQFSDSSLHCLEPPCTKWTLSSFAEKHYAPFLLKPKAKVVVIFLFLGLLGVSLYGTTRVRDGLDLTDIVPRETREYDFIAAQFKYFSFYNMYIVTQKADYPNIQHLLYDLHRSFSNVKYVMLEENKQLPKMWLHYFRDWLQGLQDAFDSDWETGKIMPNNYKNGSDDGVLAYKLLVQTGSRDKPIDISQLTKQRLVDADGIINPSAFYIYLTAWVSNDPVAYAASQANIRPHRPEWVHDKADYMPETRLRIPAAEPIEYAQFPFYLNGLRDTSDFVEAIEKVRTICSNYTSLGLSSYPNGYPFLFWEQYIGLRHWLLLFISVVLACTFLVCAVFLLNPWTAGIIVMVLALMTVELFGMMGLIGIKLSAVPVVILIASVGIGVEFTVHVALAFLTAIGDKNRRAVLALEHMFAPVLDGAVSTLLGVLMLAGSEFDFIVRYFFAVLAILTILGVLNGLVLLPVLLSFFGPYPEVSPANGLNRLPTPSPEPPPSVVRFAMPPGHTHSGSDSSDSEYSSQTTVSGLSEELRHYEAQQGAGGPAHQVIVEATENPVFAHSTVVHPESRHHPPSNPRQQPHLDSGSLPPGRQGQQPRRDPPREGLWPPLYRPRRDAFEISTEGHSGPSNRARWGPRGARSHNPRNPASTAMGSSVPGYCQPITTVTASASVTVAVHPPPVPGPGRNPRGGLCPGYPETDHGLFEDPHVPFHVRCERRDSKVEVIELQDVECEERPRGSSSN

SEQ ID NO: 815365 - protein, 1463 aa, Homo sapiens
GRSGSSARRVSSSSGWSVNRSPSPSSLRPAASSQAERPGAPGARSSGSSAPGRPGSLRPRGGGGGGGNMASAGNAAEPQDRGGGGSGCIGAPGRPAGGGRRRRTGGLRRAAAPDRDYLHRPSYCDAAFALEQISKGKATGRKAPLWLRAKFQRLLFKLGCYIQKNCGKFLVVGLLIFGAFAVGLKAANLETNVEELWVEVGGRVSRELNYTRQKIGEEAMFNPQLMIQTPKEEGANVLTTEALLQHLDSALQASRVHVYMYNRQWKLEHLCYKSGELITETGYMDQIIEYLYPCLIITPLDCFWEGAKLQSGTAYLLGKPPLRWTNFDPLEFLEELKKINYQVDSWEEMLNKAEVGHGYMDRPCLNPADPDCPATAPNKNSTKPLDMALVLNGGCHGLSRKYMHWQEELIVGGTVKNSTGKLVSAHALQTMFQLMTPKQMYEHFKGYEYVSHINWNEDKAAAILEAWQRTYVEVVHQSVAQNSTQKVLSFTTTTLDDILKSFSDVSVIRVASGYLLMVLPFLALGVGVDDVFLLAHAFSETGQNKRIPFEDRTGECLKRTGASVALTSISNVTAFFMAALIPIPALRAFSLQAAVVVVFNFAMVLLIFPAILSMDLYRREDRRLDIFCCFTSPCVSRVIQVEPQAYTDTHDNTRYSPPPPYSSHSFAHETQITMQSTVQLRTEYDPHTHVYYTTAEPRSEISVQPVTVTQDTLSCQSPESTSSTRDLLSQFSDSSLHCLEPPCTKWTLSSFAEKHYAPFLLKPKAKVVVIFLFLGLLGVSLYGTTRVRDGLDLTDIVPRETREYDFIAAQFKYFSFYNMYIVTQKADYPNIQHLLYDLHRSFSNVKYVMLEENKQLPKMWLHYFRDWLQGLQDAFDSDWETGKIMPNNYKNGSDDGVLAYKLLVQTGSRDKPIDISQLTKQRLVDADGIINPSAFYIYLTAWVSNDPVAYAASQANIRPHRPEWVHDKADYMPETRLRIPAAEPIEYAQFPFYLNGLRDTSDFVEAIEKVRTICSNYTSLGLSSYPNGYPFLFWEQYIGLRHWLLLFISVVLACTFLVCAVFLLNPWTAGIIVMVLALMTVELFGMMGLIGIKLSAVPVVILIASVGIGVEFTVHVALAFLTAIGDKNRRAVLALEHMFAPVLDGAVSTLLGVLMLAGSEFDFIVRYFFAVLAILTILGVLNGLVLLPVLLSFFGPYPEVSPANGLNRLPTPSPEPPPSVVRFAMPPGHTHSGSDSSDSEYSSQTTVSGLSEELRHYEAQQGAGGPAHQVIVEATENPVFAHSTVVHPESRHHPPSNPRQQPHLDSGSLPPGRQGQQPRRDPPREGLWPPLYRPRRDAFEISTEGHSGPSNRARWGPRGARSHNPRNPASTAMGSSVPGYCQPITTVTASASVTVAVHPPPVPGPGRNPRGGLCPGYPETDHGLFEDPHVPFHVRCERRDSKVEVIELQDVECEERPRGSSSN

SEQ ID NO: 815366 - protein, 1329 aa, Homo sapiens
MGKATGRKAPLWLRAKFQRLLFKLGCYIQKNCGKFLVVGLLIFGAFAVGLKAANLETNVEELWVEVGGRVSRELNYTRQKIGEEAMFNPQLMIQTPKEEGANVLTTEALLQHLDSALQASRVHVYMYNRQWKLEHLCYKSGELITETGYMDQIIEYLYPCLIITPLDCFWEGAKLQSGTAYLLGKPPLRWTNFDPLEFLEELKKINYQVDSWEEMLNKAEVGHGYMDRPCLNPADPDCPATAPNKNSTKPLDMALVLNGGCHGLSRKYMHWQEELIVGGTVKNSTGKLVSAHALQTMFQLMTPKQMYEHFKGYEYVSHINWNEDKAAAILEAWQRTYVEVVHQSVAQNSTQKVLSFTTTTLDDILKSFSDVSVIRVASGYLLMVLPFLALGVGVDDVFLLAHAFSETGQNKRIPFEDRTGECLKRTGASVALTSISNVTAFFMAALIPIPALRAFSLQAAVVVVFNFAMVLLIFPAILSMDLYRREDRRLDIFCCFTSPCVSRVIQVEPQAYTDTHDNTRYSPPPPYSSHSFAHETQITMQSTVQLRTEYDPHTHVYYTTAEPRSEISVQPVTVTQDTLSCQSPESTSSTRDLLSQFSDSSLHCLEPPCTKWTLSSFAEKHYAPFLLKPKAKVVVIFLFLGLLGVSLYGTTRVRDGLDLTDIVPRETREYDFIAAQFKYFSFYNMYIVTQKADYPNIQHLLYDLHRSFSNVKYVMLEENKQLPKMWLHYFRDWLQGLQDAFDSDWETGKIMPNNYKNGSDDGVLAYKLLVQTGSRDKPIDISQLTKQRLVDADGIINPSAFYIYLTAWVSNDPVAYAASQANIRPHRPEWVHDKADYMPETRLRIPAAEPIEYAQFPFYLNGLRDTSDFVEAIEKVRTICSNYTSLGLSSYPNGYPFLFWEQYIGLRHWLLLFISVVLACTFLVCAVFLLNPWTAGIIVMVLALMTVELFGMMGLIGIKLSAVPVVILIASVGIGVEFTVHVALAFLTAIGDKNRRAVLALEHMFAPVLDGAVSTLLGVLMLAGSEFDFIVRYFFAVLAILTILGVLNGLVLLPVLLSFFGPYPEVSPANGLNRLPTPSPEPPPSVVRFAMPPGHTHSGSDSSDSEYSSQTTVSGLSEELRHYEAQQGAGGPAHQVIVEATENPVFAHSTVVHPESRHHPPSNPRQQPHLDSGSLPPGRQGQQPRRDPPREGLWPPLYRPRRDAFEISTEGHSGPSNRARWGPRGARSHNPRNPASTAMGSSVPGYCQPITTVTASASVTVAVHPPPVPGPGRNPRGGLCPGYPETDHGLFEDPHVPFHVRCERRDSKVEVIELQDVECEERPRGSSSN

SEQ ID NO: 815367 - protein, 724 aa, Homo sapiens
MRLDSFSLSGKSQWCSLGSDLVPLLFQVVVIFLFLGLLGVSLYGTTRVRDGLDLTDIVPRETREYDFIAAQFKYFSFYNMYIVTQKADYPNIQHLLYDLHRSFSNVKYVMLEENKQLPKMWLHYFRDWLQGLQDAFDSDWETGKIMPNNYKNGSDDGVLAYKLLVQTGSRDKPIDISQLTKQRLVDADGIINPSAFYIYLTAWVSNDPVAYAASQANIRPHRPEWVHDKADYMPETRLRIPAAEPIEYAQFPFYLNGLRDTSDFVEAIEKVRTICSNYTSLGLSSYPNGYPFLFWEQYIGLRHWLLLFISVVLACTFLVCAVFLLNPWTAGIIVMVLALMTVELFGMMGLIGIKLSAVPVVILIASVGIGVEFTVHVALAFLTAIGDKNRRAVLALEHMFAPVLDGAVSTLLGVLMLAGSEFDFIVRYFFAVLAILTILGVLNGLVLLPVLLSFFGPYPEVSPANGLNRLPTPSPEPPPSVVRFAMPPGHTHSGSDSSDSEYSSQTTVSGLSEELRHYEAQQGAGGPAHQVIVEATENPVFAHSTVVHPESRHHPPSNPRQQPHLDSGSLPPGRQGQQPRRDPPREGLWPPLYRPRRDAFEISTEGHSGPSNRARWGPRGARSHNPRNPASTAMGSSVPGYCQPITTVTASASVTVAVHPPPVPGPGRNPRGGLCPGYPETDHGLFEDPHVPFHVRCERRDSKVEVIELQDVECEERPRGSSSN

SEQ ID NO: 815368 - protein, 587 aa, Homo sapiens
GRSGSSARRVSSSSGWSVNRSPSPSSLRPAASSQAERPGAPGARSSGSSAPGRPGSLRPRGGGGGGGNMASAGNAAEPQDRGGGGSGCIGAPGRPAGGGRRRRTGGLRRAAAPDRDYLHRPSYCDAAFALEQISKGKATGRKAPLWLRAKFQRLLFKLGCYIQKNCGKFLVVGLLIFGAFAVGLKAANLETNVEELWVEVGGRVSRELNYTRQKIGEEAMFNPQLMIQTPKEEGANVLTTEALLQHLDSALQASRVHVYMYNRQWKLEHLCYKSGELITETGYMDQIIEYLYPCLIITPLDCFWEGAKLQSGTAYLLGKPPLRWTNFDPLEFLEELKKINYQVDSWEEMLNKAEVGHGYMDRPCLNPADPDCPATAPNKNSTKPLDMALVLNGGCHGLSRKYMHWQEELIVGGTVKNSTGKLVSAHALQTMFQLMTPKQMYEHFKGYEYVSHINWNEDKAAAILEAWQRTYVEVVHQSVAQNSTQKVLSFTTTTLDDILKSFSDVSVIRVASGYLLMLAYACLTMLRCVCEAYLGREATWRQGRPSCMTRSLLGILQHVGNVQDFLRVLFAFLYRKTDFYRMSPHNW

SEQ ID NO: 815369 - protein, 424 aa, Homo sapiens
GRSGSSARRVSSSSGWSVNRSPSPSSLRPAASSQAERPGAPGARSSGSSAPGRPGSLRPRGGGGGGGNMASAGNAAEPQDRGGGGSGCIGAPGRPAGGGRRRRTGGLRRAAAPDRDYLHRPSYCDAAFALEQISKGKATGRKAPLWLRAKFQRLLFKLGCYIQKNCGKFLVVGLLIFGAFAVGLKAANLETNVEELWVEVGGRVSRELNYTRQKIGEEAMFNPQLMIQTPKEEGANVLTTEALLQHLDSALQASRVHVYMYNRQWKLEHLCYKSGELITETGYMDQIIEYLYPCLIITPLDCFWEGAKLQSGTAYLLGKPPLRWTNFDPLEFLEELKKINYQVDSWEEMLNKAEVGHGYMDRPCLNPADPDCPATAPNKNSTKPLDMALVLNGGCHGLSRKYMHWQEELIVGGTVKNSTGKLVR

SEQ ID NO: 815370 - protein, 135 aa, Homo sapiens
GITQPLPSQLWGEYCLCRVVSLLSTSASSSVLQPQCPKSLRDPAGGGALMSPRCSSHAAARLYDRAPHDAQIRRGCSLEGESVCRGHPRPHGCWGLTGRVRASGRGRAGRDSPALTPPFCFVPRGRLLAGKRRCG

SEQ ID NO: 815371 - protein, 1147 aa, Homo sapiens
MEGEVLLPALYEEEEEEEEEEEEVEEEEEQVQKGGSVGSLSVNKHRGLSLTETELEELRAQVLQLVAELEETRELAGQHEDDSLELQGLLEDERLASAQQAEVFTKQIQQLQGELRSLREEISLLEHEKESELKEIEQELHLAQAEIQSLRQAAEDSATEHESDIASLQEDLCRMQNELEDMERIRGDYEMEIASLRAEMEMKSSEPSGSLGLSDYSGLQEELQELRERYHFLNEEYRALQESNSSLTGQLADLESERTQRATERWLQSQTLSMTSAESQTSEMDFLEPDPEMQLLRQQLRDAEEQMHGMKNKCQELCCELEELQHHRQVSEEEQRRLQRELKCAQNEVLRFQTSHSVTQNEELKSRLCTLQKKYDTSQDEQNELLKMQLQLQTELRQLKVMKSTLVENQSEKELLCRLQKLHLQHQNVTCEKEKLLERQQQLQEELQCHEAELQHLRDTVASFKESNEKDTETHAQLQEMKQLYQASKDELERQKHMYDQLEQDLLLCQLELKELKASHPIPEDKGKCANKCDTLLSRLTELQEKYKASQKEMGQLQMEQCELLEDQRRMQEEQGQLQEELHRLTLPLPKSGLLLKSQELLTKLEDLCELQLLYQGMQEEQKKLIQNQDCVLKEQLEIHEELRRFKESHFQEVLENPDDSKLAKSSKCNRNKQSKLLMEQMQALQVMYDAGQAKQELLQQEQGRLLEERKRLQADLQLCLEEMQLLQVQSPSIKMSLESYGKSYGSMVPSNENCRKTYDTTVDDNESYYKSYTSTQTSSKSFLKSYDSSTSASEAYGKSYCTTSNSSITYKKSYGSTSSSDTCQKSFVSSCTDEEPAEPEDMERFEEMVVKVLIKLQAVQAMYQISQEEHSQLQEQMEKLLAKQKDLKEELDACEREFKECMECLEKPMAPQNDKNEIKELQTKLRELQLQYQASMDEQGRLLVVQEQLEGQLQCCQEELRQLREKRPSVVKEARGKNANKNMNKNANGVKMKKVTKPCSDTSESDLETRKSLEVVLYYKASQRKLDGLAKEEEKKEEMEEEKKEVKEEAKEQCGDELVAEPADPEEAKSTEDQEENEEDKEEEEKEEDSEEEEDDADSSLESPEENNPLRLSESKKSSPTPKSPHLLLASCRPGGHLGFALVLVG

SEQ ID NO: 815372 - protein, 68 aa, Homo sapiens
ETQIEQSLKTALIMLVDWLSLVPNSARGRPNANMFGLWKPMVFLAIAAVALYVLPNMRQQESEFCLME

SEQ ID NO: 815373 - protein, 120 aa, Homo sapiens
QAAEDSATEHEDDSLELQGLLEDERLASAQQAEVFTKQIQQLQGELRSLREEISLLEHENDGRPWPARGQIPSGHHPQLWAGHTVPEPSPYVPCVPISSASVTQAEKACGERLTSISCLV

SEQ ID NO: 815374 - protein, 1100 aa, Homo sapiens
MEAITSELRSLREEISLLEHEKESELKEIEQELHLAQAEIQSLRQAAEDSATEHESDIASLQEDLCRMQNELEDMERIRGDYEMEIASLRAEMEMKSSEPSGSLGLSDYSGLQEELQELRERYHFLNEEYRALQESNSSLTGQLADLESERTQRATERWLQSQTLSMTSAESQTSEMDFLEPDPEMQLLRQQLRDAEEQMHGMKNKCQELCCELEELQHHRQVSEEEQRRLQRELKCAQNEVLRFQTSHSVTQNEELKSRLCTLQKKYDTSQDEQNELLKMQLQLQTELRQLKVMKSTLVENQSEKELLCRLQKLHLQHQNVTCEKEKLLERQQQLQEELQCHEAELQHLRDTVASFKESNEKDTETHAQLQEMKQLYQASKDELERQKHMYDQLEQDLLLCQLELKELKASHPIPEDKGKCANKCDTLLSRLTELQEKYKASQKEMGQLQMEQCELLEDQRRMQEEQGQLQEELHRLTLPLPKSGLLLKSQELLTKLEDLCELQLLYQGMQEEQKKLIQNQDCVLKEQLEIHEELRRFKESHFQEVLENPDDSKLAKSSKCNRNKQSKLLMEQMQALQVMYDAGQAKQELLQQEQGRLLEERKRLQADLQLCLEEMQLLQVQSPSIKMSLESYGKSYGSMVPSNENCRKTYDTTVDDNESYYKSYTSTQTSSKSFLKSYDSSTSASEAYGKSYCTTSNSSITYKKSYGSTSSSDTCQKSFVSSCTDEEPAEPEDMERFEEMVVKVLIKLQAVQAMYQISQEEHSQLQEQMEKLLAKQKDLKEELDACEREFKECMECLEKPMAPQNDKNEIKELQTKLRELQLQYQASMDEQGRLLVVQEQLEGQLQCCQEELRQLREKRPSVVKEARGKNANKNMNKNANGVKMKKVTKPCSDTSESDLETRKSLEVVLYYKASQRKLDGLAKEEEKKEEMEEEKKEVKEEAKEQCGDELVAEPADPEEAKSTEDQEENEEDKEEEEKEEDSEEEEDDADSSLESPEENNPLRLSESKKEHVWVVEAYGILGYCSCGSVCVTQHATAGVRVLPHGVMADLGQREGRSPVATTLSFGQDTLCQNPPHMFHVSPSPQPQSPRLKRLVGSG

SEQ ID NO: 815375 - protein, 1286 aa, Homo sapiens
CAPGSGPRARGCGFCSGRRKAAAGAVMEAGAGAGAGAAGWSCPGPGPTVTTLGSYEASEGCERKKGQRWGSLERRGMQAMEGEVLLPALYEEEEEEEEEEEEVEEEEEQVQKGGSVGSLSVNKHRGLSLTETELEELRAQVLQLVAELEETRELAGQHEDDSLELQGLLEDERLASAQQAEVFTKQIQQLQGELRSLREEISLLEHEKESELKEIEQELHLAQAEIQSLRQAAEDSATEHESDIASLQEDLCRMQNELEDMERIRGDYEMEIASLRAEMEMKSSEPSGSLGLSDYSGLQEELQELRERYHFLNEEYRALQESNSSLTGQLADLESERTQRATERWLQSQTLSMTSAESQTSEMDFLEPDPEMQLLRQQLRDAEEQMHGMKNKCQELCCELEELQHHRQVSEEEQRRLQRELKCAQNEVLRFQTSHSVTQNEELKSRLCTLQKKYDTSQDEQNELLKMQLQLQTELRQLKVMKSTLVENQSEKELLCRLQKLHLQHQNVTCEKEKLLERQQQLQEELQCHEAELQHLRDTVASFKESNEKDTETHAQLQEMKQLYQASKDELERQKHMYDQLEQDLLLCQLELKELKASHPIPEDKGKCANKCDTLLSRLTELQEKYKASQKEMGQLQMEQCELLEDQRRMQEEQGQLQEELHRLTLPLPKSGLLLKSQELLTKLEDLCELQLLYQGMQEEQKKLIQNQDCVLKEQLEIHEELRRFKESHFQEVLENPDDSKLAKSSKCNRNKQSKLLMEQMQALQVMYDAGQAKQELLQQEQGRLLEERKRLQADLQLCLEEMQLLQVQSPSIKMSLESYGKSYGSMVPSNENCRKTYDTTVDDNESYYKSYTSTQTSSKSFLKSYDSSTSASEAYGKSYCTTSNSSITYKKSYGSTSSSDTCQKSFVSSCTDEEPAEPEDMERFEEMVVKVLIKLQAVQAMYQISQEEHSQLQEQMEKLLAKQKDLKEELDACEREFKECMECLEKPMAPQNDKNEIKELQTKLRELQLQYQASMDEQGRLLVVQEQLEGQLQCCQEELRQLREKRPSVVKEARGKNANKNMNKNANGVKMKKVTKPCSDTSESDLETRKSLEVVLYYKASQRKLDGLAKEEEKKEEMEEEKKEVKEEAKEQCGDELVAEPADPEEAKSTEDQEENEEDKEEEEKEEDSEEEEDDADSSLESPEENNPLRLSESKKEHVWVVEAYGILGYCSCGSVCVTQHATAGVRVLPHGVMADLGQREGRSPVATTLSFGQDTLCQNPPHMFHVSPSPQPQSPRLKRLVGSG

SEQ ID NO: 815376 - protein, 1316 aa, Homo sapiens
RRGGLPALRLDGATGGLLLRGSLALARWGVAESGEVRALPFAHPGLDFPPPAPRLPRGHRAGVGRAWGRSQRGLLGPTVTTLGSYEASEGCERKKGQRWGSLERRGMQAMEGEVLLPALYEEEEEEEEEEEEVEEEEEQVQKGGSVGSLSVNKHRGLSLTETELEELRAQVLQLVAELEETRELAGQHEDDSLELQGLLEDERLASAQQAEVFTKQIQQLQGELRSLREEISLLEHEKESELKEIEQELHLAQAEIQSLRQAAEDSATEHESDIASLQEDLCRMQNELEDMERIRGDYEMEIASLRAEMEMKSSEPSGSLGLSDYSGLQEELQELRERYHFLNEEYRALQESNSSLTGQLADLESERTQRATERWLQSQTLSMTSAESQTSEMDFLEPDPEMQLLRQQLRDAEEQMHGMKNKCQELCCELEELQHHRQVSEEEQRRLQRELKCAQNEVLRFQTSHSVTQNEELKSRLCTLQKKYDTSQDEQNELLKMQLQLQTELRQLKVMKSTLVENQSEKELLCRLQKLHLQHQNVTCEKEKLLERQQQLQEELQCHEAELQHLRDTVASFKESNEKDTETHAQLQEMKQLYQASKDELERQKHMYDQLEQDLLLCQLELKELKASHPIPEDKGKCANKCDTLLSRLTELQEKYKASQKEMGQLQMEQCELLEDQRRMQEEQGQLQEELHRLTLPLPKSGLLLKSQELLTKLEDLCELQLLYQGMQEEQKKLIQNQDCVLKEQLEIHEELRRFKESHFQEVLENPDDSKLAKSSKCNRNKQSKLLMEQMQALQVMYDAGQAKQELLQQEQGRLLEERKRLQADLQLCLEEMQLLQVQSPSIKMSLESYGKSYGSMVPSNENCRKTYDTTVDDNESYYKSYTSTQTSSKSFLKSYDSSTSASEAYGKSYCTTSNSSITYKKSYGSTSSSDTCQKSFVSSCTDEEPAEPEDMERFEEMVVKVLIKLQAVQAMYQISQEEHSQLQEQMEKLLAKQKDLKEELDACEREFKECMECLEKPMAPQNDKNEIKELQTKLRELQLQYQASMDEQGRLLVVQEQLEGQLQCCQEELRQLREKRPSVVKEARGKNANKNMNKNANGVKMKKVTKPCSDTSESDLETRKSLEVVLYYKASQRKLDGLAKEEEKKEEMEEEKKEVKEEAKEQCGDELVAEPADPEEAKSTEDQEENEEDKEEEEKEEDSEEEEDDADSSLESPEENNPLRLSESKKEHVWVVEAYGILGYCSCGSVCVTQHATAGVRVLPHGVMADLGQREGRSPVATTLSFGQDTLCQNPPHMFHVSPSPQPQSPRLKRLVGSG

SEQ ID NO: 815377 - protein, 900 aa, Homo sapiens
MEAITSELRSLREEISLLEHEKESELKEIEQELHLAQAEIQSLRQAAEDSATEHESDIASLQEDLCRMQNELEDMERIRGDYEMEIASLRAEMEMKSSEPSGSLGLSDYSGLQEELQELRERYHFLNEEYRALQESNSSLTGQLADLESERTQRATERWLQSQTLSMTSAESQTSEMDFLEPDPEMQLLRQQLRDAEEQMHGMKNKCQELCCELEELQHHRQVSEEEQRRLQRELKCAQNEVLRFQTSHSVTQNEELKSRLCTLQKKYDTSQDEQNELLKMQLQLQTELRQLKVMKSTLVENQSEKELLCRLQKLHLQHQNVTCEKEKLLERQQQLQEELQCHEAELQHLRDTVASFKESNEKDTETHAQLQEMKQLYQASKDELERQKHMYDQLEQDLLLCQLELKELKASHPIPEDKGKCANKCDTLLSRLTELQEKYKASQKEMGQLQMEQCELLEDQRRMQEEQGQLQEELHRLTLPLPKSGLLLKSQELLTKLEDLCELQLLYQGMQEEQKKLIQNQDCVLKEQLEIHEELRRFKESHFQEVLENPDDSKLAKSSKCNRNKQSKLLMEQMQALQVMYDAGQAKQELLQQEQGRLLEERKRLQADLQLCLEEMQLLQVQSPSIKMSLESYGKSYGSMVPSNENCRKTYDTTVDDNESYYKSYTSTQTSSKSFLKSYDSSTSASEAYGKSYCTTSNSSITYKKSYGSTSSSDTCQKSFVSSCTDEEPAEPEDMERFEEMVVKVLIKLQAVQAMYQISQEEHSQLQEQMEKLLAKQKDLKEELDACEREFKECMECLEKPMAPQNDKNEEHVWVVEAYGILGYCSCGSVCVTQHATAGVRVLPHGVMADLGQREGRSPVATTLSFGQDTLCQNPPHMFHVSPSPQPQSPRLKRLVGSG

SEQ ID NO: 815378 - protein, 995 aa, Homo sapiens
MEGEVLLPALYEEEEEEEEEEEEVEEEEEQVQKGGSVGSLSVNKHRGLSLTETELEELRAQVLQLVAELEETRELAGQHEDDSLELQGLLEDERLASAQQAEVFTKQIQQLQGELRSLREEISLLEHEKESELKEIEQELHLAQAEIQSLRQAAEDSATEHESDIASLQEDLCRMQNELEDMERIRGDYEMEIASLRAEMEMKSSEPSEELQELRERYHFLNEEYRALQESNSSLTGQLADLESERTQRATERWLQSQTLSMTSAESQTSEMDFLEPDPEMQLLRQQLRDAEEQMHGMKNKCQELCCELEELQHHRQVSEEEQRRLQRELKCAQNEVLRFQTSHSVTQNEELKSRLCTLQKKYDTSQDEQNELLKMQLQLQTELRQLKVMKSTLVENQSEKELLCRLQKLHLQHQNVTCEKEKLLERQQQLQEELQCHEAELQHLRDTVASFKESNEKDTETHAQLQEMKQLYQASKDELERQKHMYDQLEQDLLLCQLELKELKASHPIPEDKGKCANKCDTLLSRLTELQEKYKASQKEMGQLQMEQCELLEDQRRMQEEQGQLQEELHRLTLPLPKSGLLLKSQELLTKLEDLCELQLLYQGMQEEQKKLIQNQDCVLKEQLEIHEELRRFKESHFQEVLENPDDSKLAKSSKCNRNKQSKLLMEQMQALQVMYDAGQAKQELLQQEQGRLLEERKRLQADLQLCLEEMQLLQVQSPSIKMSLESYGKSYGSMVPSNENCRKTYDTTVDDNESYYKSYTSTQTSSKSFLKSYDSSTSASEAYGKSYCTTSNSSITYKKSYGSTSSSDTCQKSFVSSCTDEEPAEPEDMERFEEMVVKVLIKLQAVQAMYQISQEEHSQLQEQMEKLLAKQKDLKEELDACEREFKECMECLEKPMAPQNDKNEEHVWVVEAYGILGYCSCGSVCVTQHATAGVRVLPHGVMADLGQREGRSPVATTLSFGQDTLCQNPPHMFHVSPSPQPQSPRLKRLVGSG

SEQ ID NO: 815379 - protein, 715 aa, Homo sapiens
MQLLRQQLRDAEEQMHGMKNKCQELCCELEELQHHRQVSEEEQRRLQRELKCAQNEVLRFQTSHSVTQNEELKSRLCTLQKKYDTSQDEQNELLKMQLQLQTELRQLKVMKSTLVENQSEKELLCRLQKLHLQHQNVTCEKEKLLERQQQLQEELQCHEAELQHLRDTVASFKESNEKDTETHAQLQEMKQLYQASKDELERQKHMYDQLEQDLLLCQLELKELKASHPIPEDKGKCANKCDTLLSRLTELQEKYKASQKEMGQLQMEQCELLEDQRRMQEEQGQLQEELHRLTLPLPKSGLLLKSQELLTKLEDLCELQLLYQGMQEEQKKLIQNQDCVLKEQLEIHEELRRFKESHFQEVLENPDDSKLAKSSKCNRNKQSKLLMEQMQALQVMYDAGQAKQELLQQEQGRLLEERKRLQADLQLCLEEMQLLQVQSPSIKMSLESYGKSYGSMVPSNENCRKTYDTTVDDNESYYKSYTSTQTSSKSFLKSYDSSTSASEAYGKSYCTTSNSSITYKKSYGSTSSSDTCQKSFVSSCTDEEPAEPEDMERFEEMVVKVLIKLQAVQAMYQISQEEHSQLQEQMEKLLAKQKDLKEELDACEREFKECMECLEKPMAPQNDKNEEHVWVVEAYGILGYCSCGSVCVTQHATAGVRVLPHGVMADLGQREGRSPVATTLSFGQDTLCQNPPHMFHVSPSPQPQSPRLKRLVGSG

SEQ ID NO: 815380 - protein, 987 aa, Homo sapiens
MEAITSELRSLREEISLLEHEKESELKEIEQELHLAQAEIQSLRQAAEDSATEHESDIASLQEDLCRMQNELEDMERIRGDYEMEIASLRAEMEMKSSEPSGSLGLSDYSGLQEELQELRERYHFLNEEYRALQESNSSLTGQLADLESERTQRATERWLQSQTLSMTSAESQTSEMDFLEPDPEMQLLRQQLRDAEEQMHGMKNKCQELCCELEELQHHRQVSEEEQRRLQRELKCAQNEVLRFQTSHSVTQNEELKSRLCTLQKKYDTSQDEQNELLKMQLQLQTELRQLKVMKSTLVENQSEKELLCRLQKLHLQHQNVTCEKEKLLERQQQLQEELQCHEAELQHLRDTVASFKESNEKDTETHAQLQEMKQLYQASKDELERQKHMYDQLEQDLLLCQLELKELKASHPIPEDKGKCANKCDTLLSRLTELQEKYKASQKEMGQLQMEQCELLEDQRRMQEEQGQLQEELHRLTLPLPKSGLLLKSQELLTKLEDLCELQLLYQGMQEEQKKLIQNQDCVLKEQLEIHEELRRFKESHFQEVLENPDDSKLAKSSKCNRNKQSKLLMEQMQALQVMYDAGQAKQELLQQEQGRLLEERKRLQADLQLCLEEMQLLQVQSPSIKMSLESYGKSYGSMVPSNENCRKTYDTTVDDNESYYKSYTSTQTSSKSFLKSYDSSTSASEAYGKSYCTTSNSSITYKKSYGSTSSSDTCQKSFVSSCTDEEPAEPEDMERFEEMVVKVLIKLQAVQAMYQISQEEHSQLQEQMEKLLAKQKDLKEELDACEREFKECMECLEKPMAPQNDKNEIKELQTKLRELQLQYQASMDEQGRLLVVQEQLEGQLQCCQEELRQLREKRPSVVKEARGKNANKNMNKNANGVKMKKVTKPCSDTSESDLETRKKIRRKMKRTKRKRRRKKTVKRRRMTPTLPLKVPKKITPSDFPRAKRNMFGLWKPMVFLAIAAVALYVLPNMRQQESEFCLME

SEQ ID NO: 815381 - protein, 401 aa, Homo sapiens
MEAITSELRSLREEISLLEHEKESELKEIEQELHLAQAEIQSLRQAAEDSATEHESDIASLQEDLCRMQNELEDMERIRGDYEMEIASLRAEMEMKSSEPSGSLGLSDYSGLQEELQELRERYHFLNEEYRALQESNSSLTGQLADLESERTQRATERWLQSQTLSMTSAESQTSEMDFLEPDPEMQLLRQQLRDAEEQMHGMKNKCQELCCELEELQHHRQVSEEEQRRLQRELKCAQNEVLRFQTSHSVTQELLCRLQKLHLQHQNVTCEKEKLLERQQQLQEELQCHEAELQHLRDTVASFKESNEKDTETHAQLQEMKQLYQASKDELERQKHMYDQLEQDLLLCQLELKELKASHPIPEDKGKCANKSSPTPKSPHLLLASCRPGGHLGFALVLVG

SEQ ID NO: 815382 - protein, 282 aa, Homo sapiens
MEAITSELRSLREEISLLEHEKESELKEIEQELHLAQAEIQSLRQAAEDSATEHESDIASLQEDLCRMQNELEDMERIRGDYEMEIASLRAEMEMKSSEPSGSLGLSDYSGLQEELQELRERYHFLNEEYRALQESNSSLTGQLADLESERTQRATERWLQSQTLSMTSAESQTSEMDFLEPDPEMQLLRQQLRDAEEQMHGMKNKCQELCCELEELQHHRQVSEEEQRRLQRELKCAQNEVLRFQTSHSVTQSSPTPKSPHLLLASCRPGGHLGFALVLVG

SEQ ID NO: 815383 - protein, 1017 aa, Homo sapiens
MEAITSELRSLREEISLLEHEKESELKEIEQELHLAQAEIQSLRQAAEDSATEHESDIASLQEDLCRMQNELEDMERIRGDYEMEIASLRAEMEMKSSEPSGSLGLSDYSGLQEELQELRERYHFLNEEYRALQESNSSLTGQLADLESERTQRATERWLQSQTLSMTSAESQTSEMDFLEPDPEMQLLRQQLRDAEEQMHGMKNKCQELCCELEELQHHRQVSEEEQRRLQRELKCAQNEVLRFQTSHSVTQNEELKSRLCTLQKKYDTSQDEQNELLKMQLQLQTELRQLKVMKSTLVENQSEKELLCRLQKLHLQHQNVTCEKEKLLERQQQLQEELQCHEAELQHLRDTVASFKESNEKDTETHAQLQEMKQLYQASKDELERQKHMYDQLEQDLLLCQLELKELKASHPIPEDKGKCANKCDTLLSRLTELQEKYKASQKEMGQLQMEQCELLEDQRRMQEEQGQLQEELHRLTLPLPKSGLLLKSQELLTKLEDLCELQLLYQGMQEEQKKLIQNQDCVLKEQLEIHEELRRFKESHFQEVLENPDDSKLAKSSKCNRNKQSKLLMEQMQALQVMYDAGQAKQELLQQEQGRLLEERKRLQADLQLCLEEMQLLQVQSPSIKMSLESYGKSYGSMVPSNENCRKTYDTTVDDNESYYKSYTSTQTSSKSFLKSYDSSTSASEAYGKSYCTTSNSSITYKKSYGSTSSSDTCQKSFVSSCTDEEPAEPEDMERFEEMVVKVLIKLQAVQAMYQISQEEHSQLQEQMEKLLAKQKDLKEELDACEREFKECMECLEKPMAPQNDKNEIKELQTKLRELQLQYQASMDEQGRLLVVQEQLEGQLQCCQEELRQLREKRPSVVKEARGKNANKNMNKNANGVKMKKVTKPCSDTSESDLETRKSLEVVLYYKASQRKLDGLAKEEEKKEEMEEEKKEVKEEAKEQCGDELVAEPADPEEAKSTEDQEENEEDKEEEEKEEDSEEEEDDADSSLESPEENNPLRLSESKKVTRAKA

SEQ ID NO: 815384 - protein, 1023 aa, Homo sapiens
MEAITSELRSLREEISLLEHEKESELKEIEQELHLAQAEIQSLRQAAEDSATEHESDIASLQEDLCRMQNELEDMERIRGDYEMEIASLRAEMEMKSSEPSGSLGLSDYSGLQEELQELRERYHFLNEEYRALQESNSSLTGQLADLESERTQRATERWLQSQTLSMTSAESQTSEMDFLEPDPEMQLLRQQLRDAEEQMHGMKNKCQELCCELEELQHHRQVSEEEQRRLQRELKCAQNEVLRFQTSHSVTQNEELKSRLCTLQKKYDTSQDEQNELLKMQLQLQTELRQLKVMKSTLVENQSEKELLCRLQKLHLQHQNVTCEKEKLLERQQQLQEELQCHEAELQHLRDTVASFKESNEKDTETHAQLQEMKQLYQASKDELERQKHMYDQLEQDLLLCQLELKELKASHPIPEDKGKCANKCDTLLSRLTELQEKYKASQKEMGQLQMEQCELLEDQRRMQEEQGQLQEELHRLTLPLPKSGLLLKSQELLTKLEDLCELQLLYQGMQEEQKKLIQNQDCVLKEQLEIHEELRRFKESHFQEVLENPDDSKLAKSSKCNRNKQSKLLMEQMQALQVMYDAGQAKQELLQQEQGRLLEERKRLQADLQLCLEEMQLLQVQSPSIKMSLESYGKSYGSMVPSNENCRKTYDTTVDDNESYYKSYTSTQTSSKSFLKSYDSSTSASEAYGKSYCTTSNSSITYKKSYGSTSSSDTCQKSFVSSCTDEEPAEPEDMERFEEMVVKVLIKLQAVQAMYQISQEEHSQLQEQMEKLLAKQKDLKEELDACEREFKECMECLEKPMAPQNDKNEIKELQTKLRELQLQYQASMDEQGRLLVVQEQLEGQLQCCQEELRQLREKRPSVVKEARGKNANKNMNKNANGVKMKKVTKPCSDTSESDLETRKSLEVVLYYKASQRKLDGLAKEEEKKEEMEEEKKEVKEEAKEQCGDELVAEPADPEEAKSTEDQEENEEDKEEEEKEEDMATTLSFGQDTLCQNPPHMFHVSPSPQPQSPRLKRLVGSG

SEQ ID NO: 815385 - protein, 1040 aa, Homo sapiens
MEAITSELRSLREEISLLEHEKESELKEIEQELHLAQAEIQSLRQAAEDSATEHESDIASLQEDLCRMQNELEDMERIRGDYEMEIASLRAEMEMKSSEPSGSLGLSDYSGLQEELQELRERYHFLNEEYRALQESNSSLTGQLADLESERTQRATERWLQSQTLSMTSAESQTSEMDFLEPDPEMQLLRQQLRDAEEQMHGMKNKCQELCCELEELQHHRQVSEEEQRRLQRELKCAQNEVLRFQTSHSVTQNEELKSRLCTLQKKYDTSQDEQNELLKMQLQLQTELRQLKVMKSTLVENQSEKELLCRLQKLHLQHQNVTCEKEKLLERQQQLQEELQCHEAELQHLRDTVASFKESNEKDTETHAQLQEMKQLYQASKDELERQKHMYDQLEQDLLLCQLELKELKASHPIPEDKGKCANKCDTLLSRLTELQEKYKASQKEMGQLQMEQCELLEDQRRMQEEQGQLQEELHRLTLPLPKSGLLLKSQELLTKLEDLCELQLLYQGMQEEQKKLIQNQDCVLKEQLEIHEELRRFKESHFQEVLENPDDSKLAKSSKCNRNKQSKLLMEQMQALQVMYDAGQAKQELLQQEQGRLLEERKRLQADLQLCLEEMQLLQVQSPSIKMSLESYGKSYGSMVPSNENCRKTYDTTVDDNESYYKSYTSTQTSSKSFLKSYDSSTSASEAYGKSYCTTSNSSITYKKSYGSTSSSDTCQKSFVSSCTDEEPAEPEDMERFEEMVVKVLIKLQAVQAMYQISQEEHSQLQEQMEKLLAKQKDLKEELDACEREFKECMECLEKPMAPQNDKNEIKELQTKLRELQLQYQASMDEQGRLLVVQEQLEGQLQCCQEELRQLREKRPSVVKEARGKNANKNMNKNANGVKMKKVTKPCSDTSESDLETRKSLEVVLYYKASQRKLDGLAKEEEKKEEMEEEKKEVKEEAKEQCGDELVAEPADPEEAKSTEDQEENEEDKEEEEKEEDSEEEEDDADSSLESPEENNPLRLSESKKSSPTPKSPHLLLASCRPGGHLGFALVLVG

SEQ ID NO: 815386 - protein, 856 aa, Homo sapiens
MEAITSELRSLREEISLLEHEKESELKEIEQELHLAQAEIQSLRQAAEDSATEHESDIASLQEDLCRMQNELEDMERIRGDYEMEIASLRAEMEMKSSEPSGSLGLSDYSGLQEELQELRERYHFLNEEYRALQESNSSLTGQLADLESERTQRATERWLQSQTLSMTSAESQTSEMDFLEPDPEMQLLRQQLRDAEEQMHGMKNKCQELCCELEELQHHRQVSEEEQRRLQRELKCAQNEVLRFQTSHSVTQNEELKSRLCTLQKKYDTSQDEQNELLKMQLQLQTELRQLKVMKSTLVENQSEKELLCRLQKLHLQHQNVTCEKEKLLERQQQLQEELQCHEAELQHLRDTVASFKESNEKDTETHAQLQEMKQLYQASKDELERQKHMYDQLEQDLLLCQLELKELKASHPIPEDKGKCANKCDTLLSRLTELQEKYKASQKEMGQLQMEQCELLEDQRRMQEEQGQLQEELHRLTLPLPKSGLLLKSQELLTKLEDLCELQLLYQGMQEEQKKLIQNQDCVLKEQLEIHEELRRFKESHFQEVLENPDDSKLAKSSKCNRNKQSKLLMEQMQALQVMYDAGQAKQELLQQEQGRLLEERKRLQADLQLCLEEMQLLQVQSPSIKMSLESYGKSYGSMVPSNENCRKTYDTTVDDNESYYKSYTSTQTSSKSFLKSYDSSTSASEAYGKSYCTTSNSSITYKKSYGSTSSSDTCQKSFVSSCTDEEPAEPEDMERFEEMVVKVLIKLQAVQAMYQISQEEHSQLQEQMEKLLAKQKDLKEELVAEPADPEEAKSTEDQEENEEDKEEEEKEEDMATTLSFGQDTLCQNPPHMFHVSPSPQPQSPRLKRLVGSG

SEQ ID NO: 815387 - protein, 501 aa, Homo sapiens
MEAITSELRSLREEISLLEHEKESELKEIEQELHLAQAEIQSLRQAAEDSATEHESDIASLQEDLCRMQNELEDMERIRGDYEMEIASLRAEMEMKSSEPSGSLGLSDYSGLQEELQELRERYHFLNEEYRALQESNSSLTGQLADLESERTQRATERWLQSQTLSMTSAESQTSEMDFLEPDPEMQLLRQQLRDAEEQMHGMKNKCQELCCELEELQHHRQVSEEEQRRLQRELKCAQNEVLRFQTSHSVTQNEELKSRLCTLQKKYDTSQDEQNELLKMQLQLQTELRQLKVMKSTLVENQSEKELLCRLQKLHLQHQNVTCEKEKLLERQQQLQEELQCHEAELQHLRDTVASFKESNEKDTETHAQLQEMKQLYQASKDELERQKHMYDQLEQDLLLCQLELKELKASHPIPEDKGKCANKVIVVQRGDSSWALAPERRGTEAKSEGTQPKGLMAFLGRKQRQGHMLLTSKLFALTLTLSQSHSLVGSIPLDPSLNP

SEQ ID NO: 815388 - protein, 102 aa, Homo sapiens
MPSTYAQGIGSQSQSTGPHPCTLTCWKSCFLELVQHCHEIRSFTGNAAAILPYSHPTESGGSAVLQGQPEEIRWTSKRGGKERGDGGGKKGSERGSKGAVWG

SEQ ID NO: 815389 - protein, 180 aa, Homo sapiens
MKSIYFVAGLFVMLVQGSWQRSLQDTEEKSRSFSASQADPLSDPDQMNEDKRHSQGTFTSDYSKYLDSRRAQDFVQWLMNTKRNRNNIAKRHDEFERHAEGTFTSDVSSYLEGQAAKEFIAWLVKGRGRRDFPEEVAIVEELGRRHADGSFSDEMNTILDNLAARDFINWLIQTKITDRK

SEQ ID NO: 815390 - protein, 180 aa, Homo sapiens; identical to SEQ ID NO: 815389

SEQ ID NO: 815391 - protein, 223 aa, Homo sapiens
DAWADALWSAHASAKQSTSKVPKEGLLSLHLLCSTAHYQKTAEMKSIYFVAGLFVMLVQGSWQRSLQDTEEKSRSFSASQADPLSDPDQMNEDKRHSQGTFTSDYSKYLDSRRAQDFVQWLMNTKRNRNNIAKRHDEFERHAEGTFTSDVSSYLEGQAAKEFIAWLVKGRGRRDFPEEVAIVEELGRRHADGSFSDEMNTILDNLAARDFINWLIQTKITDRK

SEQ ID NO: 815392 - protein, 180 aa, Homo sapiens; identical to SEQ ID NO: 815389

SEQ ID NO: 815393 - protein, 219 aa, Homo sapiens
LFRPSVRGRLGQSTSKVPKEGLLSLHLLCSTAHYQKTAEMKSIYFVAGLFVMLVQGSWQRSLQDTEEKSRSFSASQADPLSDPDQMNEDKRHSQGTFTSDYSKYLDSRRAQDFVQWLMNTKRNRNNIAKRHDEFERHAEGTFTSDVSSYLEGQAAKEFIAWLVKGRGRRDFPEEVAIVEELGRRHADGSFSDEMNTILDNLAARDFINWLIQTKITDRK

SEQ ID NO: 815394 - protein, 180 aa, Homo sapiens; identical to SEQ ID NO: 815389

SEQ ID NO: 815395 - protein, 180 aa, Homo sapiens; identical to SEQ ID NO: 815389

SEQ ID NO: 815396 - protein, 219 aa, Homo sapiens; identical to SEQ ID NO: 815393

SEQ ID NO: 815397 - protein, 202 aa, Homo sapiens
  misc_feature (15)..(15): Xaa can be any naturally occurring amino acid
  misc_feature (17)..(17): Xaa can be any naturally occurring amino acid
HAHTTSLPIPTHQHXRXLVTAEMKSIYFVAGLFVMLVQGSWQRSLQDTEEKSRSFSASQADPLSDPDQMNEDKRHSQGTFTSDYSKYLDSRRAQDFVQWLMNTKRNRNNIAKRHDEFERHAEGTFTSDVSSYLEGQAAKEFIAWLVKGRGRRDFPEEVAIVEELGRRHADGSFSDEMNTILDNLAARDFINWLIQTKITDRK

SEQ ID NO: 815398 - protein, 143 aa, Homo sapiens
  misc_feature (1)..(1): Xaa can be any naturally occurring amino acid
XKKNRANGDRALFRPTRPGTFTSDYSKYLDSRRAQDFVQWLMNTKRNRNNIAKRHDEFERHAEGTFTSDVSSYLEGQAAKEFIAWLVKGRGRRDFPEEVAIVEELGRRHADGSFSDEMNTILDNLAARDFINWLIQTKITDRK

SEQ ID NO: 815399 - protein, 180 aa, Homo sapiens; identical to SEQ ID NO: 815389

SEQ ID NO: 815400 - protein, 180 aa, Homo sapiens; identical to SEQ ID NO: 815389

SEQ ID NO: 815401 - protein, 93 aa, Homo sapiens
EEKKPGEWGPGPFSTHASDVSSYLEGQAAKEFIAWLVKGRGRRDFPEEVAIVEELGRRHADGSFSDEMNTILDNLAARDFINWLIQTKITDRK

SEQ ID NO: 815402 - protein, 129 aa, Homo sapiens
MKSIYFVAGLFVMLVQGSWQRSLQDTEEKSRSFSASQADPLSDPDQMNEDKRHSQGTFTSDYSKYLDSRRAQDFVQWLMNTKRNRNNIAKRHDEFERHAEGTFTSVSQKRSPLLKNLAADMLMVLSLMR

SEQ ID NO: 815403 - protein, 261 aa, Homo sapiens
  misc_feature (195)..(195): Xaa can be any naturally occurring amino acid
KSFVTKTHYLQMRNLYCQRNICEAKQSWRVYKSSAPWCRSTELRTQTEHIKSSQRGLALSSPALFYSTLPEDSRNEKHLLCGWIICNAGTRQLATFPSRHRGEIQIILSFPGSKRPTIWIDTGIHSREWVTQASGVLVAKKITQDYGQDAAFTAILDTLDIFLEIVTNPDGFAFTHSTNRMWRKTRSHTAGSLCXGVDPNRNWDAGFGLSGASSNPCSETYHGKFANSEVEVKSIVDFVKDLGNIKGFISSTVIPGPHVSY

SEQ ID NO: 815404 - protein, 108 aa, Homo sapiens
KSFVTKTHYLQMRNLYCQRNICEAKQSWRVYKSSAPWCRSTELRTQTEHIKSSQRGLALSSPALFYSTLPEDSRNEKHLLCGWIICNAGTRQLATFPSRAPGENSVFF

SEQ ID NO: 815405 - protein, 967 aa, Homo sapiens
MGPGQPASTCVHLAPRTQLDGRSDPKVLQTQNQLQFNRNVPTHSSNLAIRYSCPHAIRIEKLKHSYNESYHCKDADCRVGPDLGSSVSFSVISQERLSYAVHLARRDVKRRQFEKHIKEHHLRSQPQSSQKCGHTKYKIPDHRVERKESKSQAACQCSHQPSKVEISSSGAKVYLYSSHPGQSDLTVPNSPPTHDPGLQPHPRIGDHKNISEQKSLLEVQRLQKELSSCIHKIEEVTKKDRLEEALDPDEERRIRIRRQEQAARSARMLYVLQQQVKEIQEELDKLSPHKIKHTKKSWAMSKLAAAHRGAIRALQMFVTQFTDRGEHPLPARCKELGSLIRQLSLCSVKLDADPSVPDVVIDILQQIEALESLLEKKLSPKKVKKCFSEIRSRFPIGSQKALERWPSTSPKGERRPLTAKDTFPQETSRPSVAKQLLADKYQPDTELPETQRLQSELDVLDADIVLEEGPFILDQSASFKDEVLAVAKTKAGKKKPVTENVPFRKKDTLAPARQQGLRKAERGRQSQPHSKSRVQQTTVSSRLKMNRQPVKDRKAPWIPPNPTSPPASPKCAAWLKVKTSPRDATKEPLQQEDPQEESHLTGAVEHEAARLAWLDAETSKRLKELEELKAKEIDSMQKQRLDWLDAETSRRTKELNELKAEEMYRLQQLSVSATHLADKVEEAVLDRLKPLLVKAQRVNSTTEANIHLKDGSSVNTAKAQPAQEVAAVDFESNNIRQLDDFLEDCASELWAVTHAKILGSETLATVEDSKDSPDLEIMMRRMEEMEKYQESVRQRYNKIAYADPRLWMQEENNDQKISAISEKPLSPHPIRITKTVDRKDPAVNIMLERPCNGNSLDESVGTEEGSEKREAPLLSLAEDSQQKEGRAPLFVPPGMQHSIGDYCSRFEQYLRIISHEAVGSFNPWLIAESFSEELVDEALGAVAAELQDMCEDYAEAVFTSEFLEAAT

SEQ ID NO: 815406 - protein, 689 aa, Homo sapiens [sequence omitted]

SEQ ID NO: 815407 - protein, 672 aa, Homo sapiens
MLASSEYGNNFSHLVYYQSWAMSKLAAAHRGAIRALQMFVTQFTDRGEHPLPARCKELGSLIRQLSLCSVKLDADPSVPDVVIDILQQIEALESLLEKKLSPKKVKKCFSEIRSRFPIGSQKALERWPSTSPKGERRPLTAKDTFPQETSRPSVAKQLLADKYQPDTELPETQRLQSELDVLDADIVLEEGPFILDQSASFKDEVLAVAKTKAGKKKPVTENVPFRKKDTLAPARQQGLRKAERGRQSQPHSKSRVQQTTVSSRLKMNRQPVKDRKAPWIPPNPTSPPASPKCAAWLKVKTSPRDATKEPLQQEDPQEESHLTGAVEHEAARLAWLDAETSKRLKELEELKAKEIDSMQKQRLDWLDAETSRRTKELNELKAEEMYRLQQLSVSATHLADKVEEAVLDRLKPLLVKAQRVNSTTEANIHLKDGSSVNTAKAQPAQEVAAVDFESNNIRQLDDFLEDCASELWAVTHAKILGSETLATVEDSKDSPDLEIMMRRMEEMEKYQESVRQRYNKIAYADPRLWMQEENNESRRQWIARIQPVNIMLERPCNGNSLDESVGTEEGSEKREAPLLSLAEDSQQKEGRAPLFVPPGMQHSIGDYCSRFEQYLRIISHEAVGSFNPWLIAESFSEELVDEALGAVAAELQDMCEDYAEAVFTSEFLEAAT

SEQ ID NO: 815408 - protein, 689 aa, Homo sapiens [sequence omitted]

SEQ ID NO: 815409 - protein, 402 aa, Homo sapiens
GLNDGRSMAWRHLQKRAQDAVIILGGGGLLFASYLMATGDERFYAEHLMPTLQGLLDPESAHRLAVRFTSLGLLPRARFQDSDMLEVRVLGHKFRNPVGIAAGFDKHGEAVDGLYKMGFGFVEIGSVTPKPQEGNPRPRVFRLPEDQAVINRYGFNSHGLSVVEHRLRARQQKQAKLTEDGLPLGVNLGKNKTSVDAAEDYAEGVRVLGPLADYLVVNVSSPNTAGLRSLQGKAELRRLLTKVLQERDGLRRVHRPAVLVKIAPDLTSQDKEDIASVVKELGIDGLIVTNTTVSRPAGLQGALRSETGGLSGKPLRDLSTQTIREMYALTQGRVPIIGVGGVSSGQDALEKIRAGASLVQLYTALTFWGPPVVGKVKRELEALLKEQGFGGVTDAIGADHRR

SEQ ID NO: 815410 - protein, 402 aa, Homo sapiens; identical to SEQ ID NO: 815409

SEQ ID NO: 815411 - protein, 367 aa, Homo sapiens
MATGDERFYAEHLMPTLQGLLDPESAHRLAVRFTSLGLLPRARFQDSDMLEVRVLGHKFRNPVGIAAGFDKHGEAVDGLYKMGFGFVEIGSVTPKPQEGNPRPRVFRLPEDQAVINRYGFNSHGLSVVEHRLRARQQKQAKLTEDGLPLGVNLGKNKTSVDAAEDYAEGVRVLGPLADYLVVNVSSPNTAGLRSLQGKAELRRLLTKVLQERDGLRRVHRPAVLVKIAPDLTSQDKEDIASVVKELGIDGLIVTNTTVSRPAGLQGALRSETGGLSGKPLRDLSTQTIREMYALTQGRVPIIGVGGVSSGQDALEKIRAGASLVQLYTALTFWGPPVVGKVKRELEALLKEQGFGGVTDAIGADHRR

SEQ ID NO: 815412 - protein, 449 aa, Homo sapiens
PGTGEGENGESGRARHGPKAAPGVWAPLGRVRVSGVSCKCSCVCICTWTRSGVCRQRLQVWKRAQDAVIILGGGGLLFASYLMATGDERFYAEHLMPTLQGLLDPESAHRLAVRFTSLGLLPRARFQDSDMLEVRVLGHKFRNPVGIAAGFDKHGEAVDGLYKMGFGFVEIGSVTPKPQEGNPRPRVFRLPEDQAVINRYGFNSHGLSVVEHRLRARQQKQAKLTEDGLPLGVNLGKNKTSVDAAEDYAEGVRVLGPLADYLVVNVSSPNTAGLRSLQGKAELRRLLTKVLQERDGLRRVHRPAVLVKIAPDLTSQDKEDIASVVKELGIDGLIVTNTTVSRPAGLQGALRSETGGLSGKPLRDLSTQTIREMYALTQGRVPIIGVGGVSSGQDALEKIRAGASLVQLYTALTFWGPPVVGKVKRELEALLKEQGFGGVTDAIGADHRR

SEQ ID NO: 815413 - protein, 483 aa, Homo sapiens
PGTGEGENGESGRARHGPKAAPGVWAPLGRVRVSGVSCKCSCVCICTWTRSGVCRQRLQVWKRAQDAVIILGGGGLLFASYLMATGDERFYAEHLMPTLQGLLDPESAHRLAVRFTSLGLLPRARFQDSDMLVVLPDTLYIKYKGEGCSPLNFSAGTDLFENQNPKEVRVLGHKFRNPVGIAAGFDKHGEAVDGLYKMGFGFVEIGSVTPKPQEGNPRPRVFRLPEDQAVINRYGFNSHGLSVVEHRLRARQQKQAKLTEDGLPLGVNLGKNKTSVDAAEDYAEGVRVLGPLADYLVVNVSSPNTAGLRSLQGKAELRRLLTKVLQERDGLRRVHRPAVLVKIAPDLTSQDKEDIASVVKELGIDGLIVTNTTVSRPAGLQGALRSETGGLSGKPLRDLSTQTIREMYALTQGRVPIIGVGGVSSGQDALEKIRAGASLVQLYTALTFWGPPVVGKVKRELEALLKEQGFGGVTDAIGADHRR

SEQ ID NO: 815414 - protein, 460 aa, Homo sapiens
GLNDGRSMAWRHLQKRAQDAVIILGGGGLLFASYLMATGDERFYAEHLMPTLQGLLDPESAHRLAVRFTSLGLLPRARFQDSDMLEVRVLGHKFRNPVGIAAGFDKHGEAVDGLYKMGFGFVEIGSVTPKPQEGNPRPRVFRLPEDQAVINRWGSISSELARQNNLLNIQLLQITAGAGMMVLGESYEVSRGVRSCSEPCVCGSWLCGMWYGFNSHGLSVVEHRLRARQQKQAKLTEDGLPLGVNLGKNKTSVDAAEDYAEGVRVLGPLADYLVVNVSSPNTAGLRSLQGKAELRRLLTKVLQERDGLRRVHRPAVLVKIAPDLTSQDKEDIASVVKELGIDGLIVTNTTVSRPAGLQGALRSETGGLSGKPLRDLSTQTIREMYALTQGRVPIIGVGGVSSGQDALEKIRAGASLVQLYTALTFWGPPVVGKVKRELEALLKEQGFGGVTDAIGADHRR

SEQ ID NO: 815415 - protein, 295 aa, Homo sapiens
GLNDGRSMAWRHLQKRAQDAVIILGGGGLLFASYLMATGDERFYAEHLMPTLQGLLDPESAHRLAVRFTSLGLLPRARFQDSDMLEVRVLGHKFRNPVGIAAGFDKHGEAVDGLYKMGFGFVEIGSVTPKPQEGNPRPRVFRLPEDQAVINRYGFNSHGLSVVEHRLRARQQKQAKLTEDGLPLGVNLGKNKTSVDAAEDYAEGVRVLGPLADYLVVNVSSPNTAGLRSLQGKAELRRLLTKVLQERDGLRRVHRPAVLVKIAPDLTSQDKEDIASVVKELGIDGLIVTHTHTQF

SEQ ID NO: 815416 - protein, 354 aa, Homo sapiens
MKSLLLLVLISICWADHLSDNYTLDHDRAIHIQAENGPHLLVEAEQAKVFSHRGGNVTLPCKFYRDPTAFGSGIHKIRIKWTKLTSDYLKEVDVFVSMGYHKKTYGGYQGRVFLKGGSDSDASLVITDLTLEDYGRYKCEVIEGLEDDTVVVALDLQGVVFPYFPRLGRYNLNFHEAQQACLDQDAVIASFDQLYDAWRGGLDWCNAGWLSDGSVQYPITKPREPCGGQNTVPGVRNYGFWDKDKSRYDVFCFTSNFNGRFYYLIHPTKLTYDEAVQACLNDGAQIAKVGQIFAAWKILGYDRCDAGWLADGSVRYPISRPRRRCSPTEAAVRFVGFPDKKHKLYGVYCFRAYN

SEQ ID NO: 815417 - protein, 354 aa, Homo sapiens; identical to SEQ ID NO: 815416

SEQ ID NO: 815418 - protein, 108 aa, Homo sapiens
  misc_feature (108)..(108): Xaa can be any naturally occurring amino acid
FKYPHNTLITCLFNVIGHVIKVLLGRKVNWHDFAFFDPVMYESLRQLILASQSSDADAVFSAMDLAFAIDLCKEEGGGQVELIPNGVNIPVTPQNVYEYVRIFEWGIX

SEQ ID NO: 815419 - protein, 2810 aa, Homo sapiens
RPRVEDEKESTMTSIHFVVHPLPGTEDQLNDRLREVSEKLNKYNLNSHPPLNVLEQATIKQCVVGPNHAAFLLEDGRVCRIGFSVQPDRLELGKPDNNDGSKLNSNSGAGRTSRPGRTSDSPWFLSGSETLGRLAGNTLGSRWSSGVGGSGGGSSGRSSAGARDSRRQTRVIRTGRDRGSGLLGSQPQPVIPASVIPEELISQAQVVLQGKSRSVIIRELQRTNLDVNLAVNNLLSRDDEDGDDGDDTASESYLPGEDLMSLLDADIHSAHPSVIIDADAMFSEDISYFGYPSFRRSSLSRLGSSRVLLLPLERDSELLRERESVLRLRERRWLDGASFDNERGSTSKEGEPNLDKKNTPVQSPVSLGEDLQWWPDKDGTKFICIGALYSELLAVSSKGELYQWKWSESEPYRNAQNPSLHHPRATFLGLTNEKIVLLSANSIRATVATENNKVATWVDETLSSVASKLEHTAQTYSELQGERIVSLHCCALYTCAQLENSLYWWGVVPFSQRKKMLEKARAKNKKPKSSAGISSMPNITVGTQVCLRNNPLYHAGAVAFSISAGIPKVGVLMESVWNMNDSCRFQLRSPESLKNMEKASKTTEAKPESKQEPVKTEMGPPPSPASTCSDASSIASSASMPYKRRRSTPAPKEEEKVNEEQWSLREVVFVEDVKNVPVGKVLKVDGAYVAVKFPGTSSNTNCQNSSGPDADPSSLLQDCRLLRIDELQVVKTGGTPKVPDCFQRTPKKLCIPEKTEILAVNVDSKGVHAVLKTGNWVRYCIFDLATGKAEQENNFPTSSIAFLGQNERNVAIFTAGQESPIILRDGNGTIYPMAKDCMGGIRDPDWLDLPPISSLGMGVHSLINLPANSTIKKKAAVIIMAVEKQTLMQHILRCDYEACRQYLMNLEQAVVLEQNLQMLQTFISHRCDGNRNILHACVSVCFPTSNKETKEEEEAERSERNTFAERLSAVEAIANAISVVSSNGPGNRAGSSSSRSLRLREMMRRSLRAAGLGRHEAGASSSDHQDPVSPPIAPPSWVPDPPAMDPDGDIDFILAPAVGSLTTAATGTGQGPSTSTIPGPSTEPSVVESKDRKANAHFILKLLCDSVVLQPYLRELLSAKDARGMTPFMSAVSGRAYPAAITILETAQKIAKAEISSSEKEEDVFMGMVCPSGTNPDDSPLYVLCCNDTCSFTWTGAEHINQDIFECRTCGLLESLCCCTECARVCHKGHDCKLKRTSPTAYCDCWEKCKCKTLIAGQKSARLDLLYRLLTATNLVTLPNSRGEHLLLFLVQTVARQTVEHCQYRPPRIREDRNRKTASPEDSDMPDHDLEPPRFAQLALERVLQDWNALKSMIMFGSQENKDPLSASSRIGHLLPEEQVYLNQQSGTIRLDCFTHCLIVKCTADILLLDTLLGTLVKELQNKYTPGRREEAIAVTMRFLRSVARVFVILSVEMASSKKKNNFIPQPIGKCKRVFQALLPYAVEELCNVAESLIVPVRMGIARPTAPFTLASTSIDAMQGSEELFSVEPLPPRPSSDQSSSSSQSQSSYIIRNPQQRRISQSQPVRGRDEEQDDIVSADVEEVEVVEGVAGEEDHHDEQEEHGEENAEAEGQHDEHDEDGSDMELDLLAAAETESDSESNHSNQDNASGRRSVVTAATAGSEAGASSVPAFFSEDDSQSNDSSDSDSSSSQSDDIEQETFMLDEPLERTTNSSHANGAAQAPRSMQWAVRNTQHQRAASTAPSSTSTPAASSAGLIYIDPSNLRRSGTISTSAAAAAAALEASNASSYLTSASSLARAYSIVIRQISDLMGLIPKYNHLVYSQIPAAVKLTYQDAVNLQNYVEEKLIPTWNWMVSIMDSTEAQLRYGSALASAGDPGHPNHPLHASQNSARRERMTAREEASLRTLEGRRRATLLSARQGMMSARGDFLNYALSLMRSHNDEHSDVLPVLDVCSLKHVAYVFQALIYWIKAMNQQTTLDTPQLERKRTRELLELGIDNEDSEHENDDDTNQSATLNDKDDDSLPAETGQNHPFFRRSDSMTFLGCIPPNPFEVPLAEAIPLADQPHLLQPNARKEDLFGRPSQGLYSSSASSGKCLMEVTVDRNCLEVLPTKMSYAANLKNVMNMQNRQKKEGEEQPVLPEETESSKPGPSAHDLAAQLKSSLLAEIGLTESEGPPLTSFRPQCSFMGMVISHDMLLGRWRLSLELFGRVFMEDVGAEPGSILTELGGFEVKESKFRREMEKLRNQQSRDLSLEVDRDRDLLIQQTMRQLNNHFGRRCATTPMAVHRVKVTFKDEPGEGSGVARSFYTAIAQAFLSNEKLPNLECIQNANKGTHTSLMQRLRNRGERDREREREREMRRSSGLRAGSRRDRDRDFRRQLSIDTRPFRPASEGNPSDDPEPLPAHRQALGERLYPRVQAMQPAFASKITGMLLELSPAQLLLLLASEDSLRARVDEAMELIIAHGRENGADSILDLGLVDSSEKVQQENRKRHGSSRSVVDMDLDDTDDGDDNAPLFYQPGKRGFYTPRPGKNTEARLNCFRNIGRILGLCLLQNELCPITLNRHVIKVLLGRKVNWHDFAFFDPVMYESLRQLILASQSSDADAVFSAMDLAFAIDLCKEEGGGQVELIPNGVNIPVTPQNVYEYVRKYAEHRMLVVAEQPLHAMRKGLLDVLPKNSLEDLTAEDFRLLVNGCGEVNVQMLISFTSFNDESGENAEKLLQFKRWFWSIVEKMSMTERQDLVYFWTSSPSLPASEEGFQPMPSITIRPPDDQHLPTANTCISRLYVPLYSSKQILKQKLLLAIKTKNFGFV

SEQ ID NO: 815420 - protein, 2810 aa, Homo sapiens; identical to SEQ ID NO: 815419

SEQ ID NO: 815421 - protein, 2810 aa, Homo sapiens; identical to SEQ ID NO: 815419

SEQ ID NO: 815422 - protein, 2810 aa, Homo sapiens; identical to SEQ ID NO: 815419

SEQ ID NO: 815423 - protein, 2810 aa, Homo sapiens; identical to SEQ ID NO: 815419

SEQ ID NO: 815424 - protein, 2810 aa, Homo sapiens; identical to SEQ ID NO: 815419

SEQ ID NO: 815425 - protein, 2551 aa, Homo sapiens
MSLLDADIHSAHPSVIIDADAMFSEDISYFGYPSFRRSSLSRLGSSRVLLLPLERDSELLRERESVLRLRERRWLDGASFDNERGSTSKEGEPNLDKKNTPVQSPVSLGEDLQWWPDKDGTKFICIGALYSELLAVSSKGELYQWKWSESEPYRNAQNPSLHHPRATFLGLTNEKIVLLSANSIRATVATENNKVATWVDETLSSVASKLEHTAQTYSELQGERIVSLHCCALYTCAQLENSLYWWGVVPFSQRKKMLEKARAKNKKPKSSAGISSMPNITVGTQVCLRNNPLYHAGAVAFSISAGIPKVGVLMESVWNMNDSCRFQLRSPESLKNMEKASKTTEAKPESKQEPVKTEMGPPPSPASTCSDASSIASSASMPYKRRRSTPAPKEEEKVNEEQWSLREVVFVEDVKNVPVGKVLKVDGAYVAVKFPGTSSNTNCQNSSGPDADPSSLLQDCRLLRIDELQVVKTGGTPKVPDCFQRTPKKLCIPEKTEILAVNVDSKGVHAVLKTGNWVRYCIFDLATGKAEQENNFPTSSIAFLGQNERNVAIFTAGQESPIILRDGNGTIYPMAKDCMGGIRDPDWLDLPPISSLGMGVHSLINLPANSTIKKKAAVIIMAVEKQTLMQHILRCDYEACRQYLMNLEQAVVLEQNLQMLQTFISHRCDGNRNILHACVSVCFPTSNKETKEEEEAERSERNTFAERLSAVEAIANAISVVSSNGPGNRAGSSSSRSLRLREMMRRSLRAAGLGRHEAGASSSDHQDPVSPPIAPPSWVPDPPAMDPDGDIDFILAPAVGSLTTAATGTGQGPSTSTIPGPSTEPSVVESKDRKANAHFILKLLCDSVVLQPYLRELLSAKDARGMTPFMSAVSGRAYPAAITILETAQKIAKAEISSSEKEEDVFMGMVCPSGTNPDDSPLYVLCCNDTCSFTWTGAEHINQDIFECRTCGLLESLCCCTECARVCHKGHDCKLKRTSPTAYCDCWEKCKCKTLIAGQKSARLDLLYRLLTATNLVTLPNSRGEHLLLFLVQTVARQTVEHCQYRPPRIREDRNRKTASPEDSDMPDHDLEPPRFAQLALERVLQDWNALKSMIMFGSQENKDPLSASSRIGHLLPEEQVYLNQQSGTIRLDCFTHCLIVKCTADILLLDTLLGTLVKELQNKYTPGRREEAIAVTMRFLRSVARVFVILSVEMASSKKKNNFIPQPIGKCKRVFQALLPYAVEELCNVAESLIVPVRMGIARPTAPFTLASTSIDAMQGSEELFSVEPLPPRPSSDQSSSSSQSQSSYIIRNPQQRRISQSQPVRGRDEEQDDIVSADVEEVEVVEGVAGEEDHHDEQEEHGEENAEAEGQHDEHDEDGSDMELDLLAAAETESDSESNHSNQDNASGRRSVVTAATAGSEAGASSVPAFFSEDDSQSNDSSDSDSSSSQSDDIEQETFMLDEPLERTTNSSHANGAAQAPRSMQWAVRNTQHQRAASTAPSSTSTPAASSAGLIYIDPSNLRRSGTISTSAAAAAAALEASNASSYLTSASSLARAYSIVIRQISDLMGLIPKYNHLVYSQIPAAVKLTYQDAVNLQNYVEEKLIPTWNWMVSIMDSTEAQLRYGSALASAGDPGHPNHPLHASQNSARRERMTAREEASLRTLEGRRRATLLSARQGMMSARGDFLNYALSLMRSHNDEHSDVLPVLDVCSLKHVAYVFQALIYWIKAMNQQTTLDTPQLERKRTRELLELGIDNEDSEHENDDDTNQSATLNDKDDDSLPAETGQNHPFFRRSDSMTFLGCIPPNPFEVPLAEAIPLADQPHLLQPNARKEDLFGRPSQGLYSSSASSGKCLMEVTVDRNCLEVLPTKMSYAANLKNVMNMQNRQKKEGEEQPVLPEETESSKPGPSAHDLAAQLKSSLLAEIGLTESEGPPLTSFRPQCSFMGMVISHDMLLGRWRLSLELFGRVFMEDVGAEPGSILTELGGFEVKESKFRREMEKLRNQQSRDLSLEVDRDRDLLIQQTMRQLNNHFGRRCATTPMAVHRVKVTFKDEPGEGSGVARSFYTAIAQAFLSNEKLPNLECIQNANKGTHTSLMQRLRNRGERDREREREREMRRSSGLRAGSRRDRDRDFRRQLSIDTRPFRPASEGNPSDDPEPLPAHRQALGERLYPRVQAMQPAFASKITGMLLELSPAQLLLLLASEDSLRARVDEAMELIIAHGRENGADSILDLGLVDSSEKVQQENRKRHGSSRSVVDMDLDDTDDGDDNAPLFYQPGKRGFYTPRPGKNTEARLNCFRNIGRILGLCLLQNELCPITLNRHVIKVLLGRKVNWHDFAFFDPVMYESLRQLILASQSSDADAVFSAMDLAFAIDLCKEEGGGQVELIPNGVNIPVTPQNVYEYVRKYAEHRMLVVAEQPLHAMRKGLLDVLPKNSLEDLTAEDFRLLVNGCGEVNVQMLISFTSFNDESGENAEKLLQFKRWFWSIVEKMSMTERQDLVYFWTSSPSLPASEEGFQPMPSITIRPPDDQHLPTANTCISRLYVPLYSSKQILKQKLLLAIKTKNFGFV

SEQ ID NO: 815426 - protein, 2849 aa, Homo sapiens
AFLLEDGRVCRIGFSVQPDRLELGKPDNNDGSKLDSNSGAGRTSRPARTNDSPWFLSDSETLDRLAGNTLGLREVSEKLNKYNLNSHPPLNVLEQATIKQCVVGPNHAAFLLEDGRVCRIGFSVQPDRLELGKPDNNDGSKLNSNSGAGRTSRPGRTSDSPWFLSGSETLGRLAGNTLGSRWSSGVGGSGGGSSGRSSAGARDSRRQTRVIRTGRDRGSGLLGSQPQPVIPASVIPEELISQAQVVLQGKSRSVIIRELQRTNLDVNLAVNNLLSRDDEDGDDGDDTASESYLPGEDLMSLLDADIHSAHPSVIIDADAMFSEDISYFGYPSFRRSSLSRLGSSRVLLLPLERDSELLRERESVLRLRERRWLDGASFDNERGSTSKEGEPNLDKKNTPVQSPVSLGEDLQWWPDKDGTKFICIGALYSELLAVSSKGELYQWKWSESEPYRNAQNPSLHHPRATFLGLTNEKIVLLSANSIRATVATENNKVATWVDETLSSVASKLEHTAQTYSELQGERIVSLHCCALYTCAQLENSLYWWGVVPFSQRKKMLEKARAKNKKPKSSAGISSMPNITVGTQVCLRNNPLYHAGAVAFSISAGIPKVGVLMESVWNMNDSCRFQLRSPESLKNMEKASKTTEAKPESKQEPVKTEMGPPPSPASTCSDASSIASSASMPYKRRRSTPAPKEEEKVNEEQWSLREVVFVEDVKNVPVGKVLKVDGAYVAVKFPGTSSNTNCQNSSGPDADPSSLLQDCRLLRIDELQVVKTGGTPKVPDCFQRTPKKLCIPEKTEILAVNVDSKGVHAVLKTGNWVRYCIFDLATGKAEQENNFPTSSIAFLGQNERNVAIFTAGQESPIILRDGNGTIYPMAKDCMGGIRDPDWLDLPPISSLGMGVHSLINLPANSTIKKKAAVIIMAVEKQTLMQHILRCDYEACRQYLMNLEQAVVLEQNLQMLQTFISHRCDGNRNILHACVSVCFPTSNKETKEEEEAERSERNTFAERLSAVEAIANAISVVSSNGPGNRAGSSSSRSLRLREMMRRSLRAAGLGRHEAGASSSDHQDPVSPPIAPPSWVPDPPAMDPDGDIDFILAPAVGSLTTAATGTGQGPSTSTIPGPSTEPSVVESKDRKANAHFILKLLCDSVVLQPYLRELLSAKDARGMTPFMSAVSGRAYPAAITILETAQKIAKAEISSSEKEEDVFMGMVCPSGTNPDDSPLYVLCCNDTCSFTWTGAEHINQDIFECRTCGLLESLCCCTECARVCHKGHDCKLKRTSPTAYCDCWEKCKCKTLIAGQKSARLDLLYRLLTATNLVTLPNSRGEHLLLFLVQTVARQTVEHCQYRPPRIREDRNRKTASPEDSDMPDHDLEPPRFAQLALERVLQDWNALKSMIMFGSQENKDPLSASSRIGHLLPEEQVYLNQQSGTIRLDCFTHCLIVKCTADILLLDTLLGTLVKELQNKYTPGRREEAIAVTMRFLRSVARVFVILSVEMASSKKKNNFIPQPIGKCKRVFQALLPYAVEELCNVAESLIVPVRMGIARPTAPFTLASTSIDAMQGSEELFSVEPLPPRPSSDQSSSSSQSQSSYIIRNPQQRRISQSQPVRGRDEEQDDIVSADVEEVEVVEGVAGEEDHHDEQEEHGEENAEAEGQHDEHDEDGSDMELDLLAAAETESDSESNHSNQDNASGRRSVVTAATAGSEAGASSVPAFFSEDDSQSNDSSDSDSSSSQSDDIEQETFMLDEPLERTTNSSHANGAAQAPRSMQWAVRNTQHQRAASTAPSSTSTPAASSAGLIYIDPSNLRRSGTISTSAAAAAAALEASNASSYLTSASSLARAYSIVIRQISDLMGLIPKYNHLVYSQIPAAVKLTYQDAVNLQNYVEEKLIPTWNWMVSIMDSTEAQLRYGSALASAGDPGHPNHPLHASQNSARRERMTAREEASLRTLEGRRRATLLSARQGMMSARGDFLNYALSLMRSHNDEHSDVLPVLDVCSLKHVAYVFQALIYWIKAMNQQTTLDTPQLERKRTRELLELGIDNEDSEHENDDDTNQSATLNDKDDDSLPAETGQNHPFFRRSDSMTFLGCIPPNPFEVPLAEAIPLADQPHLLQPNARKEDLFGRPSQGLYSSSASSGKCLMEVTVDRNCLEVLPTKMSYAANLKNVMNMQNRQKKEGEEQPVLPEETESSKPGPSAHDLAAQLKSSLLAEIGLTESEGPPLTSFRPQCSFMGMVISHDMLLGRWRLSLELFGRVFMEDVGAEPGSILTELGGFEVKESKFRREMEKLRNQQSRDLSLEVDRDRDLLIQQTMRQLNNHFGRRCATTPMAVHRVKVTFKDEPGEGSGVARSFYTAIAQAFLSNEKLPNLECIQNANKGTHTSLMQRLRNRGERDREREREREMRRSSGLRAGSRRDRDRDFRRQLSIDTRPFRPASEGNPSDDPEPLPAHRQALGERLYPRVQAMQPAFASKITGMLLELSPAQLLLLLASEDSLRARVDEAMELIIAHGRENGADSILDLGLVDSSEKVQQENRKRHGSSRSVVDMDLDDTDDGDDNAPLFYQPGKRGFYTPRPGKNTEARLNCFRNIGRILGLCLLQNELCPITLNRHVIKVLLGRKVNWHDFAFFDPVMYESLRQLILASQSSDADAVFSAMDLAFAIDLCKEEGGGQVELIPNGVNIPVTPQNVYEYVRKYAEHRMLVVAEQPLHAMRKGLLDVLPKNSLEDLTAEDFRLLVNGCGEVNVQMLISFTSFNDESGENAEKLLQFKRWFWSIVEKMSMTERQDLVYFWTSSPSLPASEEGFQPMPSITIRPPDDQHLPTANTCISRLYVPLYSSKQILKQKLLLAIKTKNFGFV

SEQ ID NO: 815427 - protein, 1880 aa, Homo sapiens
MSLLDADIHSAHPSVIIDADAMFSEDISYFGYPSFRRSSLSRLGSSRVLLLPLERDSELLRERESVLRLRERRWLDGASFDNERGSTSKEGEPNLDKKNTPVQSPVSLGEDLQWWPDKDGTKFICIGALYSELLAVSSKGELYQWKWSESEPYRNAQNPSLHHPRATFLGLTNEKIVLLSANSIRATVATENNKVATWVDETLSSVASKLEHTAQTYSELQGERIVSLHCCALYTCAQLENSLYWWGVVPFSQRKKMLEKARAKNKKPKSSAGISSMPNITVGTQVCLRNNPLYHAGAVAFSISAGIPKVGVLMESVWNMNDSCRFQLRSPESLKNMEKASKTTEAKPESKQEPVKTEMGPPPSPASTCSDASSIASSASMPYKRRRSTPAPKEEEKVNEEQWSLREVVFVEDVKNVPVGKVLKVDGAYVAVKFPGTSSNTNCQNSSGPDADPSSLLQDCRLLRIDELQVVKTGGTPKVPDCFQRTPKKLCIPEKTEILAVNVDSKGVHAVLKTGNWVRYCIFDLATGKAEQENNFPTSSIAFLGQNERNVAIFTAGQESPIILRDGNGTIYPMAKDCMGGIRDPDWLDLPPISSLGMGVHSLINLPANSTIKKKAAVIIMAVEKQTLMQHILRCDYEACRQYLMNLEQAVVLEQNLQMLQTFISHRCDGNRNILHACVSVCFPTSNKETKEEEEAERSERNTFAERLSAVEAIANAISVVSSNGPGNRAGSSSSRSLRLREMMRRSLRAAGLGRHEAGASSSDHQDPVSPPIAPPSWVPDPPAMDPDGDIDFILAPAVGSLTTAATGTGQGPSTSTIPGPSTEPSVVESKDRKANAHFILKLLCDSVVLQPYLRELLSAKDARGMTPFMSAVSGRAYPAAITILETAQKIAKAEISSSEKEEDVFMGMVCPSGTNPDDSPLYVLCCNDTCSFTWTGAEHINQDIFECRTCGLLESLCCCTECARVCHKGHDCKLKRTSPTAYCDCWEKCKCKTLIAGQKSARLDLLYRLLTATNLVTLPNSRGEHLLLFLVQTVARQTVEHCQYRPPRIREDRNRKTASPEDSDMPDHDLEPPRFAQLALERVLQDWNALKSMIMFGSQENKDPLSASSRIGHLLPEEQVYLNQQSGTIRLDCFTHCLIVKCTADILLLDTLLGTLVKELQNKYTPGRREEAIAVTMRFLRSVARVFVILSVEMASSKKKNNFIPQPIGKCKRVFQALLPYAVEELCNVAESLIVPVRMGIARPTAPFTLASTSIDAMQGSEELFSVEPLPPRPSSDQSSSSSQSQSSYIIRNPQQRRISQSQPVRGRDEEQDDIVSADVEEVEVVEGVAGEEDHHDEQEEHGEENAEAEGQHDEHDEDGSDMELDLLAAAETESDSESNHSNQDNASGRRSVVTAATAGSEAGASSVPAFFSEDDSQSNDSSDSDSSSSQSDDIEQETFMLDEPLERTTNSSHANGAAQAPRSMQWAVRNTQHQRAASTAPSSTSTPAASSAGLIYIDPSNLRRSGTISTSAAAAAAALEASNASSYLTSASSLARAYSIVIRQISDLMGLIPKYNHLVYSQIPAAVKLTYQDAVNLQNYVEEKLIPTWNWMVSIMDSTEAQLRYGSALASAGDPGHPNHPLHASQNSARRERMTAREEASLRTLEGRRRATLLSARQGMMSARGDFLNYALSLMRSHNDEHSDVLPVLDVCSLKHVAYVFQALIYWIKAMNQQTTLDTPQLERKRTRELLELGIDNEDSEHENDDDTNQSATLNDKDDDSLPAETGQNHPFFRRSDSMTFLGCIPPNPFEVPLAEAIPLADQPHLLQPNARKEDLFGRPSQGLYSSSASSGKCLMEVTVDRNCLEVLPTKMSYAANLKNVMNMQNRQGHLLMILLHN

SEQ ID NO: 815428 - protein, 1188 aa, Homo sapiens
MELDLLAAAETESDSESNHSNQDNASGRRSVVTAATAGSEAGASSVPAFFSEDDSQSNDSSDSDSSSSQSDDIEQETFMLDEPLERTTNSSHANGAAQAPRSMQWAVRNTQHQRAASTAPSSTSTPAASSAGLIYIDPSNLRRSGTISTSAAAAAAALEASNASSYLTSASSLARAYSIVIRQISDLMGLIPKYNHLVYSQIPAAVKLTYQDAVNLQNYVEEKLIPTWNWMVSIMDSTEAQLRYGSALASAGDPGHPNHPLHASQNSARRERMTAREEASLRTLEGRRRATLLSARQGMMSARGDFLNYALSLMRSHNDEHSDVLPVLDVCSLKHVAYVFQALIYWIKAMNQQTTLDTPQLERKRTRELLELGIDNEDSEHENDDDTNQSATLNDKDDDSLPAETGQNHPFFRRSDSMTFLGCIPPNPFEVPLAEAIPLADQPHLLQPNARKEDLFGRPSQGLYSSSASSGKCLMEVTVDRNCLEVLPTKMSYAANLKNVMNMQNRQKKEGEEQPVLPEETESSKPGPSAHDLAAQLKSSLLAEIGLTESEGPPLTSFRPQCSFMGMVISHDMLLGRWRLSLELFGRVFMEDVGAEPGSILTELGGFEVKESKFRREMEKLRNQQSRDLSLEVDRDRDLLIQQTMRQLNNHFGRRCATTPMAVHRVKVTFKDEPGEGSGVARSFYTAIAQAFLSNEKLPNLECIQNANKGTHTSLMQRLRNRGERDREREREREMRRSSGLRAGSRRDRDRDFRRQLSIDTRPFRPASEGNPSDDPEPLPAHRQALGERLYPRVQAMQPAFASKITGMLLELSPAQLLLLLASEDSLRARVDEAMELIIAHGRENGADSILDLGLVDSSEKVQQENRKRHGSSRSVVDMDLDDTDDGDDNAPLFYQPGKRGFYTPRPGKNTEARLNCFRNIGRILGLCLLQNELCPITLNRHVIKVLLGRKVNWHDFAFFDPVMYESLRQLILASQSSDADAVFSAMDLAFAIDLCKEEGGGQVELIPNGVNIPVTPQNVYEYVRKYAEHRMLVVAEQPLHAMRKGLLDVLPKNSLEDLTAEDFRLLVNGCGEVNVQMLISFTSFNDESGENAEKLLQFKRWFWSIVEKMSMTERQDLVYFWTSSPSLPASEEGFQPMPSITIRPPDDQHLPTANTCISRLYVPLYSSKQILKQKLLLAIKTKNFGFV

SEQ ID NO: 815429 - protein, 2536 aa, Homo sapiens
MSLLDADIHSAHPSVIIDADAMFSEDISYFGYPSFRRSSLSRLGSSRVLLLPLERDSELLRERESVLRLRERRWLDGASFDNERGSTSKEGEPNLDKKNTPVQSPVSLGEDLQWWPDKDGTKFICIGALYSELLAVSSKGELYQWKWSESEPYRNAQNPSLHHPRATFLGLTNEKIVLLSANSIRATVATENNKVATWVDETLSSVASKLEHTAQTYSELQGERIVSLHCCALYTCAQLENSLYWWGVVPFSQRKKMLEKARAKNKKPKSSAGISSMPNITVGTQVCLRNNPLYHAGAVAFSISAGIPKVGVLMESVWNMNDSCRFQLRSPESLKNMEKASKTTEAKPESKQEPVKTEMGPPPSPASTCSDASSIASSASMPYKRRRSTPAPKEEEKVNEEQWSLREVVFVEDVKNVPVGKVLKVDGAYVAVKFPGTSSNTNCQNSSGPDADPSSLLQDCRLLRIDELQVVKTGGTPKVPDCFQRTPKKLCIPEKTEILAVNVDSKGVHAVLKTGNWVRYCIFDLATGKAEQENNFPTSSIAFLGQNERNVAIFTAGQESPIILRDGNGTIYPMAKDCMGGIRDPDWLDLPPISSLGMGVHSLINLPANSTIKKKAAVIIMAVEKQTLMQHILRCDYEACRQYLMNLEQAVVLEQNLQMLQTFISHRCDGNRNILHACVSVCFPTSNKETKEEEEAERSERNTFAERLSAVEAIANAISVVSSNGPGNRAGSSSSRSLRLREMMRRSLRAAGLGRHEAGASSSDHQDPVSPPIAPPSWVPDPPAMDPDGDIDFILAPAVGSLTTAATGTGQGPSTSTIPGPSTEPSVVESKDRKANAHFILKLLCDSVVLQPYLRELLSAKDARGMTPFMSAVSGRAYPAAITILETAQKIAKAEISSSEKEEDVFMGMVCPSGTNPDDSPLYVLCCNDTCSFTWTGAEHINQDIFECRTCGLLESLCCCTECARVCHKGHDCKLKRTSPTAYCDCWEKCKCKTLIAGQKSARLDLLYRLLTATNLVTLPNSRGEHLLLFLVQTVARQTVEHCQYRPPRIREDRNRKTASPEDSDMPDHDLEPPRFAQLALERVLQDWNALKSMIMFGSQENKDPLSASSRIGHLLPEEQVYLNQQSGTIRLDCFTHCLIVKCTADILLLDTLLGTLVKELQNKYTPGRREEAIAVTMRFLRSVARVFVILSVEMASSKKKNNFIPQPIGKCKRVFQALLPYAVEELCNVAESLIVPVRMGIARPTAPFTLASTSIDAMQGSEELFSVEPLPPRPSSDQSSSSSQSQSSYIIRNPQQRRISQSQPVRGRDEEQDDIVSADVEEVEVVEGVAGEEDHHDEQEEHGEENAEAEGQHDEHDEDGSDMELDLLAAAETESDSESNHSNQDNASGRRSVVTAATAGSEAGASSVPAFFSEDDSQSNDSSDSDSSSSQSDDIEQETFMLDEPLERTTNSSHANGAAQAPRSMQWAVRNTQHQRAASTAPSSTSTPAASSAGLIYIDPSNLRRSGTISTSAAAAAAALEASNASSYLTSASSLARAYSIVIRQISDLMGLIPKYNHLVYSQIPAAVKLTYQDAVNLQNYVEEKLIPTWNWMVSIMDSTEAQLRYGSALASAGDPGHPNHPLHASQNSARRERMTAREEASLRTLEGRRRATLLSARQGMMSARGDFLNYALSLMRSHNDEHSDVLPVLDVCSLKHVAYVFQALIYWIKAMNQQTTLDTPQLERKRTRELLELGIDNEDSEHENDDDTNQSATLNDKDDDSLPAETGQNHPFFRRSDSMTFLGCIPPNPFEVPLAEAIPLADQPHLLQPNARKEDLFGRPSQGLYSSSASSGKCLMEVTVDRNCLEVLPTKMSYAANLKNVMNMQNRQKKEGEEQPVLPEETESSKPGPSAHDLAAQLKSSLLAEIGLTESEGPPLTSFRPQCSFMGMVISHDMLLGRWRLSLELFGRVFMEDVGAEPGSILTELGGFEVKESKFRREMEKLRNQQSRDLSLEVDRDRDLLIQQTMRQLNNHFGRRCATTPMAVHRVKVTFKDEPGEGSGVARSFYTAIAQAFLSNEKLPNLECIQNANKGTHTSLMQRLRNRGERDREREREREMRRSSGLRAGSRRDRDRDFRRQLSIDTRPFRPASEGNPSDDPEPLPAHRQALGERLYPRVQAMQPAFASKITGMLLELSPAQLLLLLASEDSLRARVDEAMELIIAHGRENGADSILDLGLVDSSEKVQQENRKRHGSSRSVVDMDLDDTDDGDDNAPLFYQPGKRGFYTPRPGKNTEARLNCFRNIGRILGLCLLQNELCPITLNRHVIKVLLGRKSLRQLILASQSSDADAVFSAMDLAFAIDLCKEEGGGQVELIPNGVNIPVTPQNVYEYVRKYAEHRMLVVAEQPLHAMRKGLLDVLPKNSLEDLTAEDFRLLVNGCGEVNVQMLISFTSFNDESGENAEKLLQFKRWFWSIVEKMSMTERQDLVYFWTSSPSLPASEEGFQPMPSITIRPPDDQHLPTANTCISRLYVPLYSSKQILKQKLLLAIKTKNFGFV

SEQ ID NO: 815430 - protein, 381 aa, Homo sapiens [sequence omitted]

SEQ ID NO: 815431 - protein, 169 aa, Homo sapiens
LGFYYFVRQRALCGYTLNSAIMAMRKGLLDVLPKNSLEDLTAEDFRLLVNGCGEVNVQMLISFTSFNDESGENAEKLLQFKRWFWSIVEKMSMTERQDLVYFWTSSPSLPASEEGFQPMPSITIRPPDDQHLPTANTCISRLYVPLYSSKQILKQKLLLAIKTKNFGFV

SEQ ID NO: 815432 - protein, 215 aa, Homo sapiens
EECELVTRLASETQILEGSLGISVKSHCSTGDAHTVLSESNRNDEHCGNSNNKCEVIPESTSAEQPLHAMRKGLLDVLPKNSLEDLTAEDFRLLVNGCGEVNVQMLISFTSFNDESGENAEKLLQFKRWFWSIVEKMSMTERQDLVYFWTSSPSLPASEEGFQPMPSITIRPPDDQHLPTANTCISRLYVPLYSSKQILKQKLLLAIKTKNFGFV

SEQ ID NO: 815433 - protein, 2412 aa, Homo sapiens
MSLLDADIHSAHPSVIIDADAMFSEDISYFGYPSFRRSSLSRLGSSRVLLLPLERDSELLRERESVLRLRERRWLDGASFDNERGSTSKEGEPNLDKKNTPVQSPVSLGEDLQWWPDKDGTKFICIGALYSELLAVSSKGELYQWKWSESEPYRNAQNPSLHHPRATFLGLTNEKIVLLSANSIRATVATENNKVATWVDETLSSVASKLEHTAQTYSELQGERIVSLHCCALYTCAQLENSLYWWGVVPFSQRKKMLEKARAKNKKPKSSAGISSMPNITVGTQVCLRNNPLYHAGAVAFSISAGIPKVGVLMESVWNMNDSCRFQLRSPESLKNMEKASKTTEAKPESKQEPVKTEMGPPPSPASTCSDASSIASSASMPYKRRRSTPAPKEEEKVNEEQWSLREVVFVEDVKNVPVGKVLKVDGAYVAVKFPGTSSNTNCQNSSGPDADPSSLLQDCRLLRIDELQVVKTGGTPKVPDCFQRTPKKLCIPEKTEILAVNVDSKGVHAVLKTGNWVRYCIFDLATGKAEQENNFPTSSIAFLGQNERNVAIFTAGQESPIILRDGNGTIYPMAKDCMGGIRDPDWLDLPPISSLGMGVHSLINLPANSTIKKKAAVIIMAVEKQTLMQHILRCDYEACRQYLMNLEQAVVLEQNLQMLQTFISHRCDGNRNILHACVSVCFPTSNKETKEEEEAERSERNTFAERLSAVEAIANAISVVSSNGPGNRAGSSSSRSLRLREMMRRSLRAAGLGRHEAGASSSDHQDPVSPPIAPPSWVPDPPAMDPDGDIDFILAPAVGSLTTAATGTGQGPSTSTIPGPSTEPSVVESKDRKANAHFILKLLCDSVVLQPYLRELLSAKDARGMTPFMSAVSGRAYPAAITILETAQKIAKAEISSSEKEEDVFMGMVCPSGTNPDDSPLYVLCCNDTCSFTWTGAEHINQDIFECRTCGLLESLCCCTECARVCHKGHDCKLKRTSPTAYCDCWEKCKCKTLIAGQKSARLDLLYRLLTATNLVTLPNSRGEHLLLFLVQTVARQTVEHCQYRPPRIREDRNRKTASPEDSDMPDHDLEPPRFAQLALERVLQDWNALKSMIMFGSQENKDPLSASSRIGHLLPEEQVYLNQQSGTIRLDCFTHCLIVKCTADILLLDTLLGTLVKELQNKYTPGRREEAIAVTMRFLRSVARVFVILSVEMASSKKKNNFIPQPIGKCKRVFQALLPYAVEELCNVAESLIVPVRMGIARPTAPFTLASTSIDAMQGSEELFSVEPLPPRPSSDQSSSSSQSQSSYIIRNPQQRRISQSQPVRGRDEEQDDIVSADVEEVEVVEGVAGEEDHHDEQEEHGEENAEAEGQHDEHDEDGSDMELDLLAAAETESDSESNHSNQDNASGRRSVVTAATAGSEAGASSVPAFFSEDDSQSNDSSDSDSSSSQSDDIEQETFMLDEPLERTTNSSHANGAAQAPRSMQWAVRNTQHQRAASTAPSSTSTPAASSAGLIYIDPSNLRRSGTISTSAAAAAAALEASNASSYLTSASSLARAYSIVIRQISDLMGLIPKYNHLVYSQIPAAVKLTYQDAVNLQNYVEEKLIPTWNWMVSIMDSTEAQLRYGSALASAGDPGHPNHPLHASQNSARRERMTAREEASLRTLEGRRRATLLSARQGMMSARGDFLNYALSLMRSHNDEHSDVLPVLDVCSLKHVAYVFQALIYWIKAMNQQTTLDTPQLERKRTRELLELGIDNEDSEHENDDDTNQSATLNDKDDDSLPAETGQNHPFFRRSDSMTFLGCIPPNPFEVPLAEAIPLADQPHLLQPNARKEDLFGRPSQGLYSSSASSGKCLMEVTVDRNCLEVLPTKMSYAANLKNVMNMQNRQKKEGEEQPVLPEETESSKPGPSAHDLAAQLKSSLLAEIGLTESEGPPLTSFRPQCSFMGMVISHDMLLGRWRLSLELFGRVFMEDVGAEPGSILTELGGFEVKESKFRREMEKLRNQQSRDLSLEVDRDRDLLIQQTMRQLNNHFGRRCATTPMAVHRVKVTFKDEPGEGSGVARSFYTAIAQAFLSNEKLPNLECIQNANKGTHTSLMQRLRNRGERDREREREREMRRSSGLRAGSRRDRDRDFRRQLSIDTRPFRPASEGNPSDDPEPLPAHRQALGERLYPRVQAMQPAFASKITGMLLELSPAQLLLLLASEDSLRARVDEAMELIIAHGRENGADSILDLGLVDSSEKVQQENRKRHGSSRSVVDMDLDDTDDGDDNAPLFYQPGKRGFYTPRPGKNTEARLNCFRNIGRILGLCLLQNELCPITLNRHVIKVLLGRKVNWHDFAFFDPVMYESLRQLILASQSSDADAVFSAMDLAFAIDLCKEEGGGQVELIPNGVNIPVTPQNVYEYVRKYAEHRMLVVAEQPLHVSVSRKCC

SEQ ID NO: 815434 - protein, 2114 aa, Homo sapiens
MSLLDADIHSAHPSVIIDADAMFSEDISYFGYPSFRRSSLSRLGSSRVLLLPLERDSELLRERESVLRLRERRWLDGASFDNERGSTSKEGEPNLDKKNTPVQSPVSLGEDLQWWPDKDGTKFICIGALYSELLAVSSKGELYQWKWSESEPYRNAQNPSLHHPRATFLGLTNEKIVLLSANSIRATVATENNKVATWVDETLSSVASKLEHTAQTYSELQGERIVSLHCCALYTCAQLENSLYWWGVVPFSQRKKMLEKARAKNKKPKSSAGISSMPNITVGTQVCLRNNPLYHAGAVAFSISAGIPKVGVLMESVWNMNDSCRFQLRSPESLKNMEKASKTTEAKPESKQEPVKTEMGPPPSPASTCSDASSIASSASMPYKRRRSTPAPKEEEKVNEEQWSLREVVFVEDVKNVPVGKVLKVDGAYVAVKFPGTSSNTNCQNSSGPDADPSSLLQDCRLLRIDELQVVKTGGTPKVPDCFQRTPKKLCIPEKTEILAVNVDSKGVHAVLKTGNWVRYCIFDLATGKAEQENNFPTSSIAFLGQNERNVAIFTAGQESPIILRDGNGTIYPMAKDCMGGIRDPDWLDLPPISSLGMGVHSLINLPANSTIKKKAAVIIMAVEKQTLMQHILRCDYEACRQYLMNLEQAVVLEQNLQMLQTFISHRCDGNRNILHACVSVCFPTSNKETKEEEEAERSERNTFAERLSAVEAIANAISVVSSNGPGNRAGSSSSRSLRLREMMRRSLRAAGLGRHEAGASSSDHQDPVSPPIAPPSWVPDPPAMDPDGDIDFILAPAVGSLTTAATGTGQGPSTSTIPGPSTEPSVVESKDRKANAHFILKLLCDSVVLQPYLRELLSAKDARGMTPFMSAVSGRAYPAAITILETAQKIAKAEISSSEKEEDVFMGMVCPSGTNPDDSPLYVLCCNDTCSFTWTGAEHINQDIFECRTCGLLESLCCCTECARVCHKGHDCKLKRTSPTAYCDCWEKCKCKTLIAGQKSARLDLLYRLLTATNLVTLPNSRGEHLLLFLVQTVARQTVEHCQYRPPRIREDRNRKTASPEDSDMPDHDLEPPRFAQLALERVLQDWNALKSMIMFGSQENKDPLSASSRIGHLLPEEQVYLNQQSGTIRLDCFTHCLIVKCTADILLLDTLLGTLVKELQNKYTPGRREEAIAVTMRFLRSVARVFVILSVEMASSKKKNNFIPQPIGKCKRVFQALLPYAVEELCNVAESLIVPVRMGIARPTAPFTLASTSIDAMQGSEELFSVEPLPPRPSSDQSSSSSQSQSSYIIRNPQQRRISQSQPVRGRDEEQDDIVSADVEEVEVVEGVAGEEDHHDEQEEHGEENAEAEGQHDEHDEDGSDMELDLLAAAETESDSESNHSNQDNASGRRSVVTAATAGSEAGASSVPAFFSEDDSQSNDSSDSDSSSSQSDDIEQETFMLDEPLERTTNSSHANGAAQAPRSMQWAVRNTQHQRAASTAPSSTSTPAASSAGLIYIDPSNLRRSGTISTSAAAAAAALEASNASSYLTSASSLARAYSIVIRQISDLMGLIPKYNHLVYSQIPAAVKLTYQDAVNLQNYVEEKLIPTWNWMVSIMDSTEAQLRYGSALASAGDPGHPNHPLHASQNSARRERMTAREEASLRTLEGRRRATLLSARQGMMSARGDFLNYALSLMRSHNDEHSDVLPVLDVCSLKHVAYVFQALIYWIKAMNQQTTLDTPQLERKRTRELLELGIDNEDSEHENDDDTNQSATLNDKDDDSLPAETGQNHPFFRRSDSMTFLGCIPPNPFEVPLAEAIPLADQPHLLQPNARKEDLFGRPSQGLYSSSASSGKCLMEVTVDRNCLEVLPTKMSYAANLKNVMNMQNRQKKEGEEQPVLPEETESSKPGPSAHDLAAQLKSSLLAEIGLTESEGPPLTSFRPQCSFMGMVISHDMLLGRWRLSLELFGRVFMEDVGAEPGSILTELGGFEVKESKFRREMEKLRNQQSRDLSLEVDRDRDLLIQQTMRQLNNHFGRRCATTPMAVHRVKVTFKDEPGEGSGVARSFYTAIAQAFLSNEKLPNLECIQNANKGTHTSLMQRLRNRGERDREREREREMRRSSGLRAGSRRDRDR

SEQ ID NO: 815435 - protein, 73 aa, Homo sapiens
NSPIFRSRWSSGVGGSGGGSSGRSSAGARDSRRQTRVIRTGRDRGSGLLGSQPQPVIPASVIPEELISQVWIS

SEQ ID NO: 815436 - protein, 604 aa, Homo sapiens
MLARALLLCAVLALSHTANPCCSHPCQNRGVCMSVGFDQYKCDCTRTGFYGENCSTPEFLTRIKLFLKPTPNTVHYILTHFKGFWNVVNNIPFLRNAIMSYVLTSRSHLIDSPPTYNADYGYKSWEAFSNLSYYTRALPPVPDDCPTPLGVKGKKQLPDSNEIVEKLLLRRKFIPDPQGSNMMFAFFAQHFTHQFFKTDHKRGPAFTNGLGHGVDLNHIYGETLARQRKLRLFKDGKMKYQIIDGEMYPPTVKDTQAEMIYPPQVPEHLRFAVGQEVFGLVPGLMMYATIWLREHNRVCDVLKQEHPEWGDEQLFQTSRLILIGETIKIVIEDYVQHLSGYHFKLKFDPELLFNKQFQYQNRIAAEFNTLYHWHPLLPDTFQIHDQKYNYQQFIYNNSILLEHGITQFVESFTRQIAGRVAGGRNVPPAVQKVSQASIDQSRQMKYQSFNEYRKRFMLKPYESFEELTGEKEMSAELEALYGDIDAVELYPALLVEKPRPDAIFGETMVEVGAPFSLKGLMGNVICSPAYWKPSTFGGEVGFQIINTASIQSLICNNVKGCPFTSFSVPDPELIKTVTINASSSRSGLDDINPTVLLKERSTEL

SEQ ID NO: 815437 - protein, 604 aa, Homo sapiens; identical to SEQ ID NO: 815436

SEQ ID NO: 815438 - protein, 110 aa, Homo sapiens
STYRSRPRRYVEPPEMIGPMRPEQFSDEVEPATPEEGEPATQRQDPAAAQEGEDEGASAGQGPKPEAHSQEQGHPQTGCECEDGPDGQEMDPPNPEEVKTPEEGEKQSQC

SEQ ID NO: 815439 - protein, 91 aa, Homo sapiens
NETYFLFAHPHVFPSPSSSVMKWNQQHLKKGNQQLNVRILQLLRRERMREHLQVKGRSLKLIARNRVTHRLGVSVKMVLMGRRWTRQIQRR

SEQ ID NO: 815440 - protein, 754 aa, Homo sapiens [sequence omitted]

SEQ ID NO: 815441 - protein, 881 aa, Homo sapiens
MFWKFDLHTSSHLDTLLEREDLSLPELLDEEDVLQECKVVNRKLLDFLLQPPHLQAMVAWVTQEPPDSGEERLRYKYPSVACEILTSDVPQINDALGADESLLNRLYGFLQSTGSLNPLLASFFSKVMGILINRKTDQLVSFLRKKDDFVDLLLQHIGTSAIMDLLLRLLTCVERPQLRQDVVNWLNEEKIVQRLIEQIHPSKDENQHSNASQSLCDIIRLSREQMIQVQDSPEPDQLLATLEKQETIEQLLSNMFEGEQSQSVIVSGIQVLLTLLEPRRPRSESVTVNSFFSSVDGQLELLAQGALESTVSSVGALHALRPRLSCFHQLLLEPPKLEPLQMTWGMLAPPLGNTRLHVVKLLASALSANDAALTHELLALDVPNTMLDLFFHYVFNNFLHAQVEGCVSTMLSLGPPPDSSPETPIQNPVVKHLLQQCRLVERILTSWEENDRVQCAGGPRKGYMGHLTRVAGALVQNTEKGPNAEQLRQLLKELPSEQQEQWEAFVSGPLAETNKKNMVDLVNTHHLHSSSDDEDDRLKEFNFPEEAVLQQAFMDFQMQRMTSAFIDHFGFNDEEFGEQEESVNAPFDKTANITFSLNADDENPNANLLEICYKDRIQQFDDDEEEEDEEEAQGSGESDGEDGAWQGSQLARGARLGQPPGVRSGGSTDSEDEEEEDEEEEEDEEGIGCAARGGATPLSYPSPGPQPPGPSWTATFDPVPTDAPTSPRVSGEEELHTGPPAPQGPLSVPQGLPTQSLASPPARDALQLRSQDPTPPSAPQEATEGSKVTEPSAPCQALVSIGDLQATFHGIRSAPSSSDSATRDPSTSVPASGAHQPPQTTEGEKSPEPLGLPQSQSAQALTPPPIPNGSAPEGPASPGSQ

SEQ ID NO: 815442 - protein, 892 aa, Homo sapiens
MMCGAHMVSFGTRYMEALHTSSHLDTLLEREDLSLPELLDEEDVLQECKVVNRKLLDFLLQPPHLQAMVAWVTQEPPDSGEERLRYKYPSVACEILTSDVPQINDALGADESLLNRLYGFLQSTGSLNPLLASFFSKVMGILINRKTDQLVSFLRKKDDFVDLLLQHIGTSAIMDLLLRLLTCVERPQLRQDVVNWLNEEKIVQRLIEQIHPSKDENQHSNASQSLCDIIRLSREQMIQVQDSPEPDQLLATLEKQETIEQLLSNMFEGEQSQSVIVSGIQVLLTLLEPRRPRSESVTVNSFFSSVDGQLELLAQGALESTVSSVGALHALRPRLSCFHQLLLEPPKLEPLQMTWGMLAPPLGNTRLHVVKLLASALSANDAALTHELLALDVPNTMLDLFFHYVFNNFLHAQVEGCVSTMLSLGPPPDSSPETPIQNPVVKHLLQQCRLVERILTSWEENDRVQCAGGPRKGYMGHLTRVAGALVQNTEKGPNAEQLRQLLKELPSEQQEQWEAFVSGPLAETNKKNMVDLVNTHHLHSSSDDEDDRLKEFNFPEEAVLQQAFMDFQMQRMTSAFIDHFGFNDEEFGEQEESVNAPFDKTANITFSLNADDENPNANLLEICYKDRIQQFDDDEEEEDEEEAQGSGESDGEDGAWQGSQLARGARLGQPPGVRSGGSTDSEDEEEEDEEEEEDEEGIGCAARGGATPLSYPSPGPQPPGPSWTATFDPVPTDAPTSPRVSGEEELHTGPPAPQGPLSVPQGLPTQSLASPPARDALQLRSQDPTPPSAPQEATEGSKVTEPSAPCQALVSIGDLQATFHGIRSAPSSSDSATRDPSTSVPASGAHQPPQTTEGEKSPEPLGLPQSQSAQALTPPPIPNGSAPEGPASPGSQ

SEQ ID NO: 815443 - protein, 757 aa, Homo sapiens
LGQALCMTQPVCPQLVSFLRKKDDFVDLLLQHIGTSAIMDLLLRLLTCVERPQLRQDVVNWLNEEKIVQRLIEQIHPSKDENQHSNASQSLCDIIRLSREQMIQVQDSPEPDQLLATLEKQETIEQLLSNMFEGEQSQSVIVSGIQVLLTLLEPRRPRSESVTVNSFFSSVDGQLELLAQGALESTVSSVGALHALRPRLSCFHQLLLEPPKLEPLQMTWGMLAPPLGNTRLHVVKLLASALSANDAALTHELLALDVPNTMLDLFFHYVFNNFLHAQVEGCVSTMLSLGPPPDSSPETPIQNPVVKHLLQQCRLVERILTSWEENDRVQCAGGPRKGYMGHLTRVAGALVQNTEKGPNAEQLRQLLKELPSEQQEQWEAFVSGPLAETNKKNMVDLVNTHHLHSSSDDEDDRLKEFNFPEEAVLQQAFMDFQMQRMTSAFIDHFGFNDEEFGEQEESVNAPFDKTANITFSLNADDENPNANLLEICYKDRIQQFDDDEEEEDEEEAQGSGESDGEDGAWQGSQLARGARLGQPPGVRSGGSTDSEDEEEEDEEEEEDEEGIGCAARGGATPLSYPSPGPQPPGPSWTATFDPVPTDAPTSPRVSGEEELHTGPPAPQGPLSVPQGLPTQSLASPPARDALQLRSQDPTPPSAPQEATEGSKVTEPSAPCQALVSIGDLQATFHGIRSAPSSSDSATRDPSTSVPASGAHQPPQTTEGEKSPEPLGLPQSQSAQALTPPPIPNGSAPEGPASPGSQ

SEQ ID NO: 815444 - protein, 718 aa, Homo sapiens
NTCPCVWVTIFPWMVSSWEGLPAPGCRGPGGPTRILTCLSPFQQHSNASQSLCDIIRLSREQMIQVQDSPEPDQLLATLEKQETIEQLLSNMFEGEQSQSVIVSGIQVLLTLLEPRRPRSESVTVNSFFSSVDGQLELLAQGALESTVSSVGALHALRPRLSCFHQLLLEPPKLEPLQMTWGMLAPPLGNTRLHVVKLLASALSANDAALTHELLALDVPNTMLDLFFHYVFNNFLHAQVEGCVSTMLSLGPPPDSSPETPIQNPVVKHLLQQCRLVERILTSWEENDRVQCAGGPRKGYMGHLTRVAGALVQNTEKGPNAEQLRQLLKELPSEQQEQWEAFVSGPLAETNKKNMVDLVNTHHLHSSSDDEDDRLKEFNFPEEAVLQQAFMDFQMQRMTSAFIDHFGFNDEEFGEQEESVNAPFDKTANITFSLNADDENPNANLLEICYKDRIQQFDDDEEEEDEEEAQGSGESDGEDGAWQGSQLARGARLGQPPGVRSGGSTDSEDEEEEDEEEEEDEEGIGCAARGGATPLSYPSPGPQPPGPSWTATFDPVPTDAPTSPRVSGEEELHTGPPAPQGPLSVPQGLPTQSLASPPARDALQLRSQDPTPPSAPQEATEGSKVTEPSAPCQALVSIGDLQATFHGIRSAPSSSDSATRDPSTSVPASGAHQPPQTTEGEKSPEPLGLPQSQSAQALTPPPIPNGSAPEGPASPGSQ

SEQ ID NO: 815445 - protein, 881 aa, Homo sapiens; identical to SEQ ID NO: 815441

SEQ ID NO: 815446 - protein, 881 aa, Homo sapiens; identical to SEQ ID NO: 815441

SEQ ID NO: 815447 - protein, 881 aa, Homo sapiens; identical to SEQ ID NO: 815441

SEQ ID NO: 815448 - protein, 881 aa, Homo sapiens; identical to SEQ ID NO: 815441

SEQ ID NO: 815449 - protein, 881 aa, Homo sapiens; identical to SEQ ID NO: 815441

SEQ ID NO: 815450 - protein, 881 aa, Homo sapiens; identical to SEQ ID NO: 815441

SEQ ID NO: 815451 - protein, 881 aa, Homo sapiens; identical to SEQ ID NO: 815441

SEQ ID NO: 815452 - protein, 502 aa, Homo sapiens
VAVIPVLDLFFHICLGLGKIAARVEGCVSTMLSLGPPPDSSPETPIQNPVVKHLLQQCRLVERILTSWEENDRVQCAGGPRKGYMGHLTRVAGALVQNTEKGPNAEQLRQLLKELPSEQQEQWEAFVSGPLAETNKKNMVDLVNTHHLHSSSDDEDDRLKEFNFPEEAVLQQAFMDFQMQRMTSAFIDHFGFNDEEFGEQEESVNAPFDKTANITFSLNADDENPNANLLEICYKDRIQQFDDDEEEEDEEEAQGSGESDGEDGAWQGSQLARGARLGQPPGVRSGGSTDSEDEEEEDEEEEEDEEGIGCAARGGATPLSYPSPGPQPPGPSWTATFDPVPTDAPTSPRVSGEEELHTGPPAPQGPLSVPQGLPTQSLASPPARDALQLRSQDPTPPSAPQEATEGSKVTEPSAPCQALVSIGDLQATFHGIRSAPSSSDSATRDPSTSVPASGAHQPPQTTEGEKSPEPLGLPQSQSAQALTPPPIPNGSAPEGPASPGSQ

SEQ ID NO: 815453 - protein, 884 aa, Homo sapiens
MFWKFDLHTSSHLDTLLEREDLSLPELLDEEDVLQECKVVNRKLLDFLLQPPHLQAMVAWVTQEPPDSGEERLRYKYPSVACEILTSDVPQINDALGADESLLNRLYGFLQSTGSLNPLLASFFSKVMGILINRKTDQLVSFLRKKDDFVDLLLQHIGTSAIMDLLLRLLTCVERPQLRQDVVNWLNEEKIVQRLIEQIHPSKDENQHSNASQSLCDIIRLSREQMIQVQDSPEPDQLLATLEKQETIEQLLSNMFEGEQSQSVIVSGIQVLLTLLEPRRPRSESVTVNSFFSSVDGQLELLAQGALESTVSSVGALHALRPRLSCFHQLLLEPPKLEPLQMTWGMLAPPLGNTRLHVVKLLASALSANDAALTHELLALDVPNTMLDLFFHYVFNNFLHAQVEGCVSTMLSLGPPPDSSPETPIQNPVVKHLLQQCRLVERILTSWEENDRVQCAGGPRKGYMGHLTRVAGALVQNTEKGPNAEQLRQLLKELPSEQQEQWEAFVSGPLAETNKKNMVDLVNTHHLHSSSDDEDDRLKEFNFPEEAVLQQAFMDFQMQRMTSAFIDHFGFNDEEFGEQEESVNAPFDKTANITFSLNADDENPNANLLEICYKDRIQQFDDDEEEEDEEEAQGSGESDGEDGAWQGSQLARGARLGQPPGVRVEAAQTALALSLQAPAGQPPLTQCLQMPRPAPESPGRKSCTLGLQPHRGPSVCPRASPLRAWPALLPVTPCSSGLRTPHPPQHLRKPQKAAKSRSPQPLARPWLASGTFRPPSTGSVLPPAPRTVQPETPLPLSQPPGPTSPPRPQKGRRAQSPWGFPKARVPRPSRLLRYPMALPRKGLHPQAPNSCLVRQRRPNLPSSRGSPGVGAGRVPRWPPLPSSP

SEQ ID NO: 815454 - protein, 810 aa, Homo sapiens
MFWKFDLHTSSHLDTLLEREDLSLPELLDEEDVLQECKVVNRKLLDFLLQPPHLQAMVAWVTQEPPDSGEERLRYKYPSVACEILTSDVPQINDALGADESLLNRLYGFLQSTGSLNPLLASFFSKVMGILINRKTDQLVSFLRKKDDFVDLLLQHIGTSAIMDLLLRLLTCVERPQLRQDVVNWLNEEKIVQRLIEQIHPSKDENQHSNASQSLCDIIRLSREQMIQVQDSPEPDQLLATLEKQETIEQLLSNMFEGEQSQSVIVSGIQVLLTLLEPRRPRSESVTVNSFFSSVDGQLELLAQGALESTVSSVGALHALRPRLSCFHQLLLEPPKLEPLQMTWGMLAPPLGNTRLHVVKLLASALSANDAALTHELLALDVPNTMLDLFFHYVFNNFLHAQVEGCVSTMLSLGPPPDSSPETPIQNPVVKHLLQQCRLVERILTSWEENDRVQCAGGPRKGYMGHLTRVAGALVQNTEKGPNAEQLRQLLKELPSEQQEQWEAFVSGPLAETNKKNMVDLVNTHHLHSSSDDEDDRLKEFNFPEEAVLQQAFMDFQMQRMTSAFIDHFGFNDEEFGEQEESVNAPFDKTANITFSLNADDENPNANLLEICYKDRIQQFDDDEEEEDEEEAQGSGESDGEDGAWQGSQLARGARLGQPPGVRSGGSTDSEDEEEEDEEEEEDEEGIGCAARGGATPLSYPSPGPQPPGPSWTATFDPVPTDAPTSPRVSGEEELHTGPPAPQGPLSVPQGLPTQSLASPPARDALQLRSQDPTPPSAPQEATEGWCQGDRPNPPPFALRREVLERCLLE

SEQ ID NO: 815455 - protein, 306 aa, Homo sapiens
SPCLAFSPSAPFDKTANITFSLNADDENPNANLLEICYKDRIQQFDDDEEEEDEEEAQGSGESDGEDGAWQGSQLARGARLGQPPGVRSGGSTDSEDEEEEDEEEEEDEEGIGCAARGGATPLSYPSPGPQPPGPSWTATFDPVPTDAPTSPRVSGEEELHTGPPAPQGPLSVPQGLPTQSLASPPARDALQLRSQDPTPPSAPQEATEGSKVTEPSAPCQALVSIGDLQATFHGIRSAPSSSDSATRDPSTSVPASGAHQPPQTTEGEKSPEPLGLPQSQSAQALTPPPIPNGSAPEGPASPGSQ

SEQ ID NO: 815456 - protein, 663 aa, Homo sapiens [sequence omitted]

SEQ ID NO: 815457 - protein, 685 aa, Homo sapiens
MFWKFDLHTSSHLDTLLEREDLSLPELLDEEDVLQECKVVNRKLLDFLLQPPHLQAMVAWVTQEPPDSGEERLRYKYPSVACEILTSDVPQINDALGADESLLNRLYGFLQSTGSLNPLLASFFSKVMGILINRKTDQLVSFLRKKDDFVDLLLQHIGTSAIMDLLLRLLTCVERPQLRQDVVNWLNEEKIVQRLIEQIHPSKDENQHSNASQSLCDIIRLSREQMIQVQDSPEPDQLLATLEKQETIEQLLSNMFEGEQSQSVIVSGIQVLLTLLEPRRPRSESVTVNSFFSSVDGQLELLAQGALESTVSSVGALHALRPRLSCFHQLLLEPPKLEPLQMTWGMLAPPLGNTRLHVVKLLASALSANDAALTHELLALDVPNTMLDLFFHYVFNNFLHAQVEGCVSTMLSLGPPPDSSPETPIQNPVVKHLLQQCRLVERILTSWEENDRVQCAGGPRKGYMGHLTRVAGALVQNTEKGPNAEQLRQLLKELPSEQQEQWEAFVSGPLAETNKKNMVDLVNTHHLHSSSDDEDDRLKEFNFPEEAVLQQAFMDFQMQRMTSAFIDHFGFNDEEFGEQEESVNAPFDKTANITFSLNADDENPNANLLEICYKDRIQQFDDDEEEEDEEEAQGSGESDGEDGAWQGSQLARGARLGQPPGVRVEAAQTVRTKKRGDDFKPKGSK

SEQ ID NO: 815458 - protein, 195 aa, Homo sapiens
MPRPAPESPGRKSCTLGLQPHRGPSVCPRASPLRAWPALLPVTPCSSGLRTPHPPQHLRKPQKAAKSRSPQPLARPWLASGTFRPPSTGSVLPPAPRTVQPETPLPLSQPPGPTSPPRPQKGRRAQSPWGFPKARVPRPSRLLRYPMALPRKGLHPQAPNSCLVRQRRPNLPSSRGSPGVGAGRVPRWPPLPSSP

SEQ ID NO: 815459 - protein, 629 aa, Homo sapiens
MFWKFDLHTSSHLDTLLEREDLSLPELLDEEDVLQECKVVNRKLLDFLLQPPHLQAMVAWVTQEPPDSGEERLRYKYPSVACEILTSDVPQINDALGADESLLNRLYGFLQSTGSLNPLLASFFSKVMGILINRKTDQLVSFLRKKDDFVDLLLQHIGTSAIMDLLLRLLTCVERPQLRQDVVNWLNEEKIVQRLIEQIHPSKDENQHSNASQSLCDIIRLSREQMIQVQDSPEPDQLLATLEKQETIEQLLSNMFEGEQSQSVIVSGIQVLLTLLEPRRPRSESVTVNSFFSSVDGQLELLAQGALESTVSSVGALHALRPRLSCFHQLLLEPPKLEPLQMTWGMLAPPLGNTRLHVVKLLASALSANDAALTHELLALDVPNTMLDLFFHYVFNNFLHAQVEGCVSTMLSLGPPPDSSPETPIQNPVVKHLLQQCRLVERILTSWEENDRVQCAGGPRKGYMGHLTRVAGALVQNTEKGPNAEQLRQLLKELPSEQQEQWEAFVSGPLAETNKKNMVDLVNTHHLHSSSDDEDDRLKEFNFPEEAVLQQAFMDFQMQRMTSAFIDHFGFNDEEFGEQEESVNAPFDKTANITFSLNADDENPNANRPGFATDLDSRPTWIRDRPGFA

SEQ ID NO: 815460 - protein, 630 aa, Homo sapiens
MFWKFDLHTSSHLDTLLEREDLSLPELLDEEDVLQECKVVNRKLLDFLLQPPHLQAMVAWVTQEPPDSGEERLRYKYPSVACEILTSDVPQINDALGADESLLNRLYGFLQSTGSLNPLLASFFSKVMGILINRKTDQLVSFLRKKDDFVDLLLQHIGTSAIMDLLLRLLTCVERPQLRQDVVNWLNEEKIVQRLIEQIHPSKDENQHSNASQSLCDIIRLSREQMIQVQDSPEPDQLLATLEKQETIEQLLSNMFEGEQSQSVIVSGIQVLLTLLEPRRPRSESVTVNSFFSSVDGQLELLAQGALESTVSSVGALHALRPRLSCFHQLLLEPPKLEPLQMTWGMLAPPLGNTRLHVVKLLASALSANDAALTHELLALDVPNTMLDLFFHYVFNNFLHAQVEGCVSTMLSLGPPPDSSPETPIQNPVVKHLLQQCRLVERILTSWEENDRVQCAGGPRKGYMGHLTRVAGALVQNTEKGPNAEQLRQLLKELPSEQQEQWEAFVSGPLAETNKKNMVDLVNTHHLHSSSDDEDDRLKEFNFPVPSQRELVLGVPRLPPTCPAVPRCSADGHAHTRPFSSGPPWGTAQRGWGCQRVPSGGRAFAQTLHFQPGQSGSGEQGPPRQQPQGP

SEQ ID NO: 815461 - protein, 136 aa, Homo sapiens
SASTRLGVTLRAGSPPARDALQLRSQDPTPPSAPQEATEGSKVTEPSAPCQALVSIGDLQATFHGIRSAPSSSDSATRDPSTSVPASGAHQPPQTTEGEKSPEPLGLPQSQSAQALTPPPIPNGSAPEGPASPGSQ

SEQ ID NO: 815462 - protein, 169 aa, Homo sapiens
EAGRRARRLSGFGEGVVKEVGLGFRRSLLGSAARLDRGGGLPSPPVGRSVCDCGNLVELPPSSLAECCLRGPRDPGSANPASCPPGPTSPPRPQKGRRAQSPWGFPKARVPRPSRLLRYPMALPRKGLHPQAPNSCLVRQRRPNLPSSRGSPGVGAGRVPRWPPLPSSP

SEQ ID NO: 815463 - protein, 111 aa, Homo sapiens
MSACVIGRGTERENSQSPGASPKPECPGPHASSDTQWLCPGRACIPRLPIAAWCGSGGQIFRPPVDLPGWGQGGSHDGPHCPHHPDTPTFSPLDPQEAGARETGPTHPHLH

SEQ ID NO: 815464 - protein, 79 aa, Homo sapiens
THAVESAQALWLWGSPKARVPRPSRLLRYPMALPRKGLHPQAPNSCLVRQRRPNLPSSRGSPGVGAGRVPRWPPLPSSP

SEQ ID NO: 815465 - protein, 412 aa, Homo sapiens
MFWKFDLHTSSHLDTLLEREDLSLPELLDEEDVLQECKVVNRKLLDFLLQPPHLQAMVAWVTQEPPDSGEERLRYKYPSVACEILTSDVPQINDALGADESLLNRLYGFLQSTGSLNPLLASFFSKVMGILINRKTDQLVSFLRKKDDFVDLLLQHIGTSAIMDLLLRLLTCVERPQLRQDVVNWLNEEKIVQRLIEQIHPSKDENQHSNASQSLCDIIRLSREQMIQVQDSPEPDQLLATLEKQETIEQLLSNMFEGEQSQSVIVSGIQVLLTLLEPRRPRSESVTVNSFFSSVDGQLELLAQGALESTVSSVGALHALRPRLSCFHQLLLEPPKLEPLQMTWGMLAPPLGNTRLHVVKLLASALSANDAALTHELLALDVPNTMLDSSHYVFHTSWLPVGVREPWWLGAL

SEQ ID NO: 815466 - protein, 124 aa, Homo sapiens
SGRESRRRPALYSPGAAAGAGAAGWLVAGGGAPMSPECEEPPPPLQGAMFWKFDLHTSSHLDTLLEREDLSLPELLDEEDVLQECKVVNRKLLDFLLQPPHLQAMVAWVTQEPPDSGEERLRYK

SEQ ID NO: 815467 - protein, 67 aa, Homo sapiens
YDPMMIEFRALVPRKRQQVRVLQSWALGDPQGKAHGREGTKGILGPTVHLSCPLFSPFHFCLQKAPS

SEQ ID NO: 815468 - protein, 204 aa, Homo sapiens
PAEPVEKGASTDICAFCHKTVSPRELAVEAMKRQYHAQCFTCRTCRRQLAGQSFYQKDGRPLCEPCYQDTLERCGKCGEVVRDHIIRALGQAFHPSCFTCVTCARCIGDESFALGSQNEVYCLDDFYRKFAPVCSICENPIIPRDGKDAFKIECMGRNFHENCYRCEDCRILLSVEPTDQGCYPLNNHLFCKPCHVKRSAAGCC

SEQ ID NO: 815469 - protein, 276 aa, Homo sapiens
MASKPEKRVASSVFITLAPPRRDVAVAEEVRQAVCEARRGRPWEAPAPMKTPEAGLAGRPSPWTTPGRAAATVPAAPMQLFNGDICAFCHKTVSPRELAVEAMKRQYHAQCFTCRTCRRQLAGQSFYQKDGRPLCEPCYQDTLERCGKCGEVVRDHIIRALGQAFHPSCFTCVTCARCIGDESFALGSQNEVYCLDDFYRKFAPVCSICENPIIPRDGKDAFKIECMGRNFHENCYRCEDCRILLSVEPTDQGCYPLNNHLFCKPCHVKRSAAGCC

SEQ ID NO: 815470 - protein, 92 aa, Homo sapiens
WLWHERLPSMGSFASRKFAPVCSICENPIIPRDGKDAFKIECMGRNFHENCYRCEDCRILLSVEPTDQGCYPLNNHLFCKPCHVKRSAAGCC

SEQ ID NO: 815471 - protein, 97 aa, Homo sapiens
LPRRNRHLCSPIATGLKLLRRKFAPVCSICENPIIPRDGKDAFKIECMGRNFHENCYRCEDCRILLSVEPTDQGCYPLNNHLFCKPCHVKRSAAGCC

SEQ ID NO: 815472 - protein, 276 aa, Homo sapiens; identical to SEQ ID NO: 815469

SEQ ID NO: 815473 - protein, 103 aa, Homo sapiens
MASKPEKRVASSVFITLAPPRRDVAVAEEVRQAVCEARRGRPWEAPAPMKTPEAGLAGRPSPWTTPGRAAATVPAAPMQLFNGGCPPPPPVLDGEDVLPDLDL

SEQ ID NO: 815474 - protein, 551 aa, Homo sapiens
QGKGRRRGVGKDIPQAFLAPARDRRGSKRKGKEQARKPDNNSIKTRLFLCVRNFAWEIKLDLELSDRESEAWDMDRSLGWQGNSVPEDRTEAGIKRFLEDTTDDGELSKFVKDFSGNASCHPPEAKTWASRPQVPEPRPQAPDLYDDDLEFRPPSRPQSSDNQQYFCAPAPLSPSARPRSPWGKLDPYDSSEDDKEYVGFATLPNQVHRKSVKKGFDFTLMVAGESGLGKSTLVNSLFLTDLYRDRKLLGAEERIMQTVEITKHAVDIEEKGVRLRLTIVDTPGFGDAVNNTECWKPVAEYIDQQFEQYFRDESGLNRKNIQDNRVHCCLYFISPFGHGLRPLDVEFMKALHQRVNIVPILAKADTLTPPEVDHKKRKIREEIEHFGIKIYQFPDCDSDEDEDFKLQDQALKESIPFAVIGSNTVVEARGRRVRGRLYPWGIVEVENPGHCDFVKLRTMLVRTHMQDLKDVTRETHYENYRAQCIQSMTRLVVKERNRNKLTRESGTDFPIPAVPPGTDPETEKLIREKDEELRRMQEMLHKIQKQMKENY

SEQ ID NO: 815475 - protein, 520 aa, Homo sapiens
GLEAKIRHRNSIKTRLFLCVRNFAWEIKLDLELSDRESEAWDMDRSLGWQGNSVPEDRTEAGIKRFLEDTTDDGELSKFVKDFSGNASCHPPEAKTWASRPQVPEPRPQAPDLYDDDLEFRPPSRPQSSDNQQYFCAPAPLSPSARPRSPWGKLDPYDSSEDDKEYVGFATLPNQVHRKSVKKGFDFTLMVAGESGLGKSTLVNSLFLTDLYRDRKLLGAEERIMQTVEITKHAVDIEEKGVRLRLTIVDTPGFGDAVNNTECWKPVAEYIDQQFEQYFRDESGLNRKNIQDNRVHCCLYFISPFGHGLRPLDVEFMKALHQRVNIVPILAKADTLTPPEVDHKKRKIREEIEHFGIKIYQFPDCDSDEDEDFKLQDQALKESIPFAVIGSNTVVEARGRRVRGRLYPWGIVEVENPGHCDFVKLRTMLVRTHMQDLKDVTRETHYENYRAQCIQSMTRLVVKERNRNKLTRESGTDFPIPAVPPGTDPETEKLIREKDEELRRMQEMLHKIQKQMKENY

SEQ ID NO: 815476 - protein, 459 aa, Homo sapiens
MIKRFLEDTTDDGELSKFVKDFSGNASCHPPEAKTWASRPQVPEPRPQAPDLYDDDLEFRPPSRPQSSDNQQYFCAPAPLSPSARPRSPWGKLDPYDSSEDDKEYVGFATLPNQVHRKSVKKGFDFTLMVAGESGLGKSTLVNSLFLTDLYRDRKLLGAEERIMQTVEITKHAVDIEEKGVRLRLTIVDTPGFGDAVNNTECWKPVAEYIDQQFEQYFRDESGLNRKNIQDNRVHCCLYFISPFGHGLRPLDVEFMKALHQRVNIVPILAKADTLTPPEVDHKKRKIREEIEHFGIKIYQFPDCDSDEDEDFKLQDQALKESIPFAVIGSNTVVEARGRRVRGRLYPWGIVEVENPGHCDFVKLRTMLVRTHMQDLKDVTRETHYENYRAQCIQSMTRLVVKERNRNKLTRESGTDFPIPAVPPGTDPETEKLIREKDEELRRMQEMLHKIQKQMKENY

SEQ ID NO: 815477 - protein, 462 aa, Homo sapiens
MIKRFLEDTTDDGELSKFVKDFSGNASCHPPEAKTWASRPQVPEPRPQAPDLYDDDLEFRPPSRPQSSDNQQYFCAPAPLSPSARPRSPWGKLDPYDSSEDDKEYVGFATLPNQVHRKSVKKGFDFTLMVAGESGLGKSTLVNSLFLTDLYRDRKLLGAEERIMQTVEITKHAVDIEEKGVRLRLTIVDTPGFGDAVNNTECWKPVAEYIDQQFEQYFRDESGLNRKNIQDNRVHCCLYFISPFGHGYGPSLRLLAPPGAVKGTGQEHQGQGCHYAGGHRFLFPRLRPLDVEFMKALHQRVNIVPILAKADTLTPPEVDHKKRKIREEIEHFGIKIYQFPDCDSDEDEDFKLQDQALKESIPFAVIGSNTVVEARGRRVRGRLYPWGIVEVENPGHCDFVKLRTMLVRTHMQDLKDVTRETHYENYRAQCIQSMTRLVVKERNRNASMTRSQDKAGRGRSQA

SEQ ID NO: 815478 - protein, 250 aa, Homo sapiens
MVKTNKPGAKVAVSAQRGSEVTTNTSPQQGHGYVLASSHRSAAVSLNPSHRRSEAAHPTTPHSASDYPRSVSLQSGPGHYAVPTPRGTETGPRTESSRHSSPHLKSQKTQTLASHASSRQWKVSPPREEAARRGSESKSGREVGHHASSIPDAKSTHQLSFQDQKNNLQSQILEDDPPSKVQNPQGVRVPRRILSYPKDEAVQTEPIQRITTTSEIRSPRSPSLLEHGSSCVSADYQTAQRRVPVEESET

SEQ ID NO: 815479 - protein, 75 aa, Homo sapiens
KDSPKVPILMPVPIPAAADAGDATQNTKTDEGELLTGFQPWIFKSPPLLPVHAGPSQHQLCSGPFSYCHFALHPC

SEQ ID NO: 815480 - protein, 483 aa, Homo sapiens
MGPVPTSFGKRRGGPQTLPASPGGMIKRFLEDTTDDGELSKFVKDFSGNASCHPPEAKTWASRPQVPEPRPQAPDLYDDDLEFRPPSRPQSSDNQQYFCAPAPLSPSARPRSPWGKLDPYDSSEDDKEYVGFATLPNQVHRKSVKKGFDFTLMVAGESGLGKSTLVNSLFLTDLYRDRKLLGAEERIMQTVEITKHAVDIEEKGVRLRLTIVDTPGFGDAVNNTECWKPVAEYIDQQFEQYFRDESGLNRKNIQDNRVHCCLYFISPFGHGLRPLDVEFMKALHQRVNIVPILAKADTLTPPEVDHKKRKIREEIEHFGIKIYQFPDCDSDEDEDFKLQDQALKESIPFAVIGSNTVVEARGRRVRGRLYPWGIVEVENPGHCDFVKLRTMLVRTHMQDLKDVTRETHYENYRAQCIQSMTRLVVKERNRNKLTRESGTDFPIPAVPPGTDPETEKLIREKDEELRRMQEMLHKIQKQMKENY

SEQ ID NO: 815481 - protein, 474 aa, Homo sapiens
MVQARPSRALPVWAEGIKRFLEDTTDDGELSKFVKDFSGNASCHPPEAKTWASRPQVPEPRPQAPDLYDDDLEFRPPSRPQSSDNQQYFCAPAPLSPSARPRSPWGKLDPYDSSEDDKEYVGFATLPNQVHRKSVKKGFDFTLMVAGESGLGKSTLVNSLFLTDLYRDRKLLGAEERIMQTVEITKHAVDIEEKGVRLRLTIVDTPGFGDAVNNTECWKPVAEYIDQQFEQYFRDESGLNRKNIQDNRVHCCLYFISPFGHGLRPLDVEFMKALHQRVNIVPILAKADTLTPPEVDHKKRKIREEIEHFGIKIYQFPDCDSDEDEDFKLQDQALKESIPFAVIGSNTVVEARGRRVRGRLYPWGIVEVENPGHCDFVKLRTMLVRTHMQDLKDVTRETHYENYRAQCIQSMTRLVVKERNRNKLTRESGTDFPIPAVPPGTDPETEKLIREKDEELRRMQEMLHKIQKQMKENY

SEQ ID NO: 815482 - protein, 589 aa, Homo sapiens
QGKGRRRGVGKDIPQAFLAPARDRRGSKRKGKEQARKPDNNSIKTRLFLCVRNFAWEIKLDLELSDRESEAWDMDRSLGWQGNSVPEDRTEAGIKRFLEDTTDDGELSKFVKDFSGNASCHPPEAKTWASRPQVPEPRPQAPDLYDDDLEFRPPSRPQSSDNQQYFCAPAPLSPSARPRSPWGKLDPYDSSEDDKEYVGFATLPNQVHRKSVKKGFDFTLMVAGESGLGKSTLVNSLFLTDLYRDRKLLGAEERIMQTVEITKHAVDIEEKGVRLRLTIVDTPGFGDAVNNTECWKPVAEYIDQQFEQYFRDESGLNRKNIQDNRVHCCLYFISPFGHGYGPSLRLLAPPGAVKGTGQEHQGQGCHYAGGHRFLFPRLRPLDVEFMKALHQRVNIVPILAKADTLTPPEVDHKKRKIREEIEHFGIKIYQFPDCDSDEDEDFKLQDQALKESIPFAVIGSNTVVEARGRRVRGRLYPWGIVEVENPGHCDFVKLRTMLVRTHMQDLKDVTRETHYENYRAQCIQSMTRLVVKERNRNKLTRESGTDFPIPAVPPGTDPETEKLIREKDEELRRMQEMLHKIQKQMKENY

SEQ ID NO: 815483 - protein, 519 aa, Homo sapiens
QGKGRRRGVGKDIPQAFLAPARDRRGSKRKGKEQARKPDNNSIKTRLFLCVRNFAWEIKLDLELSDRESEAWDMDRSLGWQGNSVPEDRTEAGIKRFLEDTTDDGELSKFVKDFSGNASCHPPEAKTWASRPQVPEPRPQAPDLYDDDLEFRPPSRPQSSDNQQYFCAPAPLSPSARPRSPWGKLDPYDSSEDDKEYVGFATLPNQVHRKSVKKGFDFTLMVAGESGLGKSTLVNSLFLTDLYRDRKLLGAEERIMQTVEITKHAVDIEEKGVRLRLTIVDTPGFGDAVNNTECWKPVAEYIDQQFEQYFRDESGLNRKNIQDNIVPILAKADTLTPPEVDHKKRKIREEIEHFGIKIYQFPDCDSDEDEDFKLQDQALKESIPFAVIGSNTVVEARGRRVRGRLYPWGIVEVENPGHCDFVKLRTMLVRTHMQDLKDVTRETHYENYRAQCIQSMTRLVVKERNRNKLTRESGTDFPIPAVPPGTDPETEKLIREKDEELRRMQEMLHKIQKQMKENY

SEQ ID NO: 815484 - protein, 674 aa, Homo sapiens
QGKGRRRGVGKDIPQAFLAPARDRRGSKRKGKEQARKPDNNSIKTRLFLCVRNFAWEIKLDLELSDRESEAWDMDRSLGWQGNSVPEDRTEAGIKRFLEDTTDDGELSKFVKDFSGNASCHPPEAKTWASRPQVPEPRPQAPDLYDDDLEFRPPSRPQSSDNQQYFCAPAPLSPSARPRSPWGKLDPYDSSEVEPPALPLPFSGLLQEDRGQGAECVCVCVCVCVCVCVVCVCIWDLFQSCVSPSSKISAPKGTGNLQFQQGQEAQLVASDGNSQKSGTAFLRLGQRPERERRLALGAGAPLAPHRDAFCLPVYKDDKEYVGFATLPNQVHRKSVKKGFDFTLMVAGESGLGKSTLVNSLFLTDLYRDRKLLGAEERIMQTVEITKHAVDIEEKGVRLRLTIVDTPGFGDAVNNTECWKPVAEYIDQQFEQYFRDESGLNRKNIQDNRVHCCLYFISPFGHGLRPLDVEFMKALHQRVNIVPILAKADTLTPPEVDHKKRKIREEIEHFGIKIYQFPDCDSDEDEDFKLQDQALKESIPFAVIGSNTVVEARGRRVRGRLYPWGIVEVENPGHCDFVKLRTMLVRTHMQDLKDVTRETHYENYRAQCIQSMTRLVVKERNRNKLTRESGTDFPIPAVPPGTDPETEKLIREKDEELRRMQEMLHKIQKQMKENY

SEQ ID NO: 815485 - protein, 360 aa, Homo sapiens
MDDKEYVGFATLPNQVHRKSVKKGFDFTLMVAGESGLGKSTLVNSLFLTDLYRDRKLLGAEERIMQTVEITKHAVDIEEKGVRLRLTIVDTPGFGDAVNNTECWKPVAEYIDQQFEQYFRDESGLNRKNIQDNRVHCCLYFISPFGHGLRPLDVEFMKALHQRVNIVPILAKADTLTPPEVDHKKRKIREEIEHFGIKIYQFPDCDSDEDEDFKLQDQALKESIPFAVIGSNTVVEARGRRVRGRLYPWGIVEVENPGHCDFVKLRTMLVRTHMQDLKDVTRETHYENYRAQCIQSMTRLVVKERNRNKLTRESGTDFPIPAVPPGTDPETEKLIREKDEELRRMQEMLHKIQKQMKENY

SEQ ID NO: 815486 - protein, 582 aa, Homo sapiens
MIKRFLEDTTDDGELSKFVKDFSGNASCHPPEAKTWASRPQVPEPRPQAPDLYDDDLEFRPPSRPQSSDNQQYFCAPAPLSPSARPRSPWGKLDPYDSSEVEPPALPLPFSGLLQEDRGQGAECVCVCVCVCVCVCVVCVCIWDLFQSCVSPSSKISAPKGTGNLQFQQGQEAQLVASDGNSQKSGTAFLRLGQRPERERRLALGAGAPLAPHRDAFCLPVYKDDKEYVGFATLPNQVHRKSVKKGFDFTLMVAGESGLGKSTLVNSLFLTDLYRDRKLLGAEERIMQTVEITKHAVDIEEKGVRLRLTIVDTPGFGDAVNNTECWKPVAEYIDQQFEQYFRDESGLNRKNIQDNRVHCCLYFISPFGHGLRPLDVEFMKALHQRVNIVPILAKADTLTPPEVDHKKRKIREEIEHFGIKIYQFPDCDSDEDEDFKLQDQALKESIPFAVIGSNTVVEARGRRVRGRLYPWGIVEVENPGHCDFVKLRTMLVRTHMQDLKDVTRETHYENYRAQCIQSMTRLVVKERNRNKLTRESGTDFPIPAVPPGTDPETEKLIREKDEELRRMQEMLHKIQKQMKENY

SEQ ID NO: 815487 - protein, 452 aa, Homo sapiens
QGKGRRRGVGKDIPQAFLAPARDRRGSKRKGKEQARKPDNNSIKTRLFLCVRNFAWEIKLDLELSDRESEAWDMDRSLGWQGNSVPEDRTEAGDDKEYVGFATLPNQVHRKSVKKGFDFTLMVAGESGLGKSTLVNSLFLTDLYRDRKLLGAEERIMQTVEITKHAVDIEEKGVRLRLTIVDTPGFGDAVNNTECWKPVAEYIDQQFEQYFRDESGLNRKNIQDNRVHCCLYFISPFGHGLRPLDVEFMKALHQRVNIVPILAKADTLTPPEVDHKKRKIREEIEHFGIKIYQFPDCDSDEDEDFKLQDQALKESIPFAVIGSNTVVEARGRRVRGRLYPWGIVEVENPGHCDFVKLRTMLVRTHMQDLKDVTRETHYENYRAQCIQSMTRLVVKERNRNKLTRESGTDFPIPAVPPGTDPETEKLIREKDEELRRMQEMLHKIQKQMKENY

SEQ ID NO: 815488 - protein, 551 aa, Homo sapiens; identical to SEQ ID NO: 815474

SEQ ID NO: 815489 - protein, 384 aa, Homo sapiens
MGPVPTSFGKRRGGPQTLPASPGGMDDKEYVGFATLPNQVHRKSVKKGFDFTLMVAGESGLGKSTLVNSLFLTDLYRDRKLLGAEERIMQTVEITKHAVDIEEKGVRLRLTIVDTPGFGDAVNNTECWKPVAEYIDQQFEQYFRDESGLNRKNIQDNRVHCCLYFISPFGHGLRPLDVEFMKALHQRVNIVPILAKADTLTPPEVDHKKRKIREEIEHFGIKIYQFPDCDSDEDEDFKLQDQALKESIPFAVIGSNTVVEARGRRVRGRLYPWGIVEVENPGHCDFVKLRTMLVRTHMQDLKDVTRETHYENYRAQCIQSMTRLVVKERNRNKLTRESGTDFPIPAVPPGTDPETEKLIREKDEELRRMQEMLHKIQKQMKENY

SEQ ID NO: 815490 - protein, 490 aa, Homo sapiens
QGKGRRRGVGKDIPQAFLAPARDRRGSKRKGKEQARKPDNNSIKTRLFLCVRNFAWEIKLDLELSDRESEAWDMDRSLGWQGNSVPEDRTEAGDDKEYVGFATLPNQVHRKSVKKGFDFTLMVAGESGLGKSTLVNSLFLTDLYRDRKLLGAEERIMQTVEITKHAVDIEEKGVRLRLTIVDTPGFGDAVNNTECWKPVAEYIDQQFEQYFRDESGLNRKNIQDNRVHCCLYFISPFGHGYGPSLRLLAPPGAVKGTGQEHQGQGCHYAGGHRFLFPRLRPLDVEFMKALHQRVNIVPILAKADTLTPPEVDHKKRKIREEIEHFGIKIYQFPDCDSDEDEDFKLQDQALKESIPFAVIGSNTVVEARGRRVRGRLYPWGIVEVENPGHCDFVKLRTMLVRTHMQDLKDVTRETHYENYRAQCIQSMTRLVVKERNRNKLTRESGTDFPIPAVPPGTDPETEKLIREKDEELRRMQEMLHKIQKQMKENY

SEQ ID NO: 815491 - protein, 449 aa, Homo sapiens
QGKGRRRGVGKDIPQAFLAPARDRRGSKRKGKEQARKPDNNSIKTRLFLCVRNFAWEIKLDLELSDRESEAWDMDRSLGWQGNSVPEDRTEAGIKRFLEDTTDDGELSKFVKDFSGNASCHPPEAKTWASRPQVPEPRPQAPDLYDDDLEFRPPSRPQSSDNQQYFCAPAPLSPSARPRSPWGKLDPYDSSEDDKEYVGFATLPNQVHRKSVKKGFDFTLMVAGESGLGKSTLVNSLFLTDLYRDRKLLGAEERIMQTVEITKHAVDIEEKGVRLRLTIVDTPGFGDAVNNTECWKPVAEYIDQQFEQYFRDESGLNRKNIQDNRVHCCLYFISPFGHGLRPLDVEFMKALHQRVNIVPILAKADTLTPPEVDHKKRKIREEIEHFGIKIYQFPDCDSDEDEDFKLQDQALKESIPFAVIGSNTVVEARGRRVRGRLYPWGIVEATCRT

SEQ ID NO: 815492 - protein, 516 aa, Homo sapiens
QGKGRRRGVGKDIPQAFLAPARDRRGSKRKGKEQARKPDNNSIKTRLFLCVRNFAWEIKLDLELSDRESEAWDMDRSLGWQGNSVPEDRTEAGIKRFLEDTTDDGELSKFVKDFSGNASCHPPEAKTWASRPQVPEPRPQAPDLYDDDLEFRPPSRPQSSDNQQYFCAPAPLSPSARPRSPWGKLDPYDSSEDDKEYVGFATLPNQVHRKSVKKGFDFTLMVAGESGLGKSTLVNSLFLTDLYRDRKLLGAEERIMQTVEITKHAVDIEEKGVRLRLTIVDTPGFGDAVNNTECWKPVAEYIDQQFEQYFRDESGLNRKNIQDNRVHCCLYFISPFGHGLRPLDVEFMKALHQRVNIVPILAKADTLTPPEVDHKKRKIREEIEHFGIKIYQFPDCDSDEDEDFKLQDQALKESIPFAVIGSNTVVEARGRRVRGRLYPWGIVEVENPGHCDFVKLRTMLVRTHMQDLKDVTRETHYENYRAQCIQSMTRLVVKERNRNASMTRSQDKAGRGRSQA

SEQ ID NO: 815493 - protein, 559 aa, Homo sapiens
QGKGRRRGVGKDIPQAFLAPARDRRGSKRKGKEQARKPDNNSIKTRLFLCVRNFAWEIKLDLELSDRESEAWDMDRSLGWQGNSVPEDRTEAGIKRFLEDTTDDGELSKFVKDFSGNASCHPPEAKTWASRPQVPEPRPQAPDLYDDDLEFRPPSRPQSSDNQQYFCAPAPLSPSARPRSPWGKLDPYDSSEDDKEYVGFATLPNQVHRKSVKKGFDFTLMVAGESGLGKSTLVNSLFLTDLYRDRKLLGAEERIMQTVEITKHAVDIEEKGVRLRLTIVDTPGFGDAVNNTECWKPVAEYIDQQFEQYFRDESGLNRKNIQDNRVHCCLYFISPFGHGLRPLDVEFMKALHQRVNIVPILAKADTLTPPEVDHKKRKIREEIEHFGIKIYQFPDCDSDEDEDFKLQDQALKESIPFAVIGSNTVVEARGRRVRGRLYPWGIVEVENPGHCDFVKLRTMLVRTHMQDLKDVTRETHYENYRAQCIQSMTRLVVKERNRNKLTRESGTDFPIPAVPPGTDPETEKLIREKDEELRRMQEMLLQIPPSLFSVHCRGLPTPN

SEQ ID NO: 815494 - protein, 510 aa, Homo sapiens
QGKGRRRGVGKDIPQAFLAPARDRRGSKRKGKEQARKPDNNSIKTRLFLCVRNFAWEIKLDLELSDRESEAWDMDRSLGWQGNSVPEDRTEAGIKRFLEDTTDDGELSKFVKDFSGNASCHPPEAKTWASRPQVPEPRPQAPDLYDDDLEFRPPSRPQSSDNQQYFCAPAPLSPSARPRSPWGKLDPYDSSEDDKEYVGFATLPNQVHRKSVKKGFDFTLMVAGESGLGKSTLVNSLFLTDLYRDRKLLGAEERIMQTVEITKHAVDIEEKGVRLRLTIVDTPGFGDAVNNTECWKPVAEYIDQQFEQYFRDESGLNRKNIQDNRVHCCLYFISPFGHGLRPLDVEFMKALHQRVNIVPILAKADTLTPPEVDHKKRKIREEIEHFGIKIYQFPDCDSDEDEDFKLQDQALKESIPFAVIGSNTVVEARGRRVRGRLYPWGIVEVENPGHCDFVKRKYDQKPGQSWQGEIPSLALGETKPYFCSSIGPGLNLSGCWGPPRLINPFLPLAN

SEQ ID NO: 815495 - protein, 502 aa, Homo sapiens
QGKGRRRGVGKDIPQAFLAPARDRRGSKRKGKEQARKPDNNSIKTRLFLCVRNFAWEIKLDLELSDRESEAWDMDRSLGWQGNSVPEDRTEAGIKRFLEDTTDDGELSKFVKDFSGNASCHPPEAKTWASRPQVPEPRPQAPDLYDDDLEFRPPSRPQSSDNQQYFCAPAPLSPSARPRSPWGKLDPYDSSEDDKEYVGFATLPNQVHRKSVKKGFDFTLMVAGESGLGKSTLVNSLFLTDLYRDRKLLGAEERIMQTVEITKHAVDIEEKGVRLRLTIVDTPGFGDAVNNTECWKPVAEYIDQQFEQYFRDESGLNRKNIQDNRVHCCLYFISPFGHGLRPLDVEFMKALHQRVNIVPILAKADTLTPPEVDHKKRKIREEIEHFGIKIYQFPDCDSDEDEDFKLQDQALKESIPFAVIGSNTVVEARGRRVRGRLYPWGIVEVENPGHCDFVKLRTMLVRTHMQDLKDVTRETHYENYRAQCIQSMTRLVVKERNRNATN

SEQ ID NO: 815496 - protein, 469 aa, Homo sapiens
QGKGRRRGVGKDIPQAFLAPARDRRGSKRKGKEQARKPDNNSIKTRLFLCVRNFAWEIKLDLELSDRESEAWDMDRSLGWQGNSVPEDRTEAGIKRFLEDTTDDGELSKFVKDFSGNASCHPPEAKTWASRPQVPEPRPQAPDLYDDDLEFRPPSRPQSSDNQQYFCAPAPLSPSARPRSPWGKLDPYDSSEDDKEYVGFATLPNQVHRKSVKKGFDFTLMVAGESGLGKSTLVNSLFLTDLYRDRKLLGAEERIMQTVEITKHAVDIEEKGVRLRLTIVDTPGFGDAVNNTECWKPVAEYIDQQFEQYFRDESGLNRKNIQDNRVHCCLYFISPFGHGLRPLDVEFMKALHQRVNIVPILAKADTLTPPEVDHKKRKIREEIEHFGIKIYQFPDCDSDEDEDFKLQDQALKESIPFAVIGSNTVVEARGRRVRGRLYPWGIVEAQQTDSGKWYRLPHPCCPTRDRSRN

SEQ ID NO: 815497 - protein, 502 aa, Homo sapiens; identical to SEQ ID NO: 815495

SEQ ID NO: 815498 - protein, 502 aa, Homo sapiens; identical to SEQ ID NO: 815495

SEQ ID NO: 815499 - protein, 190 aa, Homo sapiens
PAAVRTRGGGRVTAVLRGRRAAPPRVARALSRRSRPRPGCSHGASTNFIWKTQRRPTNTACLTRRDGKTLGPSFPQPDKGQSLALSQRDPREGEAQPTILPGGISYILLPLGQEPWESFLLLHLPAPSPPARSLCSVWGWGHPSLPPACSGKRNSNPSQPPWRCPGRKFLMLGSEDVISSPDIVARACHK

SEQ ID NO: 815500 - protein, 267 aa, Homo sapiens
QGKGRRRGVGKDIPQAFLAPARDRRGSKRKGKEQARKPDNNSIKTRLFLCVRNFAWEIKLDLELSDRESEAWDMDRSLGWQGNSVPEDRTEAGIKRFLEDTTDDGELSKFVKDFSGNASCHPPEAKTWASRPQVPEPRPQAPDLYDDDLEFRPPSRPQSSDNQQYFCAPAPLSPSARPRSPWGKLDPYDSSEDDKEYVGFATLPNQVHRKSVKKGFDFTLMVAGESGLGKSTLVNSLFLTDLYRDRKLLGAEGKERRGQSGRLALGN

SEQ ID NO: 815501 - protein, 244 aa, Homo sapiens
QGKGRRRGVGKDIPQAFLAPARDRRGSKRKGKEQARKPDNNSIKTRLFLCVRNFAWEIKLDLELSDRESEAWDMDRSLGWQGNSVPEDRTEAGIKRFLEDTTDDGELSKFVKDFSGNASCHPPEAKTWASRPQVPEPRPQAPDLYDDDLEFRPPSRPQSSDNQQYFCAPAPLSPSARPRSPWGKLDPYDSSEVEPPALPLPFSGLLQEDRGQGAECVCVCVCVCVCVCVCVCVYLGPISVLCQP

SEQ ID NO: 815502 - protein, 80 aa, Homo sapiens
TDTSRSGPQETQSEGSWWWEGIRWASRKDVVPRTVGPSSVCQIREEIEHFGIKIYQFPDCDSDEDEDFKLQDQALKVGPL

SEQ ID NO: 815503 - protein, 410 aa, Homo sapiens
MVLSQRQRDELNRAIADYLRSNGYEEAYSVFKKEAELDVNEELDKKYAGLLEKKWTSVIRLQKKVMELESKLNEAKEEFTSGGPLGQKRDPKEWIPRPPEKYALSGHRSPVTRVIFHPVFSVMVSASEDATIKVWDYETGDFERTLKGHTDSVQDISFDHSGKLLASCSADMTIKLWDFQGFECIRTMHGHDHNVSSVAIMPNGDHIVSASRDKTIKMWEVQTGYCVKTFTGHREWVRMVRPNQDGTLIASCSNDQTVRVWVVATKECKAELREHEHVVECISWAPESSYSSISEATGSETKKSGKPGPFLLSGSRDKTIKMWDVSTGMCLMTLVGHDNWVRGVLFHSGGKFILSCADDKTLRVWDYKNKRCMKTLNAHEHFVTSLDFHKTAPYVVTGSVDQTVKVWECR

SEQ ID NO: 815504 - protein, 410 aa, Homo sapiens; identical to SEQ ID NO: 815503

SEQ ID NO: 815505 - protein, 288 aa, Homo sapiens [sequence omitted]

SEQ ID NO: 815506 - protein, 410 aa, Homo sapiens; identical to SEQ ID NO: 815503

SEQ ID NO: 815507 - protein, 372 aa, Homo sapiens
MRLNKIKIKKLARCGSTHLLLDYKKKVMELESKLNEAKEEFTSGGPLGQKRDPKEWIPRPPEKYALSGHRSPVTRVIFHPVFSVMVSASEDATIKVWDYETGDFERTLKGHTDSVQDISFDHSGKLLASCSADMTIKLWDFQGFECIRTMHGHDHNVSSVAIMPNGDHIVSASRDKTIKMWEVQTGYCVKTFTGHREWVRMVRPNQDGTLIASCSNDQTVRVWVVATKECKAELREHEHVVECISWAPESSYSSISEATGSETKKSGKPGPFLLSGSRDKTIKMWDVSTGMCLMTLVGHDNWVRGVLFHSGGKFILSCADDKTLRVWDYKNKRCMKTLNAHEHFVTSLDFHKTAPYVVTGSVDQTVKVWECR

SEQ ID NO: 815508 - protein, 410 aa, Homo sapiens; identical to SEQ ID NO: 815503

SEQ ID NO: 815509 - protein, 410 aa, Homo sapiens; identical to SEQ ID NO: 815503

SEQ ID NO: 815510 - protein, 410 aa, Homo sapiens; identical to SEQ ID NO: 815503

SEQ ID NO: 815511 - protein, 410 aa, Homo sapiens; identical to SEQ ID NO: 815503

SEQ ID NO: 815512 - protein, 410 aa, Homo sapiens; identical to SEQ ID NO: 815503

SEQ ID NO: 815513 - protein, 410 aa, Homo sapiens; identical to SEQ ID NO: 815503

SEQ ID NO: 815514 - protein, 410 aa, Homo sapiens; identical to SEQ ID NO: 815503

SEQ ID NO: 815515 - protein, 995 aa, Homo sapiens
MKLDVNFQRKKGDDSDEEDLCISNKWTFQRTSRRWSRVDDLYTLLPRGDRNGSPGGTGMRNTTSSESVLTDLSEPEVCSIHSESSGGSDSRSQPGQCCTDNPVMLDAPLVSSSLPQPPRDVLNHPFHPKNEKPTRARAKSFLKRMETLRGKGAHGRHKGSGRTGGLVISGPMLQQEPESFKAMQCIQIPNGDLQNSPPPACRKGLPCSGKSSGESSPSEHSSSGVSTPCLKERKCHEANKRGGMYLEDLDVLAGTALPDAGDQSRMHEFHSQENLVVHIPKDHKPGTFPKALSIESLSPTDSSNGVNWRTGSISLGREQVPGAREPRLMASCHRASRVSIYDNVPGSHLYASTGDLLDLEKDDLFPHLDDILQHVNGLQEVVDDWSKDVLPELQTHDTLVGEPGLSTFPSPNQITLDFEGNSVSEGRTTPSDVERDVTSLNESEPPGVRDRRDSGVGASLTRPNRRLRWNSFQLSHQPRPAPASPHISSQTASQLSLLQRFSLLRLTAIMEKHSMSNKHGWTWSVPKFMKRMKVPDYKDKAVFGVPLIVHVQRTGQPLPQSIQQALRYLRSNCLDQVGLFRKSGVKSRIHALRQMNENFPENVNYEDQSAYDVADMVKQFFRDLPEPLFTNKLSETFLHIYQYVSKEQRLQAVQAAILLLADENREVLQTLLCFLNDVVNLVEENQMTPMNLAVCLAPSLFHLNLLKKESSPRVIQKKYATGKPDQKDLNENLAAAQGLAHMIMECDRLFEVPHELVAQSRNSYVEAEIHVPTLEELGTQLEESGATFHTYLNHLIQGLQKEAKEKFKGWVTCSSTDNTDLAFKKVGDGNPLKLWKASVEVEAPPSVVLNRVLRERHLWDEDFVQWKVVETLDRQTEIYQYVLNSMAPHPSRDFVVLRTWKTDLPKGMCTLVSLSVEHEEAQLLGGVRAVVMDSQYLIEPCGSGKSRLTHICRIDLKGHSPEWYSKGFGHLCAAEVARIRNSFQPLIAEGPETKI

SEQ ID NO: 815516 - protein, 441 aa, Homo sapiens
CPFLNPAWPSRAWDPKFNCKGWDSALPPMSCEASAITDFFVPFLLFWLFLLMMTLGACSHEECGAYTVLPSWLFLCLLLQGPGIHFSSDVSKEQRLQAVQAAILLLADENREVLQTLLCFLNDVVNLVEENQMTPMNLAVCLAPSLFHLNLLKKESSPRVIQKKYATGKPDQKDLNENLAAAQGLAHMIMECDRLFEVPHELVAQSRNSYVEAEIHVPTLEELGTQLEESGATFHTYLNHLIQGLQKEAKEKFKGWVTCSSTDNTDLAFKKVGDGNPLKLWKASVEVEAPPSVVLNRVLRERHLWDEDFVQWKVVETLDRQTEIYQYVLNSMAPHPSRDFVVLRTWKTDLPKGMCTLVSLSVEHEEAQLLGGVRAVVMDSQYLIEPCGSGKSRLTHICRIDLKGHSPEWYSKGFGHLCAAEVARIRNSFQPLIAEGPETKI

SEQ ID NO: 815517 - protein, 2314 aa, Homo sapiens
MRILKRFLACIQLLCVCRLDWANGYYRQQRKLVEEIGWSYTGALNQKNWGKKYPTCNSPKQSPINIDEDLTQVNVNLKKLKFQGWDKTSLENTFIHNTGKTVEINLTNDYRVSGGVSEMVFKASKITFHWGKCNMSSDGSEHSLEGQKFPLEMQIYCFDADRFSSFEEAVKGKGKLRALSILFEVGTEENLDFKAIIDGVESVSRFGKQAALDPFILLNLLPNSTDKYYIYNGSLTSPPCTDTVDWIVFKDTVSISESQLAVFCEVLTMQQSGYVMLMDYLQNNFREQQYKFSRQVFSSYTGKEEIHEAVCSSEPENVQADPENYTSLLVTWERPRVVYDTMIEKFAVLYQQLDGEDQTKHEFLTDGYQDLGAILNNLLPNMSYVLQIVAICTNGLYGKYSDQLIVDMPTDNPELDLFPELIGTEEIIKEEEEGKDIEEGAIVNPGRDSATNQIRKKEPQISTTTHYNRIGTKYNEAKTNRSPTRGSEFSGKGDVPNTSLNSTSQPVTKLATEKDISLTSQTVTELPPHTVEGTSASLNDGSKTVLRSPHMNLSGTAESLNTVSITEYEEESLLTSFKLDTGAEDSSGSSPATSAIPFISENISQGYIFSSENPETITYDVLIPESARNASEDSTSSGSEESLKDPSMEGNVWFPSSTDITAQPDVGSGRESFLQTNYTEIRVDESEKTTKSFSAGPVMSQGPSVTDLEMPHYSTFAYFPTEVTPHAFTPSSRQQDLVSTVNVVYSQTTQPVYNGETPLQPSYSSEVFPLVTPLLLDNQILNTTPAASSSDSALHATPVFPSVDVSFESILSSYDGAPLLPFSSASFSSELFRHLHTVSQILPQVTSATESDKVPLHASLPVAGGDLLLEPSLAQYSDVLSTTHAASETLEFGSESGVLYKTLMFSQVEPPSSDAMMHARSSGPEPSYALSDNEGSQHIFTVSYSSAIPVHDSVGVTYQGSLFSGPSHIPIPKSSLITPTASLLQPTHALSGDGEWSGASSDSEFLLPDTDGLTALNISSPVSVAEFTYTTSVFGDDNKALSKSEIIYGNETELQIPSFNEMVYPSESTVMPNMYDNVNKLNASLQETSVSISSTKGMFPGSLAHTTTKVFDHEISQVPENNFSVQPTHTVSQASGDTSLKPVLSANSEPASSDPASSEMLSPSTQLLFYETSASFSTEVLLQPSFQASDVDTLLKTVLPAVPSDPILVETPKVDKISSTMLHLIVSNSASSENMLHSTSVPVFDVSPTSHMHSASLQGLTISYASEKYEPVLLKSESSHQVVPSLYSNDELFQTANLEINQAHPPKGRHVFATPVLSIDEPLNTLINKLIHSDEILTSTKSSVTGKVFAGIPTVASDTFVSTDHSVPIGNGHVAITAVSPHRDGSVTSTKLLFPSKATSELSHSAKSDAGLVGGGEDGDTDDDGDDDDDRDSDGLSIHKCMSCSSYRESQEKVMNDSDTHENSLMDQNNPISYSLSENSEEDNRVTSVSSDSQTGMDRSPGKSPSANGLSQKHNDGKEENDIQTGSALLPLSPESKAWAVLTSDEESGSGQGTSDSLNENETSTDFSFADTNEKDADGILAAGDSEITPGFPQSPTSSVTSENSEVFHVSEAEASNSSHESRIGLAEGLESEKKAVIPLVIVSALTFICLVVLVGILIYWRKCFQTAHFYLEDSTSPRVISTPPTPIFPISDDVGAIPIKHFPKHVADLHASSGFTEEFETLKEFYQEVQSCTVDLGITADSSNHPDNKHKNRYINIVAYDHSRVKLAQLAEKDGKLTDYINANYVDGYNRPKAYIAAQGPLKSTAEDFWRMIWEHNVEVIVMITNLVEKGRRKCDQYWPADGSEEYGNFLVTQKSVQVLAYYTVRNFTLRNTKIKKGSQKGRPSGRVVTQYHYTQWPDMGVPEYSLPVLTFVRKAAYAKRHAVGPVVVHCSAGVGRTGTYIVLDSMLQQIQHEGTVNIFGFLKHIRSQRNYLVQTEEQYVFIHDTLVEAILSKETEVLDSHIHAYVNALLIPGPAGKTKLEKQFQLLSQSNIQQSDYSAALKQCNREKNRTSSIIPVERSRVGISSLSGEGTDYINASYIMGYYQSNEFIITQHPLLHTIKDFWRMIWDHNAQLVVMIPDGQNMAEDEFVYWPNKDEPINCESFKVTLMAEEHKCLSNEEKLIIQDFILEATQDDYVLEVRHFQCPKWPNPDSPISKTFELISVIKEEAANRDGPMIVHDEHGGVTAGTFCALTTLMHQLEKENSVDVYQVAKMINLMRPGVFADIEQYQFLYKVILSLVSTRQEENPSTSLDSNGAALPDGNIAESLESLV

SEQ ID NO: 815518 - protein, 2295 aa, Homo sapiens
MRILKRFLACIQLLCVCRLDWANGYYRQQRKLVEEIGWSYTGALNQKNWGKKYPTCNSPKQSPINIDEDLTQVNVNLKKLKFQGWDKTSLENTFIHNTGKTVEINLTNDYRVSGGVSEMVFKASKITFHWGKCNMSSDGSEHSLEGQKFPLEMQIYCFDADRFSSFEEAVKGKGKLRALSILFEVGTEENLDFKAIIDGVESVSRFGKQAALDPFILLNLLPNSTDKYYIYNGSLTSPPCTDTVDWIVFKDTVSISESQLAVFCEVLTMQQSGYVMLMDYLQNNFREQQYKFSRQVFSSYTGKEEIHEAVCSSEPENVQADPENYTSLLVTWERPRVVYDTMIEKFAVLYQQLDGEDQTKHEFLTDGYQDLGAILNNLLPNMSYVLQIVAICTNGLYGKYSDQLIVDMPTDNPELDLFPELIGTEEIIKEEEEGKDIEEGAIVNPGRDSATNQIRKKEPQISTTTHYNRIGTKYNEAKTNRSPTRGSEFSGKGDVPNTSLNSTSQPVTKLATEKDISLTSQTVTELPPHTVEGTSASLNDGSKTVLRSPHMNLSGTAESLNTVSITEYEEESLLTSFKLDTGAEDSSGSSPATSAIPFISENISQGYIFSSENPETITYDVLIPESARNASEDSTSSGSEESLKDPSMEGNVWFPSSTDITAQPDVGSGRESFLQTNYTEIRVDESEKTTKSFSAGPVMSQGPSVTDLEMPHYSTFAYFPTEVTPHAFTPSSRQQDLVSTVNVVYSQTTQPVYNGETPLQPSYSSEVFPLVTPLLLDNQILNTTPAASSSDSALHATPVFPSVDVSFESILSSYDGAPLLPFSSASFSSELFRHLHTVSQILPQVTSATESDKVPLHASLPVAGGDLLLEPSLAQYSDVLSTTHAASETLEFGSESGVLYKTLMFSQVEPPSSDAMMHARSSGPEPSYALSDNEGSQHIFTVSYSSAIPVHDSVGVTYQGSLFSGPSHIPIPKSSLITPTASLLQPTHALSGDGEWSGASSDSEFLLPDTDGLTALNISSPVSVAEFTYTTSVFGDDNKALSKSEIIYGNETELQIPSFNEMVYPSESTVMPNMYDNVNKLNASLQETSVSISSTKGMFPGSLAHTTTKVFDHEISQVPENNFSVQPTHTVSQASGDTSLKPVLSANSEPASSDPASSEMLSPSTQLLFYETSASFSTEVLLQPSFQASDVDTLLKTVLPAVPSDPILVETPKVDKISSTMLHLIVSNSASSENMLHSTSVPVFDVSPTSHMHSASLQGLTISYASEKYEPVLLKSESSHQVVPSLYSNDELFQTANLEINQAHPPKGRHVFATPVLSIDEPLNTLINKLIHSDEILTSTKSSVTGKVFAGIPTVASDTFVSTDHSVPIGNGHVAITAVSPHRDGSVTSTKLLFPSKATSELSHSAKSDAGLVGGGEDGDTDDDGDDDDDRDSDGLSIHKCMSCSSYRESQEKVMNDSDTHENSLMDQNNPISYSLSENSEEDNRVTSVSSDSQTGMDRSPGKSPSANGLSQKHNDGKEENDIQTGSALLPLSPESKAWAVLTSDEESGSGQGTSDSLNENETSTDFSFADTNEKDADGILAAGDSEITPGFPQSPTSSVTSENSEVFHVSEAEASNSSHESRIGLAEGLESEKKAVIPLVIVSALTFICLVVLVGILIYWRKCFQTAHFYLEDSTSPRVISTPPTPIFPISDDVGAIPIKHFPKHVADLHASSGFTEEFETLKEFYQEVQSCTVDLGITADSSNHPDNKHKNRYINIVAYDHSRVKLAQLAEKDGKLTDYINANYVDGYNRPKAYIAAQGPLKSTAEDFWRMIWEHNVEVIVMITNLVEKGRRKCDQYWPADGSEEYGNFLVTQKSVQVLAYYTVRNFTLRNTKIKKGSQKGRPSGRVVTQYHYTQWPDMGVPEYSLPVLTFVRKAAYAKRHAVGPVVVHCSAGVGRTGTYIVLDSMLQQIQHEGTVNIFGFLKHIRSQRNYLVQTEEQYVFIHDTLVEAILSKETEVLDSHIHAYVNALLIPGPAGKTKLEKQFQLLSQSNIQQSDYSAALKQCNREKNRTSSIIPVERSRVGISSLSGEGTDYINASYIMGYYQSNEFIITQHPLLHTIKDFWRMIWDHNAQLVVMIPDGQNMAEDEFVYWPNKDEPINCESFKVTLMAEEHKCLSNEEKLIIQDFILEATQDDYVLEVRHFQCPKWPNPDSPISKTFELISVIKEEAANRDGPMIVHDEHGGVTAGTFCALTTLMHQLEKENSVDEQYQFLYKVILSLVSTRQEENPSTSLDSNGAALPDGNIAESLESLV

SEQ ID NO: 815519 - protein, 2307 aa, Homo sapiens
MRILKRFLACIQLLCVCRLDWANGYYRQQRKLVEEIGWSYTGALNQKNWGKKYPTCNSPKQSPINIDEDLTQVNVNLKKLKFQGWDKTSLENTFIHNTGKTVEINLTNDYRVSGGVSEMVFKASKITFHWGKCNMSSDGSEHSLEGQKFPLEMQIYCFDADRFSSFEEAVKGKGKLRALSILFEVGTEENLDFKAIIDGVESVSRFGKQAALDPFILLNLLPNSTDKYYIYNGSLTSPPCTDTVDWIVFKDTVSISESQLAVFCEVLTMQQSGYVMLMDYLQNNFREQQYKFSRQVFSSYTGKEEIHEAVCSSEPENVQADPENYTSLLVTWERPRVVYDTMIEKFAVLYQQLDGEDQTKHEFLTDGYQDLGAILNNLLPNMSYVLQIVAICTNGLYGKYSDQLIVDMPTDNPELDLFPELIGTEEIIKEEEEGKDIEEGAIVNPGRDSATNQIRKKEPQISTTTHYNRIGTKYNEAKTNRSPTRGSEFSGKGDVPNTSLNSTSQPVTKLATEKDISLTSQTVTELPPHTVEGTSASLNDGSKTVLRSPHMNLSGTAESLNTVSITEYEEESLLTSFKLDTGAEDSSGSSPATSAIPFISENISQGYIFSSENPETITYDVLIPESARNASEDSTSSGSEESLKDPSMEGNVWFPSSTDITAQPDVGSGRESFLQTNYTEIRVDESEKTTKSFSAGPVMSQGPSVTDLEMPHYSTFAYFPTEVTPHAFTPSSRQQDLVSTVNVVYSQTTQPVYNGETPLQPSYSSEVFPLVTPLLLDNQILNTTPAASSSDSALHATPVFPSVDVSFESILSSYDGAPLLPFSSASFSSELFRHLHTVSQILPQVTSATESDKVPLHASLPVAGGDLLLEPSLAQYSDVLSTTHAASETLEFGSESGVLYKTLMFSQVEPPSSDAMMHARSSGPEPSYALSDNEGSQHIFTVSYSSAIPVHDSVGVTYQGSLFSGPSHIPIPKSSLITPTASLLQPTHALSGDGEWSGASSDSEFLLPDTDGLTALNISSPVSVAEFTYTTSVFGDDNKALSKSEIIYGNETELQIPSFNEMVYPSESTVMPNMYDNVNKLNASLQETSVSISSTKGMFPGSLAHTTTKVFDHEISQVPENNFSVQPTHTVSQASGDTSLKPVLSANSEPASSDPASSEMLSPSTQLLFYETSASFSTEVLLQPSFQASDVDTLLKTVLPAVPSDPILVETPKVDKISSTMLHLIVSNSASSENMLHSTSVPVFDVSPTSHMHSASLQGLTISYASEKYEPVLLKSESSHQVVPSLYSNDELFQTANLEINQAHPPKGRHVFATPVLSIDEPLNTLINKLIHSDEILTSTKSSVTGKVFAGIPTVASDTFVSTDHSVPIGNGHVAITAVSPHRDGSVTSTKLLFPSKATSELSHSAKSDAGLVGGGEDGDTDDDGDDDDDRDSDGLSIHKCMSCSSYRESQEKVMNDSDTHENSLMDQNNPISYSLSENSEEDNRVTSVSSDSQTGMDRSPGKSPSANGLSQKHNDGKEENDIQTGSALLPLSPESKAWAVLTSDEESGSGQGTSDSLNENETSTDFSFADTNEKDADGILAAGDSEITPGFPQSPTSSVTSENSEVFHVSEAEASNSSHESRIGLAEGLESEKKAVIPLVIVSALTFICLVVLVGILIYWRKCFQTAHFYLEDSTSPRVISTPPTPIFPISDDVGAIPIKHFPKHVADLHASSGFTEEFEEVQSCTVDLGITADSSNHPDNKHKNRYINIVAYDHSRVKLAQLAEKDGKLTDYINANYVDGYNRPKAYIAAQGPLKSTAEDFWRMIWEHNVEVIVMITNLVEKGRRKCDQYWPADGSEEYGNFLVTQKSVQVLAYYTVRNFTLRNTKIKKGSQKGRPSGRVVTQYHYTQWPDMGVPEYSLPVLTFVRKAAYAKRHAVGPVVVHCSAGVGRTGTYIVLDSMLQQIQHEGTVNIFGFLKHIRSQRNYLVQTEEQYVFIHDTLVEAILSKETEVLDSHIHAYVNALLIPGPAGKTKLEKQFQLLSQSNIQQSDYSAALKQCNREKNRTSSIIPVERSRVGISSLSGEGTDYINASYIMGYYQSNEFIITQHPLLHTIKDFWRMIWDHNAQLVVMIPDGQNMAEDEFVYWPNKDEPINCESFKVTLMAEEHKCLSNEEKLIIQDFILEATQDDYVLEVRHFQCPKWPNPDSPISKTFELISVIKEEAANRDGPMIVHDEHGGVTAGTFCALTTLMHQLEKENSVDVYQVAKMINLMRPGVFADIEQYQFLYKVILSLVSTRQEENPSTSLDSNGAALPDGNIAESLESLV

SEQ ID NO: 815520 - protein, 2028 aa, Homo sapiens
MRILKRFLACIQLLCVCRLDWANGYYRQQRKLVEEIGWSYTGALNQKNWGKKYPTCNSPKQSPINIDEDLTQVNVNLKKLKFQGWDKTSLENTFIHNTGKTVEINLTNDYRVSGGVSEMVFKASKITFHWGKCNMSSDGSEHSLEGQKFPLEMQIYCFDADRFSSFEEAVKGKGKLRALSILFEVGTEENLDFKAIIDGVESVSRFGKQAALDPFILLNLLPNSTDKYYIYNGSLTSPPCTDTVDWIVFKDTVSISESQLAVFCEVLTMQQSGYVMLMDYLQNNFREQQYKFSRQVFSSYTGKEEIHEAVCSSEPENVQADPENYTSLLVTWERPRVVYDTMIEKFAVLYQQLDGEDQTKHEFLTDGYQDLGAILNNLLPNMSYVLQIVAICTNGLYGKYSDQLIVDMPTDNPELDLFPELIGTEEIIKEEEEGKDIEEGAIVNPGRDSATNQIRKKEPQISTTTHYNRIGTKYNEAKTNRSPTRGSEFSGKGDVPNTSLNSTSQPVTKLATEKDISLTSQTVTELPPHTVEGTSASLNDGSKTVLRSPHMNLSGTAESLNTVSITEYEEESLLTSFKLDTGAEDSSGSSPATSAIPFISENISQGYIFSSENPETITYDVLIPESARNASEDSTSSGSEESLKDPSMEGNVWFPSSTDITAQPDVGSGRESFLQTNYTEIRVDESEKTTKSFSAGPVMSQGPSVTDLEMPHYSTFAYFPTEVTPHAFTPSSRQQDLVSTVNVVYSQTTQPVYNGETPLQPSYSSEVFPLVTPLLLDNQILNTTPAASSSDSALHATPVFPSVDVSFESILSSYDGAPLLPFSSASFSSELFRHLHTVSQILPQVTSATESDKVPLHASLPVAGGDLLLEPSLAQYSDVLSTTHAASETLEFGSESGVLYKTLMFSQVEPPSSDAMMHARSSGPEPSYALSDNEGSQHIFTVSYSSAIPVHDSVGVTYQGSLFSGPSHIPIPKSSLITPTASLLQPTHALSGDGEWSGASSDSEFLLPDTDGLTALNISSPVSVAEFTYTTSVFGDDNKALSKSEIIYGNETELQIPSFNEMVYPSESTVMPNMYDNVNKLNASLQETSVSISSTKGMFPGSLAHTTTKVFDHEISQVPENNFSVQPTHTVSQASGDTSLKPVLSANSEPASSDPASSEMLSPSTQLLFYETSASFSTEVLLQPSFQASDVDTLLKTVLPAVPSDPILVETPKVDKISSTMLHLIVSNSASSENMLHSTSVPVFDVSPTSHMHSASLQGLTISYASEKYEPVLLKSESSHQVVPSLYSNDELFQTANLEINQAHPPKGRHVFATPVLSIDEPLNTLINKLIHSDEILTSTKSSVTGKVFAGIPTVASDTFVSTDHSVPIGNGHVAITAVSPHRDGSVTSTKLLFPSKATSELSHSAKSDAGLVGGGEDGDTDDDGDDDDDRDSDGLSIHKCMSCSSYRESQEKVMNDFRHPDNKHKNRYINIVAYDHSRVKLAQLAEKDGKLTDYINANYVDGYNRPKAYIAAQGPLKSTAEDFWRMIWEHNVEVIVMITNLVEKGRRKCDQYWPADGSEEYGNFLVTQKSVQVLAYYTVRNFTLRNTKIKKGSQKGRPSGRVVTQYHYTQWPDMGVPEYSLPVLTFVRKAAYAKRHAVGPVVVHCSAGVGRTGTYIVLDSMLQQIQHEGTVNIFGFLKHIRSQRNYLVQTEEQYVFIHDTLVEAILSKETEVLDSHIHAYVNALLIPGPAGKTKLEKQFQLLSQSNIQQSDYSAALKQCNREKNRTSSIIPVERSRVGISSLSGEGTDYINASYIMGYYQSNEFIITQHPLLHTIKDFWRMIWDHNAQLVVMIPDGQNMAEDEFVYWPNKDEPINCESFKVTLMAEEHKCLSNEEKLIIQDFILEATQDDYVLEVRHFQCPKWPNPDSPISKTFELISVIKEEAANRDGPMIVHDEHGGVTAGTFCALTTLMHQLEKENSVDVYQVAKMINLMRPGVFADIEQYQFLYKVILSLVSTRQEENPSTSLDSNGAALPDGNIAESLESLV

SEQ ID NO: 815521 - protein, 2353 aa, Homo sapiens
MRILKRFLACIQLLCVCRLDWANGYYRQQRKLVEEIGWSYTGALNQKNWGKKYPTCNSPKQSPINIDEDLTQVNVNLKKLKFQGWDKTSLENTFIHNTGKTVEINLTNDYRVSGGVSEMVFKASKITFHWGKCNMSSDGSEHSLEGQKFPLEMQIYCFDADRFSSFEEAVKGKGKLRALSILFEVGTEENLDFKAIIDGVESVSRFGKQAALDPFILLNLLPNSTDKYYIYNGSLTSPPCTDTVDWIVFKDTVSISESQLAVFCEVLTMQQSGYVMLMDYLQNNFREQQYKFSRQVFSSYTGKEEIHEAVCSSEPENVQADPENYTSLLVTWERPRVVYDTMIEKFAVLYQQLDGEDQTKHEFLTDGYQDLGAILNNLLPNMSYVLQIVAICTNGLYGKYSDQLIVDMPTDNPELDLFPELIGTEEIIKEEEEGKDIEEGAIVNPGRDSATNQIRKKEPQISTTTHYNRIGTKYNEAKTNRSPTRGSEFSGKGDVPNTSLNSTSQPVTKLATEKDISLTSQTVTELPPHTVEGTSASLNDGSKTVLRSPHMNLSGTAESLNTVSITEYEEESLLTSFKLDTGAEDSSGSSPATSAIPFISENISQGYIFSSENPETITYDVLIPESARNASEDSTSSGSEESLKDPSMEGNVWFPSSTDITAQPDVGSGRESFLQTNYTEIRVDESEKTTKSFSAGPVMSQGPSVTDLEMPHYSTFAYFPTEVTPHAFTPSSRQQDLVSTVNVVYSQTTQPVYNGETPLQPSYSSEVFPLVTPLLLDNQILNTTPAASSSDSALHATPVFPSVDVSFESILSSYDGAPLLPFSSASFSSELFRHLHTVSQILPQVTSATESDKVPLHASLPVAGGDLLLEPSLAQYSDVLSTTHAASETLEFGSESGVLYKTLMFSQVEPPSSDAMMHARSSGPEPSYALSDNEGSQHIFTVSYSSAIPVHDSVGVTYQGSLFSGPSHIPIPKSSLITPTASLLQPTHALSGDGEWSGASSDSEFLLPDTDGLTALNISSPVSVAEFTYTTSVFGDDNKALSKSEIIYGNETELQIPSFNEMVYPSESTVMPNMYDNVNKLNASLQETSVSISSTKGMFPGSLAHTTTKVFDHEISQVPENNFSVQPTHTVSQASGDTSLKPVLSANSEPASSDPASSEMLSPSTQLLFYETSASFSTEVLLQPSFQASDVDTLLKTVLPAVPSDPILVETPKVDKISSTMLHLIVSNSASSENMLHSTSVPVFDVSPTSHMHSASLQGLTISYASEKYEPVLLKSESSHQVVPSLYSNDELFQTANLEINQAHPPKGRHVFATPVLSIDEPLNTLINKLIHSDEILTSTKSSVTGKVFAGIPTVASDTFVSTDHSVPIGNGHVAITAVSPHRDGSVTSTKLLFPSKATSELSHSAKSDAGLVGGGEDGDTDDDGDDDDDRDSDGLSIHKCMSCSSYRESQEKVMNDSDTHENSLMDQNNPISYSLSENSEEDNRVTSVSSDSQTGMDRSPGKSPSANGLSQKHNDGKEENDIQTGSALLPLSPESKAWAVLTSDEESGSGQGTSDSLNENETSTDFSFADTNEKDADGILAAGDSEITPGFPQSPTSSVTSENSEVFHVSEAEASNSSHESRIGLAEGLESEKKAVIPLVIVSALTFICLVVLVGILIYWRKCFQTAHFYLEDSTSPRVISTPPTPIFPISDDVGAIPIKHFPKHVADLHASSGFTEEFETLKEFYQEVQSCTVDLGITADSSNHPDNKHKNRYINIVAYDHSRVKLAQLAEKDGKLTDYINANYVDGYNRPKAYIAAQGPLKSTAEDFWRMIWEHNVEVIVMITNLVEKGRRKCDQYWPADGSEEYGNFLVTQKSVQVLAYYTVRNFTLRNTKIKKGSQKGRPSGRVVTQYHYTQWPDMGVPEYSLPVLTFVRKAAYAKRHAVGPVVVHCSAGVGRTGTYIVLDSMLQQIQHEGTVNIFGFLKHIRSQRNYLVQTEEQYVFIHDTLVEAILSKETEVLDSHIHAYVNALLIPGPAGKTKLEKQFQGLTLSPRLECRGTISAHCNLPLPGLTDPPTSASRVARTILLSQSNIQQSDYSAALKQCNREKNRTSSIIPVERSRVGISSLSGEGTDYINASYIMGYYQSNEFIITQHPLLHTIKDFWRMIWDHNAQLVVMIPDGQNMAEDEFVYWPNKDEPINCESFKVTLMAEEHKCLSNEEKLIIQDFILEATQDDYVLEVRHFQCPKWPNPDSPISKTFELISVIKEEAANRDGPMIVHDEHGGVTAGTFCALTTLMHQLEKENSVDVYQVAKMINLMRPGVFADIEQYQFLYKVILSLVSTRQEENPSTSLDSNGAALPDGNIAESLESLV

SEQ ID NO: 815522 - protein, 1989 aa, Homo sapiens
MRILKRFLACIQLLCVCRLDWANGYYRQQRKLVEEIGWSYTGALNQKNWGKKYPTCNSPKQSPINIDEDLTQVNVNLKKLKFQGWDKTSLENTFIHNTGKTVEINLTNDYRVSGGVSEMVFKASKITFHWGKCNMSSDGSEHSLEGQKFPLEMQIYCFDADRFSSFEEAVKGKGKLRALSILFEVGTEENLDFKAIIDGVESVSRFGKQAALDPFILLNLLPNSTDKYYIYNGSLTSPPCTDTVDWIVFKDTVSISESQLAVFCEVLTMQQSGYVMLMDYLQNNFREQQYKFSRQVFSSYTGKEEIHEAVCSSEPENVQADPENYTSLLVTWERPRVVYDTMIEKFAVLYQQLDGEDQTKHEFLTDGYQDLGAILNNLLPNMSYVLQIVAICTNGLYGKYSDQLIVDMPTDNPELDLFPELIGTEEIIKEEEEGKDIEEGAIVNPGRDSATNQIRKKEPQISTTTHYNRIGTKYNEAKTNRSPTRGSEFSGKGDVPNTSLNSTSQPVTKLATEKDISLTSQTVTELPPHTVEGTSASLNDGSKTVLRSPHMNLSGTAESLNTVSITEYEEESLLTSFKLDTGAEDSSGSSPATSAIPFISENISQGYIFSSENPETITYDVLIPESARNASEDSTSSGSEESLKDPSMEGNVWFPSSTDITAQPDVGSGRESFLQTNYTEIRVDESEKTTKSFSAGPVMSQGPSVTDLEMPHYSTFAYFPTEVTPHAFTPSSRQQDLVSTVNVVYSQTTQPVYNGETPLQPSYSSEVFPLVTPLLLDNQILNTTPAASSSDSALHATPVFPSVDVSFESILSSYDGAPLLPFSSASFSSELFRHLHTVSQILPQVTSATESDKVPLHASLPVAGGDLLLEPSLAQYSDVLSTTHAASETLEFGSESGVLYKTLMFSQVEPPSSDAMMHARSSGPEPSYALSDNEGSQHIFTVSYSSAIPVHDSVGVTYQGSLFSGPSHIPIPKSSLITPTASLLQPTHALSGDGEWSGASSDSEFLLPDTDGLTALNISSPVSVAEFTYTTSVFGDDNKALSKSEIIYGNETELQIPSFNEMVYPSESTVMPNMYDNVNKLNASLQETSVSISSTKGMFPGSLAHTTTKVFDHEISQVPENNFSVQPTHTVSQASGDTSLKPVLSANSEPASSDPASSEMLSPSTQLLFYETSASFSTEVLLQPSFQASDVDTLLKTVLPAVPSDPILVETPKVDKISSTMLHLIVSNSASSENMLHSTSVPVFDVSPTSHMHSASLQGLTISYASEKYEPVLLKSESSHQVVPSLYSNDELFQTANLEINQAHPPKGRHVFATPVLSIDEPLNTLINKLIHSDEILTSTKSSVTGKVFAGIPTVASDTFVSTDHSVPIGNGHVAITAVSPHRDGSVTSTKLLFPSKATSELSHSAKSDAGLVGGGEDGDTDDDGDDDDDRDSDGLSIHKCMSCSSYRESQEKVMNDSDTHENSLMDQNNPISYSLSENSEEDNRVTSVSSDSQTGMDRSPGKSPSANGLSQKHNDGKEENDIQTGSALLPLSPESKAWAVLTSDEESGSGQGTSDSLNENETSTDFSFADTNEKDADGILAAGDSEITPGFPQSPTSSVTSENSEVFHVSEAEASNSSHESRIGLAEGLESEKKAVIPLVIVSALTFICLVVLVGILIYWRKCFQTAHFYLEDSTSPRVISTPPTPIFPISDDVGAIPIKHFPKHVADLHASSGFTEEFETLKEFYQEVQSCTVDLGITADSSNHPDNKHKNRYINIVAYDHSRVKLAQLAEKDGKLTDYINANYVDGYNRPKAYIAAQGPLKSTAEDFWRMIWEHNVEVIVMITNLVEKGRRKCDQYWPADGSEEYGNFLVTQKSVQVLAYYTVRNFTLRNTKIKKGSQKGRPSGRVVTQYHYTQWPDMGVPEYSLPVLTFVRKAAYAKRHAVGPVVVHCSAGVGRTGTYIVLDSMLQQIQHEGTVNIFGFLKHIRSQRNYLVQTESSFLDQQAKQS

SEQ ID NO: 815523 - protein, 1473 aa, Homo sapiens
EYSYETYLSCLFPQASELYKPILCNSKEQADFSCEKFSDLKSDFFTLHLTFPFHLLSNLVCASLGKEAFVCLNFAILKDLVVGTSVAIFLWKSKFLCKFNLVLFPKSINCLKTRTTSSSVRPSQSLHIPIPKSSLITPTASLLQPTHALSGDGEWSGASSDSEFLLPDTDGLTALNISSPVSVAEFTYTTSVFGDDNKALSKSEIIYGNETELQIPSFNEMVYPSESTVMPNMYDNVNKLNASLQETSVSISSTKGMFPGSLAHTTTKVFDHEISQVPENNFSVQPTHTVSQASGDTSLKPVLSANSEPASSDPASSEMLSPSTQLLFYETSASFSTEVLLQPSFQASDVDTLLKTVLPAVPSDPILVETPKVDKISSTMLHLIVSNSASSENMLHSTSVPVFDVSPTSHMHSASLQGLTISYASEKYEPVLLKSESSHQVVPSLYSNDELFQTANLEINQAHPPKGRHVFATPVLSIDEPLNTLINKLIHSDEILTSTKSSVTGKVFAGIPTVASDTFVSTDHSVPIGNGHVAITAVSPHRDGSVTSTKLLFPSKATSELSHSAKSDAGLVGGGEDGDTDDDGDDDDDRDSDGLSIHKCMSCSSYRESQEKVMNDSDTHENSLMDQNNPISYSLSENSEEDNRVTSVSSDSQTGMDRSPGKSPSANGLSQKHNDGKEENDIQTGSALLPLSPESKAWAVLTSDEESGSGQGTSDSLNENETSTDFSFADTNEKDADGILAAGDSEITPGFPQSPTSSVTSENSEVFHVSEAEASNSSHESRIGLAEGLESEKKAVIPLVIVSALTFICLVVLVGILIYWRKCFQTAHFYLEDSTSPRVISTPPTPIFPISDDVGAIPIKHFPKHVADLHASSGFTEEFETLKEFYQEVQSCTVDLGITADSSNHPDNKHKNRYINIVAYDHSRVKLAQLAEKDGKLTDYINANYVDGYNRPKAYIAAQGPLKSTAEDFWRMIWEHNVEVIVMITNLVEKGRRKCDQYWPADGSEEYGNFLVTQKSVQVLAYYTVRNFTLRNTKIKKGSQKGRPSGRVVTQYHYTQWPDMGVPEYSLPVLTFVRKAAYAKRHAVGPVVVHCSAGVGRTGTYIVLDSMLQQIQHEGTVNIFGFLKHIRSQRNYLVQTEEQYVFIHDTLVEAILSKETEVLDSHIHAYVNALLIPGPAGKTKLEKQFQLLSQSNIQQSDYSAALKQCNREKNRTSSIIPVERSRVGISSLSGEGTDYINASYIMGYYQSNEFIITQHPLLHTIKDFWRMIWDHNAQLVVMIPDGQNMAEDEFVYWPNKDEPINCESFKVTLMAEEHKCLSNEEKLIIQDFILEATQDDYVLEVRHFQCPKWPNPDSPISKTFELISVIKEEAANRDGPMIVHDEHGGVTAGTFCALTTLMHQLEKENSVDVYQVAKMINLMRPGVFADIEQYQFLYKVILSLVSTRQEENPSTSLDSNGAALPDGNIAESLESLV

SEQ ID NO: 815524 - protein, 1218 aa, Homo sapiens
WNLTNLMIKNLSGGMSKVISQVPENNFSVQPTHTVSQASGDTSLKPVLSANSEPASSDPASSEMLSPSTQLLFYETSASFSTEVLLQPSFQASDVDTLLKTVLPAVPSDPILVETPKVDKISSTMLHLIVSNSASSENMLHSTSVPVFDVSPTSHMHSASLQGLTISYASEKYEPVLLKSESSHQVVPSLYSNDELFQTANLEINQAHPPKGRHVFATPVLSIDEPLNTLINKLIHSDEILTSTKSSVTGKVFAGIPTVASDTFVSTDHSVPIGNGHVAITAVSPHRDGSVTSTKLLFPSKATSELSHSAKSDAGLVGGGEDGDTDDDGDDDDDRDSDGLSIHKCMSCSSYRESQEKVMNDSDTHENSLMDQNNPISYSLSENSEEDNRVTSVSSDSQTGMDRSPGKSPSANGLSQKHNDGKEENDIQTGSALLPLSPESKAWAVLTSDEESGSGQGTSDSLNENETSTDFSFADTNEKDADGILAAGDSEITPGFPQSPTSSVTSENSEVFHVSEAEASNSSHESRIGLAEGLESEKKAVIPLVIVSALTFICLVVLVGILIYWRKCFQTAHFYLEDSTSPRVISTPPTPIFPISDDVGAIPIKHFPKHVADLHASSGFTEEFETLKEFYQEVQSCTVDLGITADSSNHPDNKHKNRYINIVAYDHSRVKLAQLAEKDGKLTDYINANYVDGYNRPKAYIAAQGPLKSTAEDFWRMIWEHNVEVIVMITNLVEKGRRKCDQYWPADGSEEYGNFLVTQKSVQVLAYYTVRNFTLRNTKIKKGSQKGRPSGRVVTQYHYTQWPDMGVPEYSLPVLTFVRKAAYAKRHAVGPVVVHCSAGVGRTGTYIVLDSMLQQIQHEGTVNIFGFLKHIRSQRNYLVQTEEQYVFIHDTLVEAILSKETEVLDSHIHAYVNALLIPGPAGKTKLEKQFQLLSQSNIQQSDYSAALKQCNREKNRTSSIIPVERSRVGISSLSGEGTDYINASYIMGYYQSNEFIITQHPLLHTIKDFWRMIWDHNAQLVVMIPDGQNMAEDEFVYWPNKDEPINCESFKVTLMAEEHKCLSNEEKLIIQDFILEATQDDYVLEVRHFQCPKWPNPDSPISKTFELISVIKEEAANRDGPMIVHDEHGGVTAGTFCALTTLMHQLEKENSVDVYQVAKMINLMRPGVFADIEQYQFLYKVILSLVSTRQEENPSTSLDSNGAALPDGNIAESLESLV

SEQ ID NO: 815525 - protein, 1321 aa, Homo sapiens
TLRDRPREGGAEPAKGAHRHRGRQPVTGTPPERSTYTTSVFGDDNKALSKSEIIYGNETELQIPSFNEMVYPSESTVMPNMYDNVNKLNASLQETSVSISSTKGMFPGSLAHTTTKVFDHEISQVPENNFSVQPTHTVSQASGDTSLKPVLSANSEPASSDPASSEMLSPSTQLLFYETSASFSTEVLLQPSFQASDVDTLLKTVLPAVPSDPILVETPKVDKISSTMLHLIVSNSASSENMLHSTSVPVFDVSPTSHMHSASLQGLTISYASEKYEPVLLKSESSHQVVPSLYSNDELFQTANLEINQAHPPKGRHVFATPVLSIDEPLNTLINKLIHSDEILTSTKSSVTGKVFAGIPTVASDTFVSTDHSVPIGNGHVAITAVSPHRDGSVTSTKLLFPSKATSELSHSAKSDAGLVGGGEDGDTDDDGDDDDDRDSDGLSIHKCMSCSSYRESQEKVMNDSDTHENSLMDQNNPISYSLSENSEEDNRVTSVSSDSQTGMDRSPGKSPSANGLSQKHNDGKEENDIQTGSALLPLSPESKAWAVLTSDEESGSGQGTSDSLNENETSTDFSFADTNEKDADGILAAGDSEITPGFPQSPTSSVTSENSEVFHVSEAEASNSSHESRIGLAEGLESEKKAVIPLVIVSALTFICLVVLVGILIYWRKCFQTAHFYLEDSTSPRVISTPPTPIFPISDDVGAIPIKHFPKHVADLHASSGFTEEFETLKEFYQEVQSCTVDLGITADSSNHPDNKHKNRYINIVAYDHSRVKLAQLAEKDGKLTDYINANYVDGYNRPKAYIAAQGPLKSTAEDFWRMIWEHNVEVIVMITNLVEKGRRKCDQYWPADGSEEYGNFLVTQKSVQVLAYYTVRNFTLRNTKIKKGSQKGRPSGRVVTQYHYTQWPDMGVPEYSLPVLTFVRKAAYAKRHAVGPVVVHCSAGVGRTGTYIVLDSMLQQIQHEGTVNIFGFLKHIRSQRNYLVQTEEQYVFIHDTLVEAILSKETEVLDSHIHAYVNALLIPGPAGKTKLEKQFQLLSQSNIQQSDYSAALKQCNREKNRTSSIIPVERSRVGISSLSGEGTDYINASYIMGYYQSNEFIITQHPLLHTIKDFWRMIWDHNAQLVVMIPDGQNMAEDEFVYWPNKDEPINCESFKVTLMAEEHKCLSNEEKLIIQDFILEATQDDYVLEVRHFQCPKWPNPDSPISKTFELISVIKEEAANRDGPMIVHDEHGGVTAGTFCALTTLMHQLEKENSVDVYQVAKMINLMRPGVFADIEQYQFLYKVILSLVSTRQEENPSTSLDSNGAALPDGNIAESLESLV

SEQ ID NO: 815526 - protein, 1455 aa, Homo sapiens
MRILKRFLACIQLLCVCRLDWANGYYRQQRKLVEEIGWSYTGALNQKNWGKKYPTCNSPKQSPINIDEDLTQVNVNLKKLKFQGWDKTSLENTFIHNTGKTVEINLTNDYRVSGGVSEMVFKASKITFHWGKCNMSSDGSEHSLEGQKFPLEMQIYCFDADRFSSFEEAVKGKGKLRALSILFEVGTEENLDFKAIIDGVESVSRFGKQAALDPFILLNLLPNSTDKYYIYNGSLTSPPCTDTVDWIVFKDTVSISESQLAVFCEVLTMQQSGYVMLMDYLQNNFREQQYKFSRQVFSSYTGKEEIHEAVCSSEPENVQADPENYTSLLVTWERPRVVYDTMIEKFAVLYQQLDGEDQTKHEFLTDGYQDLGAILNNLLPNMSYVLQIVAICTNGLYGKYSDQLIVDMPTDNPELDLFPELIGTEEIIKEEEEGKDIEEGAIVNPGRDSATNQIRKKEPQISTTTHYNRIGTKYNEAKTNRSPTRGSEFSGKGDVPNTSLNSTSQPVTKLATEKDISLTSQTVTELPPHTVEGTSASLNDGSKTVLRSPHMNLSGTAESLNTVSITEYEEESLLTSFKLDTGAEDSSGSSPATSAIPFISENISQGYIFSSENPETITYDVLIPESARNASEDSTSSGSEESLKDPSMEGNVWFPSSTDITAQPDVGSGRESFLQTNYTEIRVDESEKTTKSFSAGPVMSQGPSVTDLEMPHYSTFAYFPTEVTPHAFTPSSRQQDLVSTVNVVYSQTTQPVYNEASNSSHESRIGLAEGLESEKKAVIPLVIVSALTFICLVVLVGILIYWRKCFQTAHFYLEDSTSPRVISTPPTPIFPISDDVGAIPIKHFPKHVADLHASSGFTEEFETLKEFYQEVQSCTVDLGITADSSNHPDNKHKNRYINIVAYDHSRVKLAQLAEKDGKLTDYINANYVDGYNRPKAYIAAQGPLKSTAEDFWRMIWEHNVEVIVMITNLVEKGRRKCDQYWPADGSEEYGNFLVTQKSVQVLAYYTVRNFTLRNTKIKKGSQKGRPSGRVVTQYHYTQWPDMGVPEYSLPVLTFVRKAAYAKRHAVGPVVVHCSAGVGRTGTYIVLDSMLQQIQHEGTVNIFGFLKHIRSQRNYLVQTEEQYVFIHDTLVEAILSKETEVLDSHIHAYVNALLIPGPAGKTKLEKQFQLLSQSNIQQSDYSAALKQCNREKNRTSSIIPVERSRVGISSLSGEGTDYINASYIMGYYQSNEFIITQHPLLHTIKDFWRMIWDHNAQLVVMIPDGQNMAEDEFVYWPNKDEPINCESFKVTLMAEEHKCLSNEEKLIIQDFILEATQDDYVLEVRHFQCPKWPNPDSPISKTFELISVIKEEAANRDGPMIVHDEHGGVTAGTFCALTTLMHQLEKENSVDVYQVAKMINLMRPGVFADIEQYQFLYKVILSLVSTRQEENPSTSLDSNGAALPDGNIAESLESLV

SEQ ID NO: 815527 - protein, 502 aa, Homo sapiens
MIWEHNVEVIVMITNLVEKGRRKCDQYWPADGSEEYGNFLVTQKSVQVLAYYTVRNFTLRNTKIKKGSQKGRPSGRVVTQYHYTQWPDMGVPEYSLPVLTFVRKAAYAKRHAVGPVVVHCSAGVGRTGTYIVLDSMLQQIQHEGTVNIFGFLKHIRSQRNYLVQTEEQYVFIHDTLVEAILSKETEVLDSHIHAYVNALLIPGPAGKTKLEKQFQLLSQSNIQQSDYSAALKQCNREKNRTSSIIPVERSRVGISSLSGEGTDYINASYIMGYYQSNEFIITQHPLLHTIKDFWRMIWDHNAQLVVMIPDGQNMAEDEFVYWPNKDEPINCESFKVTLMAEEHKCLSNEEKLIIQDFILEATQDDYVLEVRHFQCPKWPNPDSPISKTFELISVIKEEAANRDGPMIVHDEHGGVTAGTFCALTTLMHQLEKENSVDVYQVAKMINLMRPGVFADIEQYQFLYKVILSLVSTRQEENPSTSLDSNGAALPDGNIAESLESLV

SEQ ID NO: 815528 - protein, 502 aa, Homo sapiens; identical to SEQ ID NO: 815527

SEQ ID NO: 815529 - protein, 502 aa, Homo sapiens; identical to SEQ ID NO: 815527

SEQ ID NO: 815530 - protein, 1615 aa, Homo sapiens
MFPLIGKTIIFDNFPDPSDTWEITETIGKGTYGKVFKVLNKKNGQKAAVKILDPIHDIDEEIEAEYNILKALSDHPNVVRFYGIYFKKDKVNGDKLWLVLELCSGGSVTDLVKGFLKRGERMSEPLIAYILHEALMGLQHLHNNKTIHRDVKGNNILLTTEGGVKLVDFGVSAQLTSTRHRRNTSVGTPFWMAPEVIACEQQLDTTYDARCDTWSLGITAIELGDGDPPLADLHPMRALFKIPRNPPPKLRQPELWSAEFNDFISKCLTKDYEKRPTVSELLQHKFITQIEGKDVMLQKQLTEFIGIHQCMGGTEKARRERIHTKKGNFNRPLISNLKDVDDLATLEILDENTVSEQLEKCYSRDQIYVYVGDILIALNPFQSLGLYSTKHSKLYIGSKRTASPPHIFAMADLGYQSIITYNSDQCIVISGESGAGKTENAHLLVQQLTVLGKANNRTLQEKILQVNNLVEAFGNACTIINDNSSRFGKYLEMKFTSSGAVVGAQISEYLLEKSRVIHQAIGEKNFHIFYYIYAGLAEKKKLAHYKLPENKPPRYLQNDHLRTVQDIMNNSFYKSQYELIEQCFKVIGFTMEQLGSIYSILAAILNVGNIEFSSVATEHQIDKSHISNHTALENCVSLLCIRADELQEALTSHCVVTRGETIIRPNTVEKATDVRDAMAKTLYGRLFSWIVNCINSLLKHDSSPSGNGDELSIGILDIFGFENFKKNSFEQLCINIANEQIQYYYNQHVFAWEQNEYLNEDVDARVIEYEDNWPLLDMFLQKPMGLLSLLDEESRFPKATDQTLVEKFEGNLKSQYFWRPKRMELSFGIHHYAGKVLYNASGFLAKNKTLVPTDIVLLLRSSDNSVIRQLVNHPLTKTGNLPHSKLKMLNYQMRTSEKLINLAKGDTGEATRHARETTNMKTQTVASYFRYSLMDLLSKMVVGQPHFVRCIKPNSERQARKYDKEKVLLQLRYTGILETARIRRLGFSHRILFANFIKRYYLLCYKSSEEPRMSPDTCATILEKAGLDNWALGKTKVFLKYYHVEQLNLMRKEAIDKLILIQACVRAFLCSRRYQKIQEKRKESAIIIQSAARGHLVRKQRKEIVDMKNTAVTTIQTSDQEFDYKKNFENTRESFVKKQAENAISANERFISAPNNKGSVSVVKTSTFKPEEETTNAVESNNRVYQTPKKMNNVYEEEVKQEFYLVGPEVSPKQKSVKDLEENSNLRKVEKEEAMIQSYYQRYTEERNCEESKAAYLERKAISERPSYPVPWLAENETSFKKTLEPTLSQRSIYQNANSMEKEKKTSVVTQSAPICSQEEGRGRLRHETVKERQVEPVTQAQEEEDKAAVFIQSKYRGYKRRQQLRKDKMSSFKHQKIVTTPTEVARNTHNLYSYPTKHEEINNIKKKDNKDSKATSEREACGLAIFSKQISKLSEEYFILQKKLNEMILSQQLKSLYLGVSHHKPINRRVSSQQCLSGVCKGEEPKILRPPRRPRKPKTLNNPEDSTYYYLLHKSIQEEKRRPRKDSQGKLLDLEDFYYKEFLPSRSGPKEHSPSLRERRPQQELQNQCIKANERCWAAESPEKEEEREPAANPYDFRRLLRKTSQRRRLVQQS

SEQ ID NO: 815531 - protein, 1504 aa, Homo sapiens
MFPLIGKTIIFDNFPDPSDTWEITETIGKGTYGKVFKVLNKKNGQKAAVKILDPIHDIDEEIEAEYNILKALSDHPNVVRFYGIYFKKDKVNGDKLWLVLELCSGGSVTDLVKGFLKRGERMSEPLIAYILHEALMGLQHLHNNKTIHRDVKGNNILLTTEGGVKLVDFGVSAQLTSTRHRRNTSVGTPFWMAPEVIACEQQLDTTYDARCDTWSLGITAIELGDGDPPLADLHPMRALFKIPRNPPPKLRQPELWSAEFNDFISKCLTKDYEKRPTVSELLQHKFITQIEGKDVMLQKQLTEFIGIHQCMGGTEKARRERIHTKKGNFNRPLISNLKDVDDLATLEILDENTVSEQLEKCYSRDQIYVYVGDILIALNPFQSLGLYSTKHSKLYIGSKRTASPPHIFAMADLGYQSIITYNSDQCIVISGESGAGKTENAHLLVQQLTVLGKANNRTLQEKILQVNNLVEAFGNACTIINDNSSRFGKYLEMKFTSSGAVVGAQISEYLLEKSRVIHQAIGEKNFHIFYYIYAGLAEKKKLAHYKLPENKPPRYLQNDHLRTVQDIMNNSFYKSQYELIEQCFKVIGFTMEQLGSIYSILAAILNVGNIEFSSVATEHQIDKSHISNHTALENCVSLLCIRADELQEALTSHCVVTRGETIIRPNTVEKATDVRDAMAKTLYGRLFSWIVNCINSLLKHDSSPSGNGDELSIGILDIFGFENFKKNSFEQLCINIANEQIQYYYNQHVFAWEQNEYLNEDVDARVIEYEDNWPLLDMFLQKPMGLLSLLDEESRFPKATDQTLVEKFEGNLKSQYFWRPKRMELSFGIHHYAGKVLYNASGFLAKNKTLVPTDIVLLLRSSDNSVIRQLVNHPLTKTGNLPHSKLKMLNYQMRTSEKLINLAKGDTGEATRHARETTNMKTQTVASYFRYSLMDLLSKMVVGQPHFVRCIKPNSERQARKYDKEKVLLQLRYTGILETARIRRLGFSHRILFANFIKRYYLLCYKSSEEPRMSPDTCATILEKAGLDNWALGKTKVFLKYYHVEQLNLMRKEAIDKLILIQACVRAFLCSRRYQKIQEKRKESAIIIQSAARGHLVRKQRKEIVDMKNTAVTTIQTSDQEFDYKKNFENTRESFVKKQAENAISANERFISAPNNKGSVSVVKTSTFKPEEETTNAVESNNRVYQTPKKMNNVYEEEVKQEFYLVGPEVSPKQKSVKDLEENSNLRKVEKEEAMIQSYYQRYTEERNCEESKAAYLERKAISERPSYPVPWLAENETSFKKTLEPTLSQRSIYQNANSMEKEKKTSVVTQSAPICSQEEGRGRLRHETVKERQVEPVTQAQEEEDKAAVFIQSKYRGYKRRQQLRKDKMSSFKHQKIVTTPTEVARNTHNLYSYPTKHEEINNIKKKDNKDSKATSEREACGLAIFSKQISKLSEEYFILQKKLNEMILSQQLKSLYLGVSHHKPINRRVSSQQCLSEVNPRRKTKTKERQSGKIIRFGRFLL

SEQ ID NO: 815532 - protein, 492 aa, Homo sapiens
MSPDTCATILEKAGLDNWALGKTKVFLKYYHVEQLNLMRKEAIDKLILIQACVRAFLCSRRYQKIQEKRKESAIIIQSAARGHLVRKQRKEIVDMKNTAVTTIQTSDQEFDYKKNFENTRESFVKKQAENAISANERFISAPNNKGSVSVVKTSTFKPEEETTNAVESNNRVYQTPKKMNNVYEEEVKQEFYLVGPEVSPKQKSVKDLEENSNLRKVEKEEAMIQSYYQRYTEERNCEESKAAYLERKAISERPSYPVPWLAENETSFKKTLEPTLSQRSIYQNANSMEKEKKTSVVTQSAPICSQEEGRGRLRHETVKERQVEPVTQAQEEEDKAAVFIQSKYRGYKRRQQLRKDKMSSFKHQKIVTTPTEVARNTHNLYSYPTKHEEINNIKKKDNKDSKATSEREACGLAIFSKQISKLSEEYFILQKKLNEMILSQQLKSLYLGVSHHKPINRRVSSQQCLSEVNPRRKTKTKERQSGKIIRFGRFLL

SEQ ID NO: 815533 - protein, 1504 aa, Homo sapiens; identical to SEQ ID NO: 815531

SEQ ID NO: 815534 - protein, 247 aa, Homo sapiens
MFPLIGKTIIFDNFPDPSDTWEITETIGKGTYGKVFKVLNKKNGQKAAVKILDPIHDIDEEIEAEYNILKALSDHPNVVRFYGIYFKKDKVNGDKLWLVLELCSGGSVTDLVKGFLKRGERMSEPLIAYILHEALMGLQHLHNNKTIHRDVKGNNILLTTEGGVKLVDFGVSAQLTSTRHRRNTSVGTPFWMAPEVIACEQQLDTTYDARCDTWSLGITAIELGDGDPPLADLHPMRALFKIPRSDD

SEQ ID NO: 815535 - protein, 604 aa, Homo sapiens
MASNPERGEILLTELQGDSRSLPFSENVSAVQKLDFSDTMVQQKLDDIKDRIKREIRKELKIKEGAENLRKVTTDKKSLAYVDNILKKSNKKLEELHHKLQELNAHIVVSDPEDITDCPRTPDTPNNDPRCSTSNNRLKALQKQLDIELKVKQGAENMIQMYSNGSSKDRKLHGTAQQLLQDSKTKIEVIRMQILQAVQTNELAFDNAKPVISPLELRMEELRHHFRIEFAVAEGAKNVMKLLGSGKVTDRKALSEAQARFNESSQKLDLLKYSLEQRLNEVPKNHPKSRIIIEELSLVAASPTLSPRQSMISTQNQYSTLSKPAALTGTLEVRLMGCQDILENVPGRSKATSVALPGWSPSETRSSFMSRTSKSKSGSSRNLLKTDDLSNDVCAVLKLDNTVVGQTSWKPISNQSWDQKFTLELDRSRELEISVYWRDWRSLCAVKFLRLEDFLDNQRHGMCLYLEPQGTLFAEVTFFNPVIERRPKLQRQKKIFSKQQGKTFLRAPQMNINIATWGRLVRRAIPTVNHSGTFSPQAPVPTTVPVVDVRIPQLAPPARYVSEILSISYTKLLGHSYVLIIAGVLSLAFFPSSILKVVFCLLKK

SEQ ID NO: 815536 - protein, 917 aa, Homo sapiens
MASNPERGEILLTELQGDSRSLPFSENVSAVQKLDFSDTMVQQKLDDIKDRIKREIRKELKIKEGAENLRKVTTDKKSLAYVDNILKKSNKKLEELHHKLQELNAHIVVSDPEDITDCPRTPDTPNNDPRCSTSNNRLKALQKQLDIELKVKQGAENMIQMYSNGSSKDRKLHGTAQQLLQDSKTKIEVIRMQILQAVQTNELAFDNAKPVISPLELRMEELRHHFRIEFAVAEGAKNVMKLLGSGKVTDRKALSEAQARFNESSQKLDLLKYSLEQRLNEVPKNHPKSRIIIEELSLVAASPTLSPRQSMISTQNQYSTLSKPAALTGTLEVRLMGCQDILENVPGRSKATSVALPGWSPSETRSSFMSRTSKSKSGSSRNLLKTDDLSNDVCAVLKLDNTVVGQTSWKPISNQSWDQKFTLELDRSRELEISVYWRDWRSLCAVKFLRLEDFLDNQRHGMCLYLEPQGTLFAEVTFFNPVIERRPKLQRQKKIFSKQQGKTFLRAPQMNINIATWGRLVRRAIPTVNHSGTFSPQAPVPTTVPVVDVRIPQLAPPASDSTVTKLDFDLEPEPPPAPPRASSLGEIDESSELRVLDIPGQDSETVFDIQNDRNSILPKSQSEYKPDTPQSGLEYSGIQELEDRRSQQRFQFNLQDFRCCAVLGRGHFGKVLLAEYKNTNEMFAIKALKKGDIVARDEVDSLMCEKRIFETVNSVRHPFLVNLFACFQTKEHVCFVMEYAAGGDLMMHIHTDVFSEPRAVFYAACVVLGLQYLHEHKIVYRDLKLDNLLLDTEGFVKIADFGLCKEGMGYGDRTSTFCGTPEFLAPEVLTETSYTRAVDWWGLGVLIYEMLVGESPFPGDDEEEVFDSIVNDEVRYPRFLSTEAISIMRRLLRRNPERRLGASEKDAEDVKSTHFSG

SEQ ID NO: 815537 - protein, 917 aa, Homo sapiens; identical to SEQ ID NO: 815536

SEQ ID NO: 815538 - protein, 917 aa, Homo sapiens; identical to SEQ ID NO: 815536

SEQ ID NO: 815539 - protein, 917 aa, Homo sapiens; identical to SEQ ID NO: 815536

SEQ ID NO: 815540 - protein, 917 aa, Homo sapiens; identical to SEQ ID NO: 815536

SEQ ID NO: 815541 - protein, 855 aa, Homo sapiens
MASNPERGEILLTELQGDSRSLPFSENVSAVQKLDFSDTMVQQKLDDIKDRIKREIRKELKIKEGAENLRKVTTDKKSLAYVDNILKKSNKKLEELHHKLQELNAHIVVSDPEDITDCPRTPDTPNNDPRCSTSNNRLKALQKQLDIELKVKQGAENMIQMYSNGSSKDRKLHGTAQQLLQDSKTKIEVIRMQILQAVQTNELAFDNAKPVISPLELRMEELRHHFRIEFAVAEGAKNVMKLLGSGKVTDRKALSEAQARFNESSQKLDLLKYSLEQRLNEVPKNHPKSRIIIEELSLVAASPTLSPRQSMISTQNQYSTLSKPAALTDDVCAVLKLDNTVVGQTSWKPISNQSWDQKFTLELDRSRELEISVYWRDWRSLCAVKFLRLEDFLDNQRHGMCLYLEPQGTLFAEVTFFNPVIERRPKLQRQKKIFSKQQGKTFLRAPQMNINIATWGRLVRRAIPTVNHSGTFSPQAPVPTTVPVVDVRIPQLAPPASDSTVTKLDFDLEPEPPPAPPRASSLGEIDESSELRVLDIPGQDSETVFDIQNDRNSILPKSQSEYKPDTPQSGLEYSGIQELEDRRSQQRFQFNLQDFRCCAVLGRGHFGKVLLAEYKNTNEMFAIKALKKGDIVARDEVDSLMCEKRIFETVNSVRHPFLVNLFACFQTKEHVCFVMEYAAGGDLMMHIHTDVFSEPRAVFYAACVVLGLQYLHEHKIVYRDLKLDNLLLDTEGFVKIADFGLCKEGMGYGDRTSTFCGTPEFLAPEVLTETSYTRAVDWWGLGVLIYEMLVGESPFPGDDEEEVFDSIVNDEVRYPRFLSTEAISIMRRLLRRNPERRLGASEKDAEDVKSTHFSG

SEQ ID NO: 815542 - protein, 917 aa, Homo sapiens; identical to SEQ ID NO: 815536

SEQ ID NO: 815543 - protein, 262 aa, Homo sapiens
MRNSYRFLASSLSVVVSLLLIPEDVCEKIIGGNEVTPHSRPYMVLLSLDRKTICAGALIAKDWVLTAAHCNLNKRSQVILGAHSITREEPTKQIMLVKKEFPYPCYDPATREGDLKLLQLTEKAKINKYVTILHLPKKGDDVKPGTMCQVAGWGRTHNSASWSDTLREVNITIIDRKVCNDRNHYNFNPVIGMNMVCAGSLRGGRDSCNGDSGSPLLCEGVFRGVTSFGLENKCGDPRGPGVYILLSKKHLNWIIMTIKGAV

SEQ ID NO: 815544 - protein, 305 aa, Homo sapiens
MMDQKTCNDAEHYNFKLVVENCMICASGRKGEDAGRLPRWPNRNSSRLQLPARSMRKTSDFCISNSDVCEKIIGGNEVTPHSRPYMVLLSLDRKTICAGALIAKDWVLTAAHCNLNKRSQVILGAHSITREEPTKQIMLVKKEFPYPCYDPATREGDLKLLQLTEKAKINKYVTILHLPKKGDDVKPGTMCQVAGWGRTHNSASWSDTLREVNITIIDRKVCNDRNHYNFNPVIGMNMVCAGSLRGGRDSCNGDSGSPLLCEGVFRGVTSFGLENKCGDPRGPGVYILLSKKHLNWIIMTIKGAV

SEQ ID NO: 815545 - protein, 305 aa, Homo sapiens; identical to SEQ ID NO: 815544

SEQ ID NO: 815546 - protein, 305 aa, Homo sapiens; identical to SEQ ID NO: 815544

SEQ ID NO: 815547 - protein, 220 aa, Homo sapiens [sequence omitted]

SEQ ID NO: 815548 - protein, 305 aa, Homo sapiens; identical to SEQ ID NO: 815544

SEQ ID NO: 815549 - protein, 305 aa, Homo sapiens; identical to SEQ ID NO: 815544

SEQ ID NO: 815550 - protein, 305 aa, Homo sapiens; identical to SEQ ID NO: 815544

SEQ ID NO: 815551 - protein, 264 aa, Homo sapiens
YEISLPSTQEPPLAATDSLNFPPLHDVCEKIIGGNEVTPHSRPYMVLLSLDRKTICAGALIAKDWVLTAAHCNLNKRSQVILGAHSITREEPTKQIMLVKKEFPYPCYDPATREGDLKLLQLTEKAKINKYVTILHLPKKGDDVKPGTMCQVAGWGRTHNSASWSDTLREVNITIIDRKVCNDRNHYNFNPVIGMNMVCAGSLRGGRDSCNGDSGSPLLCEGVFRGVTSFGLENKCGDPRGPGVYILLSKKHLNWIIMTIKGAV

SEQ ID NO: 815552 - protein, 149 aa, Homo sapiens
MFFFQQLTEKAKINKYVTILHLPKKGDDVKPGTMCQVAGWGRTHNSASWSDTLREVNITIIDRKVCNDRNHYNFNPVIGMNMVCAGSLRGGRDSCNGDSGSPLLCEGVFRGVTSFGLENKCGDPRGPGVYILLSKKHLNWIIMTIKGAV

SEQ ID NO: 815553 - protein, 107 aa, Homo sapiens [sequence omitted]

SEQ ID NO: 815554 - protein, 696 aa, Homo sapiens
MAPVGTDKELSDLLDFSMMFPLPVTNGKGRPASLAGAQFGGSGLEDRPSSGSWGSGDQSSSSFDPSRTFSEGTHFTESHSSLSSSTFLGPGLGGKSGERGAYASFGRDAGVGGLTQAGFLSGELALNSPGPLSPSGMKGTSQYYPSYSGSSRRRAADGSLDTQPKKVRKVPPGLPSSVYPPSSGEDYGRDATAYPSAKTPSSTYPAPFYVADGSLHPSAELWSPPGQAGFGPMLGGGSSPLPLPPGSGPVGSSGSSSTFGGLHQHERMGYQLHGAEVNGGLPSASSFSSAPGATYGGVSSHTPPVSGADSLLGSRGTTAGSSGDALGKALASIYSPDHSSNNFSSSPSTPVGSPQGLAGTSQWPRAGAPGALSPSYDGGLHGLQSKIEDHLDEAIHVLRSHAVGTAGDMHTLLPGHGALASGFTGPMSLGGRHAGLVGGSHPEDGLAGSTSLMHNHAALPSQPGTLPDLSRPPDSYSGLGRAGATAAASEIKREEKEDEENTSAADHSEEEKKELKAPRARTSPVRGRGRPSPPRAERPEREKERRVANNARERLRVRDINEAFKELGRMCQTAPQQSEKPQTKLLILHQAVLGHPELGAASARAEPESQSSLFETARRGKGVRCGWRPPDGAFSSPPRPERSPQPRRAHVKGMPPWDEPPAFSPVLWPQNGHSRPRASSTSTPHTPVVSIEPTPT

SEQ ID NO: 815555 - protein, 462 aa, Homo sapiens
MGKEKTHINIVVIGHVDSGKSTTTGHLIYKCGGIDKRTIEKFEKEAAEMGKGSFKYAWVLDKLKAERERGITIDISLWKFETSKYYVTIIDAPGHRDFIKNMITGTSQADCAVLIVAAGVGEFEAGISKNGQTREHALLAYTLGVKQLIVGVNKMDSTEPPYSQKRYEEIVKEVSTYIKKIGYNPDTVAFVPISGWNGDNMLEPSANMPWFKGWKVTRKDGNASGTTLLEALDCILPPTRPTDKPLRLPLQDVYKIGGIGTVPVGRVETGVLKPGMVVTFAPVNVTTEVKSVEMHHEALSEALPGDNVGFNVKNVSVKDVRRGNVAGDSKNDPPMEAAGFTAQVIILNHPGQISAGYAPVLDCHTAHIACKFAELKEKIDRRSGKKLEDGPKFLKSGDAAIVDMVPGKPMCVESFSDYPPLGRFAVRDMRQTVAVGVIKAVDKKAAGAGKVTKSAQKAQKAK

SEQ ID NO: 815556 - protein, 141 aa, Homo sapiens
QQLRGQAEEAQGPLLLLHGCALWPPMEGGRIQAGPPCPGQKILESWALPVSVLRDKGPARPAPGPRSSSRPLLRRELLPHAGFWSPHWACSWVMRFGSTLTGCQPPARWVSLCCCFSKGRPHFPHWQVGTGRPWASPELMG

SEQ ID NO: 815557 - protein, 696 aa, Homo sapiens; identical to SEQ ID NO: 815554

SEQ ID NO: 815558 - protein, 798 aa, Homo sapiens
MAPVGTDKELSDLLDFSMMFPLPVTNGKGRPASLAGAQFGGSGLEDRPSSGSWGSGDQSSSSFDPSRVGVPVRPETLSFLSPELGARGVGKLRLREGASLPGVWTGGHGFESCLSSCNAGWRGGLWSPSTSHPHPISPRPSARAPTSLSRTAASLHPHSWDRDSEGGECLAWCGPSAVHRCADVGLGMVSARTAPGKSGERGAYASFGRDAGVGGLTQAGFLSGELALNSPGPLSPSGMKGTSQYYPSYSGSSRRRAADGSLDTQPKKVRKVPPGLPSSVYPPSSGEDYGRDATAYPSAKTPSSTYPAPFYVADGSLHPSAELWSPPGQAGFGPMLGGGSSPLPLPPGSGPVGSSGSSSTFGGLHQHERMGYQLHGAEVNGGLPSASSFSSAPGATYGGVSSHTPPVSGADSLLGSRGTTAGSSGDALGKALASIYSPDHSSNNFSSSPSTPVGSPQGLAGTSQWPRAGAPGALSPSYDGGLHGLQSKIEDHLDEAIHVLRSHAVGTAGDMHTLLPGHGALASGFTGPMSLGGRHAGLVGGSHPEDGLAGSTSLMHNHAALPSQPGTLPDLSRPPDSYSGLGRAGATAAASEIKREEKEDEENTSAADHSEEEKKELKAPRARTSPVRGRGRPSPPRAERPEREKERRVANNARERLRVRDINEAFKELGRMCQTAPQQSEKPQTKLLILHQAVLGHPELGAASARAEPESQSSLFETARRGKGVRCGWRPPDGAFSSPPRPERSPQPRRAHVKGMPPWDEPPAFSPVLWPQNGHSRPRASSTSTPHTPVVSIEPTPT

SEQ ID NO: 815559 - protein, 657 aa, Homo sapiens
MAPVGTDKELSDLLDFSMMFPLPVTNGKGRPASLAGAQFGGSGLEDRPSSGSWGSGDQSSSSFDPSRTFSEGTHFTESHSSLSSSTFLGPGLGGKSGERGAYASFGRDAGVGGLTQAGFLSGELALNSPGPLSPSGMKGTSQYYPSYSGSSRRRAADGSLDTQPKKVRKVPPGLPSSVYPPSSGEDYGRDATAYPSAKTPSSTYPAPFYVADGSLHPSAELWSPPGQAGFGPMLGGGSSPLPLPPGSGPVGSSGSSSTFGGLHQHERMGYQLHGAEVNGGLPSASSFSSAPGATYGGVSSHTPPVSGADSLLGSRGTTAGSSGDALGKALASIYSPDHSSNNFSSSPSTPVGSPQGLAGTSQWPRAGAPGALSPSYDGGLHGLQSKIEDHLDEAIHVLRSHAVGTAGDMHTLLPGHGALASGFTGPMSLGGRHAGLVGGSHPEDGLAGSTSLMHNHAALPSQPGTLPDLSRPPDSYSGLGRAGATAAASEIKREEKEDEENTSAADHSEEEKKELKAPRARTSPVRGRGRPSPPRAERPEREKERRVANNARERLRVRDINEAFKELGRMCQTAPQQSEKPQTKLLILHQAVLGHPELGAASARAEPESQSSLFETARRGKGVRCGWRPPDGAFSSPPRPERSPQPRRAHVKAVNKT

SEQ ID NO: 815560 - protein, 696 aa, Homo sapiens; identical to SEQ ID NO: 815554

SEQ ID NO: 815561 - protein, 622 aa, Homo sapiens
MAPVGTDKELSDLLDFSMMFPLPVTNGKGRPASLAGAQFGGSGLEDRPSSGSWGSGDQSSSSFDPSRTFSEGTHFTESHSSLSSSTFLGPGLGGKSGERGAYASFGRDAGVGGLTQAGFLSGELALNSPGPLSPSGMKGTSQYYPSYSGSSRRRAADGSLDTQPKKVRKVPPGLPSSVYPPSSGEDYGRDATAYPSAKTPSSTYPAPFYVADGSLHPSAELWSPPGQAGFGPMLGGGSSPLPLPPGSGPVGSSGSSSTFGGLHQHERMGYQLHGAEVNGGLPSASSFSSAPGATYGGVSSHTPPVSGADSLLGSRGTTAGSSGDALGKALASIYSPDHSSNNFSSSPSTPVGSPQGLAGTSQWPRAGAPGALSPSYDGGLHGLQSKIEDHLDEAIHVLRSHAVGTAGDMHTLLPGHGALASGFTGPMSLGGRHAGLVGGSHPEDGLAGSTSLMHNHAALPSQPGTLPDLSRPPDSYSGLGRAGATAAASEIKREEKEDEENTSAADHSEEEKKELKAPRARTSPVRGRGRPSPPRAERPEREKERRVANNARERLRVRDINEAFKELGRMCQTAPQQSEKPQTKLLILHQAVLGHPELGAASARAEPESQSSLFETARRGQA

SEQ ID NO: 815562 - protein, 726 aa, Homo sapiens
MAPVGTDKELSDLLDFSMMFPLPVTNGKGRPASLAGAQFGGSGLEDRPSSGSWGSGDQSSSSFDPSRTFSEGTHFTESHSSLSSSTFLGPGLGGKSGERGAYASFGRDAGVGGLTQAGFLSGELALNSPGPLSPSGMKGTSQYYPSYSGSSRRRAADGSLDTQPKKVRKVPPGLPSSVYPPSSGEDYGRDATAYPSAKTPSSTYPAPFYVADGSLHPSAELWSPPGQAGFGPMLGGGSSPLPLPPGSGPVGSSGSSSTFGGLHQHERMGYQLHGAEVNGGLPSASSFSSAPGATYGGVSSHTPPVSGADSLLGSRGTTAGSSGDALGKALASIYSPDHSSNNFSSSPSTPVGSPQGLAGTSQWPRAGAPGALSPSYDGGLHGLQSKIEDHLDEAIHVLRSHAVGTAGDMHTLLPGHGALASGFTGPMSLGGRHAGLVGGSHPEDGLAGSTSLMHNHAALPSQPGTLPDLSRPPDSYSGLGRAGATAAASEIKREEKEDEENTSAADHSEEEKKELKAPRARTSPVRGRGRPSPPRAERPEREKERRVANNARERLRVRDINEAFKELGRMCQTAPQQSEKPQTKLLILHQAVLGHPELGAASASSTDEVLSLEEKDLRDRERRMANNARERVRVRDINEAFRELGRMCQMHLKSDKAQTKLLILQQAVQVILGLEQQVRERNLNPKAACLKRREEEKVSGVVGDPQMVLSAPHPGLSEAHNPAGHM

SEQ ID NO: 815563 - protein, 684 aa, Homo sapiens
MAPVGTDKELSDLLDFSMMFPLPVTNGKGRPASLAGAQFGGSGLEDRPSSGSWGSGDQSSSSFDPSRTFSEGTHFTESHSSLSSSTFLGPGLGGKSGERGAYASFGRDAGVGGLTQAGFLSGELALNSPGPLSPSGMKGTSQYYPSYSGSSRRRAADGSLDTQPKKVRKVPPGLPSSVYPPSSGEDYGRDATAYPSAKTPSSTYPAPFYVADGSLHPSAELWSPPGQAGFGPMLGGGSSPLPLPPGSGPVGSSGSSSTFGGLHQHERMGYQLHGAEVNGGLPSASSFSSAPGATYGGVSSHTPPVSGADSLLGSRGTTAGSSGDALGKALASIYSPDHSSNNFSSSPSTPVGSPQGLAGTSQWPRAGAPGALSPSYDGGLHGLQSKIEDHLDEAIHVLRSHAVGTAGDMHTLLPGHGALASGFTGPMSLGGRHAGLVGGSHPEDGLAGSTSLMHNHAALPSQPGTLPDLSRPPDSYSGLGRAGATAAASEIKREEKEDEENTSAADHSEEEKKELKAPRARTRAERPEREKERRVANNARERLRVRDINEAFKELGRMCQTAPQQSEKPQTKLLILHQAVLGHPELGAASARAEPESQSSLFETARRGKGVRCGWRPPDGAFSSPPRPERSPQPRRAHVKGMPPWDEPPAFSPVLWPQNGHSRPRASSTSTPHTPVVSIEPTPT

SEQ ID NO: 815564 - protein, 714 aa, Homo sapiens
MAPVGTDKELSDLLDFSMMFPLPVTNGKGRPASLAGAQFGGSGLEDRPSSGSWGSGDQSSSSFDPSRTFSEGTHFTESHSSLSSSTFLGPGLGGKSGERGAYASFGRDAGVGGLTQAGFLSGELALNSPGPLSPSGMKGTSQYYPSYSGSSRRRAADGSLDTQPKKVRKVPPGLPSSVYPPSSGEDYGRDATAYPSAKTPSSTYPAPFYVADGSLHPSAELWSPPGQAGFGPMLGGGSSPLPLPPGSGPVGSSGSSSTFGGLHQHERMGYQLHGAEVNGGLPSASSFSSAPGATYGGVSSHTPPVSGADSLLGSRGTTAGSSGDALGKALASIYSPDHSSNNFSSSPSTPVGSPQGLAGTSQWPRAGAPGALSPSYDGGLHGLQSKIEDHLDEAIHVLRSHAVGTAGDMHTLLPGHGALASGFTGPMSLGGRHAGLVGGSHPEDGLAGSTSLMHNHAALPSQPGTLPDLSRPPDSYSGLGRAGATAAASEIKREEKEDEENTSAADHSEEEKKELKAPRARTRAERPEREKERRVANNARERLRVRDINEAFKELGRMCQTAPQQSEKPQTKLLILHQAVLGHPELGAASASSTDEVLSLEEKDLRDRERRMANNARERVRVRDINEAFRELGRMCQMHLKSDKAQTKLLILQQAVQVILGLEQQVRERNLNPKAACLKRREEEKVSGVVGDPQMVLSAPHPGLSEAHNPAGHM

SEQ ID NO: 815565 - protein, 642 aa, Homo sapiens
MAPVGTDKELSDLLDFSMMFPLPVTNGKGRPASLAGAQFGGSGLEDRPSSGSWGSGDQSSSSFDPSRTFSEGTHFTESHSSLSSSTFLGPGLGGKSGERGAYASFGRDAGVGGLTQAGFLSGELALNSPGPLSPSGMKGTSQYYPSYSGSSRRRAADGSLDTQPKKVRKVPPGLPSSVYPPSSGEDYGRDATAYPSAKTPSSTYPAPFYVADGSLHPSAELWSPPGQAGFGPMLGGGSSPLPLPPGSGPVGSSGSSSTFGGLHQHERMGYQLHGAEVNGGLPSASSFSSAPGATYGGVSSHTPPVSGADSLLGSRGTTAGSSGDALGKALASIYSPDHSSNNFSSSPSTPVGSPQGLAGTSQWPRAGAPGALSPSYDGGLHGLQSKIEDHLDEAIHVLRSHAVGTAGDMHTLLPGHGALASGFTGPMSLGGRHAGLVGGSHPEDGLAGSTSLMHNHAALPSQPGTLPDLSRPPDSYSGLGRAGATAAASEIKREEKEDEENTSAADHSEEEKKELKAPRARTSPVRGRGRPSPPRAERPEREKERRVANNARERLRVRDINEAFKELGRMCQTAPQQSEKPQTKLLILHQAVLGHQRNLNPKAACLKRREEEKVSGVVGDPQMVLSAPHPGLSEAHNPAGHM

SEQ ID NO: 815566 - protein, 645 aa, Homo sapiens [sequence omitted]

SEQ ID NO: 815567 - protein, 645 aa, Homo sapiens [sequence omitted]

SEQ ID NO: 815568 - protein, 696 aa, Homo sapiens; identical to SEQ ID NO: 815554

SEQ ID NO: 815569 - protein, 723 aa, Homo sapiens
MAPVGTDKELSDLLDFSMMFPLPVTNGKGRPASLAGAQFGGSGLEDRPSSGSWGSGDQSSSSFDPSRTFSEGTHFTESHSSLSSSTFLGPGLGGKSGERGAYASFGRDAGVGGLTQAGFLSGELALNSPGPLSPSGMKGTSQYYPSYSGSSRRRAADGSLDTQPKKVRKVPPGLPSSVYPPSSGEDYGRDATAYPSAKTPSSTYPAPFYVADGSLHPSAELWSPPGQAGFGPMLGGGSSPLPLPPGSGPVGSSGSSSTFGGLHQHERMGYQLHGAEVNGGLPSASSFSSAPGATYGGVSSHTPPVSGADSLLGSRGTTAGSSGDALGKALASIYSPDHSSNNFSSSPSTPVGSPQGLAGTSQWPRAGAPGALSPSYDGGLHGLQSKIEDHLDEAIHVLRSHAVGTAGDMHTLLPGHGALASGFTGPMSLGGRHAGLVSAGRGWSWAVGGDPAPPDAPVSPRLQVGGSHPEDGLAGSTSLMHNHAALPSQPGTLPDLSRPPDSYSGLGRAGATAAASEIKREEKEDEENTSAADHSEEEKKELKAPRARTSPVRGRGRPSPPRAERPEREKERRVANNARERLRVRDINEAFKELGRMCQTAPQQSEKPQTKLLILHQAVLGHPELGAASARAEPESQSSLFETARRGKGVRCGWRPPDGAFSSPPRPERSPQPRRAHVKGMPPWDEPPAFSPVLWPQNGHSRPRASSTSTPHTPVVSIEPTPT

SEQ ID NO: 815570 - protein, 696 aa, Homo sapiens; identical to SEQ ID NO: 815554

SEQ ID NO: 815571 - protein, 645 aa, Homo sapiens [sequence omitted]

SEQ ID NO: 815572 - protein, 649 aa, Homo sapiens
MNQPQRMAPVGTDKELSDLLDFSMMFPLPVTNGKGRPASLAGAQFGGSGLEDRPSSGSWGSGDQSSSSFDPSRTFSEGTHFTESHSSLSSSTFLGPGLGGKSGERGAYASFGRDAGVGGLTQAGFLSGELALNSPGPLSPSGMKGTSQYYPSYSGSSRRRAADGSLDTQPKKVRKVPPGLPSSVYPPSSGEDYGRDATAYPSAKTPSSTYPAPFYVADGSLHPSAELWSPPGQAGFGPMLGGGSSPLPLPPGSGPVGSSGSSSTFGGLHQHERMGYQLHGAEVNGGLPSASSFSSAPGATYGGVSSHTPPVSGADSLLGSRGTTAGSSGDALGKALASIYSPDHSSNNFSSSPSTPVGSPQGLAGTSQWPRAGAPGALSPSYDGGLHGLVGGSHPEDGLAGSTSLMHNHAALPSQPGTLPDLSRPPDSYSGLGRAGATAAASEIKREEKEDEENTSAADHSEEEKKELKAPRARTSPVRGRGRPSPPRAERPEREKERRVANNARERLRVRDINEAFKELGRMCQTAPQQSEKPQTKLLILHQAVLGHPELGAASARAEPESQSSLFETARRGKGVRCGWRPPDGAFSSPPRPERSPQPRRAHVKGMPPWDEPPAFSPVLWPQNGHSRPRASSTSTPHTPVVSIEPTPT

SEQ ID NO: 815573 - protein, 696 aa, Homo sapiens; identical to SEQ ID NO: 815554

SEQ ID NO: 815574 - protein, 696 aa, Homo sapiens; identical to SEQ ID NO: 815554

SEQ ID NO: 815575 - protein, 753 aa, Homo sapiens
MNQPQRMAPVGTDKELSDLLDFSMMFPLPVTNGKGRPASLAGAQFGGSGLEDRPSSGSWGSGDQSSSSFDPSRVGVPVRPETLSFLSPELGARGVGKLRLREGASLPGVWTGGHGFESCLSSCNAGWRGGLWSPSTSHPHPISPRPSARAPTSLSRTAASLHPHSWDRDSEGGECLAWCGPSAVHRCADVGLGMVSARTAPGKSGERGAYASFGRDAGVGGLTQAGFLSGELALNSPGPLSPSGMKGTSQYYPSYSGSSRRRAADGSLDTQPKKVRKVPPGLPSSVYPPSSGEDYGRDATAYPSAKTPSSTYPAPFYVADGSLHPSAELWSPPGQAGFGPMLGGGSSPLPLPPGSGPVGSSGSSSTFGGLHQHERMGYQLHGAEVNGGLPSASSFSSAPGATYGGVSSHTPPVSGADSLLGSRGTTAGSSGDALGKALASIYSPDHSSNNFSSSPSTPVGSPQGLAGTSQWPRAGAPGALSPSYDGGLHGLQSKIEDHLDEAIHVLRSHAVGTAGDMHTLLPGHGALASGFTGPMSLGGRHAGLVGGSHPEDGLAGSTSLMHNHAALPSQPGTLPDLSRPPDSYSGLGRAGATAAASEIKREEKEDEENTSAADHSEEEKKELKAPRARTSSTDEVLSLEEKDLRDRERRMANNARERVRVRDINEAFRELGRMCQMHLKSDKAQTKLLILQQAVQVILGLEQQVRERNLNPKAACLKRREEEKVSGVVGDPQMVLSAPHPGLSEAHNPAGHM

SEQ ID NO: 815576 - protein, 657 aa, Homo sapiens; identical to SEQ ID NO: 815559

SEQ ID NO: 815577 - protein, 657 aa, Homo sapiens; identical to SEQ ID NO: 815559

SEQ ID NO: 815578 - protein, 709 aa, Homo sapiens
MAPVGTDKELSDLLDFSMMFPLPVTNGKGRPASLAGAQFGGSGLEDRPSSGSWGSGDQSSSSFDPSRTFSEGTHFTESHSSLSSSTFLGPGLGGKSGERGAYASFGRDAGVGGLTQAGFLSGELALNSPGPLSPSGMKGTSQYYPSYSGSSRRRAADGSLDTQPKKVRKVPPGLPSSVYPPSSGEDYGRDATAYPSAKTPSSTYPAPFYVADGSLHPSAELWSPPGQAGFGPMLGGGSSPLPLPPGSGPVGSSGSSSTFGGLHQHERMGYQLHGAEVNGGLPSASSFSSAPGATYGGVSSHTPPVSGADSLLGSRGTTAGSSGDALGKALASIYSPDHSSNNFSSSPSTPVGSPQGLAGTSQWPRAGAPGALSPSYDGGLHGLQSKIEDHLDEAIHVLRSHAVGTAGDMHTLLPGHGALASGFTGPMSLGGRHAGLVGGSHPEDGLAGSTSLMHNHAALPSQPGTLPDLSRPPDSYSGLGRAGATAAASEIKREEKEDEENTSAADHSEEEKKELKAPRARTSPVRGRGRPSPPRAERPEREKERRVANNARERLRVRDINEAFKELGRMCQTAPQQSEKPQTKLLILHQAVLGHPELGAASARAEPESQSSLFETARRGKGVRCGWRPPDGAFSSPPRPERSPQPRRAHVKGLGGQWPHSLWNCAFCIEFKRDSPSARRKKQQFLGTTIMGGGGCDLSASRWFSKKFF

SEQ ID NO: 815579 - protein, 657 aa, Homo sapiens; identical to SEQ ID NO: 815559

SEQ ID NO: 815580 - protein, 726 aa, Homo sapiens; identical to SEQ ID NO: 815562

SEQ ID NO: 815581 - protein, 726 aa, Homo sapiens; identical to SEQ ID NO: 815562

SEQ ID NO: 815582 - protein, 726 aa, Homo sapiens; identical to SEQ ID NO: 815562

SEQ ID NO: 815583 - protein, 733 aa, Homo sapiens
MAPVGTDKELSDLLDFSMMFPLPVTNGKGRPASLAGAQFGGSGLEDRPSSGSWGSGDQSSSSFDPSRTFSEGTHFTESHSSLSSSTFLGPGLGGKSGERGAYASFGRDAGVGGLTQAGFLSGELALNSPGPLSPSGMKGTSQYYPSYSGSSRRRAADGSLDTQPKKVRKVPPGLPSSVYPPSSGEDYGRDATAYPSAKTPSSTYPAPFYVADGSLHPSAELWSPPGQAGFGPMLGGGSSPLPLPPGSGPVGSSGSSSTFGGLHQHERMGYQLHGAEVNGGLPSASSFSSAPGATYGGVSSHTPPVSGADSLLGSRGTTAGSSGDALGKALASIYSPDHSSNNFSSSPSTPVGSPQGLAGTSQWPRAGAPGALSPSYDGGLHGLQSKIEDHLDEAIHVLRSHAVGTAGDMHTLLPGHGALASGFTGPMSLGGRHAGLVGGSHPEDGLAGSTSLMHNHAALPSQPGTLPDLSRPPDSYSGLGRAGATAAASEIKREEKEDEENTSAADHSEEEKKELKAPRARTSPVRGRGRPSPPRAERPEREKERRVANNARERLRVRDINEAFKELGRMCQTAPQQSEKPQTKLLILHQAVLGHPELGAASASSTDEVLSLEEKDLRDRERRMANNARERVRVRDINEAFRELGRMCQMHLKSDKAQTKLLILQQAVQVILGLEQQVRERNLNPKAACLKRREEEKVSGGVFTPGAAFSKSKLIDRLNKHGIEFSVISSSEV

SEQ ID NO: 815584 - protein, 568 aa, Homo sapiens
MAPVGTDKELSDLLDFSMMFPLPVTNGKGRPASLAGAQFGGSGLEDRPSSGSWGSGDQSSSSFDPSRTFSEGTHFTESHSSLSSSTFLGPGLGGKSGERGAYASFGRDAGVGGLTQAGFLSGELALNSPGPLSPSGMKGTSQYYPSYSGSSRRRAADGSLDTQPKKVRKVPPGLPSSVYPPSSGEDYGRDATAYPSAKTPSSTYPAPFYVADGSLHPSAELWSPPGQAGFGPMLGGGSSPLPLPPGSGPVGSSGSSSTFGGLHQHERMGYQLHGAEVNGGLPSASSFSSAPGATYGGVSSHTPPVSGADSLLGSRGTTAGSSGDALGKALASIYSPDHSSNNFSSSPSTPVGSPQGLAGTSQWPRAGAPGALSPSYDGGLHGLQSKIEDHLDEAIHVLRSHAVGTAGDMHTLLPGHGALASGFTGPMSLGGRHAGLVGGSHPEDGLAGSTSLMHNHAALPSQPGTLPDLSRPPDSYSGQGISPQLGPLSTSIYLLTQDDKYWARRRKNNMAAKRSRDARRLKENQIAIRASFLEKENSALRQEVADLRKELGKCKNILAKYEARHGPL

SEQ ID NO: 815585 - protein, 171 aa, Homo sapiens
MAPVGTDKELSDLLDFSMMFPLPVTNGKGRPASLAGAQFGGSGLEDRPSSGSWGSGDQSSSSFDPSRTFSEGTHFTESHSSLSSSTFLGPGLGGKSGERGAYASFGRDAGVGGLTQAGFLSGELALNSPGPLSPSGMKGTSQYYPSYSGSSKQNLKASNKTYTLSEKKKMP

SEQ ID NO: 815586 - protein, 92 aa, Homo sapiens
EKDLRDRERRMANNARERVRVRDINEAFRELGRMCQMHLKSDKAQTKLLILQQAVQVILGLEQQVRGRLPGQGCPSTLSLPHTQVQMLGSSC

SEQ ID NO: 815587 - protein, 1097 aa, Homo sapiens
MRGMIGGGFFRGSINSQFEFGRKKENMTSPAKFKKDKEIIAEYDTQVKEIRAQLTEQMKCLDQQCELRVQLLQDLQDFFRKKAEIEMDYSRNLEKLAEHFLAKTRSTKDQQFKKDQNVLSPVNCWNLLLNQVKWESRDHTTLSDIYLNNIIPRFVQVSEDSGRLFKKSKEVGQQLQDDLMKVLNELYSVMKTYHMYNADSISAQSKLKEAEKQEEKQIGKSVKQEDRQTPRSPDSTANVRIEEKHVRRSSVKKIEKMKEKRQAKYTENKLKAIKARNEYLLALEATNASVFKYYIHDLSDLIDQCCDLGYHASLNRALRTFLSAELNLEQSKHEGLDAIENAVENLDATSDKQRLMEMYNNVFCPPMKFEFQPHMGDMASQLCAQQPVQSELVQRCQQLQSRLSTLKIENEEVKKTMEATLQTIQDIVTVEDFDVSDCFQYSNSMESVKSTVSETFMSKPSIAKRRANQQETEQFYFTKMKEYLEGRNLITKLQAKHDLLQKTLGESQRTDCSLARRSSTVRKQDSSQAIPLVVESCIRFISRHGLQHEGIFRVSGSQVEVNDIKNAFERGEDPLAGDQNDHDMDSIAGVLKLYFRGLEHPLFPKDIFHDLMACVTMDNLQERALHIRKVLLVLPKTTLIIMRYLFAFLNHLSQFSEENMMDPYNLAICFGPSLMSVPEGHDQVSCQAHVNELIKTIIIQHENIFPSPRELEGPVYSRGGSMEDYCDSPHGETTSVEDSTQDVTAEHHTSDDECEPIEAIAKFDYVGRTARELSFKKGASLLLYQRASDDWWEGRHNGIDGLIPHQYIVVQDTEDGVVERSSPKSEIEVISEPPEEKVTARAGASCPSGGHVADIYLANINKQRKRPESGSIRKTFRSDSHGLSSSLTDSSSPGVGASCRPSSQPIMSQSLPKEGPDKCSISGHGSLNSISRHSSLKNRLDSPQIRKTATAGRSKSFNNHRPMDPEVIAQDIEATMNSALNELRELERQSSVKHTPDVVLDTLEPLKTSPVVAPTSEPSSPLHTQLLKDPEPAFQRSASTAGDIACAFRPVKSVKMAAPVKPPATRPKPTVFPKTNATSPGVNSSTSPQSTDKSCTV

SEQ ID NO: 815588 - protein, 485 aa, Homo sapiens
MRGMIGGGFFRGSINSQFEFGRKKENMTSPAKFKKDKEIIAEYDTQVKEIRAQLTEQMKCLDQQCELRVQLLQDLQDFFRKKAEIEMDYSRNLEKLAEHFLAKTRSTKDQQFKKDQNVLSPVNCWNLLLNQVKWESRDHTTLSDIYLNNIIPRFVQVSEDSGRLFKKSKEVGQQLQDDLMKVLNELYSVMKTYHMYNADSISAQSKLKEAEKQEEKQIGKSVKQEDRQTPRSPDSTANVRIEEKHVRRSSVKKIEKMKEKRQAKYTENKLKAIKARNEYLLALEATNASVFKYYIHDLSDLIDQCCDLGYHASLNRALRTFLSAELNLEQSKHEGLDAIENAVENLDATSDKQRLMEMYNNVFCPPMKFEFQPHMGDMASQLCAQQPVQSELVQRCQQLQSRLSTLKIENEEVKKTMEATLQTIQDIVTVEDFDVSDCFQYSNSMESVKSTVSETFMSKPSIAKRRANQQETEQFYFTVRECYGF

SEQ ID NO: 815589 - protein, 473 aa, Homo sapiens
MRGMIGGGFFRGSINSQFEFGRKKENMTSPAKFKKDKEIIAEYDTQVKEIRAQLTEQMKCLDQQCELRVQLLQDLQDFFRKKAEIEMDYSRNLEKLAEHFLAKTRSTKDQQFKKDQNVLSPVNCWNLLLNQVKWESRDHTTLSDIYLNNIIPRFVQVSEDSGRLFKKSKEVGQQLQDDLMKVLNELYRISAQSKLKEAEKQEEKQIGKSVKQEDRQTPRSPDSTANVRIEEKHVRRSSVKKIEKMKEKRQAKYTENKLKAIKARNEYLLALEATNASVFKYYIHDLSDLIDQCCDLGYHASLNRALRTFLSAELNLEQSKHEGLDAIENAVENLDATSDKQRLMEMYNNVFCPPMKFEFQPHMGDMASQLCAQQPVQSELVQRCQQLQSRLSTLKIENEEVKKTMEATLQTIQDIVTVEDFDVSDCFQYSNSMESVKSTVSETFMSKPSIAKRRANQQETEQFYFTVRECYGF

SEQ ID NO: 815590 - protein, 286 aa, Homo sapiens
RDVCTRVCLTASHTVLSDVVKSSSLSTFIPNPMTCVTSRSIHEDTALFYFTVRKVSNIIDMRQAKYTENKLKAIKARNEYLLALEATNASVFKYYIHDLSDLIDQCCDLGYHASLNRALRTFLSAELNLEQSKHEGLDAIENAVENLDATSDKQRLMEMYNNVFCPPMKFEFQPHMGDMASQLCAQQPVQSELVQRCQQLQSRLSTLKIENEEVKKTMEATLQTIQDIVTVEDFDVSDCFQYSNSMESVKSTVSETFMSKPSIAKRRANQQETEQFYFTVRECYGF

SEQ ID NO: 815591 - protein, 94 aa, Homo sapiens
SIVFLEPELPEALFSSLLSLPWSCRPYIDLPLPGSKQIPLPIPFMYCLVLEEAHTSWLWVLLQHRNHEPYTLNMGSFIASNGNSGTAKGTVSSF

SEQ ID NO: 815592 - protein, 485 aa, Homo sapiens; identical to SEQ ID NO: 815588

SEQ ID NO: 815593 - protein, 836 aa, Homo sapiens
MTSPAKFKKDKEIIAEYDTQVKEIRAQLTEQMKCLDQQCELRVQLLQDLQDFFRKKAEIEMDYSRNLEKLAEHFLAKTRSTKDQQFKKDQNVLSPVNCWNLLLNQVKWESRDHTTLSDIYLNNIIPRFVQVSEDSGRLFKKSKEVGQQLQDDLMKVLNELYSVMKTYHMYNADSISAQSKLKEAEKQEEKQIGKSVKQEDRQTPRSPDSTANVRIEEKHVRRSSVKKIEKMKEKRQAKYTENKLKAIKARNEYLLALEATNASVFKYYIHDLSDLIDQCCDLGYHASLNRALRTFLSAELNLEQSKHEGLDAIENAVENLDATSDKQRLMEMYNNVFCPPMKFEFQPHMGDMASQLCAQQPVQSELVQRCQQLQSRLSTLKIENEEVKKTMEATLQTIQDIVTVEDFDVSDCFQYSNSMESVKSTVSETFMSKPSIAKRRANQQETEQFYFTKMKEYLEGRNLITKLQAKHDLLQKTLGESQRTDCSLARRSSTVRKQDSSQAIPLVVESCIRFISRHGLQHEGIFRVSGSQVEVNDIKNAFERGEDPLAGDQNDHDMDSIAGVLKLYFRGLEHPLFPKDIFHDLMACVTMDNLQERALHIRKVLLVLPKTTLIIMRYLFAFLNHLSQFSEENMMDPYNLAICFGPSLMSVPEGHDQVSCQAHVNELIKTIIIQHENIFPSPRELEGPVYSRGGSMEDYCDSPHGETTSVEDSTQDVTAEHHTSDDECEPIEAIAKFDYVGRTARELSFKKGASLLLYQRASDDWWEGRHNGIDGLIPHQYIVVQDTEDGVVERSSPKSEIEVISEPPEEKVTARAGASCPSGGHVADIYLANINK

SEQ ID NO: 815594 - protein, 1341 aa, Homo sapiens
MRGMIGGGFFRGSINSQFEFGRKKENMTSPAKFKKDKEIIAEYDTQVKEIRAQLTEQMKCLDQQCELRVQLLQDLQDFFRKKAEIEMDYSRNLEKLAEHFLAKTRSTKDQQFKKDQNVLSPVNCWNLLLNQVKWESRDHTTLSDIYLNNIIPRFVQVSEDSGRLFKKSKEVGQQLQDDLMKVLNELYSVMKTYHMYNADSISAQSKLKEAEKQEEKQIGKSVKQEDRQTPRSPDSTANVRIEEKHVRRSSVKKIEKMKEKRQAKYTENKLKAIKARNEYLLALEATNASVFKYYIHDLSDLIDQCCDLGYHASLNRALRTFLSAELNLEQSKHEGLDAIENAVENLDATSDKQRLMEMYNNVFCPPMKFEFQPHMGDMASQLCAQQPVQSELVQRCQQLQSRLSTLKIENEEVKKTMEATLQTIQDIVTVEDFDVSDCFQYSNSMESVKSTVSETFMSKPSIAKRRANQQETEQFYFTKMKEYLEGRNLITKLQAKHDLLQKTLGESQRTDCSLARRSSTVRKQDSSQAIPLVVESCIRFISRHGLQHEGIFRVSGSQVEVNDIKNAFERGEDPLAGDQNDHDMDSIAGVLKLYFRGLEHPLFPKDIFHDLMACVTMDNLQERALHIRKVLLVLPKTTLIIMRYLFAFLNHLSQFSEENMMDPYNLAICFGPSLMSVPEGHDQVSCQAHVNELIKTIIIQHENIFPSPRELEGPVYSRGGSMEDYCDSPHGETTSVEDSTQDVTAEHHTSDDECEPIEAIAKFDYVGRTARELSFKKGASLLLYQRASDDWWEGRHNGIDGLIPHQYIVVQDTVDILSESAPSQPLPGSFCREILPLLIASQTWWQSVRGQDPPKFSIMTSPQDQEKMNCGGEGAFFVISSRGARRAVERPGTGLDALSGARGATTVCGGVLPRRRRLQSHHTVDCPYPAVLRTSADKPQPGLAASFSRRPPQHGLPRKQHGVEGRCLESRCPLATFPEELRSPQNSADYLFLFKRPFKGPEVSLPLLTELVQPGVAAASELCGVACMSGGHLADLTLLFCCCCFPSSLPACPFSPSEDGVVERSSPKSEIEVISEPPEEKVTARAGASCPSGGHVADIYLANINKQRKRPESGSIRKTFRSDSHGLSSSLTDSSSPGVGASCRPSSQPIMSQSLPKEGPDKCSISGHGSLNSISRHSSLKNRLDSPQIRKTATAGRSKSFNNHRPMDPEVIAQDIEATMNSALNELRELERQSSVKHTPDVVLDTLEPLKTSPVVAPTSEPSSPLHTQLLKDPEPAFQRSASTAGDIACAFRPVKSVKMAAPVKPPATRPKPTVFPKTNATSPGVNSSTSPQSTDKSCTV

SEQ ID NO: 815595 - protein, 816 aa, Homo sapiens
MRGMIGGGFFRGSINSQFEFGRKKENMTSPAKFKKDKEIIAEYDTQVKEIRAQLTEQMKCLDQQCELRVQLLQDLQDFFRKKAEIEMDYSRNLEKLAEHFLAKTRSTKDQQFKKDQNVLSPVNCWNLLLNQVKWESRDHTTLSDIYLNNIIPRFVQVSEDSGRLFKKSKEVGQQLQDDLMKVLNELYSVMKTYHMYNADSISAQSKLKEAEKQEEKQIGKSVKQEDRQTPRSPDSTANVRIEEKHVRRSSVKKIEKMKEKRQAKYTENKLKAIKARNEYLLALEATNASVFKYYIHDLSDLIDQCCDLGYHASLNRALRTFLSAELNLEQSKHEGLDAIENAVENLDATSDKQRLMEMYNNVFCPPMKFEFQPHMGDMASQLCAQQPVQSELVQRCQQLQSRLSTLKIENEEVKKTMEATLQTIQDIVTVEDFDVSDCFQYSNSMESVKSTVSETFMSKPSIAKRRANQQETEQFYFTKMKEYLEGRNLITKLQAKHDLLQKTLGESQRTDCSLARRSSTVRKQDSSQAIPLVVESCIRFISRHGLQHEGIFRVSGSQVEVNDIKNAFERGEDPLAGDQNDHDMDSIAGVLKLYFRGLEHPLFPKDIFHDLMACVTMDNLQERALHIRKVLLVLPKTTLIIMRYLFAFLNHLSQFSEENMMDPYNLAICFGPSLMSVPEGHDQVSCQAHVNELIKTIIIQHENIFPSPRELEGPVYSRGGSMEDYCDSPHGETTSVEDSTQDVTAEHHTSDDECEPIEAIAKFDYVGRTARELSFKKGASLLLYQRASDDWWEGRHNGIDGLIPHQYIVVQDTLIS

SEQ ID NO: 815596 - protein, 191 aa, Homo sapiens [sequence omitted]

SEQ ID NO: 815597 - protein, 105 aa, Homo sapiens
MVLSRGLGTDRRRVLLGRAHCKQLELRLHTVIFTPKSQKELAIQGLGRPAFLSYACRNQHDASKSPAPPLMAWILFLVWTLKGQSSGKRGGVGLLASQFRKQRSL

SEQ ID NO: 815598 - protein, 867 aa, Homo sapiens
MRGMIGGGFFRGSINSQFEFGRKKENMTSPAKFKKDKEIIAEYDTQVKEIRAQLTEQMKCLDQQCELRVQLLQDLQDFFRKKAEIEMDYSRNLEKLAEHFLAKTRSTKDQQFKKDQNVLSPVNCWNLLLNQVKWESRDHTTLSDIYLNNIIPRFVQVSEDSGRLFKKSKEVGQQLQDDLMKVLNELYSVMKTYHMYNADSISAQSKLKEAEKQEEKQIGKSVKQEDRQTPRSPDSTANVRIEEKHVRRSSVKKIEKMKEKRQAKYTENKLKAIKARNEYLLALEATNASVFKYYIHDLSDLIDQCCDLGYHASLNRALRTFLSAELNLEQSKHEGLDAIENAVENLDATSDKQRLMEMYNNVFCPPMKFEFQPHMGDMASQLCAQQPVQSELVQRCQQLQSRLSTLKIENEEVKKTMEATLQTIQDIVTVEDFDVSDCFQYSNSMESVKSTVSETFMSKPSIAKRRANQQETEQFYFTKMKEYLEGRNLITKLQAKHDLLQKTLGESQRTDCSLARRSSTVRKQDSSQAIPLVVESCIRFISRHGLQHEGIFRVSGSQVEVNDIKNAFERGEDPLAGDQNDHDMDSIAGVLKLYFRGLEHPLFPKDIFHDLMACVTMDNLQERALHIRKVLLVLPKTTLIIMRYLFAFLNHLSQFSEENMMDPYNLAICFGPSLMSVPEGHDQVSCQAHVNELIKTIIIQHENIFPSPRELEGPVYSRGGSMEDYCDSPHGETTSVEDSTQDVTAEHHTSDDECEPIEAIAKFDYVGRTARELSFKKGASLLLYQRASDDWWEGRHNGIDGLIPHQYIVVQDTEDGVVERSSPKSEIEVISEPPEEKVTARAGASCPSGGHVADIYLANINNFHCGC

SEQ ID NO: 815599 - protein, 816 aa, Homo sapiens; identical to SEQ ID NO: 815595

SEQ ID NO: 815600 - protein, 371 aa, Homo sapiens
MTSPAKFKKDKEIIAEYDTQVKEIRAQLTEQMKCLDQQCELRVQLLQDLQDFFRKKAEIEMDYSRNLEKLAEHFLAKTRSTKDQQFKKDQNVLSPVNCWNLLLNQVKWESRDHTTLSDIYLNNIIPRFVQVSEDSGRLFKKSKEVGQQLQDDLMKVLNELYSVMKTYHMYNADSISAQSKLKEAEKQEEKQIGKSVKQEDRQTPRSPDSTANVRIEEKHVRRSSVKKIEKMKEKRQAKYTENKLKAIKARNEYLLALEATNASVFKYYIHDLSDLIDQCCDLGYHASLNRALRTFLSAELNLEQSKHEGLDAIENAVENLDATSDKQRLMEMYNNVFCPPMKFEFQPHMGDMVRPFPYTPTLKGLEWSCLD

SEQ ID NO: 815601 - protein, 269 aa, Homo sapiens
MRGMIGGGFFRGSINSQFEFGRKKENMTSPAKFKKDKEIIAEYDTQVKEIRAQLTEQMKCLDQQCELRVQLLQDLQDFFRKKAEIEMDYSRNLEKLAEHFLAKTRSTKDQQFKKDQNVLSPVNCWNLLLNQVKWESRDHTTLSDIYLNNIIPRFVQVSEDSGRLFKKSKEVGQQLQDDLMKVLNELYSVMKTYHMYNADSISAQSKLKEAEKQEEKQIGKSVKQEDRQTPRSPDSTANVRIEEKHVRRSSVKKIEKMKEKMAQKRPACT

SEQ ID NO: 815602 - protein, 50 aa, Homo sapiens
MAKWGEGDPRWIVEERADATNVNNWHWTERDASNCLVRVRLRWATSVGYI

SEQ ID NO: 815603 - protein, 338 aa, Homo sapiens
MAKWGEGDPRWIVEERADATNVNNWHWTERDASNWSTDKLKTLFLAVQVQNEEGKCEVTEVSKLDGEASINNRKGKLIFFYEWSVKLNWTGTSKSGVQYKGHVEIPNLSDENSVDEVEISVSLAKDEPDTNLVALMKEEGVKLLREAMGIYISTLKTEFTQGMILPTMNGESVDPVGQPALKTEERKAKPAPSKTQARPVGVKIPTCKITLKETFLTSPEELYRVFTTQELVQAFTHAPATLEADRGGKFHMVDGNVSGEFTDLVPEKHIVMKWRFKSWPEGHFATITLTFIDKNGETELCMEGRGIPAPEEERTRQGWQRYYFEGIKQTFGYGARLF

SEQ ID NO: 815604 - protein, 338 aa, Homo sapiens; identical to SEQ ID NO: 815603

SEQ ID NO: 815605 - protein, 370 aa, Homo sapiens
KGRGRKPRLGTRPGWCCGYGCSGAGGAAIGEPMAKWGEGDPRWIVEERADATNVNNWHWTERDASNWSTDKLKTLFLAVQVQNEEGKCEVTEVSKLDGEASINNRKGKLIFFYEWSVKLNWTGTSKSGVQYKGHVEIPNLSDENSVDEVEISVSLAKDEPDTNLVALMKEEGVKLLREAMGIYISTLKTEFTQGMILPTMNGESVDPVGQPALKTEERKAKPAPSKTQARPVGVKIPTCKITLKETFLTSPEELYRVFTTQELVQAFTHAPATLEADRGGKFHMVDGNVSGEFTDLVPEKHIVMKWRFKSWPEGHFATITLTFIDKNGETELCMEGRGIPAPEEERTRQGWQRYYFEGIKQTFGYGARLF

SEQ ID NO: 815606 - protein, 338 aa, Homo sapiens; identical to SEQ ID NO: 815603

SEQ ID NO: 815607 - protein, 338 aa, Homo sapiens; identical to SEQ ID NO: 815603

SEQ ID NO: 815608 - protein, 338 aa, Homo sapiens; identical to SEQ ID NO: 815603

SEQ ID NO: 815609 - protein, 288 aa, Homo sapiens
MAKWGEGDPRWIVEERADATNVNNWHWTERDASNWSTDKLKTLFLAVQVQNEEGKCEVTEVSKLDGEASINNRKGKLIFFYEWSVKLNWTGTSKSGVQYKGHVEIPNLSDENSVDEVEISVSLAKDEPDTNLVALMKEEGVKLLREAMGIYISTLKTEFTQGMILPTMNGESVDPVGQPALKTEERKAKPAPSKTQARPVGVKIPTCKITLKETFLTSPEELYRVFTTQELVQAFTHAPATLEADRGGKFHMVDGNVSGEFTDLVPEKHIVMKWRFKSWPEGSHCHSG

SEQ ID NO: 815610 - protein, 336 aa, Homo sapiens
ALGEVQGDVLQQSLVGPLPHGFPGCHIEVALLTKARISSMTVRVSTLSQRAGACEVTEVSKLDGEASINNRKGKLIFFYEWSVKLNWTGTSKSGVQYKGHVEIPNLSDENSVDEVEISVSLAKDEPDTNLVALMKEEGVKLLREAMGIYISTLKTEFTQGMILPTMNGESVDPVGQPALKTEERKAKPAPSKTQARPVGVKIPTCKITLKETFLTSPEELYRVFTTQELVQAFTHAPATLEADRGGKFHMVDGNVSGEFTDLVPEKHIVMKWRFKSWPEGHFATITLTFIDKNGETELCMEGRGIPAPEEERTRQGWQRYYFEGIKQTFGYGARLF

SEQ ID NO: 815611 - protein, 288 aa, Homo sapiens; identical to SEQ ID NO: 815609

SEQ ID NO: 815612 - protein, 269 aa, Homo sapiens
KARYEAWLRMAEEWSVKLNWTGTSKSGVQYKGHVEIPNLSDENSVDEVEISVSLAKDEPDTNLVALMKEEGVKLLREAMGIYISTLKTEFTQGMILPTMNGESVDPVGQPALKTEERKAKPAPSKTQARPVGVKIPTCKITLKETFLTSPEELYRVFTTQELVQAFTHAPATLEADRGGKFHMVDGNVSGEFTDLVPEKHIVMKWRFKSWPEGHFATITLTFIDKNGETELCMEGRGIPAPEEERTRQGWQRYYFEGIKQTFGYGARLF

SEQ ID NO: 815613 - protein, 312 aa, Homo sapiens
MAKWGEGDPRWIVEERADATNVNNWHWTERDASNWSTDKLKTLFLAVQVQNEEGKCEVTEVSKLDGEASINNRKGKLIFFYEWSVKLNWTGTSKSGVQYKGHVEIPNLSDENSVDEVEISVSLAKDEPDTNLVALMKEEGVKLLREAMGIYISTLKTEFTQGMILPTMNGESVDPVGQPALKTEERKAKPAPSKTQARPVGVEVLVQAFTHAPATLEADRGGKFHMVDGNVSGEFTDLVPEKHIVMKWRFKSWPEGHFATITLTFIDKNGETELCMEGRGIPAPEEERTRQGWQRYYFEGIKQTFGYGARLF

SEQ ID NO: 815614 - protein, 267 aa, Homo sapiens
MAKWGEGDPRWIVEERADATNVNNWHWTERDASNWSTDKLKTLFLAVQVQNEEGKCEVTEVSKLDGEASINNRKGKLIFFYEWSVKLNWTGTSKSGVQYKGHVEIPNLSDENSVDEVEISVSLAKDEPDTNLVALMKEEGVKLLREAMGIYISTLKTEFTQGMILPTMNGESVDPVGQPALKTEERKAKPAPSKTQARPVGVKIPTCKITLKETFLTSPEELYRVFTTQERGGRGIPAPEEERTRQGWQRYYFEGIKQTFGYGARLF

SEQ ID NO: 815615 - protein, 176 aa, Homo sapiens [sequence omitted]

SEQ ID NO: 815616 - protein, 221 aa, Homo sapiens
MAKWGEGDPRWIVEERADATNVNNWHWTERDASNWSTDKLKTLFLAVQVQNEEGKCEVTEVSKLDGEASINNRKGKLIFFYEWSVKLNWTGTSKSGVQYKGHVEIPNLSDENSVDEVEISVSLAKDEPDTNLVALMKEEGVKLLREAMGIYISTLKTEFTQGMILPTMNGESVDPVGQPALKTEERKAKPVLSKPGQTVEFKSHGRIFLRKLLRYNEEINE

SEQ ID NO: 815617 - protein, 113 aa, Homo sapiens
VQASLELLGSSDPPASASQSAGITGACHHAHVILVEMEFHHVSQAGLELLTSGDPPTSACQSAGITGVSHHAQPGCPSLKLRWKPRYETSVPSAFPRTLCHHHLDLHRQERRD

SEQ ID NO: 815618 - protein, 157 aa, Homo sapiens
MAKWGEGDPRWIVEERADATNVNNWHWTERDASNWSTDKLKTLFLAVQVQNEEGKCEVTEVSKLDGEASINNRKGKLIFFYEWSVKLNWTGTSKSGVQYKGHVEIPNLSDENSVDEVELWRTLILGPAAGDSSLLDTSVQLSPDWGLRLTGLHRPSC

SEQ ID NO: 815619 - protein, 45 aa, Homo sapiens
MRVPLKLFTTYFSSFTQISVSLAKDEPDTNLVALMKEEGVKLLRE

SEQ ID NO: 815620 - protein, 825 aa, Homo sapiens
MGWLCSGLLFPVSCLVLLQVASSGNMKVLQEPTCVSDYMSISTCEWKMNGPTNCSTELRLLYQLVFLLSEAHTCIPENNGGAGCVCHLLMDDVVSADNYTLDLWAGQQLLWKGSFKPSEHVKPRAPGNLTVHTNVSDTLLLTWSNPYPPDNYLYNHLTYAVNIWSENDPADFRIYNVTYLEPSLRIAASTLKSGISYRARVRAWAQCYNTTWSEWSPSTKWHNSYREPFEQHLLLGVSVSCIVILAVCLLCYVSITKIKKEWWDQIPNPARSRLVAIIIQDAQGSQWEKRSRGQEPAKCPHWKNCLTKLLPCFLEHNMKRDEDPHKAAKEMPFQGSGKSAWCPVEISKTVLWPESISVVRCVELFEAPVECEEEEEVEEEKGSFCASPESSRDDFQEGREGIVARLTESLFLDLLGEENGGFCQQDMGESCLLPPSGSTSAHMPWDEFPSAGPKEAPPWGKEQPLHLEPSPPASPTQSPDNLTCTETPLVIAGNPAYRSFSNSLSQSPCPRELGPDPLLARHLEEVEPEMPCVPQLSEPTTVPQPEPETWEQILRRNVLQHGAAAAPVSAPTSGYQEFVHAVEQGGTQASAVVGLGPPGEAGYKAFSSLLASSAVSPEKCGFGASSGEEGYKPFQDLIPGCPGDPAPVPVPLFTFGLDREPPRSPQSSHLPSSSPEHLGLEPGEKVEDMPKPPLPQEQATDPLVDSLGSGIVYSALTCHLCGHLKQCHGQEDGGQTPVMASPCCGCCCGDRSSPPTTPLRAPDPSPGGVPLEASLCPASLAPSGISEKSKSSSSFHPAPGNAQSSSQTPKIVNFVSVGPTYMRVS

SEQ ID NO: 815621 - protein, 73 aa, Homo sapiens
RVDDEWSHHCSTELRCCTSWFFCSPSALASPNGVALLWAPVPCELPGPAAGGKLWTLQDAVWRKEEGGSQEVW

SEQ ID NO: 815622 - protein, 661 aa, Homo sapiens
MLPFLYQFRIYNVTYLEPSLRIAASTLKSGISYRARVRAWAQCYNTTWSEWSPSTKWHNSYREPFEQHLLLGVSVSCIVILAVCLLCYVSITKIKKEWWDQIPNPARSRLVAIIIQDAQGSQWEKRSRGQEPAKCPHWKNCLTKLLPCFLEHNMKRDEDPHKAAKEMPFQGSGKSAWCPVEISKTVLWPESISVVRCVELFEAPVECEEEEEVEEEKGSFCASPESSRDDFQEGREGIVARLTESLFLDLLGEENGGFCQQDMGESCLLPPSGSTSAHMPWDEFPSAGPKEAPPWGKEQPLHLEPSPPASPTQSPDNLTCTETPLVIAGNPAYRSFSNSLSQSPCPRELGPDPLLARHLEEVEPEMPCVPQLSEPTTVPQPEPETWEQILRRNVLQHGAAAAPVSAPTSGYQEFVHAVEQGGTQASAVVGLGPPGEAGYKAFSSLLASSAVSPEKCGFGASSGEEGYKPFQDLIPGCPGDPAPVPVPLFTFGLDREPPRSPQSSHLPSSSPEHLGLEPGEKVEDMPKPPLPQEQATDPLVDSLGSGIVYSALTCHLCGHLKQCHGQEDGGQTPVMASPCCGCCCGDRSSPPTTPLRAPDPSPGGVPLEASLCPASLAPSGISEKSKSSSSFHPAPGNAQSSSQTPKIVNFVSVGPTYMRVS

SEQ ID NO: 815623 - protein, 861 aa, Homo sapiens
PARRGPGKGHPGVPHFPLGRPDGEWSRGAQVPWHLPMGWLCSGLLFPVSCLVLLQVASSGNMKVLQEPTCVSDYMSISTCEWKMNGPTNCSTELRLLYQLVFLLSEAHTCIPENNGGAGCVCHLLMDDVVSADNYTLDLWAGQQLLWKGSFKPSEHVKPRAPGNLTVHTNVSDTLLLTWSNPYPPDNYLYNHLTYAVNIWSENDPADFRIYNVTYLEPSLRIAASTLKSGISYRARVRAWAQCYNTTWSEWSPSTKWHNSYREPFEQHLLLGVSVSCIVILAVCLLCYVSITKIKKEWWDQIPNPARSRLVAIIIQDAQGSQWEKRSRGQEPAKCPHWKNCLTKLLPCFLEHNMKRDEDPHKAAKEMPFQGSGKSAWCPVEISKTVLWPESISVVRCVELFEAPVECEEEEEVEEEKGSFCASPESSRDDFQEGREGIVARLTESLFLDLLGEENGGFCQQDMGESCLLPPSGSTSAHMPWDEFPSAGPKEAPPWGKEQPLHLEPSPPASPTQSPDNLTCTETPLVIAGNPAYRSFSNSLSQSPCPRELGPDPLLARHLEEVEPEMPCVPQLSEPTTVPQPEPETWEQILRRNVLQHGAAAAPVSAPTSGYQEFVHAVEQGGTQASAVVGLGPPGEAGYKAFSSLLASSAVSPEKCGFGASSGEEGYKPFQDLIPGCPGDPAPVPVPLFTFGLDREPPRSPQSSHLPSSSPEHLGLEPGEKVEDMPKPPLPQEQATDPLVDSLGSGIVYSALTCHLCGHLKQCHGQEDGGQTPVMASPCCGCCCGDRSSPPTTPLRAPDPSPGGVPLEASLCPASLAPSGISEKSKSSSSFHPAPGNAQSSSQTPKIVNFVSVGPTYMRVS

SEQ ID NO: 815624 - protein, 732 aa, Homo sapiens
MPISQHFGRPSPADHRRSGVRDQPGQHVKPRAPGNLTVHTNVSDTLLLTWSNPYPPDNYLYNHLTYAVNIWSENDPADFRIYNVTYLEPSLRIAASTLKSGISYRARVRAWAQCYNTTWSEWSPSTKWHNSYREPFEQHLLLGVSVSCIVILAVCLLCYVSITKIKKEWWDQIPNPARSRLVAIIIQDAQGSQWEKRSRGQEPAKCPHWKNCLTKLLPCFLEHNMKRDEDPHKAAKEMPFQGSGKSAWCPVEISKTVLWPESISVVRCVELFEAPVECEEEEEVEEEKGSFCASPESSRDDFQEGREGIVARLTESLFLDLLGEENGGFCQQDMGESCLLPPSGSTSAHMPWDEFPSAGPKEAPPWGKEQPLHLEPSPPASPTQSPDNLTCTETPLVIAGNPAYRSFSNSLSQSPCPRELGPDPLLARHLEEVEPEMPCVPQLSEPTTVPQPEPETWEQILRRNVLQHGAAAAPVSAPTSGYQEFVHAVEQGGTQASAVVGLGPPGEAGYKAFSSLLASSAVSPEKCGFGASSGEEGYKPFQDLIPGCPGDPAPVPVPLFTFGLDREPPRSPQSSHLPSSSPEHLGLEPGEKVEDMPKPPLPQEQATDPLVDSLGSGIVYSALTCHLCGHLKQCHGQEDGGQTPVMASPCCGCCCGDRSSPPTTPLRAPDPSPGGVPLEASLCPASLAPSGISEKSKSSSSFHPAPGNAQSSSQTPKIVNFVSVGPTYMRVS

SEQ ID NO: 815625 - protein, 810 aa, Homo sapiens
MQKDARREGNMKVLQEPTCVSDYMSISTCEWKMNGPTNCSTELRLLYQLVFLLSEAHTCIPENNGGAGCVCHLLMDDVVSADNYTLDLWAGQQLLWKGSFKPSEHVKPRAPGNLTVHTNVSDTLLLTWSNPYPPDNYLYNHLTYAVNIWSENDPADFRIYNVTYLEPSLRIAASTLKSGISYRARVRAWAQCYNTTWSEWSPSTKWHNSYREPFEQHLLLGVSVSCIVILAVCLLCYVSITKIKKEWWDQIPNPARSRLVAIIIQDAQGSQWEKRSRGQEPAKCPHWKNCLTKLLPCFLEHNMKRDEDPHKAAKEMPFQGSGKSAWCPVEISKTVLWPESISVVRCVELFEAPVECEEEEEVEEEKGSFCASPESSRDDFQEGREGIVARLTESLFLDLLGEENGGFCQQDMGESCLLPPSGSTSAHMPWDEFPSAGPKEAPPWGKEQPLHLEPSPPASPTQSPDNLTCTETPLVIAGNPAYRSFSNSLSQSPCPRELGPDPLLARHLEEVEPEMPCVPQLSEPTTVPQPEPETWEQILRRNVLQHGAAAAPVSAPTSGYQEFVHAVEQGGTQASAVVGLGPPGEAGYKAFSSLLASSAVSPEKCGFGASSGEEGYKPFQDLIPGCPGDPAPVPVPLFTFGLDREPPRSPQSSHLPSSSPEHLGLEPGEKVEDMPKPPLPQEQATDPLVDSLGSGIVYSALTCHLCGHLKQCHGQEDGGQTPVMASPCCGCCCGDRSSPPTTPLRAPDPSPGGVPLEASLCPASLAPSGISEKSKSSSSFHPAPGNAQSSSQTPKIVNFVSVGPTYMRVS

SEQ ID NO: 815626 - protein, 732 aa, Homo sapiens
MPIIPALWEAEPADHRRSGVRDQPGQHVKPRAPGNLTVHTNVSDTLLLTWSNPYPPDNYLYNHLTYAVNIWSENDPADFRIYNVTYLEPSLRIAASTLKSGISYRARVRAWAQCYNTTWSEWSPSTKWHNSYREPFEQHLLLGVSVSCIVILAVCLLCYVSITKIKKEWWDQIPNPARSRLVAIIIQDAQGSQWEKRSRGQEPAKCPHWKNCLTKLLPCFLEHNMKRDEDPHKAAKEMPFQGSGKSAWCPVEISKTVLWPESISVVRCVELFEAPVECEEEEEVEEEKGSFCASPESSRDDFQEGREGIVARLTESLFLDLLGEENGGFCQQDMGESCLLPPSGSTSAHMPWDEFPSAGPKEAPPWGKEQPLHLEPSPPASPTQSPDNLTCTETPLVIAGNPAYRSFSNSLSQSPCPRELGPDPLLARHLEEVEPEMPCVPQLSEPTTVPQPEPETWEQILRRNVLQHGAAAAPVSAPTSGYQEFVHAVEQGGTQASAVVGLGPPGEAGYKAFSSLLASSAVSPEKCGFGASSGEEGYKPFQDLIPGCPGDPAPVPVPLFTFGLDREPPRSPQSSHLPSSSPEHLGLEPGEKVEDMPKPPLPQEQATDPLVDSLGSGIVYSALTCHLCGHLKQCHGQEDGGQTPVMASPCCGCCCGDRSSPPTTPLRAPDPSPGGVPLEASLCPASLAPSGISEKSKSSSSFHPAPGNAQSSSQTPKIVNFVSVGPTYMRVS

SEQ ID NO: 815627 - protein, 661 aa, Homo sapiens; identical to SEQ ID NO: 815622

SEQ ID NO: 815628 - protein, 739 aa, Homo sapiens
MAGCGGSCLLSQHFGRPSPADHRRSGVRDQPGQHVKPRAPGNLTVHTNVSDTLLLTWSNPYPPDNYLYNHLTYAVNIWSENDPADFRIYNVTYLEPSLRIAASTLKSGISYRARVRAWAQCYNTTWSEWSPSTKWHNSYREPFEQHLLLGVSVSCIVILAVCLLCYVSITKIKKEWWDQIPNPARSRLVAIIIQDAQGSQWEKRSRGQEPAKCPHWKNCLTKLLPCFLEHNMKRDEDPHKAAKEMPFQGSGKSAWCPVEISKTVLWPESISVVRCVELFEAPVECEEEEEVEEEKGSFCASPESSRDDFQEGREGIVARLTESLFLDLLGEENGGFCQQDMGESCLLPPSGSTSAHMPWDEFPSAGPKEAPPWGKEQPLHLEPSPPASPTQSPDNLTCTETPLVIAGNPAYRSFSNSLSQSPCPRELGPDPLLARHLEEVEPEMPCVPQLSEPTTVPQPEPETWEQILRRNVLQHGAAAAPVSAPTSGYQEFVHAVEQGGTQASAVVGLGPPGEAGYKAFSSLLASSAVSPEKCGFGASSGEEGYKPFQDLIPGCPGDPAPVPVPLFTFGLDREPPRSPQSSHLPSSSPEHLGLEPGEKVEDMPKPPLPQEQATDPLVDSLGSGIVYSALTCHLCGHLKQCHGQEDGGQTPVMASPCCGCCCGDRSSPPTTPLRAPDPSPGGVPLEASLCPASLAPSGISEKSKSSSSFHPAPGNAQSSSQTPKIVNFVSVGPTYMRVS

SEQ ID NO: 815629 - protein, 294 aa, Homo sapiens
MLPFLYQFRIYNVTYLEPSLRIAASTLKSGISYRARVRAWAQCYNTTWSEWSPSTKWHNSYREPFEQHLLLGVSVSCIVILAVCLLCYVSITKIKKEWWDQIPNPARSRLVAIIIQDAQGSQWEKRSRGQEPAKCPHWKNCLTKLLPCFLEHNMKRDEDPHKAAKEMPFQGSGKSAWCPVEISKTVLWPESISVVRCVELFEAPVECEEEEEVEEEKGSFCASPESSRAGHQASAWKVWPKGSLAAALLLLLMDEFGDGAGDAAYQGPVLIEADAPIMIGIQVLDELIRSLQIK

SEQ ID NO: 815630 - protein, 317 aa, Homo sapiens
PARRGPGKGHPGVPHFPLGRPDGEWSRGAQVPWHLPMGWLCSGLLFPVSCLVLLQVASSGNMKVLQEPTCVSDYMSISTCEWKMNGPTNCSTELRLLYQLVFLLSEAHTCIPENNGGAGCVCHLLMDDVVSADNYTLDLWAGQQLLWKGSFKPSEHVKPRAPGNLTVHTNVSDTLLLTWSNPYPPDNYLYNHLTYAVNIWSENDPADFRIYNVTYLEPSLRIAASTLKSGISYRARVRAWAQCYNTTWSEWSPSTKWHNSYREPFEQHLLLGVSVSCIVILAVCLLCYVSITKIETEWRDQIPYAPPQPPRSRIIIR

SEQ ID NO: 815631 - protein, 265 aa, Homo sapiens
PARRGPGKGHPGVPHFPLGRPDGEWSRGAQVPWHLPMGWLCSGLLFPVSCLVLLQVASSGNMKVLQEPTCVSDYMSISTCEWKMNGPTNCSTELRLLYQLVFLLSEAHTCIPENNGGAGCVCHLLMDDVVSADNYTLDLWAGQQLLWKGSFKPSEHVKPRAPGNLTVHTNVSDTLLLTWSNPYPPDNYLYNHLTYAVNIWSENDPADFRIYNVTYLEPSLRIAASTLKSGISYRARVRAWAQCYNTTWSEWSPSTKWHNCEYQEA

SEQ ID NO: 815632 - protein, 131 aa, Homo sapiens [sequence omitted]

SEQ ID NO: 815633 - protein, 103 aa, Homo sapiens
MGWLCSGLLFPVSCLVLLQVASSGNMKVLQEPTCVSDYMSISTCEWKMNGPTNCSTELRCMAGGSSYAWNPQNKYAQPPCGPGNPDSRHKAPVTLHVGPDLRC

SEQ ID NO: 815634 - protein, 141 aa, Homo sapiens
MGWLCSGLLFPVSCLVLLQVASSGNMKVLQEPTCVSDYMSISTCEWKMNGPTNCSTELRLLYQLVFLLSEAHTCIPENNGGAGCVCHLLMDDVVSADNYTLDLWAGQQLLWKGSFKPSEHGEQGGVRQGWLGVFPQLPGLR

SEQ ID NO: 815635 - protein, 307 aa, Homo sapiens
ECTWHQHGGGGGGFQQALGRRADRNAARGLRGGVWVLRGDWSHGGVGACSGKEAPARWLEGALGMAESPAGGGASRFGRRRGLGFPGLPLARVNADPPLRDPSALPFFPSASFCSGVGASAPCALAQKLLCRLLQHRRKRRSTPLTSSTLPSQATEKSSYFQTTEISLWTVVAAIQAVEKKMESQAARLQSLEGRTGTAEKKLADCEKMAVEFGNQLEGKWAVLGTLLQEYGLLQRRLENVENLLRNRNFWILRLPPGSKGEAPKVSSVIGEIDGGLFPRSRTGRILDGMAEWNLNRHVDGQYTMRT

SEQ ID NO: 815636 - protein, 495 aa, Homo sapiens
MAESAPARHRRKRRSTPLTSSTLPSQATEKSSYFQTTEISLWTVVAAIQAVEKKMESQAARLQSLEGRTGTAEKKLADCEKMAVEFGNQLEGKWAVLGTLLQEYGLLQRRLENVENLLRNRNFWILRLPPGSKGEAPKVSRSLENDGVCFTEQEWENLEDWQKELYRNVMESNYETLVSLKVLGQTEGEAELGTEMLGDLEEEGPGGAHPAGGVMIKQELQYTQEGPADLPGEFSCIAEEQAFLSPEQTELWGGQGSSVLLETGPGDSTLEEPVGSRVPSSSRTVGCPKQKSHRQVQLDQECGQGLKLKKDTSRPYECSECEITFRYKQQLATHLRSHSGWGSCTPEEPEESLRPRPRLKPQTKKAKLHQCDVCLRSFSCKVSLVTHQRCHLQEGPSAGQHVQERFSPNSLVALPGHIPWRKSRSSLICGYCGKSFSHPSDLVRHQRIHTGERPYSCTECEKSFVQKQHLLQHQKIHQRERGGLALEPGRPNGLL

SEQ ID NO: 815637 - protein, 441 aa, Homo sapiens
MESQAARLQSLEGRTGTAEKKLADCEKMAVEFGNQLEGKWAVLGTLLQEYGLLQRRLENVENLLRNRNFWILRLPPGSKGEAPKVSRSLENDGVCFTEQEWENLEDWQKELYRNVMESNYETLVSLKVLGQTEGEAELGTEMLGDLEEEGPGGAHPAGGVMIKQELQYTQEGPADLPGEFSCIAEEQAFLSPEQTELWGGQGSSVLLETGPGDSTLEEPVGSRVPSSSRTVGCPKQKSHRQVQLDQECGQGLKLKKDTSRPYECSECEITFRYKQQLATHLRSHSGWGSCTPEEPEESLRPRPRLKPQTKKAKLHQCDVCLRSFSCKVSLVTHQRCHLQEGPSAGQHVQERFSPNSLVALPGHIPWRKSRSSLICGYCGKSFSHPSDLVRHQRIHTGERPYSCTECEKSFVQKQHLLQHQKIHQRERGGLALEPGRPNGLL

SEQ ID NO: 815638 - protein, 441 aa, Homo sapiens; identical to SEQ ID NO: 815637

SEQ ID NO: 815639 - protein, 346 aa, Homo sapiens
MEAELEDERKQRSMAVAARKKLEMDLKDLEAQVLGQTEGEAELGTEMLGDLEEEGPGGAHPAGGVMIKQELQYTQEGPADLPGEFSCIAEEQAFLSPEQTELWGGQGSSVLLETGPGDSTLEEPVGSRVPSSSRTVGCPKQKSHRQVQLDQECGQGLKLKKDTSRPYECSECEITFRYKQQLATHLRSHSGWGSCTPEEPEESLRPRPRLKPQTKKAKLHQCDVCLRSFSCKVSLVTHQRCHLQEGPSAGQHVQERFSPNSLVALPGHIPWRKSRSSLICGYCGKSFSHPSDLVRHQRIHTGERPYSCTECEKSFVQKQHLLQHQKIHQRERGGLALEPGRPNGLL

SEQ ID NO: 815640 - protein, 495 aa, Homo sapiens; identical to SEQ ID NO: 815636

SEQ ID NO: 815641 - protein, 213 aa, Homo sapiens
MIKQELQYTQEGPADLPGEFSCIAEEQAFLSPEQTELWGGQGSSVLLETGPGDSTLEEPVGSRVPSSSRTVGCPKQKSHRQVQLDQECGQGLKLKKDTSRPYECSECEITFRYKQQLATHLRSHSGWGSCTPEEPEESLRPRPRLKPQTKKAKLHQCDVCLRSFSCKVSLVTHQRCHLQEGPSAGQHVQERFSPNSLVALPGHIPWRKSRSSL

SEQ ID NO: 815642 - protein, 2663 aa, Homo sapiens
MAEEGAVAVCVRVRPLNSREESLGETAQVYWKTDNNVIYQVDGSKSFNFDRVFHGNETTKNVYEEIAAPIIDSAIQGYNGTIFAYGQTASGKTYTMMGSEDHLGVIPRAIHDIFQKIKKFPDREFLLRVSYMEIYNETITDLLCGTQKMKPLIIREDVNRNVYVADLTEEVVYTSEMALKWITKGEKSRHYGETKMNQRSSRSHTIFRMILESREKGEPSNCEGSVKVSHLNLVDLAGSERAAQTGAAGVRLKEGCNINRSLFILGQVIKKLSDGQVGGFINYRDSKLTRILQNSLGGNAKTRIICTITPVSFDETLTALQFASTAKYMKNTPYVNEVSTDEALLKRYRKEIMDLKKQLEEVSLETRAQAMEKDQLAQLLEEKDLLQKVQNEKIENLTRMLVTSSSLTLQQELKAKRKRRVTWCLGKINKMKNSNYADQFNIPTNITTKTHKLSINLLREIDESVCSESDVFSNTLDTLSEIEWNPATKLLNQENIESELNSLRADYDNLVLDYEQLRTEKEEMELKLKEKNDLDEFEALERKTKKDQEMQLIHEISNLKNLVKHREVYNQDLENELSSKVELLREKEDQIKKLQEYIDSQKLENIKMDLSYSLESIEDPKQMKQTLFDAETVALDAKRESAFLRSENLELKEKMKELATTYKQMENDIQLYQSQLEAKKKMQVDLEKELQSAFNEITKLTSLIDGKVPKDLLCNLELEGKITDLQKELNKEVEENEALREEVILLSELKSLPSEVERLRKEIQDKSEELHIITSEKDKLFSEVVHKESRVQGLLEEIGKTKDDLATTQSNYKSTDQEFQNFKTLHMDFEQKYKMVLEENERMNQEIVNLSKEAQKFDSSLGALKTELSYKTQELQEKTREVQERLNEMEQLKEQLENRDSPLQTVEREKTLITEKLQQTLEEVKTLTQEKDDLKQLQESLQIERDQLKSDIHDTVNMNIDTQEQLRNALESLKQHQETINTLKSKISEEVSRNLHMEENTGETKDEFQQKMVGIDKKQDLEAKNTQTLTADVKDNEIIEQQRKIFSLIQEKNELQQMLESVIAEKEQLKTDLKENIEMTIENQEELRLLGDELKKQQEIVAQEKNHAIKKEGELSRTCDRLAEVEEKLKEKSQQLQEKQQQLLNVQEEMSEMQKKINEIENLKNELKNKELTLEHMETERLELAQKLNENYEEVKSITKERKVLKELQKSFETERDHLRGYIREIEATGLQTKEELKIAHIHLKEHQETIDELRRSVSEKTAQIINTQDLEKSHTKLQEEIPVLHEEQELLPNVKKVSETQETMNELELLTEQSTTKDSTTLARIEMERLRLNEKFQESQEEIKSLTKERDNLKTIKEALEVKHDQLKEHIRETLAKIQESQSKQEQSLNMKEKDNETTKIVSEMEQFKPKDSALLRIEIEMLGLSKRLQESHDEMKSVAKEKDDLQRLQEVLQSESDQLKENIKEIVAKHLETEEELKVAHCCLKEQEETINELRVNLSEKETEISTIQKQLEAINDKLQNKIQEIYEKEEQFNIKQISEVQEKVNELKQFKEHRKAKDSALQSIESKMLELTNRLQESQEEIQIMIKEKEEMKRVQEALQIERDQLKENTKEIVAKMKESQEKEYQFLKMTAVNETQEKMCEIEHLKEQFETQKLNLENIETENIRLTQILHENLEEMRSVTKERDDLRSVEETLKVERDQLKENLRETITRDLEKQEELKIVHMHLKEHQETIDKLRGIVSEKTNEISNMQKDLEHSNDALKAQDLKIQEELRIAHMHLKEQQETIDKLRGIVSEKTDKLSNMQKDLENSNAKLQEKIQELKANEHQLITLKKDVNETQKKVSEMEQLKKQIKDQSLTLSKLEIENLNLAQKLHENLEEMKSVMKERDNLRRVEETLKLERDQLKESLQETKARDLEIQQELKTARMLSKEHKETVDKLREKISEKTIQISDIQKDLDKSKDELQKKIQELQKKELQLLRVKEDVNMSHKKINEMEQLKKQFEPNYLCKCEMDNFQLTKKLHESLEEIRIVAKERDELRRIKESLKMERDQFIATLREMIARDRQNHQVKPEKRLLSDGQQHLMESLREKCSRIKELLKRYSEMDDHYECLNRLSLDLEKEIEFQKELSRDKYVLSYVTKIKEEQHESINKFEMDFIDEVEKQKELLIKIQHLQQDCDVPSRELRDLKLNQNMDLHIEEILKDFSESEFPSIKTEFQQVLSNRKEMTQFLEEWLNTRFDIEKLKNGIQKENDRICQVNNFFNNRIIAIMNESTEFEERSATISKEWEQDLKSLKEKNEKLFKNYQTLKTSLASGAQVNPTTQDNKNPHVTSRATQLTTEKIRELENSLHEAKESAMHKESKIIKMQKELEVTNDIIAKLQAKVHESNKCLEKTKETIQVLQDKVALGAKPYKEEIEDLKMKLVKIDLEKMKNAKEFEKEISATKATVEYQKEVIRLLRENLRRSQQAQDTSVISEHTDPQPSNKPLTCGGGSGIVQNTKALILKSEHIRLEKEISKLKQQNEQLIKQKNELLSNNQHLSNEVKTWKERTLKREAHKQVTCENSPKSPKVTGTASKKKQITPSQCKERNLQDPVPKESPKSCFFDSRSKSLPSPHPVRYFDNSSLGLCPEVQNAGAESVDSQPGPWHASSGKDVPECKTQ

SEQ ID NO: 815643 - protein, 2663 aa, Homo sapiens; identical to SEQ ID NO: 815642

SEQ ID NO: 815644 - protein, 2562 aa, Homo sapiens
MAEEGAVAVCVRVRPLNSREESLGETAQVYWKTDNNVIYQVDGSKSFNFDRVFHGNETTKNVYEEIAAPIIDSAIQGYNGTIFAYGQTASGKTYTMMGSEDHLGVIPRAIHDIFQKIKKFPDREFLLRVSYMEIYNETITDLLCGTQKMKPLIIREDVNRNVYVADLTEEVVYTSEMALKWITKGEKSRHYGETKMNQRSSRSHTIFRMILESREKGEPSNCEGSVKVSHLNLVDLAGSERAAQTGAAGVRLKEGCNINRSLFILGQVIKKLSDGQVGGFINYRDSKLTRILQNSLGGNAKTRIICTITPVSFDETLTALQFASTAKYMKNTPYVNEVSTDEALLKRYRKEIMDLKKQLEEVSLETRAQAMEKDQLAQLLEEKDLLQKVQNEKIENLTRMLVTSSSLTLQQELKAKRKRRVTWCLGKINKMKNSNYADQFNIPTNITTKTHKLSINLLREIDESVCSESDVFSNTLDTLSEIEWNPATKLLNQENIESELNSLRADYDNLVLDYEQLRTEKEEMELKLKEKNDLDEFEALERKTKKDQENELSSKVELLREKEDQIKKLQEYIDSQKLENIKMDLSYSLESIEDPKQMKQTLFDAETVALDAKRESAFLRSENLELKEKMKELATTYKQMENDIQLYQSQLEAKKKMQVDLEKELQSAFNEITKLTSLIDGKVPKDLLCNLELEGKITDLQKELNKEVEENEALREEVILLSELKSLPSEVERLRKEIQDKSEELHIITSEKDKLFSEVVHKESRVQGLLEEIGKTKDDLATTQSNYKSTDQEFQNFKTLHMDFEQKYKMVLEENERMNQEIVNLSKEAQKFDSSLGALKTELSYKTQELQEKTREVQERLNEMEQLKEQLENRDSPLQTVEREKTLITEKLQQTLEEVKTLTQEKDDLKQLQESLQIERDQLKSDIHDTVNMNIDTQEQLRNALESLKQHQETINTLKSKISEEVSRNLHMEENTGETKDEFQQKMVGIDKKQDLEAKNTQTLTADVKDNEIIEQQRKIFSLIQEKNELQQMLESVIAEKEQLKTDLKENIEMTIENQEELRLLGDELKKQQEIVAQEKNHAIKKEGELSRTCDRLAEVEEKLKEKSQQLQEKQQQLLNVQEEMSEMQKKINEIENLKNELKNKELTLEHMETERLELAQKLNENYEEVKSITKERKVLKELQKSFETERDHLRGYIREIEATGLQTKEELKIAHIHLKEHQETIDELRRSVSEKTAQIINTQDLEKSHTKLQEEIPVLHEEQELLPNVKKVSETQETMNELELLTEQSTTKDSTTLARIEMERLRLNEKFQESQEEIKSLTKERDNLKTIKEALEVKHDQLKEHIRETLAKIQESQSKQEQSLNMKEKDNETTKIVSEMEQFKPKDSALLRIEIEMLGLSKRLQESHDEMKSVAKEKDDLQRLQEVLQSESDQLKENIKEIVAKHLETEEELKVAHCCLKEQEETINELRVNLSEKETEISTIQKQLEAINDKLQNKIQEIYEKEEQFNIKQISEVQEKVNELKQFKEHRKAKDSALQSIESKMLELTNRLQESQEEIQIMIKEKEEMKRVQEALQIERDQLKENTKEIVAKMKESQEKEYQFLKMTAVNETQEKMCEIEHLKEQFETQKLNLENIETENIRLTQILHENLEEMRSVTKERDDLRSVEETLKVERDQLKENLRETITRDLEKQEELKIVHMHLKEHQETIDKLRGIVSEKTNEISNMQKDLEHSNDALKAQDLKIQEELRIAHMHLKEQQETIDKLRGIVSEKTDKLSNMQKDLENSNAKLQEKIQELKANEHQLITLKKDVNETQKKVSEMEQLKKQIKDQSLTLSKLEIENLNLAQKLHENLEEMKSVMKERDNLRRVEETLKLERDQLKESLQETKARDLEIQQELKTARMLSKEHKETVDKLREKISEKTIQISDIQKDLDKSKDELQKKDRQNHQVKPEKRLLSDGQQHLMESLREKCSRIKELLKRYSEMDDHYECLNRLSLDLEKEIEFQKELSMKVKANLSLPYLQTKHIEKLFTANQRCSMEFHRIMKKLKKYVLSYVTKIMEKQKELLIKIQHLQQDCDVPSRELRDLKLNQNMDLHIEEILKDFSESEFPSIKTEFQQVLSNRKEMTQFLEEWLNTRFDIEKLKNGIQKENDRICQVNNFFNNRIIAIMNESTEFEERSATISKEWEQDLKSLKEKNEKLFKNYQTLKTSLASGAQVNPTTQDNKNPHVTSRATQLTTEKIRELENSLHEAKESAMHKESKIIKMQKELEVTNDIIAKLQAKVHESNKCLEKTKETIQVLQDKVALGAKPYKEEIEDLKMKLVKIDLEKMKNAKEFEKEISATKATVEYQKEVIRLLRENLRRSQQAQDTSVISEHTDPQPSNKPLTCGGGSGIVQNTKALILKSEHIRLEKEISKLKQQNEQLIKQKNELLSNNQHLSNEVKTWKERTLKREAHKQVTCENSPKSPKVTGTASKKKQITPSQCKERNLQDPVPKESPKSCFFDSRSKSLPSPHPVRYFDNSSLGLCPEVQNAGAESVDSQPGPWHASSGKDVPECKTQ

SEQ ID NO: 815645 - protein, 1149 aa, Homo sapiens
IIINPKYLERGVNYNKIDYNVSINLLEFPLIIKHLETEEELKVAHCCLKEQEETINELRVNLSEKETEISTIQKQLEAINDKLQNKIQEIYEKEEQFNIKQISEVQEKVNELKQFKEHRKAKDSALQSIESKMLELTNRLQESQEEIQIMIKEKEEMKRVQEALQIERDQLKENTKEIVAKMKESQEKEYQFLKMTAVNETQEKMCEIEHLKEQFETQKLNLENIETENIRLTQILHENLEEMRSVTKERDDLRSVEETLKVERDQLKENLRETITRDLEKQEELKIVHMHLKEHQETIDKLRGIVSEKTNEISNMQKDLEHSNDALKAQDLKIQEELRIAHMHLKEQQETIDKLRGIVSEKTDKLSNMQKDLENSNAKLQEKIQELKANEHQLITLKKDVNETQKKVSEMEQLKKQIKDQSLTLSKLEIENLNLAQKLHENLEEMKSVMKERDNLRRVEETLKLERDQLKESLQETKARDLEIQQELKTARMLSKEHKETVDKLREKISEKTIQISDIQKDLDKSKDELQKKDRQNHQVKPEKRLLSDGQQHLMESLREKCSRIKELLKRYSEMDDHYECLNRLSLDLEKEIEFQKELSMKVKANLSLPYLQTKHIEKLFTANQRCSMEFHRIMKKLKQYVLSYVTKIMEKQKELLIKIQHLQQDCDVPSRELRDLKLNQNMDLHIEEILKDFSESEFPSIKTEFQQVLSNRKEMTQFLEEWLNTRFDIEKLKNGIQKENDRICQVNNFFNNRIIAIMNESTEFEERSATISKEWEQDLKSLKEKNEKLFKNYQTLKTSLASGAQVNPTTQDNKNPHVTSRATQLTTEKIRELENSLHEAKESAMHKESKIIKMQKELEVTNDIIAKLQAKVHESNKCLEKTKETIQVLQDKVALGAKPYKEEIEDLKMKLVKIDLEKMKNAKEFEKEISATKATVEYQKEVIRLLRENLRRSQQAQDTSVISEHTDPQPSNKPLTCGGGSGIVQNTKALILKSEHIRLEKEISKLKQQNEQLIKQKNELLSNNQHLSNEVKTWKERTLKREAHKQVTCENSPKSPKVTGTASKKKQITPSQCKERNLQDPVPKESPKSCFFDSRSKSLPSPHPVRYFDNSSLGLCPEVQNAGAESVDSQPGPWHASSGKDVPECKTQ

SEQ ID NO: 815646 - protein, 2348 aa, Homo sapiens
MAEEGAVAVCVRVRPLNSREESLGETAQVYWKTDNNVIYQVDGSKSFNFDRVFHGNETTKNVYEEIAAPIIDSAIQGYNGTIFAYGQTASGKTYTMMGSEDHLGVIPRAIHDIFQKIKKFPDREFLLRVSYMEIYNETITDLLCGTQKMKPLIIREDVNRNVYVADLTEEVVYTSEMALKWITKGEKSRHYGETKMNQRSSRSHTIFRMILESREKGEPSNCEGSVKVSHLNLVDLAGSERAAQTGAAGVRLKEGCNINRSLFILGQVIKKLSDGQVGGFINYRDSKLTRILQNSLGGNAKTRIICTITPVSFDETLTALQFASTAKYMKNTPYVNEVSTDEALLKRYRKEIMDLKKQLEEVSLETRAQAMEKDQLAQLLEEKDLLQKVQNEKIENLTRMLVTSSSLTLQQELKAKRKRRVTWCLGKINKMKNSNYADQFNIPTNITTKTHKLSINLLREIDESVCSESDVFSNTLDTLSEIEWNPATKLLNQENIESELNSLRADYDNLVLDYEQLRTEKEEMELKLKEKNDLDEFEALERKTKKDQENELSSKVELLREKEDQIKKLQEYIDSQKLENIKMDLSYSLESIEDPKQMKQTLFDAETVALDAKRESAFLRSENLELKEKMKELATTYKQMENDIQLYQSQLEAKKKMQVDLEKELQSAFNEITKLTSLIDGKVPKDLLCNLELEGKITDLQKELNKEVEENEALREEVILLSELKSLPSEVERLRKEIQDKSEELHIITSEKDKLFSEVVHKESRVQGLLEEIGKTKDDLATTQSNYKSTDQEFQNFKTLHMDFEQKYKMVLEENERMNQEIVNLSKEAQKFDSSLGALKTELSYKTQELQEKTREVQERLNEMEQLKEQLENRDSPLQTVEREKTLITEKLQQTLEEVKTLTQEKDDLKQLQESLQIERDQLKSDIHDTVNMNIDTQEQLRNALESLKQHQETINTLKSKISEEVSRNLHMEENTGETKDEFQQKMVGIDKKQDLEAKNTQTLTADVKDNEIIEQQRKIFSLIQEKNELQQMLESVIAEKEQLKTDLKENIEMTIENQEELRLLGDELKKQQEIVAQEKNHAIKKEGELSRTCDRLAEVEEKLKEKSQQLQEKQQQLLNVQEEMSEMQKKINEIENLKNELKNKELTLEHMETERLELAQKLNENYEEVKSITKERKVLKELQKSFETERDHLRGYIREIEATGLQTKEELKIAHIHLKEHQETIDELRRSVSEKTAQIINTQDLEKSHTKLQEEIPVLHEEQELLPNVKKVSETQETMNELELLTEQSTTKDSTTLARIEMERLRLNEKFQESQEEIKSLTKERDNLKTIKEALEVKHDQLKEHIRETLAKIQESQSKQEQSLNMKEKDNETTKIVSEMEQFKPKDSALLRIEIEMLGLSKRLQESHDEMKSVAKEKDDLQRLQEVLQSESDQLKENIKEIVAKHLETEEELKVAHCCLKEQEETINELRVNLSEKETEISTIQKQLEAINDKLQNKIQEIYEKEEQFNIKQISEVQEKVNELKQFKEHRKAKDSALQSIESKMLELTNRLQESQEEIQIMIKEKEEMKRVQEALQIERDQLKENTKEIVAKMKESQEKEYQFLKMTAVNETQEKMCEIEHLKEQFETQKLNLENIETENIRLTQILHENLEEMRSVTKERDDLRSVEETLKVERDQLKENLRETITRDLEKQEELKIVHMHLKEHQETIDKLRGIVSEKTNEISNMQKDLEHSNDALKAQDLKIQEELRIAHMHLKEQQETIDKLRGIVSEKTDKLSNMQKDLENSNAKLQEKIQELKANEHQLITLKKDVNETQKKVSEMEQLKKQIKDQSLTLSKLEIENLNLAQKLHENLEEMKSVMKERDNLRRVEETLKLERDQLKESLQETKARDLEIQQELKTARMLSKEHKETVDKLREKISEKTIQISDIQKDLDKSKDELQKKDRQNHQVKPEKRLLSDGQQHLMESLREKCSRIKELLKRYSEMDDHYECLNRLSLDLEKEIEFQKELSMKVKANLSLPYLQTKHIEKLFTANQRCSMEFHRIMKKLKKYVLSYVTKIMEKQKELLIKIQHLQQDCDVPSRELRDLKLNQNMDLHIEEILKDFSESEFPSIKTEFQQVLSNRKEMTQFLEEWLNTRFDIEKLKNGIQKENDRICQVNNFFNNRIIAIMNESTEFEERSATISKEWEQDLKSLKEKNEKLFKNYQTLKTSLASGAQVNPTTQDNKNPHVTSRATQLTTEKIRELENSLHEAKESAMHKESKIIKMQKELEVTNDIIAKLQAKVHESNKCLEKTKETIQVLQDKVALGAKPYKEEIEDLKMKLVKIDLEKMKNAKEFEKEYVFVLI

SEQ ID NO: 815647 - protein, 320 aa, Homo sapiens
MAGLAARLVLLAGAAALASGSQGDREPVYRDCVLQCEEQNCSGGALNHFRSRQPIYMSLAGWTCRDDCKYECMWVTVGLYLQEGHKVPQFHGKWPFSRFLFFQEPASAVASFLNGLASLVMLCRYRTFVPASSPMYHTCVAFAWVSLNAWFWSTVFHTRDTDLTEKMDYFCASTVILHSIYLCCVRTVGLQHPAVVSAFRALLLLMLTVHVSYLSLIRFDYGYNLVANVAIGLVNVVWWLAWCLWNQRRLPHVRKCVVVVLLLQGLSLLELLDFPPLFWVLDAHAIWHISTIPVHVLFFSFLEDDSLYLLKESEDKFKLD

SEQ ID NO: 815648 - protein, 193 aa, Homo sapiens
  misc_feature (188)..(188): Xaa can be any naturally occurring amino acid
MAGLAARLVLLAGAAALASGSQGDREPVYRDCVLQCEEQNCSGGALNHFRSRQPIYMSLAGWTCRDDCKYECMWVTVGLYLQEGHKVPQFHGKWPFSRFLFFQEPASAVASFLNGLASLVMLCRYRTFVPASSPMYHTCVAFAWVSLNAWFWSTVFHTRDTDLTEKIYYFFSSTFILHSIYLFFFITXFLHHP

SEQ ID NO: 815649 - protein, 154 aa, Homo sapiens
MAGLAARLVLLAGAAALASGSQGDREPVYRDCVLQCEEQNCSGGALNHFRSRQPIYMSLAGWTCRDDCKYECMWVTVGLYLQEGHKVPQFHGKWPFSRFLFFQEPASAVASFLNGLASLVMLCRYRTFVPASSPMYHTCVAFAWMRKLRHSKAK

SEQ ID NO: 815650 - protein, 93 aa, Homo sapiens
LWSASSAQDATWADSQELSMARLPHVRKCVVVVLLLQGLSLLELLDFPPLFWVLDAHAIWHISTIPVHVLFFSFLEDDSLYLLKESEDKFKRG

SEQ ID NO: 815651 - protein, 233 aa, Homo sapiens
AASQGERMAGLAARLVLLAGAAALASGSQGDREPVYRDCVLQCEEQNCSGGALNHFRSRQPIYMSLAGWTCRDDCKYECMWVTVGLYLQEGHKVPQFHGKWPFSRFLFFQEPASAVASFLNGLASLVMLCRYRTFVPASSPMYHTCVAFAWVSLNAWFWSTVFHTRDTDLTEKMDYFCASTVILHSIYLCCVRPGQRGVVAGLVPVEPAAAASRAQVRGGGLAAAGAVPARAA

SEQ ID NO: 815652 - protein, 206 aa, Homo sapiens
MAGLAARLVLLAGAAALASGSQGDREPVYRDCVLQCEEQNCSGGALNHFRSRQPIYMSLAGWTCRDDCKYECMWVTVGLYLQEGHKVPQFHGKWPFSRFLFFQEPASAVASFLNGLASLVMLCRYRTFVPASSPMYHTCVAFAWVSLNAWFWSTVFHTRDTDLTEKMDYFCASTVILHSIYLCCVSFLEDDSLYLLKESEDKFKLD

SEQ ID NO: 815653 - protein, 165 aa, Homo sapiens
MHQCWGEEMLQGMLLWGWATCPLSNPGRWGRTVGLQHPAVVSAFRALLLLMLTVHVSYLSLIRFDYGYNLVANVAIGLVNVVWWLAWCLWNQRRLPHVRKCVVVVLLLQGLSLLELLDFPPLFWVLDAHAIWHISTIPVHVLFFSFLEDDSLYLLKESEDKFKLD

SEQ ID NO: 815654 - protein, 154 aa, Homo sapiens; identical to SEQ ID NO: 815649

SEQ ID NO: 815655 - protein, 117 aa, Homo sapiens
MRASSFLIVVVFLIAGTLVLEAAVTGVPVKGQDTVKGRVPFNGQDPVKGQVSVKGQDKVKAQEPVKGPVSTKPGSCPIILIRCAMLNPPNRCLKDTDCPGIKKCCEGSCGMACFVPQ

SEQ ID NO: 815656 - protein, 114 aa, Homo sapiens
FPVRKLEDPLIAGMLVLEAAVTGVPVKGQDTVKGRVPFNGQDPVKGQVSVKGQDKVKAQEPVKGPVSTKPGSCPIILIRCAMLNPPNRCLKDTDCPGIKKCCEGSCGMACFVPQ

SEQ ID NO: 815657 - protein, 117 aa, Homo sapiens; identical to SEQ ID NO: 815655

SEQ ID NO: 815658 - protein, 98 aa, Homo sapiens
GSFLLLTVPVKGQDTVKGRVPFNGQDPVKGQVSVKGQDKVKAQEPVKGPVSTKPGSCPIILIRCAMLNPPNRCLKDTDCPGIKKCCEGSCGMACFVPQ

SEQ ID NO: 815659 - protein, 117 aa, Homo sapiens; identical to SEQ ID NO: 815655

SEQ ID NO: 815660 - protein, 117 aa, Homo sapiens; identical to SEQ ID NO: 815655

SEQ ID NO: 815661 - protein, 67 aa, Homo sapiens
MDTGNSWPKKPWLDRGAFPPKKPRRPAFDKPDGVGQPGSHGARRTPARCGRKRRSGEQRHNRHDRHE

SEQ ID NO: 815662 - protein, 122 aa, Homo sapiens
MEEDQELERKAIEELLKEAKRGKTRAETMGPMGWMKCPLASTNKRFLINTIKNTLPSHKEQDHEQKEGDKEPAKSQAQKEENPKKHRSHPYKHSFRARGSASYSPPRKRSSQDKYEKRSNRR

SEQ ID NO: 815663 - protein, 133 aa, Homo sapiens
MEEDQELERKISGLKTSMAEGERKTALEMVQAAGTDRHCVTFVLHEEDHTLGNSLRYMIMKNPEVEFCGYTTTHPSESKINLRIQTRGTLPAVEPFQRGLNELMNVCQHVLDKFEASIKDYKDQKASRNESTF

SEQ ID NO: 815664 - protein, 133 aa, Homo sapiens; identical to SEQ ID NO: 815663

SEQ ID NO: 815665 - protein, 151 aa, Homo sapiens
PLAPGCPRRPPDSPAEAPLARCLRAPPAAAKSGTAGEGVNIQRNRGAGWGEARRTGGAGKQKRSCAGQLESGRVGASGEGTRRADSRGSAPEGAQRRPGRRELDGERAWAAKGCRGGGWAPGNKVENATASSPVKQIPPSTFVFCGDSSRT

SEQ ID NO: 815666 - protein, 151 aa, Homo sapiens; identical to SEQ ID NO: 815665

SEQ ID NO: 815667 - protein, 133 aa, Homo sapiens; identical to SEQ ID NO: 815663

SEQ ID NO: 815668 - protein, 122 aa, Homo sapiens; identical to SEQ ID NO: 815662

SEQ ID NO: 815669 - protein, 115 aa, Homo sapiens
MEEDQELERKISGLKTSMAEGERKTALEMVQAAGTDRHCVTFVLHEEDHTLGNSLRYMIMKNPEVEFCGYTTTHPSESQRGLNELMNVCQHVLDKFEASIKDYKDQKASRNESTF

SEQ ID NO: 815670 - protein, 3052 aa, Homo sapiens
MDLFDFFRDWDLEQQCHYEQDRSALKKREWERRNQEVQQEDDLFSSGFDLFGEPYKTNKGDALANRVQNTLGNYDEMKNLLTNHSNQNHLVGIPKNSVPQNPNNKNEPSFFPEQKNRIIPPHQDNTHPSAPMPPPSVVILNSTLIHSNRKSKPEWSRDSHNPSTVLASQASGQPNKMQTLTQDQSQAKLEDFFVYPAEQPQIGEVEESNPSAKEDSNPNSSGEDAFKEIFQSNSPEESEFAVQAPGSPLVASSLLAPSSGLSVQNFPPGLYCKTSMGQQKPTAYVRPMDGQDQAPDISPTLKPSIEFENSFGNLSFGTLLDGKPSAASSKTKLPKFTILQTSEVSLPSDPSCVEEILREMTHSWPTPLTSMHTAGHSEQSTFSIPGQESQHLTPGFTLQKWNDPTTRASTKSVSFKSMLEDDLKLSSDEDDLEPVKTLTTQCTATELYQAVEKAKPRNNPVNPPLATPQPPPAVQASGGSGSSSESESSSESDSDTESSTTDSESNEAPRVATPEPEPPSTNKWQLDKWLNKVTSQNKSFICGQNETPMETISLPPPIIQPMEVQMKVKTNASQVPAEPKERPLLSLIREKARPRPTQKIPETKALKHKLSTTSETVSQRTIGKKQPKKVEKNTSTDEFTWPKPNITSSTPKEKESVELHDPPRGRNKATAHKPAPRKEPRPNIPLAPEKKKYRGPGKIVPKSREFIETDSSTSDSNTDQEETLQIKVLPPCIISGGNTAKSKEICGASLTLSTLMSSSGSNNNLSISNEEPTFSPIPVMQTEILSPLRDHENLKNLWVKIDLDLLSRVPGHSSLHAAPAKPDHKETATKPKRQTAVTAVEKPAPKGKRKHKPIEVAEKIPEKKQRLEEATTICLLPPCISPAPPHKPPNTRENNSSRRANRRKEEKLFPPPLSPLPEDPPRRRNVSGNNGPFGQDKNIAMTGQITSTKPKRTEGKFCATFKGISVNEGDTPKKASSATITVTNTAIATATVTATAIVTTTVTATATATATTTTTTTTISTITSTITTGLMDSSHLEMTSWAALPLLSSSSTNVRRPKLTFDDSVHNADYYMQEAKKLKHKADALFEKFGKAVNYADAALSFTECGNAMERDPLEAKSPYTMYSETVELLRYAMRLKNFASPLASDGDKKLAVLCYRCLSLLYLRMFKLKKDHAMKYSRSLMEYFKQNASKVAQIPSPWVSNGKNTPSPVSLNNVSPINAMGNCNNGPVTIPQRIHHMAASHVNITSNVLRGYEHWDMADKLTRENKEFFGDLDTLMGPLTQHSSMTNLVRYVRQGLVGCASMPTCCSGCSQISSIIDPSLYLYQRTDGHWWNSTHWGTFSLVMFVFMLLLLSVKNRSHCKLTLQLKGSVRIYYLVIFFLLAFDMHFSDSTIFLCFMDDSPYNIVLSPHYPKQRMGSTCDKDRLLEMQQVVLHIHENLDTRDHPPNSTLIPRKEHISESVKLLCIPQIQSSGENFHCQNPLVRCCSNIIKSRVSRKEMSIAMLLLKRCYATQPEDFLVSIPFLIPYFVNFNDKKKEVTFILTSFRHQLASVFFNSIISSVNPHLGFSVCKAVLLKNSLVDACLSSQNAYTLDLQVGVKRGLESVQQGIHTSASFATTTFTQLVSGSITGRIFKLYFAQIYGNKSQGIIYLEVMIYSFLPSGLKIWTSSIIIHIFSLIGFLFSTFFFLLSVFPFPLFGSLTFDWITITPFIKVHIIVNHFHENFYENSKLSEIVANFYFFKMSRGECFTLRCFERALNIGNHSPNLETFLTGCDYPTYDPSHSFYVPKHHNVNIIFDVPAHQKILTLGVNTIHALLTGNYLLVYNSMEPLICWVIKFCSLSYDQINNRYAHEKMQTCVIIKASHAVSMIETAGDDSALSLSRLAISPVAKQPDLSCALVIFEFKAFCCIRLWKLYSNGCSHVVNMADGSIPAAEPSTFYAPTVVELYVYSLSNNTYASKHSQMNLKESFLSLLKEENDDNIKDSEHPRLVSHIKIKLMTLQCLKLSLYHGLPGRVPGYYYIMKPTGLTCKFNLNHNPDHHGFRSRFFLKSHIQKLDIRMLGSFPEKQAYCLMDERLVVLVSVTCYIYLHTTGRQEDSLSSLVTECKICAKFCSTVTKSDNLSSGSPLDYVVDSFIKQLRNKLNMEDELPSYPLDKTSFSFMIKDCCCFIVTLFITVYMVMRVVGVQLFEGLRDGDILSNESLQYTSLWEGYETCGWQGEIVPLDLDGGFGETHLNKHVEVRIEGREKEAPSEQVHQMISALQLDPGRATTTPSLVTQAPTTESLTSLCYDVGFGFVFLINFGFLVVLSYNCLSLVGRITLKRVYYVVLRVEFSCKHVVSQPVDCELLNNLIGKILVVLYLDDIIGKSRLAATTFKRLKVGMPFFPCKEMKRPKSSGKKQVAKLETIGKKCVLLSFQMDEFSFGHYITKFIRFCLHWKDTLLAYLSQRYLIWILFHANLHPGGGSWSLRLENIFEGRISGVVRVKPHILLNRHDKIHLHELAGGRTKLDHWVRLLSKAMNCLLREASLSPLRKMCGKMNSYTVSNEWVNSAPPNLILWGKIIEPVVSVLLHDWQTKFFIVVVIVVVVSHFHSHGLILIIKIYIHFLFSVSRLQQQKWHLCIHNQHLPWQETNQIGRSQTLILPSDIFGEGKSINSLSILLLRNIEALFTKIITFYSVIYQLKENCMKPHKARLQFLPLFASDMRCERIIHSAHIGLGDTELLFRSMISHHSSKRLELCCFINCAVRLMVFNKNHSKFQTLLPVTSILLALDLYQTLRREGGSEGSLRPGPWQDAAVASSSSPACQQLLVSSSMQTSCGKPPEEVPQLMLSAGNSLFLLGNSLFSSLCSRKPAVIFGGNFRCFTFLVLSCITHVATKVSLRIEPNVVTMGVKCTPDAQALLWFCSVYEIGRKETLDSKQNWRHSNEAKLMPCCPEQDLASHLVSLACNQWCAGKMFNNQLLRIESTWFAPFANFHGINTTTLDDFKLPTVMSLNTWLERDARSWLLQAWAKMLQHATGCSQSEGSYLIYVFMWTHTDTHTQTHPYTHTSMTKTIT

SEQ ID NO: 815671 - protein, 427 aa, Homo sapiens
MDLFDFFRDWDLEQQCHYEQDRSALKKREWERRNQEVQQEDDLFSSGFDLFGEPYKTNKGDALANRVQNTLGNYDEMKNLLTNHSNQNHLVGIPKNSVPQNPNNKNEPSFFPEQKNRIIPPHQDNTHPSAPMPPPSVVILNSTLIHSNRKSKPEWSRDSHNPSTVLASQASGQPNKMQTLTQDQSQAKLEDFFVYPAEQPQIGEVEESNPSAKEDSNPNSSGEDAFKEIFQSNSPEESEFAVQAPGSPLVASSLLAPSSGLSVQNFPPGLYCKTSMGQQKPTAYVRPMDGQDQAPDISPTLKPSIEFENSFGNLSFGTLLDGKPSAASSKTKLPKFTILQTSEVSLPSDPSCVEEILRESQHLTPGFTLQKWNDPTTRASTKMLEDDLKLSSDEDDLEPVKTLTTQCTATELYQAVEKAKPRNNPVK

SEQ ID NO: 815672 - protein, 703 aa, Homo sapiens
MINKNEMCPDLKHAPWKGMLYYEIVIIYTALLHGSINISLLNSFVQLYNFVEQCFDLGYIILEQVEWLQADETVLYQDFSINFVGGLAITNIFRCFCNHYKYEKNLFKKFPIVLQSRLFRFIFFFSFLLFLFHYFSMGGLLSLTEENFDCNGLSLSPPLSLSPLFFPPSLCPSPLIKILKSGVFDEICIRPGYMLGMKSGQISMGFQRMLHVHWALSHPTVINEKDRGSFFKKSTLIISSETYMQFNKLTPPIFPVGKLTETCKIPLRVVRGVFCLVYSVCVCFVSNRHIHVIVYSYEVFPNIPISLYIRIRKIIPTCCKRRCDSITFLFFLEKKGHFHAYFKQKFCIFKCHRKYLLSNWDTNGNLIVIICFVCGDAYQHHVAGPLWQAITAQRVHIVSVCVCVCVRARTCVCVSLHVQTCLACCPSWDFSFPFLKNIILQFQEALVTLLYEGSDFEMKIPFLLEALVIISWFNETDSTGLCDEKGSVKIQLSFQEEIVVGQDAMRGKMEATSAGEHELSEPSVLKLTCSKLQSKTLGPVPGLCSLPSKKRSRTIRNSLPGSYEENFLTSCPQRKTLSPRAPQVAIKIVMIIQKVPPWLYENPISLLNHLFLGADFQHSCSLQIHQLSLFLTSMLVLSEFQKFQFPVQTRVNCSKINQLMKCYLVFKSWFHVLYVYKTISACVALHFKCVAHKRFVGALFSVQ

SEQ ID NO: 815673 - protein, 3023 aa, Homo sapiens
MDLFDFFRDWDLEQQCHYEQDRSALKKREWERRNQEVQQEDDLFSSGFDLFGEPYKTNKGDALANRVQNTLGNYDEMKNLLTNHSNQNHLVGIPKNSVPQNPNNKNEPSFFPEQKNRIIPPHQDNTHPSAPMPPPSVVILNSTLIHSNRKSKPEWSRDSHNPSTVLASQASGQPNKMQTLTQDQSQAKLEDFFVYPAEQPQIGEVEESNPSAKEDSNPNSSGEDAFKEIFQSNSPEESEFAVQAPGSPLVASSLLAPSSGLSVQNFPPGLYCKTSMGQQKPTAYVRPMDGQDQAPDISPTLKPSIEFENSFGNLSFGTLLDGKPSAASSKTKLPKFTILQTSEVSLPSDPSCVEEILRESQHLTPGFTLQKWNDPTTRASTKSVSFKSMLEDDLKLSSDEDDLEPVKTLTTQCTATELYQAVEKAKPRNNPVNPPLATPQPPPAVQASGGSGSSSESESSSESDSDTESSTTDSESNEAPRVATPEPEPPSTNKWQLDKWLNKVTSQNKSFICGQNETPMETISLPPPIIQPMEVQMKVKTNASQVPAEPKERPLLSLIREKARPRPTQKIPETKALKHKLSTTSETVSQRTIGKKQPKKVEKNTSTDEFTWPKPNITSSTPKEKESVELHDPPRGRNKATAHKPAPRKEPRPNIPLAPEKKKYRGPGKIVPKSREFIETDSSTSDSNTDQEETLQIKVLPPCIISGGNTAKSKEICGASLTLSTLMSSSGSNNNLSISNEEPTFSPIPVMQTEILSPLRDHENLKNLWVKIDLDLLSRVPGHSSLHAAPAKPDHKETATKPKRQTAVTAVEKPAPKGKRKHKPIEVAEKIPEKKQRLEEATTICLLPPCISPAPPHKPPNTRENNSSRRANRRKEEKLFPPPLSPLPEDPPRRRNVSGNNGPFGQDKNIAMTGQITSTKPKRTEGKFCATFKGISVNEGDTPKKASSATITVTNTAIATATVTATAIVTTTVTATATATATTTTTTTTISTITSTITTGLMDSSHLEMTSWAALPLLSSSSTNVRRPKLTFDDSVHNADYYMQEAKKLKHKADALFEKFGKAVNYADAALSFTECGNAMERDPLEAKSPYTMYSETVELLRYAMRLKNFASPLASDGDKKLAVLCYRCLSLLYLRMFKLKKDHAMKYSRSLMEYFKQNASKVAQIPSPWVSNGKNTPSPVSLNNVSPINAMGNCNNGPVTIPQRIHHMAASHVNITSNVLRGYEHWDMADKLTRENKEFFGDLDTLMGPLTQHSSMTNLVRYVRQGLVGCASMPTCCSGCSQISSIIDPSLYLYQRTDGHWWNSTHWGTFSLVMFVFMLLLLSVKNRSHCKLTLQLKGSVRIYYLVIFFLLAFDMHFSDSTIFLCFMDDSPYNIVLSPHYPKQRMGSTCDKDRLLEMQQVVLHIHENLDTRDHPPNSTLIPRKEHISESVKLLCIPQIQSSGENFHCQNPLVRCCSNIIKSRVSRKEMSIAMLLLKRCYATQPEDFLVSIPFLIPYFVNFNDKKKEVTFILTSFRHQLASVFFNSIISSVNPHLGFSVCKAVLLKNSLVDACLSSQNAYTLDLQVGVKRGLESVQQGIHTSASFATTTFTQLVSGSITGRIFKLYFAQIYGNKSQGIIYLEVMIYSFLPSGLKIWTSSIIIHIFSLIGFLFSTFFFLLSVFPFPLFGSLTFDWITITPFIKVHIIVNHFHENFYENSKLSEIVANFYFFKMSRGECFTLRCFERALNIGNHSPNLETFLTGCDYPTYDPSHSFYVPKHHNVNIIFDVPAHQKILTLGVNTIHALLTGNYLLVYNSMEPLICWVIKFCSLSYDQINNRYAHEKMQTCVIIKASHAVSMIETAGDDSALSLSRLAISPVAKQPDLSCALVIFEFKAFCCIRLWKLYSNGCSHVVNMADGSIPAAEPSTFYAPTVVELYVYSLSNNTYASKHSQMNLKESFLSLLKEENDDNIKDSEHPRLVSHIKIKLMTLQGLKLSLYHGLPGRVPGYYYIMKPTGLTCKFNLNHNPDHHGFRSRFFLKSHIQKLDIRMLGSFPEKQAYCLMDERLVVLVSVTCYIYLHTTGRQEDSLSSLVTECKICAKFCSTVTKSDNLSSGSPLDYVVDSFIKQLRNKLNMEDELPSYPLDKTSFSFMIKDCCCFIVTLFITVEMVMRVVGVQLFEGLRDGDILSNESLQYTSLWEGYETCGWQGEIVPLDLDGGFGETHLNKHVEVRIEGREKEAPSEQVHQMISALQLDPGRATTTPSLVTQAPTTESLTSLCYDVGFGFVFLINFGFLVVLSYNCLSLVGRITLKRVYYVVLRVEFSCKHVVSQPVDCELLNNLIGKILVVLYLDDIIGKSRLAATTFKRLKVGMPFFPCKEMKRPKSSGKKQVAKLETIGKKCVLLSFQMDEFSFGHYITKFIRFCLHWKDTLLAYLSQRYLIWILFHANLHPGGGSWSLRLENIFEGRISGVVRVKPHILLNRHDKIHLHELAGGRTKLDHWVRLLSKAMNCLLREASLSPLRKMCGKMNSYTVSNEWVNSAPPNLILWGKIIEPVVSVLLHDWQTKFFIVVVIVVVVSHFHSHGLILIIKIYIHFLFSVSRLQQQKWHLCIHNQHLPWQETNQIGRSQTLILPSDIFGEGKSINSLSILLLRNIEALFTKIITFYSVIYQLKENCMKPHKARLQFLPLFASDMRCERIIHSAHIGLGDTELLFRSMISHHSSKRLELCCFINCAVRLMVFNKNHSKFQTLLPVTSILLALDLYQTLRREGGSEGSLRPGPGQDAAVASSSSPACQQLLVSSSMQTSCGKPPEEVPQLMLSAGNSLFLLGNSLFSSLCSRKPAVIFGGNFRCFTFLVLSCITHVATKVSLRIEPNVVTMGVKCTPDAQALLWFCSVYEIGRKETLDSKQNWRHSNEAKLMPCCPEQDLASHLVSLACNQWCAGKMFNNQLLRIESTWFAPFANFHGINTTTLDDFKLPTVMSLNTWLERDARSWLLQAWAKMLQHATGCSQSEGSYLIYVFMWTHTDTHTQTHPYTHTSMTKTIT

SEQ ID NO: 815674 - protein, 3017 aa, Homo sapiens
MDLFDFFRDWDLEQQCHYEQDRSALKKREWERRNQEVQQEDDLFSSGFDLFGEPYKTNKGDALANRVQNTLGNYDEMKNLLTNHSNQNHLVGIPKNSVPQNPNNKNEPSFFPEQKNRIIPPHQDNTHPSAPMPPPSVVILNSTLIHSNRKSKPEWSRDSHNPSTVLASQASGQPNKMQTLTQDQSQAKLEDFFVYPAEQPQIGEVEESNPSAKEDSNPNSSGEDAFKEIFQSNSPEESEFAVQAPGSPLVASSLLAPSSGLSVQNFPPGLYCKTSMGQQKPTAYVRPMDGQDQAPDISPTLKPSIEFENSFGNLSFGTLLDGKPSAASSKTKLPKFTILQTSEVSLPSDPSCVEEILRESQHLTPGFTLQKWNDPTTRASTKMLEDDLKLSSDEDDLEPVKTLTTQCTATELYQAVEKAKPRNNPVNPPLATPQPPPAVQASGGSGSSSESESSSESDSDTESSTTDSESNEAPRVATPEPEPPSTNKWQLDKWLNKVTSQNKSFICGQNETPMETISLPPPIIQPMEVQMKVKTNASQVPAEPKERPLLSLIREKARPRPTQKIPETKALKHKLSTTSETVSQRTIGKKQPKKVEKNTSTDEFTWPKPNITSSTPKEKESVELHDPPRGRNKATAHKPAPRKEPRPNIPLAPEKKKYRGPGKIVPKSREFIETDSSTSDSNTDQEETLQIKVLPPCIISGGNTAKSKEICGASLTLSTLMSSSGSNNNLSISNEEPTFSPIPVMQTEILSPLRDHENLKNLWVKIDLDLLSRVPGHSSLHAAPAKPDHKETATKPKRQTAVTAVEKPAPKGKRKHKPIEVAEKIPEKKQRLEEATTICLLPPCISPAPPHKPPNTRENNSSRRANRRKEEKLFPPPLSPLPEDPPRRRNVSGNNGPFGQDKNIAMTGQITSTKPKRTEGKFCATFKGISVNEGDTPKKASSATITVTNTAIATATVTATAIVTTTVTATATATATTTTTTTTISTITSTITTGLMDSSHLEMTSWAALPLLSSSSTNVRRPKLTFDDSVHNADYYMQEAKKLKHKADALFEKFGKAVNYADAALSFTECGNAMERDPLEAKSPYTMYSETVELLRYAMRLKNFASPLASDGDKKLAVLCYRCLSLLYLRMFKLKKDHAMKYSRSLMEYFKQNASKVAQIPSPWVSNGKNTPSPVSLNNVSPINAMGNCNNGPVTIPQRIHHMAASHVNITSNVLRGYEHWDMADKLTRENKEFFGDLDTLMGPLTQHSSMTNLVRYVRQGLVGCASMPTCCSGCSQISSIIDPSLYLYQRTDGHWWNSTHWGTFSLVMFVFMLLLLSVKNRSHCKLTLQLKGSVRIYYLVIFFLLAFDMHFSDSTIFLCFMDDSPYNIVLSPHYPKQRMGSTCDKDRLLEMQQVVLHIHENLDTRDHPPNSTLIPRKEHISESVKLLCIPQIQSSGENFHCQNPLVRCCSNIIKSRVSRKEMSIAMLLLKRCYATQPEDFLVSIPFLIPYFVNFNDKKKEVTFILTSFRHQLASVFFNSIISSVNPHLGFSVCKAVLLKNSLVDACLSSQNAYTLDLQVGVKRGLESVQQGIHTSASFATTTFTQLVSGSITGRIFKLYFAQIYGNKSQGIIYLEVMIYSFLPSGLKIWTSSIIIHIFSLIGFLFSTFFFLLSVFPFPLFGSLTFDWITITPFIKVHIIVNHFHENFYENSKLSEIVANFYFFKMSRGECFTLRCFERALNIGNHSPNLETFLTGCDYPPYDPSHSFYVPKHHNVNIIFDVPAHQKILTLGVNTIHALLTGNYLLVYNSMEPLICWVIKFCSLSYDQINNRYAHEKMQTCVIIKASHAVSMIETAGDDSALSLSRLAISPVAKQPDLSCALVIFEFKAFCCIRLWKLYSNGCSHVVNMADGSIPAAEPSTFYAPTVVELYVYSLSNNTYASKHSQMNLKESFLSLLKEENDDNIKDSEHPRLVSHIKIKLMTLQGLKLSLYHGLPGRVPGYYYIMKPTGLTCKFNLNHNPDHHGFRSRFFLKSHIQKLDIRMLGSFPEKQAYCLMDERLVVLVSVTCYIYLHTTGRQEDSLSSLVTECKICAKFCSTVTKSDNLSSGSPLDYVVDSFIKQLRNKLNMEDELPSYPLDKTSFSFMIKDCCCFIVTLFITVYMVMRVVGVQLFEGLRDGDILSNESLQYTSLWEGYETCGWQGEIVPLDLDGGFGETHLNKHVEVRIEGREKEAPSEQVHQMISALQLDPGRATTTPSLVTQAPTTESLTSLCYDVGFGFVFLINFGFLVVLSYNCLSLVGRITLKRVYYVVLRVEFSCKHVVSQPVDCELLNNLIGKILVVLYLDDIIGKSRLAATTFKRLKVGMPFFPCKEMKRPKSSGKKQVAKLETIGKKCVLLSFQMDEFSFGHYITKFIRFCLHWKDTLLAYLSQRYLIWILFHANLHPGGGSWSLRLENIFEGRISGVVRVKPHILLNRHDKIHLHELAGGRTKLDHWVRLLSKAMNCLLREASLSPLRKMCGKMNSYTVSNEWVNSAPPNLILWGKIIEPVVSVLLHDWQTKFFIVVVIVVVVSHFHSHGLILIIKIYIHFLFSVSRLQQQKWHLCIHNQHLPWQETNQIGRSQTLILPSDIFGEGKSINSLSILLLRNIEALFTKIITFYSVIYQLKENCMKPHKARLQFLPLFASDMRCERIIHSAHIGLGDTELLFRSMISHHSSKRLELCCFINCAVRLMVFNKNHSKFQTLLPVTSILLACDLYQTLRREGGSEGSLRPGPWQDAAVASSSSPACQQLLVSSSMQTSCGKPPEEVPQLMLSAGNSLFLLGNSLFSSLCSRKPAVIFGGNFRCFTFLVLSCITHVATKVSLRIEPNVVTMGVKCTPDAQALLWFCSVYEIGRKETLDSKQNWRHSNEAKLMPCCPEQDLASHLVSLACNQWCAGKMFNNQLLRIESTWFAPFANFHGINTTTLDDFKLPTVMSLNTWLERDARSWLLQAWAKMLQHATGCSQSEGSYLIYVFMWTHTDTHTQTHPYTHTSMTKTIT

SEQ ID NO: 815675 - protein, 3054 aa, Homo sapiens
EPTAYVRPTDGQDQAPDISPTLKPSIEFENSFGNLHLEHSWMENPVHPVQKTKLPKFTILQTSETNKGDALANRVQNTLGNYDEMKNLLTNHSNQNHLVGIPKNSVPQNPNNKNEPSFFPEQKNRIIPPHQDNTHPSAPMPPPSVVILNSTLIHSNRKSKPEWSRDSHNPSTVLASQASGQPNKMQTLTQDQSQAKLEDFFVYPAEQPQIGEVEESNPSAKEDSNPNSSGEDAFKEIFQSNSPEESEFAVQAPGSPLVASSLLAPSSGLSVQNFPPGLYCKTSMGQQKPTAYVRPMDGQDQAPDISPTLKPSIEFENSFGNLSFGTLLDGKPSAASSKTKLPKFTILQTSEVSLPSDPSCVEEILREMTHSWPTPLTSMHTAGHSEQSTFSIPGQESQHLTPGFTLQKWNDPTTRASTKMLEDDLKLSSDEDDLEPVKTLTTQCTATELYQAVEKAKPRNNPVNPPLATPQPPPAVQASGGSGSSSESESSSESDSDTESSTTDSESNEAPRVATPEPEPPSTNKWQLDKWLNKVTSQNKSFICGQNETPMETISLPPPIIQPMEVQMKVKTNASQVPAEPKERPLLSLIREKARPRPTQKIPETKALKHKLSTTSETVSQRTIGKKQPKKVEKNTSTDEFTWPKPNITSSTPKEKESVELHDPPRGRNKATAHKPAPRKEPRPNIPLAPEKKKYRGPGKIVPKSREFIETDSSTSDSNTDQEETLQIKVLPPCIISGGNTAKSKEICGASLTLSTLMSSSGSNNNLSISNEEPTFSPIPVMQTEILSPLRDHENLKNLWVKIDLDLLSRVPGHSSLHAAPAKPDHKETATKPKRQTAVTAVEKPAPKGKRKHKPIEVAEKIPEKKQRLEEATTICLLPPCISPAPPHKPPNTRENNSSRRANRRKEEKLFPPPLSPLPEDPPRRRNVSGNNGPFGQDKNIAMTGQITSTKPKRTEGKFCATFKGISVNEGDTPKKASSATITVTNTAIATATVTATAIVTTTVTATATATATTTTTTTTISTITSTITTGLMDSSHLEMTSWAALPLLSSSSTNVRRPKLTFDDSVHNADYYMQEAKKLKHKADALFEKFGKAVNYADAALSFTECGNAMERDPLEAKSPYTMYSETVELLRYAMRLKNFASPLASDGDKKLAVLCYRCLSLLYLRMFKLKKDHAMKYSRSLMEYFKQNASKVAQIPSPWVSNGKNTPSPVSLNNVSPINAMGNCNNGPVTIPQRIHHMAASHVNITSNVLRGYEHWDMADKLTRENKEFFGDLDTLMGPLTQHSSMTILSATFAKDCVGCASMPTCCSGCSQISSIIDPSLYLYQRTDGHWWNSTHWGTFSLVMFVFMLLLLSVKNRSHCKLTLQLKGSVRIYYLVIFFLLAFDMHFSDSTIFLCFMDDSPYNIVLSPHYPKQRMGSTCDKDRLLEMQQVVLHIHENLDTRDHPPNSTLIPRKEHISESVKLLCIPQIQSSGENFHCQNPLVRCCSNIIKSRVSRKEMSIAMLLLKRCYATQPEDFLVSIPFLIPYFVNFNDKKKEVTFILTSFRHQLASVFFNSIIWSVNPHLGFSVCKAVLLKNSLVDACLSSQNAYTLDLQVGVKRGLESVQQGIHTSASFATTTFTQLVSGSITGRIFKLYFAQIYGNKSQGIIYLEVMIYSFLPSGLKIWTSSIIIHIFSLIGFLFSTFFFLLSVFPFPLFGSLTFDWITITPFIKVHIIVNHFHENFKENSKLSKVVANFYFFKMSRGECFTLRCFERALNIGNHSPNLETFLTGCDYPTYDPSHSFYVPKHHNVNIIFDVPAHQKILTLGVNTIHALLTGNYLLVYNSMEPLICWVIKFCSLSYDQINNRYAHEEMQTCVIIKASHAVSMIETAGDDSALSLSRLAISPVAKQPDLSCALVIFEFKAFCCIRLWKLYSNGCSHVVNMADGSIPAAEPSTFYAPTVVELYVYSLSNNTYASKHSQMNLKESFLSLLKEENDDNIKDSEHPRLVSHIKIKLMTLQGLKLSLYHGLPGRVPGYYYIMKPTGLTCKFNLNHNPDHHGFRSRFFLKSHIQKLDIRMLGSFPEKQAYCLMDERLVVLVSVTCYIYLHTTGRQEDSLSSLVTECKICAKFCSTVTKSDNLSSGSPLDYVVDSFIKQLRNKLNMEDELPSYPLDKTSFSFMIKDCCCFIVTLFITVYMVMRVVGVQLFEGLRDGDILSNESLQYTSLWEGYETCGWQGEIVPLDLDGGFGETHLNKHVEVRIEGREKEAPSEQVHQMISALQLDPGRATTTPSLVTQAPTTESLTSLCYDVGFGFVFLINFGFLVVLSYNCLSLVGRITLKRVYSVVLRVEFSCKHVVSQPVDCELLNNLIGKILVVLYLDDIIGKSRLAATTFKRLKVGMPFFPCKEMKRPKIFRQKASCKIRNHWLKMCFVGFQMDEFSFGHYITKFIRFCLHWKDTLLAYLSQRYLIWILFHANLHPGGGSWSLRLENIFEGRISWVVRVKPHILLNRHDKIHLHELAGGRTKLDHWVRLLSKAMNCLLREASLSPLRKMCGKMNSYTVSNEWVNSAPPNLILWGKIIEPVVSVLLHDWQTKFFIVVVIVVVVSHFHSHGLILIIKIYIHFLFSVSRLQQQKWHLCIHNQHLPWQETNQIGRSQTLILPSDIFGEGKSINSLSILLLRNIEALFTKIITFYSVIYQLKEIALKPHKARLQFLPLFASDMRCERIIHSAHIGLGDTELLFRSMISHHSSKRLELCCFINCAVRLMVFNKNHSKFQTLLPVTSILLALDLYQTLRREGGSEGSLRPGPWQDAAVASSSSPACQQLLVSSSMQTSCGKPPEEVPQLMLSAGNSLFLLGNSLFSSLCSRKPAVIFGGNFRCFTFLVLSCITHVATKVSLRIEPNVVTMGVKCTPDAQALLWFCSVYEIGRKETLDSKQNWRHSNEAKLMPCCPEQDLASHLVSLACNQWCAGKMFNNQLAEKESTWFAPFANFHGINTTTLDDFKLPTVMSLNTWLERDARSWLLQAWAKMLQHATGCSQSEGSYLIYVFMWTHTDTHTQTHPYTHTSMTKTIT

SEQ ID NO: 815676 - protein, 1419 aa, Homo sapiens
MVFCSNLWEQKSRYHYLEVMIYSFLPSGLKIWTSSIIIHIFSLIGFLFSTFFFLLSVFPFPLFGSLTFDWITITPFIKVHIIVNHFHENFYENSKLSKYVANFYFFKMSRGVCFTLRCFERALNIGNHSPNLETFLTGCDYPTYDPSHSFYVPKHHNVNIIFDVPAHQKILTLGVNTIHALLTGNYLLVYNSMEPLICWVIKFCSLSYDQINNRYAHEKMQTCVIIKASHAGSMIETAGDDSALSLSRLAISPVAKQPDLSCALVIFEFKAFCCIRLWKLYSNGRSHVVNMADGSIPAAEPSTFYAPTVVELYVYSLSNNTYASKHSQMNLKESFLSLLKEENDDNIKDSEHPRLVSHIKIKLMTLQGLKLSLYHGLPGRVPGYYYIMKPTGLTCKFNLNHNPDHHGFRSRFFLKSHIQKLDIRMLGSFPEKQAYCLMDERLVVLVSVTCYIYLHTTGRQEDSLSSLVTECKICAKFCSTVTKSDNLSSGSPLDYVVDSFIKQLRNKLNMEDELPSYPLDKTSFSFMIKDCCCFIVTLFITVYMVMRVVGVQLFEGLRDGDILSNESLQYTSLWEGYETCGWQGEIVPLDLDGGFGETHLNKHVEVRIEGRVKGSSSEQVHQMISALQLDPGRATTTPSLVTQAPTTESLTSLCYDVGFGFVFLINFGFLVVLSYNCLSLVGRITLKRVYSVVLRVEFSCKHVVSQPVDCELLNNLIGKILVVLYLDDIIGKSRLAATTFKRLKVGMPFFPCKEMKRPKSSGKKQVAKLETIGKKCVLLSFQMDEFSFGHYITKFIRFCLHWKDTLLAYLSQRYLIWILFHANLHPGGGSWSLRLENIFEGRISGVVRVKPHILLNRHDKIHLHELAGGRTKLDHWVRLLSKAMNCLLREASLSPLRKMCGKMNSYTVSNEWVNSAPPNLILWGKIIEPVVSVLLHDWQTKFFIVVVIVVVVSHFHSHGLILIIKIYIHFLFSVSRLQQQKWHLCIHNQHLPWQETNQIGRSQTLILPSDIFGEGKSINSLSILLLRNIEALFTKIITFYSVIYQLKENCMKPHKARLQFLPLFASDMRCERIIHSAHIGLGDTELLFRSMISHHSSKRLELCCFINCAVRLMVFNKNHSKFQTLLPVTSILLALDLYQTLRREGGSEGSLRPGPWQDAAVASSSSPACQQLLVSSSMQTSCGKPPEEVPQLMLSAGNSLFLLGNSLFSSLCSRKPAVIFGGNFRCFTFLVLSCITHVATKVSLRIEPNVVTMGVKCTPDAQALLWFCSVYEIGRKETLDSKQNWRHSNEAKLMPCCPEQDLASHLVSLACNQWCAGKMFNNQLLRIESTWFAPFANFHGINTTTLDDFKLPTVMSLNTWLERDARSWLLQAWAKMLQHATGCSQSEGSYLIYVFMWTHTDTHTQTHPYTHTSMTKTIT

SEQ ID NO: 815677 - protein, 372 aa, Homo sapiens [sequence omitted]

SEQ ID NO: 815678 - protein, 379 aa, Homo sapiens [sequence omitted]

SEQ ID NO: 815679 - protein, 310 aa, Homo sapiens
MSLGKLSPVGWVSSSQGKRRLTADMISHPLGDFRHTMHVGRGGDVFGDTSFLSNHGGSSGSTHRSPRSFLAKKLQLVRRVGAPPRRMASPPAPSPAPPAISPIIKNAISLPQLNQAAYDSLVVGKLSFDSSPTSSTDGHSSYGLDSGFCTISRLPRSEKPHDRDRDGSFPSEPGLRRSDSLLSFRLDLDLGPSLLSELLGVMSLSGYSGPRQPDSVTISWTRQNGEAVKTHTNISESHPNATFSDHRVTTSIREDDWNSGKSFTRTVTHTDPPSTLKQTISRPKGEILHSPDVYSQPPTREQHEPVGLVG

SEQ ID NO: 815680 - protein, 367 aa, Homo sapiens [sequence omitted]

SEQ ID NO: 815681 - protein, 379 aa, Homo sapiens [sequence omitted]

SEQ ID NO: 815682 - protein, 201 aa, Homo sapiens
MSLGKLSPVGWVSSSQGKRRLTADMISHPLGDFRHTMHVGRGGDVFGDTSFLSNHGGSSGSTHRSPRSFLAKKLQLVRRVGAPPRRMASPPAPSPAPPAISPIIKNAISLPQLNQAAYDSLVVGKLSFDSSPTSSTDGHSSYGLDSGFCTISRLPRSEKPHDRDRDGSFPSEPGLRRSDSLLLLRTHPNPTPNHISYSPEG

SEQ ID NO: 815683 - protein, 178 aa, Homo sapiens [sequence omitted]

SEQ ID NO: 815684 - protein, 151 aa, Homo sapiens
LQHSLDFEKSSTEGSESSIMGNSIDTVRYGKESDLGDVSEEHGENKESSNNEQDNSLLEQYLTSVQQLEDADERTNFDTETRDSKLHIACFPVQLDTLSDGASVDESHGISPPLQGEISQTQENSKLNAEVQGQQPECDSTFQLLHVGVTV

SEQ ID NO: 815685 - protein, 151 aa, Homo sapiens; identical to SEQ ID NO: 815684

SEQ ID NO: 815686 - protein, 151 aa, Homo sapiens; identical to SEQ ID NO: 815684

SEQ ID NO: 815687 - protein, 151 aa, Homo sapiens; identical to SEQ ID NO: 815684

SEQ ID NO: 815688 - protein, 326 aa, Homo sapiens
MATLVELPDSVLLEIFSYLPVRDRIRISRVCHRWKRLVDDRWLWRHVDLTLYTMRPKVMWHLLRRYMASRLHSLRMGGYLFSGSQAPQLSPALLRALGQKCPNLKRLCLHVADLSMVPITSLPSTLRTLELHSCEISMAWLHKQQDPTVLPLLECIVLDRVPAFRDEHLQGLTRFRALRSLVLGGTYRVTETGLDAGLQELSYLQRLEVLGCTLSADSTLLAISRHLRDVRKIRLTVRGLSAPGLAVLEGMPALESLCLQGPLVTPEMPSPTEILSSCLTMPKLRVLELQGLGWEGQEAEKILCKGLPHCMVIVRACPKESMDWWM

SEQ ID NO: 815689 - protein, 273 aa, Homo sapiens
MRPKVMWHLLRRYMASRLHSLRMGGYLFSGSQAPQLSPALLRALGQKCPNLKRLCLHVADLSMVPITSLPSTLRTLELHSCEISMAWLHKQQDPTVLPLLECIVLDRVPAFRDEHLQGLTRFRALRSLVLGGTYRVTETGLDAGLQELSYLQRLEVLGCTLSADSTLLAISRHLRDVRKIRLTVRGLSAPGLAVLEGMPALESLCLQGPLVTPEMPSPTEILSSCLTMPKLRVLELQGLGWEGQEAEKILCKGLPHCMVIVRACPKESMDWWM

SEQ ID NO: 815690 - protein, 273 aa, Homo sapiens; identical to SEQ ID NO: 815689

SEQ ID NO: 815691 - protein, 407 aa, Homo sapiens
LGLSSQSRPNHASATSRKPLTASATLSRLVSGPHPRLVRPWDRITSQREEGQISRPATGRSRPPPCQPPRRPQDPSGLFNRKRKCVSAGSWRLWSNCRTRSCSRSSLTSRVCHRWKRLVDDRWLWRHVDLTLYTMRPKVMWHLLRRYMASRLHSLRMGGYLFSGSQAPQLSPALLRALGQKCPNLKRLCLHVADLSMVPITSLPSTLRTLELHSCEISMAWLHKQQDPTVLPLLECIVLDRVPAFRDEHLQGLTRFRALRSLVLGGTYRVTETGLDAGLQELSYLQRLEVLGCTLSADSTLLAISRHLRDVRKIRLTVRGLSAPGLAVLEGMPALESLCLQGPLVTPEMPSPTEILSSCLTMPKLRVLELQGLGWEGQEAEKILCKGLPHCMVIVRACPKESMDWWM

SEQ ID NO: 815692 - protein, 391 aa, Homo sapiens
LVLVPSRGQITPQPPPASLSLPQPRFPGWFLVPIRGWSGPGTESLPSERKVKFLDRLREGRGRRPVSRLGAPRTPRVSLTGSGSACRRDHGDFGRTAGLGPARDLLLPPGTGPDPHLQMRPKVMWHLLRRYMASRLHSLRMGGYLFSGSQAPQLSPALLRALGQKCPNLKRLCLHVADLSMVPITSLPSTLRTLELHSCEISMAWLHKQQDPTVLPLLECIVLDRVPAFRDEHLQGLTRFRALRSLVLGGTYRVTETGLDAGLQELSYLQRLEVLGCTLSADSTLLAISRHLRDVRKIRLTVRGLSAPGLAVLEGMPALESLCLQGPLVTPEMPSPTEILSSCLTMPKLRVLELQGLGWEGQEAEKILCKGLPHCMVIVRACPKESMDWWM

SEQ ID NO: 815693 - protein, 440 aa, Homo sapiens
LGLSSQSRPNHASATSRKPLTASATLSRLVSGPHPRLVRPWDRITSQREEGQISRPATGRSRPPPCQPPRRPQDPSGLFNRKRKCVSAGSWRLWSNCRTRSCSRSSLTSRVCHRWKRLVDDRWLWRHVDLTLYTAGVQWYDLSSLQPLPPGFKVIPLPQPPEKLGLQMRPKVMWHLLRRYMASRLHSLRMGGYLFSGSQAPQLSPALLRALGQKCPNLKRLCLHVADLSMVPITSLPSTLRTLELHSCEISMAWLHKQQDPTVLPLLECIVLDRVPAFRDEHLQGLTRFRALRSLVLGGTYRVTETGLDAGLQELSYLQRLEVLGCTLSADSTLLAISRHLRDVRKIRLTVRGLSAPGLAVLEGMPALESLCLQGPLVTPEMPSPTEILSSCLTMPKLRVLELQGLGWEGQEAEKILCKGLPHCMVIVRACPKESMDWWM

SEQ ID NO: 815694 - protein, 484 aa, Homo sapiens
LVLVPSRGQITPQPPPASLSLPQPRFPGWFLVPIRGWSGPGTESLPSERKVKFLDRLREGRGRRPVSRLGAPRTPRVSLTGSGSACRRDHGDFGRTAGLGPARDLLLPPGTGPDPHLQGLSPLEEAGGRPVAVATCRPDALHVETGFCHVGQDGLNLLTSCSARIGLPKCWDYGHEPLRPGFFLIFSCCRHVKKCLSPPAMILRPPQPCGTMRPKVMWHLLRRYMASRLHSLRMGGYLFSGSQAPQLSPALLRALGQKCPNLKRLCLHVADLSMVPITSLPSTLRTLELHSCEISMAWLHKQQDPTVLPLLECIVLDRVPAFRDEHLQGLTRFRALRSLVLGGTYRVTETGLDAGLQELSYLQRLEVLGCTLSADSTLLAISRHLRDVRKIRLTVRGLSAPGLAVLEGMPALESLCLQGPLVTPEMPSPTEILSSCLTMPKLRVLELQGLGWEGQEAEKILCKGLPHCMVIVRACPKESMDWWM

SEQ ID NO: 815695 - protein, 293 aa, Homo sapiens
MATLVELPDSVLLEIFSYLPMRPKVMWHLLRRYMASRLHSLRMGGYLFSGSQAPQLSPALLRALGQKCPNLKRLCLHVADLSMVPITSLPSTLRTLELHSCEISMAWLHKQQDPTVLPLLECIVLDRVPAFRDEHLQGLTRFRALRSLVLGGTYRVTETGLDAGLQELSYLQRLEVLGCTLSADSTLLAISRHLRDVRKIRLTVRGLSAPGLAVLEGMPALESLCLQGPLVTPEMPSPTEILSSCLTMPKLRVLELQGLGWEGQEAEKILCKGLPHCMVIVRACPKESMDWWM

SEQ ID NO: 815696 - protein, 336 aa, Homo sapiens
LGLSSQSRPNHASATSRKPLTASATLSRLVSGPHPRLVRPWDRITSQREEGQISRPATGRSRPPPCQPPRRPQDPSGLFNRKRKCVSAGSWRLWSNCRTRPALLRALGQKCPNLKRLCLHVADLSMVPITSLPSTLRTLELHSCEISMAWLHKQQDPTVLPLLECIVLDRVPAFRDEHLQGLTRFRALRSLVLGGTYRVTETGLDAGLQELSYLQRLEVLGCTLSADSTLLAISRHLRDVRKIRLTVRGLSAPGLAVLEGMPALESLCLQGPLVTPEMPSPTEILSSCLTMPKLRVLELQGLGWEGQEAEKILCKGLPHCMVIVRACPKESMDWWM

SEQ ID NO: 815697 - protein, 326 aa, Homo sapiens; identical to SEQ ID NO: 815688

SEQ ID NO: 815698 - protein, 134 aa, Homo sapiens
MATLVELPDSVLLEIFSYLPVRDRIRISRVCHRWKRLVDDRWLWRHVDLTLYTVRAAGRAGLGRGRGARTPKTTSPTLGLCVGARAGDLEPGDPGPISASSLTSSSSTSGPQFPHPCNGDKGQYLPHGAIMGLH

SEQ ID NO: 815699 - protein, 476 aa, Homo sapiens [sequence omitted]

SEQ ID NO: 815700 - protein, 451 aa, Homo sapiens
MGRKEEDDCSSWKKQTTNIRKTFIFMEVLGSGAFSEVFLVKQRLTGKLFALKCIKKSPAFRDSSLENEIAVLKKIKHENIVTLEDIYESTTHYYLVMQLVSGGELFDRILERGVYTEKDASLVIQQVLSAVKYLHENGIVHRDLKPENLLYLTPEENSKIMITDFGLSKMEQNGIMSTACGTPGYVGSVDTPHSMKKRSLSFSRRSRRATMSLSLHSGMTFLSQPRTLFATCLRRIQNERYTCEKALSHPWIDGNTALHRDIYPSVSLQIQKNFAKSKWRQAFNAAAVVHHMRKLHMNLHSPGVRPEVENRPPETQASETSRPSSPEITITEAPVLDHSVALPALTQLPCQHGRRPTAPGGRSLNCLVNGSLHISSSLVPMHQGSLAAGPCGCCSSCLNIGSKGKSSYCSEPTLLKKANKKQNFKSEVMVPVKASGSSHCRAGQTGVCLIM

SEQ ID NO: 815701 - protein, 35 aa, Homo sapiens
MNLHSPGVRPEVENRPPETQASETSRPSSPEITIT

SEQ ID NO: 815702 - protein, 697 aa, Homo sapiens
MARLVAVCRDGEEEFPFERRQIPLYIDDTLTMVMEFPDNVLNLDGHQNNGAQLKQFIQRHGMLKQQDLSIAMVVTSREVLSALSQLVPCVGCRRSVERLFSQLVESGNPALEPLTVGPKGVLSVTRSCMTDAKKLYTLFYVHGSKLNDMIDAIPKSKKNKRCQLHSLDTHKPKPLGGCWMDVWELMSQECRDEVVLIDSSCLLETLETYLRKHRFCTDCKNKVLRAYNILIGELDCSKEKGYCAALYEGLRCCPHERHIHVCCETDFIAHLLGRAEPEFAGGRRERHAKTIDIAQEEVLTCLGIHLYERLHRIWQKLRAEEQTWQMLFYLGVDALRKSFEMTVEKVQGISRLEQLCEEFSEEERVRELKQEKKRQKRKNRRKNKCVCDIPTPLQTADEKEVSQEKETDFIENSSCKACGSTEDGNTCVEVIVTNENTSCTCPSSGNLLGSPKIKKGLSPHCNGSDCGYSSSMEGSETGSREGSDVACTEGICNHDEHGDDSCVHHCEDKEDDGDSCVECWANSEENDTKGKNKKKKKKSKILKCDEHIQKLGSCITDPGNRETSGNTMHTVFHRDKTKDTHPESCCSSEKGGQPLPWFEHRKNVPQFAEPTETLFGPDSGKGAKSLVELLDESECTSDEEIFISQDEIQSFMANNQSFYSNREQYRQHLKEKFNKYCRLNDHKRPICSGWLTTAGAN

SEQ ID NO: 815703 - protein, 288 aa, Homo sapiens
MARLVAVCRDGEEEFPFERRQIPLYIDDTLTMVMEFPDNVLNLDGHQNNGAQLKQFIQRHGMLKQQDLSIAMVVTSREVLSALSQLVPCVGCRRSVERLFSQLVESGNPALEPLTVGPKGVLSVTRSCMTDAKKLYTLFYVHGSKLNDMIDAIPKSKKNKRCQLHSLDTHKPKPLGGCWMDVWELMSQECRDEVVLIDSSCLLETLETYLRKHRFCTDCKNKVLRAYNILIGELDCSKEKGYCAALYEGLRCCPHERHIHVCCETDFIAHLLGRAEPEFAGGYEYVIC

SEQ ID NO: 815704 - protein, 149 aa, Homo sapiens
STIFAEYSIWCRCLRKSFEMTVEKVQGISRLEQLCEEFSEEERVRELKQEKKRQKRKNRRKNKCVCDIPTPLQTADEKEVSQEKETDFIENSSCKACGSTEDGNTCVEVIVTNENTSCTCPSSGNLLGSPKIKKGLSPHCNGRTDGVPS

SEQ ID NO: 815705 - protein, 288 aa, Homo sapiens; identical to SEQ ID NO: 815703

SEQ ID NO: 815706 - protein, 520 aa, Homo sapiens
ILDAVDGRECHHLVHCYMPQEIIAQPFLNFKVFLFNRFCTDCKNKVLRAYNILIGELDCSKEKGYCAALYEGLRCCPHERHIHVCCETDFIAHLLGRAEPEFAGGRRERHAKTIDIAQEEVLTCLGIHLYERLHRIWQKLRAEEQTWQMLFYLGVDALRKSFEMTVEKVQGISRLEQLCEEFSEEERVRELKQEKKRQKRKNRRKNKCVCDIPTPLQTADEKEVSQEKETDFIENSSCKACGSTEDGNTCVEVIVTNENTSCTCPSSGNLLGSPKIKKGLSPHCNGSDCGYSSSMEGSETGSREGSDVACTEGICNHDEHGDDSCVHHCEDKEDDGDSCVECWANSEENDTKGKNKKKKKKSKILKCDEHIQKLGSCITDPGNRETSGNTMHTVFHRDKTKDTHPESCCSSEKGGQPLPWFEHRKNVPQFAEPTETLFGPDSGKGAKSLVELLDESECTSDEEIFISQDEIQSFMANNQSFYSNREQYRQHLKEKFNKYCRLNDHKRPICSGWLTTAGAN

SEQ ID NO: 815707 - protein, 457 aa, Homo sapiens
MARLVAVCRDGEEEFPFERRQIPLYIDDTLTMVMEFPDNVLNLDGHQNNGAQLKQFIQRHGMLKQQDLSIAMVVTSREVLSALSQLVPCVGCRRSVERLFSQLVESGNPALEPLTVGPKGVLSVTRSCMTDAKKLYTLFYVHGSKLNDMIDAIPKSKKNKRCQLHSLDTHKPKPLGGCWMDVWELMSQECRDEVVLIDSSCLLETLETYLRKHRFCTDCKNKVLRAYNILIGELDCSKEKGYCAALYEGLRCCPHERHIHVCCETDFIAHLLGRAEPEFAGGRRERHAKTIDIAQEEVLTCLGIHLYERLHRIWQKLRAEEQTWQMLFYLGVDALRKSFEMTVEKVQGISRLEQLCEEFSEEERVRELKQEKKRQKRKNRRKNKCVCDIPTPLQTADEKEVSQEKETDFIENSSCKACGSTEDGNTCVEVIVTNENTSCTCPSSGNLLGSPKIKKGK

SEQ ID NO: 815708 - protein, 697 aa, Homo sapiens; identical to SEQ ID NO: 815702

SEQ ID NO: 815709 - protein, 411 aa, Homo sapiens
MARLVAVCRDGEEEFPFERRQIPLYIDDTLTMVMEFPDNVLNLDGHQNNGAQLKQFIQRHGMLKQQDLSIAMVVTSREVLSALSQLVPCVGCRRSVERLFSQLVESGNPALEPLTVGPKGVLSVTRSCMTDAKKLYTLFYVHGSKLNDMIDAIPKSKKNKRCQLHSLDTHKPKPLGGCWMDVWELMSQECRDEVVLIDSSCLLETLETYLRKHRFCTDCKNKVLRAYNILIGELDCSKEKGYCAALYEGLRCCPHERHIHVCCETDFIAHLLGRAEPEFAGGRRERHAKTIDIAQEEVLTCLGIHLYERLHRIWQKLRAEEQTWQMLFYLGVDALRKSFEMTVEKVQGISRLEQLCEEFSEEERVRELKQEKKRQKRKNRRKNKCVCDIPTPLQTADEKEVSQEKLPQRHS

SEQ ID NO: 815710 - protein, 330 aa, Homo sapiens
YSISSSENSSQSCSNLLIPCTFSTVISKLLRKHQYQDEETDFIENSSCKACGSTEDGNTCVEVIVTNENTSCTCPSSGNLLGSPKIKKGLSPHCNGSDCGYSSSMEGSETGSREGSDVACTEGICNHDEHGDDSCVHHCEDKEDDGDSCVECWANSEENDTKGKNKKKKKKSKILKCDEHIQKLGSCITDPGNRETSGNTMHTVFHRDKTKDTHPESCCSSEKGGQPLPWFEHRKNVPQFAEPTETLFGPDSGKGAKSLVELLDESECTSDEEIFISQDEIQSFMANNQSFYSNREQYRQHLKEKFNKYCRLNDHKRPICSGWLTTAGAN

SEQ ID NO: 815711 - protein, 457 aa, Homo sapiens; identical to SEQ ID NO: 815707

SEQ ID NO: 815712 - protein, 457 aa, Homo sapiens; identical to SEQ ID NO: 815707

SEQ ID NO: 815713 - protein, 685 aa, Homo sapiens
MARLVAVCRDGEEEFPFERRQIPLYIDDTLTMVMEFPDNVLNLDGHQNNGAQLKQFIQRHGMLKQQDLSIAMVVTSREVLSALSQLVPCVGCRRSVERLFSQLVESGNPALEPLTVGPKGVLSVTRSCMTDAKKLYTLFYVHGSKLNDMIDAIPKSKKNKRCQLHSLDTHKPKPLGGCWMDVWELMSQECRDEVVLIDSSCLLETLETYLRKHRFCTDCKNKVLRAYNILIGELDCSKEKGYCAALYEGLRCCPHERHIHVCCETDFIAHLLGRAEPEFAGGRRERHAKTIDIAQEEVLTCLGIHLYERLHRIWQKLRAEEQTWQMLFYLGVDALRKSFEMTVEKVQGISRLEQLCEEFSEEERVRELKQEKKRQKRKNRRKNKCVCDIPTPLQTADEKEVSQEKETDFIENSSCKACGSTEDGNTCVEVIVTNENTSCTCPSSGNLLGSPKIKKGLSPHCNGSDCGYSSSMEGSETGSREGSDVACTEGICNHDEHGDDSCVHHCEDKEDDGDSCVECWANSEENDTKGKNKKKKKKSKILKCDEHIQKLGSCITDPGNRETSGNTMHTVFHRDKTKDTHPESCCSSEKGGQPLPWFEHRKNVPQFAEPTETLFGPDSGKGAKSLVELLDESECTSDEEIFISQDEIQSFMANNQSFYSNREQYRQHLKEKFNASNRDPSSRLQ

SEQ ID NO: 815714 - protein, 130 aa, Homo sapiens [sequence omitted]

SEQ ID NO: 815715 - protein, 457 aa, Homo sapiens; identical to SEQ ID NO: 815707

SEQ ID NO: 815716 - protein, 143 aa, Homo sapiens
MARLVAVCRDGEEEFPFERRQIPLYIDDTLTMVMEFPDNVLNLDGHQNNGAQLKQFIQRHGMLKQQDLSIAMVVTSREVLSALSQLVPCVGCRRSVERLFSQLVESGNPALEPLTVGPKGVLSVTRSCMTDAKKLYTLFYVHG

SEQ ID NO: 815717 - protein, 126 aa, Homo sapiens
DDCVLFDRHLISRMRPENEYIIFLVNFQWKGLTSACLHIRYLSTGLFSFLFFDLFVIACTSLCNFPLDLYYRLLVFLVLKVHKFKKEISGWPLWTLSGHTSSLSSAVYPGFPQTEASAAPRSPCSP

SEQ ID NO: 815718 - protein, 126 aa, Homo sapiens; identical to SEQ ID NO: 815717

SEQ ID NO: 815719 - protein, 126 aa, Homo sapiens; identical to SEQ ID NO: 815717

SEQ ID NO: 815720 - protein, 126 aa, Homo sapiens; identical to SEQ ID NO: 815717

SEQ ID NO: 815721 - protein, 673 aa, Homo sapiens
MDLTKMGMIQLQNPSHPTGLLCKANQMRLAGTLCDVVIMVDSQEFHAHRTVLACTSKMFEILFHRNSQHYTLDFLSPKTFQQILEYAYTATLQAKAEDLDDLLYAAEILEIEYLEEQCLKMLETIQASDDNDTEATMADGGAEEEEDRKARYLKNIFISKHSSEESGYASVAGQSLPGPMVDQSPSVSTSFGLSAMSPTKAAVDSLMTIGQSLLQGTLQPPAGPEEPTLAGGGRHPGVAEVKTEMMQVDEVPSQDSPGAAESSISGGMGDKVEERGKEGPGTPTRSSVITSARELHYGREESAEQVPPPAEAGQAPTGRPEHPAPPPEKHLGIYSVLPNHKADAVLSMPSSVTSGLHVQPALAVSMDFSTYGGLLPQGFIQRELFSKLGELAVGMKSESRTIGEQCSVCGVELPDNEAVEQHRKLHSGMKTYGCELCGKRFLDSLRLRMHLLAHSAGAKAFVCDQCGAQFSKEDALETHRQTHTGTDMAVFCLLCGKRFQAQSALQQHMEVHAGVRSYICSECNRTFPSHTALKRHLRSHTGDHPYECEFCGSCFRDESTLKSHKRIHTGEKPYECNGCGKKFSLKHQLETHYRVHTGEKPFECKLCHQRSRDYSAMIKHLRTHNGASPYQCTICTEYCPSLSSMQKHMKGHKPEEIPPDWRIEKTYLYLCYV

SEQ ID NO: 815722 - protein, 673 aa, Homo sapiens; identical to SEQ ID NO: 815721

SEQ ID NO: 815723 - protein, 705 aa, Homo sapiens
MDLTKMGMIQLQNPSHPTGLLCKANQMRLAGTLCDVVIMVDSQEFHAHRTVLACTSKMFEILFHRNSQHYTLDFLSPKTFQQILEYAYTATLQAKAEDLDDLLYAAEILEIEYLEEQCLKMLETIQASDDNDTEATMADGGAEEEEDRKARYLKNIFISKHSSEESGYASVAGQSLPGPMVDQSPSVSTSFGLSAMSPTKAAVDSLMTIGQSLLQGTLQPPAGPEEPTLAGGGRHPGVAEVKTEMMQVDEVPSQDSPGAAESSISGGMGDKVEERGKEGPGTPTRSSVITSARELHYGREESAEQVPPPAEAGQAPTGRPEHPAPPPEKHLGIYSVLPNHKADAVLSMPSSVTSGLHVQPALAVSMDFSTYGGLLPQGFIQRELFSKLGELAVGMKSESRTIGEQCSVCGVELPDNEAVEQHRVFSITFVPVGNTSFWTVKMHFLRCEMSGPCVWKLHSGMKTYGCELCGKRFLDSLRLRMHLLAHSAGAKAFVCDQCGAQFSKEDALETHRQTHTGTDMAVFCLLCGKRFQAQSALQQHMEVHAGVRSYICSECNRTFPSHTALKRHLRSHTGDHPYECEFCGSCFRDESTLKSHKRIHTGEKPYECNGCGKKFSLKHQLETHYRVHTGEKPFECKLCHQRSRDYSAMIKHLRTHNGASPYQCTICTEYCPSLSSMQKHMKGHKPEEIPPDWRIEKTYLYLCYV

SEQ ID NO: 815724 - protein, 290 aa, Homo sapiens
MDLTKMGMIQLQNPSHPTGLLCKANQMRLAGTLCDVVIMVDSQEFHAHRTVLACTSKMFEILFHRNSQHYTLDFLSPKTFQQILEYAYTATLQAKAEDLDDLLYAAEILEIEYLEEQCLKMLETIQASDDNDTEATMADGGAEEEEDRKARYLKNIFISKHSSEESGYASVAGQSLPGPMVDQSPSVSTSFGLSAMSPTKAAVDSLMTIGQSLLQGTLQPPAGPEEPTLAGGGRHPGVAEVKTEMMQVDEVPSQDSPGAAESSISGGMGDKVEALRQPAQGLSAEGAGGV

SEQ ID NO: 815725 - protein, 252 aa, Homo sapiens
MFQPAPKRCFTIESLVAKDSPLPASRSEDPIRPAALSYANSSPINPFLNGFHSAAAAAAGRGVYSNPDLVFAEAVSHPPNPAVPVHPVPPPHALAAHPLPSSHSPHPLFASQQRDPSTFYPWLIHRYRYLGHRFQGNDTSPESFLLHNALARKPKRIRTAFSPSQLLRLEHAFEKNHYVVGAERKQLAHSLSLTETQVKVWFQNRRTKFKRQKLEEEGSDSQQKKKGTHHINRWRIATKQASPEEIDVTSDD

SEQ ID NO: 815726 - protein, 92 aa, Homo sapiens
AGAAGASELGARGEGAEKPGRPVGGRRLSRGGGADSVPLSARIQASGFPGAHLPLTHFKESPPFHLRASNSDQSSSHLPGFGGSCLCDPRTN

SEQ ID NO: 815727 - protein, 252 aa, Homo sapiens; identical to SEQ ID NO: 815725

SEQ ID NO: 815728 - protein, 252 aa, Homo sapiens; identical to SEQ ID NO: 815725

SEQ ID NO: 815729 - protein, 296 aa, Homo sapiens
MNTEPERKFGVVVVGVGRAGSVRMRDLRNPHPSSAFLNLIGFVSRRELGSIDGVQQISLEDALSSQEVEVAYICSESSSHEDYIRQFLNAGKHVLVEYPMTLSLAAAQELWELAEQKGKVLHEEHVELLMEEFAFLKKEVVGKDLLKGSLLFTAGPLEEERFGFPAFSGISRLTWLVSLFGELSLVSATLEERKEDQYMKMTVCLETEKKSPLSWIEEKGPGLKRNRYLSFHFKSGSLENVPNVGVNKNIFLKDQNIFVQKLLGQFSEKELAAEKKRILHCLGLAEEIQKYCCSRK

SEQ ID NO: 815730 - protein, 296 aa, Homo sapiens; identical to SEQ ID NO: 815729

SEQ ID NO: 815731 - protein, 197 aa, Homo sapiens [sequence omitted]

SEQ ID NO: 815732 - protein, 125 aa, Homo sapiens
MNTEPERKFGVVVVGVGRAGSVRMRDLRNPHPSSAFLNLIGFVSRRELGSIDGVQQISLEDALSSQEVEVAYICSESSSHEDYIRVFHTGSPCLTQQCSTAKMSKQAKTPCKGVRRASEKITIAL

SEQ ID NO: 815733 - protein, 167 aa, Homo sapiens
MLTVALLALLCASASGNAIQARSSSYSGEYGSGGGKRFSHSGNQLDGPITALRVRVNTYYIVGLQVRYGKVWSDYVGGRNGDLEEIFLHPGESVIQVSGKYKWYLKKLVFVTDKGRYLSFGKDSGTSFNAVPLHPNTVLRFISGRSGSLIDAIGLHWDVYPTSCSRC

SEQ ID NO: 815734 - protein, 887 aa, Homo sapiens
VVIATGKFKRVCGKEFGFHLFISPAQLSVEMESEDLSGRELTIDSIMNKVRDIKNKFKNEDLTDELSLNKISADTTDNSGTVNQIMMMANNPEDWLSLLLKLEKNSVPLSDALLNKLIGRYSQAIEALPPDKYGQNESFARIQVRFAELKAIQEPDDARDYFQMARANCKKFAFVHISFAQFELSQGNVKKSKQLLQKAVERGAVPLEMLEIALRNLNLQKKQLLSEEEKKNLSASTVLTAQESFSGSLGHLQNRNNSCDSRGQTTKARFLYGENMPPQDAEIGYRNSLRQTNKTKQSCPFGRVPVNLLNSPDCDVKTDDSVVPCFMKRQTSRSECRDLVVPGSKPSGNDSCELRNLKSVQNSHFKEPLVSDEKSSELIITDSITLKNKTESSLLAKLEETKEYQEPEVPESNQKQWQSKRKSECINQNPAASSNHWQIPELARKVNTEQKHTTFEQPVFSVSKQSPPISTSKWFDPKSICKTPSSNTLDDYMSCFRTPVVKNDFPPACQLSTPYGQPACFQQQQHQILATPLQNLQVLASSSANECISVKGRIYSILKQIGSGGSSKVFQVLNEKKQIYAIKYVNLEEADNQTLDSYRNEIAYLNKLQQHSDKIIRLYDYEITDQYIYMVMECGNIDLNSWLKKKKSIDPWERKSYWKNMLEAVHTIHQHGIVHSDLKPANFLIVDGMLKLIDFGIANQMQPDTTSVVKDSQVGTVNYMPPEAIKDMSSSRENGKSKSKISPKSDVWSLGCILYYMTYGKTPFQQIINQISKLHAIIDPNHEIEFPDIPEKDLQDVLKCCLKRDPKQRISIPELLAHPYVQIQTHPVNQMAKGTTEEMKYVLGQLVGLNSPNSILKAAKTLYEHYSGGESHNSSSSKTFEKKRGKK

SEQ ID NO: 815735 - protein, 305 aa, Homo sapiens
MCMRQNLQVLASSSANECISVKGRIYSILKQIGSGGSSKVFQVLNEKKQIYAIKYVNLEEADNQTLDSYRNEIAYLNKLQQHSDKIIRLYDYEITDQYIYMVMECGNIDLNSWLKKKKSIDPWERKSYWKNMLEAVHTIHQHGIVHSDLKPANFLIVDGMLKLIDFGIANQMQPDTTSVVKDSQVGTVNYMPPEAIKDMSSSRENGKSKSKISPKSDVWSLGCILYYMTYGKTPFQQIINQISKLHAIIDPNHEIEFPDIPEKDLQDVLKCCLKRDPKQRISIPELLAHPYVQIQTHPVNNGREH

SEQ ID NO: 815736 - protein, 239 aa, Homo sapiens
VVIATGKFKRVCGKEFGFHLFISPAQLSVEMESEDLSGRELTIDSIMNKVRDIKNKFKNEDLTDELSLNKISADTTDNSGTVNQIMMMANNPEDWLSLLLKLEKNSVPLSDALLNKLIGRYSQAIEALPPDKYGQNESFARIQVRFAELKAIQEPDDARDYFQMARANCKKFAFVHISFAQFELSQGNVKKSKQLLQKAVERGAVPLEMLEIALRNLNLQKKQLLSEEEKKNLSASYGY

SEQ ID NO: 815737 - protein, 197 aa, Homo sapiens
VVIATGKFKRVCGKEFGFHLFISPAQLSVEMESEDLSGRELTIDSIMNKVRDIKNKFKNEDLTDELSLNKISADTTDNSGTVNQIMMMANNPEDWLSLLLKLEKNSVPLSDALLNKLIGRYSQAIEALPPDKYGQNESFARIQVRFAELKAIQEPDDARDYFQMARANCKKFAFVHISFAQFELSQGNLKMSNSNFK

SEQ ID NO: 815738 - protein, 654 aa, Homo sapiens
VVIATGKFKRVCGKEFGFHLFISPAQLSVEMESEDLSGRELTIDSIMNKVRDIKNKFKNEDLTDELSLNKISADTTDNSGTVNQIMMMANNPEDWLSLLLKLEKNSVPLSDALLNKLIGRYSQAIEALPPDKYGQNESFARIQVRFAELKAIQEPDDARDYFQMARANCKKFAFVHISFAQFELSQGNVKKSKQLLQKAVERGAVPLEMLEIALRNLNLQKKQLLSEEEKKNLSASTVLTAQESFSGSLGHLQNRNNSCDSRGQTTKARFLYGENMPPQDAEIGYRNSLRQTNKTKQSCPFGRVPVNLLNSPDCDVKTDDSVVPCFMKRQTSRSECRDLVVPGSKPSGNDSCELRNLKSVQNSHFKEPLVSDEKSSELIITDSITLKNKTESSLLAKLEETKEYQEPEVPESNQKQWQSKRKSECINQNPAASSNHWQIPELARKVNTEQKHTTFEQPVFSVSKQSPPISTSKWFDPKSICKTPSSNTLDDYMSCFRTPVVKNDFPPACQLSTPYGQPACFQQQQHQILATPLQNLQVLASSSANECISVKGRIYSILKQIGSGGSSKVFQVLNEKKQIYAIKYVNLEEADNQTLDSYRNEIAYLNKLQQHSDKIIRLYDYEITDQYIYMVMECGNIDLNSWALFTVILNQLTF

SEQ ID NO: 815739 - protein, 834 aa, Homo sapiens
VVIATGKFKRVCGKEFGFHLFISPAQLSVEMESEDLSGRELTIDSIMNKVRDIKNKFKNEDLTDELSLNKISADTTDNSGTVNQIMMMANNPEDWLSLLLKLEKNSVPLSDALLNKLIGRYSQAIEALPPDKYGQNESFARIQVRFAELKAIQEPDDARDYFQMARANCKKFAFVHISFAQFELSQGNVKKSKQLLQKAVERGAVPLEMLEIALRNLNLQKKQLLSEEEKKNLSASTVLTAQESFSGSLGHLQNRNNSCDSRGQTTKARFLYGENMPPQDAEIGYRNSLRQTNKTKQSCPFGRVPVNLLNSPDCDVKTDDSVVPCFMKRQTSRSECRDLVVPGSKPSGNDSCELRNLKSVQNSHFKEPLVSDEKSSELIITDSITLKNKTESSLLAKLEETKEYQEPEVPESNQKQWQSKRKSECINQNPAASSNHWQIPELARKVNTEQKHTTFEQPVFSVSKQSPPISTSKWFDPKSICKTPSSNTLDDYMSCFRTPVVKNDFPPACQLSTPYGQPACFQQQQHQILATPLQNLQVLASSSANECISVKGRIYSILKQIGSGGSSKVFQVLNEKKQIYAIKYVNLEEADNQTLDSYRNEIAYLNKLQQHSDKIIRLYDYEITDQYIYMVMECGNIDLNSWLKKKKSIDPWERKSYWKNMLEAVHTIHQHGIVHSDLKPANFLIVDGMLKLIDFGIANQMQPDTTSVVKDSQVGTVNYMPPEAIKDMSSSRENGKSKSKISPKSDVWSLGCILYYMTYGKTPFQQIINQISKLHAIIDPNHEIEFPDIPEKDLQDVLKCCLKRDPKQRISIPELLAHPYVQIQTHPVNNGREH

SEQ ID NO: 815740 - protein, 654 aa, Homo sapiens; identical to SEQ ID NO: 815738

SEQ ID NO: 815741 - protein, 119 aa, Homo sapiens
AGPPAAVCCPPAGRVIWGPVRPPFPRSFRRRSLVSKSAGVSARVCRRASPGAPASPAGRWSTTGGRPWAALPNLRTGRATSRRQISPVAESPFPHLYNGHLNYPQNLHSGRYPVPGTWS

SEQ ID NO: 815742 - protein, 283 aa, Homo sapiens
GAQRERRALGWRLSRSRSCSRPHTAARSSSHARPLPGRPGAGHRGGDPADRARPAPAPAPTPSPLRSAAARLARRPRQSCRKMVNDRWKTMGGAAQLEDRPRDKPQRPSCGYVLCTVLLALAVLLAVAVTGAVLFLNHAHAPGTAPPPVVSTGAASANSALVTVERADSSHLSILIDPRCPDLTDSFARLESAQASVLQALTEHQAQPRLVGDQEQELLDTLADQLPRLLARASELQTECMGLRKGHGTLGQGLSALQSEQGRLIQLALCPSATRSSTCANVC

SEQ ID NO: 815743 - protein, 356 aa, Homo sapiens
MVNDRWKTMGGAAQLEDRPRDKPQRPSCGYVLCTVLLALAVLLAVAVTGAVLFLNHAHAPGTAPPPVVSTGAASANSALVTVERADSSHLSILIDPRCPDLTDSFARLESAQASVLQALTEHQAQPRLVGDQEQELLDTLADQLPRLLARASELQTECMGLRKGHGTLGQGLSALQSEQGRLIQLLSESQGHMAHLVNSVSDILDALQRDRGLGRPRNKADLQRAPARGTRPRGCATGSRPRDCLDVLLSGQQDDGVYSVFPTHYPAGFQVYCDMRTDGGGWTVFQRREDGSVNFFRGWDAYRDGFGRLTGEHWLGPLDRCTLSLALLVPVAPSPTPPHSFVNVLHPPVPGGPTLQ

SEQ ID NO: 815744 - protein, 140 aa, Homo sapiens
ALTTQAAYELHVDLEDFENGTAYARYGSFGVGLFSVDPEEDGYPLTVADYSGTAGDSLLKHSGMRFTTKDRDSDHSENNCAAFYRGAWWYRNCHTSNLNGQYLRGAHASYADGVEWSSWTGWQYSLKFSEMKIRPVREDR

SEQ ID NO: 815745 - protein, 104 aa, Homo sapiens
MRELTLLPTTATEEGINHECKLCNQMFDSPAKLLCHLIEHSFEGMGGTFKCPVCFTVFVQANKLQQHIFAVHGQEDKIYDCSQCPQKFFFQTELQNHTMSQHAQ

SEQ ID NO: 815746 - protein, 110 aa, Homo sapiens
GPSLFSLSVEEGEASDFSLAWDSSVTAAGGLEGEPECDQKTSRALEDRNSVTSQEERNEDDEDMEDESIYTCDHCQQDFESLADLTDHRAHRCPGGNAKQPQDSDRWLHG

SEQ ID NO: 815747 - protein, 1287 aa, Homo sapiens
GPSLFSLSVEEGEASDFSLAWDSSVTAAGGLEGEPECDQKTSRALEDRNSVTSQEERNEDDEDMEDESIYTCDHCQQDFESLADLTDHRAHRCPGDGDDDPQLSWVASSPSSKDVASPTQMIGDGCDLGLGEEEGGTGLPYPCQFCDKSFIRLSYLKRHEQIHSDKLPFKCTYCSRLFKHKRSRDRHIKLHTGDKKYHCHECEAAFSRSDHLKIHLKTHSSSKPFKCTVCKRGFSSTSSLQSHMQAHKKNKEHLAKSEKEAKKDDFMCDYCEDTFSQTEELEKHVLTRHPQLSEKADLQCIHCPEVFVDENTLLAHIHQAHANQKHKCPMCPEQFSSVEGVYCHLDSHRQPDSSNHSVSPDPVLGSVASMSSATPDSSASVERGSTPDSTLKPLRGQKKMRDDGQGWTKVVYSCPYCSKRDFNSLAVLEIHLKTIHADKPQQSHTCQICLDSMPTLYNLNEHVRKLHKNHAYPVMQFGNISAFHCNYCPEMFADINSLQEHIRVSHCGPNANPSDGNNAFFCNQCSMGFLTESSLTEHIQQAHCSVGSAKLESPVVQPTQSFMEVYSCPYCTNSPIFGSILKLTKHIKENHKNIPLAHSKKSKAEQSPVSSDVEVSSPKRQRLSASANSISNGEYPCNQCDLKFSNFESFQTHLKLHLELLLRKQACPQCKEDFDSQESLLQHLTVHYMTTSTHYVCESCDKQFSSVDDLQKHLLDMHTFVLYHCTLCQEVFDSKVSIQVHLAVKHSNEKKMYRCTACNWDFRKEADLQVHVKHSHLGNPAKAHKCIFCGETFSTEVELQCHITTHSKKYNCKFCSKAFHAIILLEKHLREKHCVFDAATENGTANGVPPMATKKAEPADLQGMLLKNPEAPNSHEASEDDVDASEPMYGCDICGAAYTMEVLLQNHRLRDHNIRPGEDDGSRKKAEFIKGSHKCNVCSRTFFSENGLREHLQTHRGPAKHYMCPICGERFPSLLTLTEHKVTHSKSLDTGTCRICKMPLQSEEEFIEHCQMHPDLRNSLTGFRCVVCMQTVTSTLELKIHGTFHMQKLAGSSAASSPNGQGLQKLYKCALCLKEFRSKQDLVKLDVNGLPYGLCAGCMARSANGQVGGLAPPEPADRPCAGLRCPECSVKFESAEDLESHMQVDHRDLTPETSGPRKGTQTSPVPRKKTYQCIKCQMTFENEREIQIHVANHMIEEGINHECKLCNQMFDSPAKLLCHLIEHSFEGMGGTFKCPVCFTVFVQANKLQQHIFAVHGQEDKIYDCSQCPQKFFFQTELQNHTMSQHAQ

SEQ ID NO: 815748 - protein, 1292 aa, Homo sapiens
GPSLFSLSVEEGEASDFSLAWDSSVTAAGGLEGEPECDQKTSRALEDRNSVTSQEERNEDDEDMEDESIYTCDHCQQDFESLADLTDHRAHRCPGDGDDDPQLSWVASSPSSKDVASPTQMIGDGCDLGLGEEEGGTGLPYPCQFCDKSFIRLSYLKRHEQIHSDKLPFKCTYCSRLFKHKRSRDRHIKLHTGDKKYHCHECEAAFSRSDHLKIHLKTHSSSKPFKCTVCKRGFSSTSSLQSHMQAHKKNKEHLAKSEKEAKKDDFMCDYCEDTFSQTEELEKHVLTRHPQLSEKADLQCIHCPEVFVDENTLLAHIHQAHANQKHKCPMCPEQFSSVEGVYCHLDSHRQPDSSNHSVSPDPVLGSVASMSSATPDSSASVERGSTPDSTLKPLRGQKKMRDDGQGWTKVVYSCPYCSKRDFNSLAVLEIHLKTIHADKPQQSHTCQICLDSMPTLYNLNEHVRKLHKNHAYPVMQFGNISAFHCNYCPEMFADINSLQEHIRVSHCGPNANPSDGNNAFFCNQCSMGFLTESSLTEHIQQAHCSVGSAKLESPVVQPTQSFMEVYSCPYCTNSPIFGSILKLTKHIKENHKNIPLAHSKKSKAEQSPVSSDVEVSSPKRQRLSASANSISNGEYPCNQCDLKFSNFESFQTHLKLHLELLLRKQACPQCKEDFDSQESLLQHLTVHYMTTSTHYVCESCDKQFSSVDDLQKHLLDMHTFVLYHCTLCQEVFDSKVSIQVHLAVKHSNEKKMYRCTACNWDFRKEADLQVHVKHSHLGNPAKAHKCIFCGETFSTEVELQCHITTHSKKYNCKFCSKAFHAIILLEKHLREKHCVFDAATENGTANGVPPMATKKAEPADLQGMLLKNPEAPNSHEASEDDVDASEPMYGCDICGAAYTMEVLLQNHRLRDHNIRPGEDDGSRKKAEFIKGSHKCNVCSRTFFSENGLREHLQTHRGPAKHYMCPICGERFPSLLTLTEHKVTHSKSLDTGTCRICKMPLQSEEEFIEHCQMHPDLRNSLTGFRCVVCMQTVTSTLELKIHGTFHMQKLAGSSAASSPNGQGLQKLYKCALCLKEFRSKQDLVKLDVNGLPYGLCAGCMARSANGQVGGLAPPEPADRPCAGLRCPECSVKFESAEDLESHMQVDHRDLTPETSGPRKGTQTSPVPRKKTYQCIKCQMTFENEREIQIHVANHMIEEGINHECKLCNQMFDSPAKLLCHLIEHSFEGMGGTFKCPVCFTEPHDEPARTVRDRSTGHLSAEGLPETPWGGPFEHYIQSKCHLQPRCKTLMIWP

SEQ ID NO: 815749 - protein, 1226 aa, Homo sapiens
GPSLFSLSVEEGEASDFSLAWDSSVTAAGGLEGEPECDQKTSRALEDRNSVTSQEERNEDDEDMEDESIYTCDHCQQDFESLADLTDHRAHRCPGDGDDDPQLSWVASSPSSKDVASPTQMIGDGCDLGLGEEEGGTGLPYPCQFCDKSFIRLSYLKRHEQIHSDKLPFKCTYCSRLFKHKRSRDRHIKLHTGDKKYHCHECEAAFSRSDHLKIHLKTHSSSKPFKCTVCKRGFSSTSSLQSHMQAHKKNKEHLAKSEKEAKKDDFMCDYCEDTFSQTEELEKHVLTRHPQLSEKADLQCIHCPEVFVDENTLLAHIHQAHANQKHKCPMCPEQFSSVEGVYCHLDSHRQPDSSNHSVSPDPVLGSVASMSSATPDSSASVERGSTPDSTLKPLRGQKKMRDDGQGWTKVVYSCPYCSKRDFNSLAVLEIHLKTIHADKPQQSHTCQICLDSMPTLYNLNEHVRKLHKNHAYPVMQFGNISAFHCNYCPEMFADINSLQEHIRVSHCGPNANPSDGNNAFFCNQCSMGFLTESSLTEHIQQAHCSVGSAKLESPVVQPTQSFMEVYSCPYCTNSPIFGSILKLTKHIKENHKNIPLAHSKKSKAEQSPVSSDVEVSSPKRQRLSASANSISNGEYPCNQCDLKFSNFESFQTHLKLHLELLLRKQACPQCKEDFDSQESLLQHLTVHYMTTSTHYVCESCDKQFSSVDDLQKHLLDMHTFVLYHCTLCQEVFDSKVSIQVHLAVKHSNEKKMYRCTACNWDFRKEADLQVHVKHSHLGNPAKAHKCIFCGETFSTEVELQCHITTHSKKYNCKFCSKAFHAIILLEKHLREKHCVFDAATENGTANGVPPMATKKAEPADLQGMLLKNPEAPNSHEASEDDVDASEPMYGCDICGAAYTMEVLLQNHRLRDHNIRPGEDDGSRKKAEFIKGSHKCNVCSRTFFSENGLREHLQTHRGPAKHYMCPICGERFPSLLTLTEHKVTHSKSLDTGTCRICKMPLQSEEEFIEHCQMHPDLRNSLTGFRCVVCMQTVTSTLELKIHGTFHMQKLAGSSAASSPNGQGLQKLYKCALCLKEFRSKQDLVKLDVNGLPYGLCAGCMARSANGQVGGLAPPEPADRPCAGLRCPECSVKFESAEDLESHMQVDHRDLTPETSGPRKGTQTSPVPRKKTYQCIKCQMTFENEREIQIHVANHMIEEGINHECKLCNQMFDSPAKLLCHLIEHSWP

SEQ ID NO: 815750 - protein, 1180 aa, Homo sapiens
MSADSSPLVGSTPTGYGTLTIGTSIDPLSSSVSSVRLSGYCGSPWRVIGYHVVVWMMAGIPLLLFRWKPLWGVRLRLRPCNLAHAETLVIEIRDKEDSSWQLFTVQVQTEAIGEGSLEPSPQSQAEDGRSQAAVGAVPEGAWKDTAQLHKSEEAVSVGQKRVLRYYLFQGQRYIWIETQQAFYQVSLLDHGRSCDDVHRSRHGLSLQDQMVRKAIYGPNVISIPVKSYPQLLVDEALNPYYGFQAFSIALWLADHYYWYALCIFLISSISICLSLYKTRKQSQTLRDMVKLSMRVCVCRPGGEEEWVDSSELVPGDCLVLPQEGGLMPCDAALVAGECMVNESSLTGESIPVLKTALPEGLGPYCAETHRRHTLFCGTLILQARAYVGPHVLAVVTRTGFCTAKGGLVSSILHPRPINFKFYKHSMKFVAALSVLALLGTIYSIFILYRNRVPLNEIVIRALDLVTVVVPPALPAAMTVCTLYAQSRLRRQGIFCIHPLRINLGGKLQLVCFDKTGTLTEDGLDVMGVVPLKGQAFLPLVPEPRRLPVGPLLRALATCHALSRLQDTPVGDPMDLKMVESTGWVLEEEPAADSAFGTQVLAVMRPPLWEPQLQAMEEPPVPVSVLHRFPFSSALQRMSVVVAWPGATQPEAYVKGSPELVAGLCNPETVPTDFAQMLQSYTAAGYRVVALASKPLPTVPSLEAAQQLTRDTVEGDLSLLGLLVMRNLLKPQTTPVIQALRRTRIRAVMVTGDNLQTAVTVARGCGMVAPQEHLIIVHATHPERGQPASLEFLPMESPTAVNGVKDPDQAASYTVEPDPRSRHLALSGPTFGIIVKHFPKLLPKVLVQGTVFARMAPEQKTELVCELQKLQYCVGMCGDGANDCGALKAADVGISLSQAEASVVSPFTSSMASIECVPMVIREGRCSLDTSFSVFKYMALYSLTQFISVLILYTINTNLGDLQFLAIDLVITTTVAVLMSRTGPALVLGRVRPPGALLSVPVLSSLLLQMVLVTGVQLGGYFLTLAQPWFVPLNRTVAAPDNLPNYENTVVFSLSSFQYLILAAAVSKGAPFRRPLYTNVPFLVALALLSSVLVGLVLVPGLLQGPLALRNITDTGFKLLLLGLVTLNFVGAFMLESVLDQCLPACLRRLRPKRASKKRFKQLERELAEQPWPPLPAGPLR

SEQ ID NO: 815751 - protein, 971 aa, Homo sapiens
MVRKAIYGPNVISIPVKSYPQLLVDEALNPYYGFQAFSIALWLADHYYWYALCIFLISSISICLSLYKTRKQSQTLRDMVKLSMRVCVCRPGGEEEWVDSSELVPGDCLVLPQEGGLMPCDAALVAGECMVNESSLTGESIPVLKTALPEGLGPYCAETHRRHTLFCGTLILQARAYVGPHVLAVVTRTGFCTAKGGLVSSILHPRPINFKFYKHSMKFVAALSVLALLGTIYSIFILYRNRVPLNEIVIRALDLVTVVVPPALPAAMTVCTLYAQSRLRRQGIFCIHPLRINLGGKLQLVCFDKTGTLTEDGLDVMGVVPLKGQAFLPLVPEPRRLPVGPLLRALATCHALSRLQDTPVGDPMDLKMVESTGWVLEEEPAADSAFGTQVLAVMRPPLWEPQLQAMEEPPVPVSVLHRFPFSSALQRMSVVVAWPGATQPEAYVKGSPELVAGLCNPETVPTDFAQMLQSYTAAGYRVVALASKPLPTVPSLEAAQQLTRDTVEGDLSLLGLLVMRNLLKPQTTPVIQALRRTRIRAVMVTGDNLQTAVTVARGCGMVAPQEHLIIVHATHPERGQPASLEFLPMESPTAVNGVKDPDQAASYTVEPDPRSRHLALSGPTFGIIVKHFPKLLPKVLVQGTVFARMAPEQKTELVCELQKLQYCVGMCGDGANDCGALKAADVGISLSQAEASVVSPFTSSMASIECVPMVIREGRCSLDTSFSVFKYMALYSLTQFISVLILYTINTNLGDLQFLAIDLVITTTVAVLMSRTGPALVLGRVRPPGALLSVPVLSSLLLQMVLVTGVQLGGYFLTLAQPWFVPLNRTVAAPDNLPNYENTVVFSLSSFQYLILAAAVSKGAPFRRPLYTNVPFLVALALLSSVLVGLVLVPGLLQGPLALRNITDTGFKLLLLGLVTLNFVGAFMLESVLDQCLPACLRRLRPKRASKKRFKQLERELAEQPWPPLPAGPLR

SEQ ID NO: 815752 - protein, 874 aa, Homo sapiens
SHLVTELTETESLWDNSTQNSWFAGGREGCGVVLTPRSPPGESIPVLKTALPEGLGPYCAETHRRHTLFCGTLILQARAYVGPHVLAVVTRTGFCTAKGGLVSSILHPRPINFKFYKHSMKFVAALSVLALLGTIYSIFILYRNRVPLNEIVIRALDLVTVVVPPALPAAMTVCTLYAQSRLRRQGIFCIHPLRINLGGKLQLVCFDKTGTLTEDGLDVMGVVPLKGQAFLPLVPEPRRLPVGPLLRALATCHALSRLQDTPVGDPMDLKMVESTGWVLEEEPAADSAFGTQVLAVMRPPLWEPQLQAMEEPPVPVSVLHRFPFSSALQRMSVVVAWPGATQPEAYVKGSPELVAGLCNPETVPTDFAQMLQSYTAAGYRVVALASKPLPTVPSLEAAQQLTRDTVEGDLSLLGLLVMRNLLKPQTTPVIQALRRTRIRAVMVTGDNLQTAVTVARGCGMVAPQEHLIIVHATHPERGQPASLEFLPMESPTAVNGVKDPDQAASYTVEPDPRSRHLALSGPTFGIIVKHFPKLLPKVLVQGTVFARMAPEQKTELVCELQKLQYCVGMCGDGANDCGALKAADVGISLSQAEASVVSPFTSSMASIECVPMVIREGRCSLDTSFSVFKYMALYSLTQFISVLILYTINTNLGDLQFLAIDLVITTTVAVLMSRTGPALVLGRVRPPGALLSVPVLSSLLLQMVLVTGVQLGGYFLTLAQPWFVPLNRTVAAPDNLPNYENTVVFSLSSFQYLILAAAVSKGAPFRRPLYTNVPFLVALALLSSVLVGLVLVPGLLQGPLALRNITDTGFKLLLLGLVTLNFVGAFMLESVLDQCLPACLRRLRPKRASKKRFKQLERELAEQPWPPLPAGPLR

SEQ ID NO: 815753 - protein, 1160 aa, Homo sapiens
MSADSSPLVGSTPTGYGTLTIGTSIDPLSSSVSSVRLSGYCGSPWRVIGYHVVVWMMAGIPLLLFRWKPLWGVRLRLRPCNLAHAETLVIEIRDKEDSSWQLFTVQVQTEAIGEGSLEPSPQSQAEDGRSQAAVGAVPEGAWKDTAQLHKSEEAVSVGQKRVLRYYLFQGQRYIWIETQQAFYQVSLLDHGRSCDDVHRSRHGLSLQDQMVRKAIYGPNVISIPVKSYPQLLVDEALNPYYGFQAFSIALWLADHYYWYALCIFLISSISICLSLYKTRKQSQTLRDMVKLSMRVCVCRPGGEEEWVDSSELVPGDCLVLPQEGGLMPCDAALVAGECMVNESSLTGESIPVLKTALPEGLGPYCAETHRRHTLFCGTLILQARAYVGPHVLAVVTRTGFCTAKGGLVSSILHPRPINFKFYKHSMKFVAALSVLALLGTIYSIFILYRNRVPLNEIVIRALDLVTVVVPPALPAAMTVCTLYAQSRLRRQGIFCIHPLRINLGGKLQLVCFDKTGTLTEDGLDVMGVVPLKGQAFLPLVPEPRRLPVGPLLRALATCHALSRLQDTPVGDPMDLKMVESTGWVLEEEPAADSAFGTQVLAVMRPPLWEPQLQAMRMSVVVAWPGATQPEAYVKGSPELVAGLCNPETVPTDFAQMLQSYTAAGYRVVALASKPLPTVPSLEAAQQLTRDTVEGDLSLLGLLVMRNLLKPQTTPVIQALRRTRIRAVMVTGDNLQTAVTVARGCGMVAPQEHLIIVHATHPERGQPASLEFLPMESPTAVNGVKDPDQAASYTVEPDPRSRHLALSGPTFGIIVKHFPKLLPKVLVQGTVFARMAPEQKTELVCELQKLQYCVGMCGDGANDCGALKAADVGISLSQAEASVVSPFTSSMASIECVPMVIREGRCSLDTSFSVFKYMALYSLTQFISVLILYTINTNLGDLQFLAIDLVITTTVAVLMSRTGPALVLGRVRPPGALLSVPVLSSLLLQMVLVTGVQLGGYFLTLAQPWFVPLNRTVAAPDNLPNYENTVVFSLSSFQYLILAAAVSKGAPFRRPLYTNVPFLVALALLSSVLVGLVLVPGLLQGPLALRNITDTGFKLLLLGLVTLNFVGAFMLESVLDQCLPACLRRLRPKRASKKRFKQLERELAEQPWPPLPAGPLR

SEQ ID NO: 815754 - protein, 1091 aa, Homo sapiens
MSADSSPLVGSTPTGYGTLTIGTSIDPLSSSVSSVRLSGYCGSPWRVIGYHVVVWMMAGIPLLLFRWKPLWGVRLRLRPCNLAHAETLVIEIRDKEDSSWQLFTVQVQTEAIGEGSLEPSPQSQAEDGRSQAAVGAVPEGAWKDTAQLHKSEEAVSVGQKRVLRYYLFQGQRYIWIETQQAFYQVSLLDHGRSCDDVHRSRHGLSLQDQMVRKAIYGPNVISIPVKSYPQLLVDEALNPYYGFQAFSIALWLADHYYWYALCIFLISSISICLSLYKTRKQSQTLRDMVKLSMRVCVCRPGGEEEWVDSSELVPGDCLVLPQEGGLMPCDAALVAGECMVNESSLTGESIPVLKTALPEGLGPYCAETHRRHTLFCGTLILQARAYVGPHVLAVVTRTGFCTAKGGLVSSILHPRPINFKFYKHSMKFVAALSVLALLGTIYSIFILYRNRVPLNEIVIRALDLVTVVVPPALPAAMTVCTLYAQSRLRRQGIFCIHPLRINLGGKLQLVCFDKVLEEEPAADSAFGTQVLAVMRPPLWEPQLQAMRMSVVVAWPGATQPEAYVKGSPELVAGLCNPETVPTDFAQMLQSYTAAGYRVVALASKPLPTVPSLEAAQQLTRDTVEGDLSLLGLLVMRNLLKPQTTPVIQALRRTRIRAVMVTGDNLQTAVTVARGCGMVAPQEHLIIVHATHPERGQPASLEFLPMESPTAVNGVKDPDQAASYTVEPDPRSRHLALSGPTFGIIVKHFPKLLPKVLVQGTVFARMAPEQKTELVCELQKLQYCVGMCGDGANDCGALKAADVGISLSQAEASVVSPFTSSMASIECVPMVIREGRCSLDTSFSVFKYMALYSLTQFISVLILYTINTNLGDLQFLAIDLVITTTVAVLMSRTGPALVLGRVRPPGALLSVPVLSSLLLQMVLVTGVQLGGYFLTLAQPWFVPLNRTVAAPDNLPNYENTVVFSLSSFQYLILAAAVSKGAPFRRPLYTNVPFLVALALLSSVLVGLVLVPGLLQGPLALRNITDTGFKLLLLGLVTLNFVGAFMLESVLDQCLPACLRRLRPKRASKKRFKQLERELAEQPWPPLPAGPLR

SEQ ID NO: 815755 - protein, 1202 aa, Homo sapiens
MSADSSPLVGSTPTGYGTLTIGTSIDPLSSSVSSVRLSGYCGSPWRVIGYHVVVWMMAGIPLLLFRWKPLWGVRLRLRPCNLAHAETLVIEIRDKEDSSWQLFTVQVQTEAIGEGSLEPSPQSQAEDGRSQAAVGAVPEGAWKDTAQLHKSEEAVSVGQKRVLRYYLFQGQRYIWIETQQAFYQVSLLDHGRSCDDVHRSRHGLSLQDQMVRKAIYGPNVISIPVKSYPQLLVDEALNPYYGFQAFSIALWLADHYYWYALCIFLISSISICLSLYKTRKQSQTLRDMVKLSMRVCVCRPGGEEEWVDSSELVPGDCLVLPQEGGLMPCDAALVAGECMVNESSLTGESIPVLKTALPEGLGPYCAETHRRHTLFCGTLILQARAYVGPHVLAVVTRTGFCTAKGGLVSSILHPRPINFKFYKHSMKFVAALSVLALLGTIYSIFILYRNRVPLNEIVIRALDLVTVVVPPALPAAMTVCTLYAQSRLRRQGIFCIHPLRINLGGKLQLVCFDKTGTLTEDGLDVMGVVPLKGQAFLPLVPEPRRLPVGPLLRALATCHALSRLQDTPVGDPMDLKMVESTGWVLEEEPAADSAFGTQVLAVMRPPLWEPQLQAMEEPPVPVSVLHRFPFSSALQRMSVVVAWPGATQPEAYVKGSPELVAGLCNPETVPTDFAQMLQSYTAAGYRVVALASKPLPTVPSLEAAQQLTRDTVEGDLSLLGLLVMRNLLKPQTTPVIQALRRTRIRAVMVTGDNLQTAVTVARGCGMVAPQEHLIIVHATHPERGQPASLEFLPMESPTAVNGVKDPDQAASYTVEPDPRSRHLALSGPTFGIIVKHFPKLLPKVLVQGTVFARMAPEQKTELVCELQKLQYCVGMCGDGANDCGALKAADVGISLSQAEASVVSPFTSSMASIECVPMVIREGRCSLDTSFSVFKYMALYSLTQFISVLILYTINTNLGDLQFLAIDLVITTTVAVLMSRTGPALVLGRVRPPGALLSVPVLSSLLLQMVLVTGVQLGGYFLTLAQPWFVPLNRTVAAPDNLPNYENTVVFSLSSFQYLILAAAVSKGAPFRRPLYTNERARPVPPRLPAPPPAQAGLQEALQAAGTRAGRAALAAAARRPPEVVQAHGHPRHWNSLPLSHQLDPSPATPPPPPPTSLRLATVYTPPPRPPPPWGSVDYCPLPWTIPRRGGSPQLPSVLLSV

SEQ ID NO: 815756 - protein, 1141 aa, Homo sapiens
MSADSSPLVGSTPTGYGTLTIGTSIDPLSSSVSSVRLSGYCGSPWRVIGYHVVVWMMAGIPLLLFRWKPLWGVRLRLRPCNLAHAETLVIEIRDKEDSSWQLFTVQVQTEAIGEGSLEPSPQSQAEDGRSQAAVGAVPEGAWKDTAQLHKSEEAVSVGQKRVLRYYLFQGQRYIWIETQQAFYQVSLLDHGRSCDDVHRSRHGLSLQDQMVRKAIYGPNVISIPVKSYPQLLVDEALNPYYGFQAFSIALWLADHYYWYALCIFLISSISICLSLYKTRKQSQTLRDMVKLSMRVCVCRPGGEEEWVDSSELVPGDCLVLPQEGGLMPCDAALVAGECMVNESSLTGESIPVLKTALPEGLGPYCAETHRRHTLFCGTLILQARAYVGPHVLAVVTRTGFCTAKGGLVSSILHPRPINFKFYKHSMKFVAALSVLALLGTIYSIFILYRNRVPLNEIVIRALDLVTVVVPPALPAAMTVCTLYAQSRLRRQGIFCIHPLRINLGGKLQLVCFDKTGTLTEDGLDVMGVVPLKGQAFLPLVPEPRRLPVGPLLRALATCHALSRLQDTPVGDPMDLKMVESTGWVLEEEPAADSAFGTQVLAVMRPPLWEPQLQAMEEPPVPVSVLHRFPFSSALQRMSVVVAWPGATQPEAYVKGSPELVAGLCNPETVPTDFAQMLQSYTAAGYRVVALASKPLPTVPSLEAAQQLTRDTVEGDLSLLGLLVMRNLLKPQTTPVIQALRRTRIRAVMVTGDNLQTAVTVARGCGMVAPQEHLIIVHATHPERGQPASLEFLPMESPTAVNGVKVLVQGTVFARMAPEQKTELVCELQKLQYCVGMCGDGANDCGALKAADVGISLSQAEASVVSPFTSSMASIECVPMVIREGRCSLDTSFSVFKYMALYSLTQFISVLILYTINTNLGDLQFLAIDLVITTTVAVLMSRTGPALVLGRVRPPGALLSVPVLSSLLLQMVLVTGVQLGGYFLTLAQPWFVPLNRTVAAPDNLPNYENTVVFSLSSFQYLILAAAVSKGAPFRRPLYTNVPFLVALALLSSVLVGLVLVPGLLQGPLALRNITDTGFKLLLLGLVTLNFVGAFMLESVLDQCLPACLRRLRPKRASKKRFKQLERELAEQPWPPLPAGPLR

SEQ ID NO: 815757 - protein, 994 aa, Homo sapiens
MSADSSPLVGSTPTGYGTLTIGTSIDPLSSSVSSVRLSGYCGSPWRVIGYHVVVWMMAGIPLLLFRWKPLWGVRLRLRPCNLAHAETLVIEIRDKEDSSWQLFTVQVQTEAIGEGSLEPSPQSQAEDGRSQAAVGAVPEGAWKDTAQLHKSEEAVSVGQKRVLRYYLFQGQRYIWIETQQAFYQVSLLDHGRSCDDVHRSRHGLSLQDQMVRKAIYGPNVISIPVKSYPQLLVDEALNPYYGFQAFSIALWLADHYYWYALCIFLISSISICLSLYKTRKQSQTLRDMVKLSMRVCVCRPGGEEEWVDSSELVPGDCLVLPQEGGLMPCDAALVAGECMVNESSLTGESIPVLKTALPEGLGPYCAETHRRHTLFCGTLILQARAYVGPHVLAVVTRTGFCTAKGGLVSSILHPRPINFKFYKHSMKFVAALSVLALLGTIYSIFILYRNRVPLNEIVIRALDLVTVVVPPALPAAMTVCTLYAQSRLRRQGIFCIHPLRINLGGKLQLVCFDKTGTLTEDGLDVMGVVPLKGQAFLPLVPEPRRLPVGPLLRALATCHALSRLQDTPVGDPMDLKMVESTGWVLEEEPAADSAFGTQVLAVMRPPLWEPQLQAMEEPPVPVSVLHRFPFSSALQRMSVVVAWPGATQPEAYVKGSPELVAGLCNPETVPTDFAQMLQSYTAAGYRVVALASKPLPTVPSLEAAQQLTRDTVEGDLSLLGLLVMRNLLKPQTTPVIQALRRTRIRAVMVTGDNLQTAVTVARGCGMVAPQEHLIIVHATHPERGQPASLEFLPMESPTAVNGVKDPDQAASYTVEPDPRSRHLALSGPTFGIIVKHFPKLLPKVLVQGTVFARMAPEQKTELVCELQKLQYCVGMCGDGANDCGALKAADVGISLSQAEASVVSPFTSSMASIECVPMVIREGRCSLDTSFSVFKYMALYSLTQFISVLILYTINTNLGDLQFLAIDWSWDGCGHRGRCSACPCSAACCCRWSW

SEQ ID NO: 815758 - protein, 1111 aa, Homo sapiens
MSADSSPLVGSTPTGYGTLTIGTSIDPLSSSVSSVRLSGYCGSPWRVIGYHVVVWMMAGIPLLLFRWKPLWGVRLRLRPCNLAHAETLVIEIRDKEDSSWQLFTVQVQTEAIGEGSLEPSPQSQAEDGRSQAAVGAVPEGAWKDTAQLHKSEEAVSVGQKRVLRYYLFQGQRYIWIETQQAFYQVSLLDHGRSCDDVHRSRHGLSLQDQMVRKAIYGPNVISIPVKSYPQLLVDEALNPYYGFQAFSIALWLADHYYWYALCIFLISSISICLSLYKTRKQSQTLRDMVKLSMRVCVCRPGGEEEWVDSSELVPGDCLVLPQEGGLMPCDAALVAGECMVNESSLTGESIPVLKTALPEGLGPYCAETHRRHTLFCGTLILQARAYVGPHVLAVVTRTGFCTAKGGLVSSILHPRPINFKFYKHSMKFVAALSVLALLGTIYSIFILYRNRVPLNEIVIRALDLVTVVVPPALPAAMTVCTLYAQSRLRRQGIFCIHPLRINLGGKLQLVCFDKTGTLTEDGLDVMGVVPLKGQAFLPLVPEPRRLPVGPLLRALATCHALSRLQDTPVGDPMDLKMVESTGWVLEEEPAADSAFGTQVLAVMRPPLWEPQLQAMEEPPVPVSVLHRFPFSSALQRMSVVVAWPGATQPEAYVKGSPELVAGLCNPETVPTDFAQMLQSYTAAGYRVVALASKPLPTVPSLEAAQQLTRDTVEGDLSLLGLLVMRNLLKPQTTPVIQALRRTRIRAVMVTGDNLQTAVTVARGCGMVAPQEHLIIVHATHPERGQPASLEFLPMESPTAVNGVKDPDQAASYTVEPDPRSRHLALSGPTFGIIVKHFPKLLPKVLVQGTVFARMAPEQKTELVCELQKLQYCVGMCGDGANDCGALKAADVGISLSQAEASVVSPFTSSMASIECVPMVIREGRCSLDTSFSVFKYMALYSLTQFISVLILYTINTNLGDLQFLAIDLVITTTVAVLMSRTGPALVLGRVRPPGALLSVPVLSSLLLQMVLVTGVQLGGYFLTLAQPWFVPLNRTVAAPDNLPNYENTVVFSLSSFQYLILAAAVSKGAPFRRPLYTNGATAGAGGRCWRREGGALGCWGGRWERGAGRVE

SEQ ID NO: 815759 - protein, 803 aa, Homo sapiens
MSADSSPLVGSTPTGYGTLTIGTSIDPLSSSVSSVRLSGYCGSPWRVIGYHVVVWMMAGIPLLLFRWKPLWGVRLRLRPCNLAHAETLVIEIRDKEDSSWQLFTVQVQTEAIGEGSLEPSPQSQAEDGRSQAAVGAVPEGAWKDTAQLHKSEEAVSVGQKRVLRYYLFQGQRYIWIETQQAFYQVSLLDHGRSCDDVHRSRHGLSLQDQMVRKAIYGPNVISIPVKSYPQLLVDEALNPYYGFQAFSIALWLADHYYWYALCIFLISSISICLSLYKTRKQSQTLRDMVKLSMRVCVCRPGGEEEWVDSSELVPGDCLVLPQEGGLMPCDAALVAGECMVNESSLTGESIPVLKTALPEGLGPYCAETHRRHTLFCGTLILQARAYVGPHVLAVVTRTGFCTAKGGLVSSILHPRPINFKFYKHSMKFVAALSVLALLGTIYSIFILYRNRVPLNEIVIRALDLVTVVVPPALPAAMTVCTLYAQSRLRRQGIFCIHPLRINLGGKLQLVCFDKTGTLTEDGLDVMGVVPLKGQAFLPLVPEPRRLPVGPLLRALATCHALSRLQDTPVGDPMDLKMVESTGWVLEEEPAADSAFGTQVLAVMRPPLWEPQLQAMEEPPVPVSVLHRFPFSSALQRMSVVVAWPGATQPEAYVKGSPELVAGLCNPETVPTDFAQMLQSYTAAGYRVVALASKPLPTVPSLEAAQQLTRDTVEGDLSLLGLLVMRNLLKPQTTPVIQALRRTRIRAVMVTGDNLQTAVTVARGCGMVAPQEHLIIVHATTSHIPEVGDCLHSSPETTPTLGKR

SEQ ID NO: 815760 - protein, 552 aa, Homo sapiens
MSADSSPLVGSTPTGYGTLTIGTSIDPLSSSVSSVRLSGYCGSPWRVIGYHVVVWMMAGIPLLLFRWKPLWGVRLRLRPCNLAHAETLVIEIRDKEDSSWQLFTVQVQTEAIGEGSLEPSPQSQAEDGRSQAAVGAVPEGAWKDTAQLHKSEEAVSVGQKRVLRYYLFQGQRYIWIETQQAFYQVSLLDHGRSCDDVHRSRHGLSLQDQMVRKAIYGPNVISIPVKSYPQLLVDEALNPYYGFQAFSIALWLADHYYWYALCIFLISSISICLSLYKTRKQSQTLRDMVKLSMRVCVCRPGGEEEWVDSSELVPGDCLVLPQEGGLMPCDAALVAGECMVNESSLTGESIPVLKTALPEGLGPYCAETHRRHTLFCGTLILQARAYVGPHVLAVVTRTGFCTAKGGLVSSILHPRPINFKFYKHSMKFVAALSVLALLGTIYSIFILYRNRVPLNEIVIRALDLVTVVVPPALPAAMTVCTLYAQSRLRRQGIFCIHPLRINLGGKLQLVCFDKVGPQVGLVQGSGTATGAPVRPPHPRYSLSSTHRMPGPV

SEQ ID NO: 815761 - protein, 51 aa, Homo sapiens
GPGTGAATGGAAQRARAQQPAAADGPGDRRAARGLLPDPGPAMVSRELTDH

SEQ ID NO: 815762 - protein, 461 aa, Homo sapiens
MPPSGPRGTLLLLPLLLLLLLRAVLAVPLERGAPNKEETPATESPDTGLYYHRYLQEVIDVLETDGHFREKLQAANAEDIKSGKLSRELDFVSHHVRTKLDELKRQEVSRLRMLLKAKMDAEQDPNVQVDHLNLLKQFEHLDPQNQHTFEARDLELLIQTATRDLAQYDAAHHEEFKRYEMLKEHERRRYLESLGEEQRKEAERKLEEQQRRHREHPKVNVPGSQAQLKEVWEELDGLDPNRFNPKTFFILHDINSDGVLDEQELEALFTKELEKVYDPKNEEDDMREMEEERLRMREHVMKNVDTNQDRLVTLEEFLASTQRKEFGDTGEGWETVEMHPAYTEEELRRFEEELAAREAELNAKAQRLSQETEALGRSQGRLEAQKRELQQAVLHMEQRKQQQQQQQGHKAPAAHPEGQLKFHPDTDDVPVPAPAGDQKEVDTSEKKLLERLPEVEVPQHL

SEQ ID NO: 815763 - protein, 410 aa, Homo sapiens
CWLTLEDPGSGVLRGPFLYEPVAANAEDIKSGKLSRELDFVSHHVRTKLDELKRQEVSRLRMLLKAKMDAEQDPNVQVDHLNLLKQFEHLDPQNQHTFEARDLELLIQTATRDLAQYDAAHHEEFKRYEMLKEHERRRYLESLGEEQRKEAERKLEEQQRRHREHPKVNVPGSQAQLKEVWEELDGLDPNRFNPKTFFILHDINSDGVLDEQELEALFTKELEKVYDPKNEEDDMREMEEERLRMREHVMKNVDTNQDRLVTLEEFLASTQRKEFGDTGEGWETVEMHPAYTEEELRRFEEELAAREAELNAKAQRLSQETEALGRSQGRLEAQKRELQQAVLHMEQRKQQQQQQQGHKAPAAHPEGQLKFHPDTDDVPVPAPAGDQKEVDTSEKKLLERLPEVEVPQHL

SEQ ID NO: 815764 - protein, 73 aa, Homo sapiens
GLLCLSLLPQDTGLYYHRYLQEVIDVLETDGHFREKLQAANAEDIKSGKLSRELDFVSQGQPLPESPARSDKR

SEQ ID NO: 815765 - protein, 229 aa, Homo sapiens
MPPSGPRGTLLLLPLLLLLLLRAVLAVPLERGAPNKEETPATESPDTGLYYHRYLQEVIDVLETDGHFREKLQAANAEDIKSGKLSRELDFVSHHVRTKLDELKRQEVSRLRMLLKAKMDAEQDPNVQVDHLNLLKQFEHLDPQNQHTFEARDLELLIQTATRDLAQYDAAHHEEFKRYEMLKEHERRRYLESLGEEQRKEAERKLEEQQRRHREHPKVNVPVRTPFVP

SEQ ID NO: 815766 - protein, 134 aa, Homo sapiens
RHYMLVFIMVIIVSIRLSRGITSSRKPSLIAPGSSCLLGFPSAVRDFFGSCLAQDGGSERTCPQVLDSSLSSRCTGGSSESPDLPSSSLQISTVMVSWMSRSWRHSSPRSEHLGSLGHLEGRPNQPLVSSCSPL

SEQ ID NO: 815767 - protein, 178 aa, Homo sapiens
GLVVWEAEVPDNPGADSVSRALNARARESCMTVTQACFLEPSLGSIPFSTPWSLGSGPSNGSSGVAKAWGPPFHRGRPVVTCPLITDPTSAQNFFTRDLTHPVLGPLRYLAILFPSDINSDGVLDEQELEALFTKELEKVYDPKNEEDDMREMEEERLRMREHVMKNVRWGPGGGEDG

SEQ ID NO: 815768 - protein, 461 aa, Homo sapiens; identical to SEQ ID NO: 815762

SEQ ID NO: 815769 - protein, 461 aa, Homo sapiens; identical to SEQ ID NO: 815762

SEQ ID NO: 815770 - protein, 461 aa, Homo sapiens; identical to SEQ ID NO: 815762

SEQ ID NO: 815771 - protein, 461 aa, Homo sapiens; identical to SEQ ID NO: 815762

SEQ ID NO: 815772 - protein, 461 aa, Homo sapiens; identical to SEQ ID NO: 815762

SEQ ID NO: 815773 - protein, 461 aa, Homo sapiens; identical to SEQ ID NO: 815762

SEQ ID NO: 815774 - protein, 461 aa, Homo sapiens; identical to SEQ ID NO: 815762

SEQ ID NO: 815775 - protein, 461 aa, Homo sapiens; identical to SEQ ID NO: 815762

SEQ ID NO: 815776 - protein, 461 aa, Homo sapiens; identical to SEQ ID NO: 815762

SEQ ID NO: 815777 - protein, 461 aa, Homo sapiens; identical to SEQ ID NO: 815762

SEQ ID NO: 815778 - protein, 461 aa, Homo sapiens; identical to SEQ ID NO: 815762

SEQ ID NO: 815779 - protein, 461 aa, Homo sapiens; identical to SEQ ID NO: 815762

SEQ ID NO: 815780 - protein, 250 aa, Homo sapiens
MLKEHERRRYLESLGEEQRKEAERKLEEQQRRHREHPKVNVPGSQAQLKEVWELEALFTKELEKVYDPKNEEDDMREMEEERLRMREHVMKNVDTNQDRLVTLEEFLASTQRKEFGDTGEGWETVEMHPAYTEEELRRFEEELAAREAELNAKAQRLSQETEALGRSQGRLEAQKRELQQAVLHMEQRKQQQQQQQGHKAPAAHPEGQLKFHPDTDDVPVPAPAGDQKEVDTSEKKLLERLPEVEVPQHL

SEQ ID NO: 815781 - protein, 461 aa, Homo sapiens; identical to SEQ ID NO: 815762

SEQ ID NO: 815782 - protein, 461 aa, Homo sapiens; identical to SEQ ID NO: 815762

SEQ ID NO: 815783 - protein, 164 aa, Homo sapiens
MPPSGPRGTLLLLPLLLLLLLRSTQRKEFGDTGEGWETVEMHPAYTEEELRRFEEELAAREAELNAKAQRLSQETEALGRSQGRLEAQKRELQQAVLHMEQRKQQQQQQQGHKAPAAHPEGQLKFHPDTDDVPVPAPAGDQKEVDTSEKKLLERLPEVEVPQHL

SEQ ID NO: 815784 - protein, 461 aa, Homo sapiens; identical to SEQ ID NO: 815762

SEQ ID NO: 815785 - protein, 461 aa, Homo sapiens; identical to SEQ ID NO: 815762

SEQ ID NO: 815786 - protein, 461 aa, Homo sapiens; identical to SEQ ID NO: 815762

SEQ ID NO: 815787 - protein, 102 aa, Homo sapiens
RLYALRVMGCGEGETTLPCLPLGPEEPSFCCRCCCCSCFAPCWLSPWSEGRPTRRRPLRLRVPTQACTTTGTSRRSSMYWRRMGISERSCRLPMRRTSRAGS

SEQ ID NO: 815788 - protein, 314 aa, Homo sapiens
MPPSGPRGTLLLLPLLLLLLLRAVLAVPLERGAPNKEETPATESPDTGLYYHRYLQEVIDVLETDGHFREKLQAANAEDIKSGKLSRELDFVSHHVRTKLDELKRQEVSRLRMLLKAKMDAEQDPNVQVDHLNLLKQFEHLDPQNQHTFEARDLELLIQTATRDLAQYDAAHHEEFKRYEMLKEHERRRYLESLGEEQRKEAERKLEEQQRRHREHPKVNVPGSQAQLKEVWEELDGLDPNRFNPKTFFILHDINSDGVLDEQELEALFTKELEKVYDPKNEEDDMREMEEERLRMREHVMKNLKTFPYLLWNQ

SEQ ID NO: 815789 - protein, 102 aa, Homo sapiens; identical to SEQ ID NO: 815787

SEQ ID NO: 815790 - protein, 73 aa, Homo sapiens
  misc_feature (3)..(3): Xaa can be any naturally occurring amino acid
  misc_feature (24)..(24): Xaa can be any naturally occurring amino acid
  misc_feature (30)..(30): Xaa can be any naturally occurring amino acid
TLXQPSLKIHNPNNNNHNNKPKTXPLTTFXPLQVHPDTDDVPVPAPAGDQKEVDTSEKKLLERLPEVEVPQHL

SEQ ID NO: 815791 - protein, 102 aa, Homo sapiens; identical to SEQ ID NO: 815787

SEQ ID NO: 815792 - protein, 102 aa, Homo sapiens; identical to SEQ ID NO: 815787

SEQ ID NO: 815793 - protein, 286 aa, Homo sapiens
MPPSGPRGTLLLLPLLLLLLLRAVLAVPLERGAPNKEETPATESPDTGLYYHRYLQEVIDVLETDGHFREKLQAANAEDIKSGKLSRELDFVSHHVRTKLDELKRQEVSRLRMLLKAKMDAEQDPNVQVDHLNLLKQFEHLDPQNQHTFEARDLELLIQTATRDLAQYDAAHHEEFKRYEMLKEHERRRYLESLGEEQRKEAERKLEEQQRRHREHPKVNVPGSQAQLKEVWEELDGLDPNRFNPKTFFILHAQDLPLPFVEPVMPQRQCPLHSWVPGAGDPQYSR

SEQ ID NO: 815794 - protein, 322 aa, Homo sapiens
VRNSRDALCGEGETTKAPAAHPEGQLKSTQTQTMYLSQLQPGDQKEVDTSEKKLLERLPEVEVPPASVILRDPSAVLAVPLERGAPNKEETPATESPDTGLYYHRYLQEVIDVLETDGHFREKLQAANAEDIKSGKLSRELDFVSHHVRTKLDELKRQEVSRLRMLLKAKMDAEQDPNVQVDHLNLLKQFEHLDPQNQHTFEARDLELLIQTATRDLAQYDAAHHEEFKRYEMLKEHERRRYLESLGEEQRKEAERKLEEQQRRHREHPKVNVPMLGSWGGGTAWHFTHCCHPRSTCLHFHSLQVCGSSLLSSEGLAFSRVQ

SEQ ID NO: 815795 - protein, 106 aa, Homo sapiens
  misc_feature (10)..(10): Xaa can be any naturally occurring amino acid
CRLVLAWDVXIALCGEGETTLPCLPLGPEEPSFCCRCCCCSCFAPCWLSPWSEGRPTRRRPLRLRVPTQACTTTGTSRRSSMYWRRMGISERSCRLPMRRTSRAGS

SEQ ID NO: 815796 - protein, 106 aa, Homo sapiens; identical to SEQ ID NO: 815795
  misc_feature (10)..(10): Xaa can be any naturally occurring amino acid

SEQ ID NO: 815797 - protein, 112 aa, Homo sapiens
  misc_feature (10)..(10): Xaa can be any naturally occurring amino acid
CRLVLAWDVXIALCGEGETTLPCLPLGPEEPSFCCRCCCCSCFAPCWLSPWSEGRPTRRRPLRLRVPTQACTTTGTSRRSSMYWRRMGISERSCRLPMRRTSRATAPAPRAP

SEQ ID NO: 815798 - protein, 119 aa, Homo sapiens
MPPSGPRGTLLLLPLLLLLLLRAVLAVPLERGAPNKEETPATESPDTGLYYHRYLQEVIDVLETDGHFREKLQAANAEDIKSGKLSRELDFVSHQDLGPAPQPHLEPLKTSPTHLSGLI

SEQ ID NO: 815799 - protein, 467 aa, Homo sapiens
MVHSSMGAPEIRMSKPLEAEKQGLDSPSEHTDTERNGPDTNHQNPQNKTSPFSVSPTGPSTKIKAEDPSGDSAPAAPLPPQPAQPHLPQAQLMLTGSQLAGDIQQLLQLQQLVLVPGHHLQPPAQFLLPQAQQSQPGLLPTPNLFQLPQQTQGALLTSQPRAGLPTQAVTRPTLPDPHLSHPQPPKCLEPPSHPEEPSDLEELEQFARTFKQRRIKLGFTQGDVGLAMGKLYGNDFSQTTISRFEALNLSFKNMCKLKPLLEKWLNDAETMSVDSSLPSPNQLSSPSLGFDGLPGRRRKKRTSIETNVRFALEKSFLANQKPTSEEILLIAEQLHMEKEVIRVWFCNRRQKEKRINPCSAAPMLPSPGKPASYSPHMVTPQGGAGTLPLSQASSSLSTTVTTLSSAVGTLHPSRTAGGGGGGGGAAPPLNSIPSVTPPPPATTNSTNPSPQGSHSAIGLSGLNPSTG

SEQ ID NO: 815800 - protein, 481 aa, Homo sapiens
RQHELGLGQMRLAGGAGSMVHSSMGAPEIRMSKPLEAEKQGLDSPSEHTDTERNGPDTNHQNPQNKTSPFSVSPTGPSTKIKAEDPSGDSAPAAPLPPQPAQPHLPQAQLMLTGSQLAGDIQQLLQLQQLVLVPGHHLQPPAQFLLPQAQQSQPGLLPTPNLFQLPQQTQGALLTSQPRAGLPTQPPKCLEPPSHPEEPSDLEELEQFARTFKQRRIKLGFTQGDVGLAMGKLYGNDFSQTTISRFEALNLSFKNMCKLKPLLEKWLNDAETMSVDSSLPSPNQLSSPSLGFDGLPGRRRKKRTSIETNVRFALEKSFLANQKPTSEEILLIAEQLHMEKEVIRVWFCNRRQKEKRINPCSAAPMLPSPGKPASYSPHMVTPQGGAGTLPLSQASSSLSTTVTTLSSAVGTLHPSRTAGGGGGGGGAAPPLNSIPSVTPPPPATTNSTNPSPQGSHSAIGLSGLNPSTGPGLWWNPAPYQP

SEQ ID NO: 815801 - protein, 497 aa, Homo sapiens
RQHELGLGQMRLAGGAGSMVHSSMGAPEIRMSKPLEAEKQGLDSPSEHTDTERNGPDTNHQNPQNKTSPFSVSPTGPSTKIKAEDPSGDSAPAAPLPPQPAQPHLPQAQLMLTGSQLAGDIQQLLQLQQLVLVPGHHLQPPAQFLLPQAQQSQPGLLPTPNLFQLPQQTQGALLTSQPRAGLPTQAVTRPTLPDPHLSHPQPPKCLEPPSHPEEPSDLEELEQFARTFKQRRIKLGFTQGDVGLAMGKLYGNDFSQTTISRFEALNLSFKNMCKLKPLLEKWLNDAETMSVDSSLPSPNQLSSPSLGFDGLPGRRRKKRTSIETNVRFALEKSFLANQKPTSEEILLIAEQLHMEKEVIRVWFCNRRQKEKRINPCSAAPMLPSPGKPASYSPHMVTPQGGAGTLPLSQASSSLSTTVTTLSSAVGTLHPSRTAGGGGGGGGAAPPLNSIPSVTPPPPATTNSTNPSPQGSHSAIGLSGLNPSTGPGLWWNPAPYQP

SEQ ID NO: 815802 - protein, 503 aa, Homo sapiens
RQHELGLGQMRLAGGAGSMVHSSMGAPEIRMSKPLEAEKQGLDSPSEHTDTERNGPDTNHQNPQNKTSPFSVSPTGPSTKVGILSGLHLTFWGPGPCLSPPQIKAEDPSGDSAPAAPLPPQPAQPHLPQAQLMLTGSQLAGDIQQLLQLQQLVLVPGHHLQPPAQFLLPQAQQSQPGLLPTPNLFQLPQQTQGALLTSQPRAGLPTQPPKCLEPPSHPEEPSDLEELEQFARTFKQRRIKLGFTQGDVGLAMGKLYGNDFSQTTISRFEALNLSFKNMCKLKPLLEKWLNDAETMSVDSSLPSPNQLSSPSLGFDGLPGRRRKKRTSIETNVRFALEKSFLANQKPTSEEILLIAEQLHMEKEVIRVWFCNRRQKEKRINPCSAAPMLPSPGKPASYSPHMVTPQGGAGTLPLSQASSSLSTTVTTLSSAVGTLHPSRTAGGGGGGGGAAPPLNSIPSVTPPPPATTNSTNPSPQGSHSAIGLSGLNPSTGPGLWWNPAPYQP

SEQ ID NO: 815803 - protein, 451 aa, Homo sapiens
MVHSSMGAPEIRMSKPLEAEKQGLDSPSEHTDTERNGPDTNHQNPQNKTSPFSVSPTGPSTKIKAEDPSGDSAPAAPLPPQPAQPHLPQAQLMLTGSQLAGDIQQLLQLQQLVLVPGHHLQPPAQFLLPQAQQSQPGLLPTPNLFQLPQQTQGALLTSQPRAGLPTQPPKCLEPPSHPEEPSDLEELEQFARTFKQRRIKLGFTQGDVGLAMGKLYGNDFSQTTISRFEALNLSFKNMCKLKPLLEKWLNDAETMSVDSSLPSPNQLSSPSLGFDGLPGRRRKKRTSIETNVRFALEKSFLANQKPTSEEILLIAEQLHMEKEVIRVWFCNRRQKEKRINPCSAAPMLPSPGKPASYSPHMVTPQGGAGTLPLSQASSSLSTTVTTLSSAVGTLHPSRTAGGGGGGGGAAPPLNSIPSVTPPPPATTNSTNPSPQGSHSAIGLSGLNPSTG

SEQ ID NO: 815804 - protein, 128 aa, Homo sapiens
MLGCPCSAPRLVWAWSQQRLRLWQPPSPASLLASPPHPLHPHPPPPPLAARRQHRPLEVQGGPRQGPNLSEGQPCLPSHSSGPCLGPLPGKRARRPVVGTQRVLRAGVTREERPKKQPTKKKKKKERN

SEQ ID NO: 815805 - protein, 367 aa, Homo sapiens
MVHSSMGAPEIRMSKPLEAEKQGLDSPSEHTDTERNGPDTNHQNPQNKTSPFSVSPTGPSTKIKAEDPSGDSAPAAPLPPQPAQPHLPQAQLMLTGSQLAGDIQQLLQLQQLVLVPGHHLQPPAQFLLPQAQQSQPGLLPTPNLFQLPQQTQGALLTSQPRAGLPTQPPKCLEPPSHPEEPSDLEELEQFARTFKQRRIKLGFTQGDVGLAMGKLYGNDFSQTTISRFEALNLSFKNMCKLKPLLEKWLNDAETMSVDSSLPSPNQLSSPSLGFDGLPGRRRKKRTSIETNVRFALEKSFLANQKPTSEEILLIAEQLHMEKEVIRVWFCNRRQKEKRINPCMWVGEWERQWEEGRTHPSSAGATQL

SEQ ID NO: 815806 - protein, 200 aa, Homo sapiens
  misc_feature (1)..(1): Xaa can be any naturally occurring amino acid
XRLVQAGVLGSGSMVHSSMGAPEIRMSKPLEAEKQGLDSPSEHTDTERNGPDTNHQNPQNKTSPFSVSPTGPSTKIKAEDPSGDSAPAAPLPPQPAQPHLPQAQLMLTGSQLAGDIQQLLQLQQLVLVPGHHLQPPAQFLLPQAQQSQPGLLPTPNLFQLPQQTQGALLTSQPRAGLPTQVRLSIECTRPGQQQGLLKAG

SEQ ID NO: 815807 - protein, 481 aa, Homo sapiens; identical to SEQ ID NO: 815800

SEQ ID NO: 815808 - protein, 400 aa, Homo sapiens
MVHSSMGAPEIRMSKPLEAEKQGLDSPSEHTDTERNGPDTNHQNPQNKTSPFSVSPTGPSTKIKAEDPSGDSAPAAPLPPQPAQPHLPQAQLMLTGSQLAGDIQQLLQLQQLVLVPGHHLQPPAQFLLPQAQQSQPGLLPTPNLFQLPQQTQGALLTSQPRAGLPTQPPKCLEPPSHPEEPSDLEELEQFARTFKQRRIKLGFTQGDVGLAMGKLYGNDFSQTTISRFEALNLSFKNMCKLKPLLEKWLNDAETMSVDSSLPSPNQLSSPSLGFDGLPGRRRKKRTSIETNVRFALEKSFLANQKPTSEEILLIAEQLHMEKEVIRVWFCNRRQKEKRINPCSAAPMLPSPGKPASYSPHMVTPQGGAGTLPLSQASSSLSTTAQTPALKAATRLSACQA

SEQ ID NO: 815809 - protein, 519 aa, Homo sapiens
MVHSSMGAPEIRMSKPLEAEKQGLDSPSEHTDTERNGPDTNHQNPQNKTSPFSVSPTGPSTKIKAEDPSGDSAPAAPLPPQPAQPHLPQAQLMLTGSQLAGDIQQLLQLQQLVLVPGHHLQPPAQFLLPQAQQSQPGLLPTPNLFQLPQQTQGALLTSQPRAGLPTQPPKCLEPPSHPEEPSDLEELEQFARTFKQRRIKLGFTQGDVGLAMGKLYGNDFSQTTISRFEALNLSFKNMCKLKPLLEKWLNDAETMSVDSSLPSPNQLSSPSLGFDGLPGRRRKKRTSIETNVRFALEKSFLANQKPTSEEILLIAEQLHMEKEVIRVWFCNRRQKEKRINPCSAAPMLPSPGKPASYSPHMVTPQGGAGTLPLSQASSSLSTTEAQMVGLSSGLSPALMSNNPLATIQALASGGTLPLTSLDGSGNLVLGAAGAAPGSPGLVTSPLFLNHAGLPLLSTPPGVGLVSAAAAAVAASISSKSPGLSSSSSSSSSSSSSTCSETAAQTPGGPGGPEAGSKPE

SEQ ID NO: 815810 - protein, 403 aa, Homo sapiens [sequence omitted]

SEQ ID NO: 815811 - protein, 1429 aa, Homo sapiens
MIKCLSVEVQAKLRSGLAISSLGQCVEELALNSIDAEAKCVAVRVNMETFQVQVIDNGFGMGSDDVEKVGNRYFTSKCHSVQDLENPRFYGFRGEALANIADMASAVEISSKKNRTMKTFVKLFQSGKALKACEADVTRASAGTTVTVYNLFYQLPVRRKCMDPRLEFEKVRQRIEALSLMHPSISFSLRNDVSGSMVLQLPKTKDVCSRFCQIYGLGKSQKLREISFKYKEFELSGYISSEAHYNKNMQFLFVNKRLVLRTKLHKLIDFLLRKESIICKPKNGPTSRQMNSSLRHRSTPELYGIYVINVQCQFCEYDVCMEPAKTLIEFQNWDTLLFCIQEGVKMFLKQEKLFVELSGEDIKEFSEDNGFSLFDATLQKRVTSDERSNFQEACNNILDSYEMFNLQSKAVKRKTTAENVNTQSSRDSEATRKNTNDAFLYIYESGGPGHSKMTEPSLQNKDSSCSESKMLEQETIVASEAGENEKHKKSFLEHSSLENPCGTSLEMFLSPFQTPCHFEESGQDLEIWKESTTVNGMAANILKNNRIQNQPKRFKDATEVGCQPLPFATTLWGVHSAQTEKEKKKESSNCGRRNVFSYGRVKLCSTGFITHVVQNEKTKSTETEHSFKNYVRPGPTRAQETFGNRTRHSVETPDIKDLASTLSKESGQLPNKKNCRTNISYGLENEPTATYTMFSAFQEGSKKSQTDCILSDTSPSFPWYRHVSNDSRKTDKLIGFSKPIVRKKLSLSSQLGSLEKFKRQYGKVENPLDTEVEESNGVTTNLSLQVEPDILLKDKNRLENSDVCKITTMEHSDSDSSCQPASHILDSEKFPFSKDEDCLEQQMPSLRESPMTLKELSLFNRKPLDLEKSSESLASKLSRLKGSERETQTMGMMSRFNELPNSDSSRKDSKLCSVLTQDFCMLFNNKHEKTENGVIPTSDSATQDNSFNKNSKTHSNSNTTENCVISETPLVLPYNNSKVTGKDSDVLIRASEQQIGSLDSPSGMLMNPVEDATGDQNGICFQSEESKARACSETEESNTCCSDWQRHFDVALGRMVYVNKMTGLSTFIAPTEDIQAACTKDLTTVAVDVVLENGSQYRCQPFRSDLVLPFLPRARAERTVMRQDNRDTVDDTVSSESLQSLFSEWDNPVFARYPEVAVDVSSGQAESLAVKIHNILYPYRFTKGMIHSMQVLQQVDNKFIACLMSTKTEENGEADSYEKQQAQGSGRKKLLSSTLIPPLEITVTEEQRRLLWCYHKNLEDLGLEFVFPDTSDSLVLVGKVPLCFVEREANELRRGRSTVTKSIVEEFIREQLELLQTTGGIQGTLPLTVQKVLASQACHGAIKFNDGLSLQESCRLIEALSSCQLPFQCAHGRPSMLPLADIDHLEQEKQIKPNLTKLRKMAQAWRLFGKAECDTRQSLQQSMPPCEPP

SEQ ID NO: 815812 - protein, 1453 aa, Homo sapiens
MIKCLSVEVQAKLRSGLAISSLGQCVEELALNSIDAEAKCVAVRVNMETFQVQVIDNGFGMGSDDVEKVGNRYFTSKCHSVQDLENPRFYGFRGEALANIADMASAVEISSKKNRTMKTFVKLFQSGKALKACEADVTRASAGTTVTVYNLFYQLPVRRKCMDPRLEFEKVRQRIEALSLMHPSISFSLRNDVSGSMVLQLPKTKDVCSRFCQIYGLGKSQKLREISFKYKEFELSGYISSEAHYNKNMQFLFVNKRLVLRTKLHKLIDFLLRKESIICKPKNGPTSRQMNSSLRHRSTPELYGIYVINVQCQFCEYDVCMEPAKTLIEFQNWDTLLFCIQEGVKMFLKQEKLFVELSGEDIKEFSEDNGFSLFDATLQKRVTSDERSNFQEACNNILDSYEMFNLQSKAVKRKTTAENVNTQSSRDSEATRKNTNDAFLYIYESGGPGHSKMTEPSLQNKDSSCSESKMLEQETIVASEAGENEKHKKSFLEHSSLENPCGTSLEMFLSPFQTPCHFEESGQDLEIWKESTTVNGMAANILKNNRIQNQPKRFKDATEVGCQPLPFATTLWGVHSAQTEKEKKKESSNCGRRNVFSYGRVKLCSTGFITHVVQNEKTKSTETEHSFKNYVRPGPTRAQETFGNRTRHSVETPDIKDLASTLSKESGQLPNKKNCRTNISYGLENEPTATYTMFSAFQEGSKKSQTDCILSDTSPSFPWYRHVSNDSRKTDKLIGFSKPIVRKKLSLSSQLGSLEKFKRQYGKVENPLDTEVEESNGVTTNLSLQVEPDILLKDKNRLENSDVCKITTMEHSDSDSSCQPASHILDSEKFPFSKDEDCLEQQMPSLRESPMTLKELSLFNRKPLDLEKSSESLASKLSRLKGSERETQTMGMMSRFNELPNSDSSRKDSKLCSVLTQDFCMLFNNKHEKTENGVIPTSDSATQDNSFNKNSKTHSNSNTTENCVISETPLVLPYNNSKVTGKDSDVLIRASEQQIGSLDSPSGMLMNPVEDATGDQNGICFQSEESKARACSETEESNTCCSDWQRHFDVALGRMVYVNKMTGLSTFIAPTEDIQAACTKDLTTVAVDVVLENGSQYRCQPFRSDLVLPFLPRARAERTVMRQDNRDTVDDTVSSESLQSLFSEWDNPVFARYPEVAVDVSSGQAESLAVKIHNILYPYRFTKGMIHSMQVLQQVDNKFIACLMSTKTEENGEAGGNLLVLVDQHAAHERIRLEQLIIDSYEKQQAQGSGRKKLLSSTLIPPLEITVTEEQRRLLWCYHKNLEDLGLEFVFPDTSDSLVLVGKVPLCFVEREANELRRGRSTVTKSIVEEFIREQLELLQTTGGIQGTLPLTVQKVLASQACHGAIKFNDGLSLQESCRLIEALSSCQLPFQCAHGRPSMLPLADIDHLEQEKQIKPNLTKLRKMAQAWRLFGKAECDTRQSLQQSMPPCEPP

SEQ ID NO: 815813 - protein, 1453 aa, Homo sapiens; identical to SEQ ID NO: 815812

SEQ ID NO: 815814 - protein, 1453 aa, Homo sapiens; identical to SEQ ID NO: 815812

SEQ ID NO: 815815 - protein, 1453 aa, Homo sapiens; identical to SEQ ID NO: 815812

SEQ ID NO: 815816 - protein, 1402 aa, Homo sapiens
MIKCLSVEVQAKLRSGLAISSLGQCVEELALNSIDAEAKCVAVRVNMETFQVQVIDNGFGMGSDDVEKVGNRYFTSKCHSVQDLENPRFYGFRGEALANIADMASAVEISSKKNRTMKTFVKLFQSGKALKACEADVTRASAGTTVTVYNLFYQLPVRRKCMDPRLEFEKVRQRIEALSLMHPSISFSLRNDVSGSMVLQLPKTKDVCSRFCQIYGLGKSQKLREISFKYKEFELSGYISSEAHYNKNMQFLFVNKRLVLRTKLHKLIDFLLRKESIICKPKNGPTSRQMNSSLRHRSTPELYGIYVINVQCQFCEYDVCMEPAKTLIEFQNWDTLLFCIQEGVKMFLKQEKLFVELSGEDIKEFSEDNGFSLFDATLQKRVTSDERSNFQEACNNILDSYEMFNLQSKAVKRKTTAENVNTQSSQGFRTGENEKHKKSFLEHSSLENPCGTSLEMFLSPFQTPCHFEESGQDLEIWKESTTVNGMAANILKNNRIQNQPKRFKDATEVGCQPLPFATTLWGVHSAQTEKEKKKESSNCGRRNVFSYGRVKLCSTGFITHVVQNEKTKSTETEHSFKNYVRPGPTRAQETFGNRTRHSVETPDIKDLASTLSKESGQLPNKKNCRTNISYGLENEPTATYTMFSAFQEGSKKSQTDCILSDTSPSFPWYRHVSNDSRKTDKLIGFSKPIVRKKLSLSSQLGSLEKFKRQYGKVENPLDTEVEESNGVTTNLSLQVEPDILLKDKNRLENSDVCKITTMEHSDSDSSCQPASHILDSEKFPFSKDEDCLEQQMPSLRESPMTLKELSLFNRKPLDLEKSSESLASKLSRLKGSERETQTMGMMSRFNELPNSDSSRKDSKLCSVLTQDFCMLFNNKHEKTENGVIPTSDSATQDNSFNKNSKTHSNSNTTENCVISETPLVLPYNNSKVTGKDSDVLIRASEQQIGSLDSPSGMLMNPVEDATGDQNGICFQSEESKARACSETEESNTCCSDWQRHFDVALGRMVYVNKMTGLSTFIAPTEDIQAACTKDLTTVAVDVVLENGSQYRCQPFRSDLVLPFLPRARAERTVMRQDNRDTVDDTVSSESLQSLFSEWDNPVFARYPEVAVDVSSGQAESLAVKIHNILYPYRFTKGMIHSMQVLQQVDNKFIACLMSTKTEENGEAGGNLLVLVDQHAAHERIRLEQLIIDSYEKQQAQGSGRKKLLSSTLIPPLEITVTEEQRRLLWCYHKNLEDLGLEFVFPDTSDSLVLVGKVPLCFVEREANELRRGRSTVTKSIVEEFIREQLELLQTTGGIQGTLPLTVQKVLASQACHGAIKFNDGLSLQESCRLIEALSSCQLPFQCAHGRPSMLPLADIDHLEQEKQIKPNLTKLRKMAQAWRLFGKAECDTRQSLQQSMPPCEPP

SEQ ID NO: 815817 - protein, 480 aa, Homo sapiens
MLNFGASLQQTAEERMEMISERPKESMYSWNKTAEKSDFEAVEALMSMSCSWKSDFKKYVENRPVTPVSDLSEEENLLPGTPDFHTIPAFCLTPPYSPSDFEPSQVSNLMAPAPSTVHFKSLSDTAKPHIAAPFKEEEKSPVSAPKLPKAQATSVIRHTADAQLCNHQTCPMKAASILNYQNNSFRRRTHLNVEAARKNIPCAAVSPNRSKCERNTVADVDEKASAALYDFSVPSSETVICRSQPAPVSPQQKSVLVSPPAVSAGGVPPMPVICQMVPLPANNPVVTTVVPSTPPSQPPAVCPPVVFMGTQVPKGAVMFVVPQPVVQSSKPPVVSPNGTRLSPIAPAPGFSPSAAKVTPQIDSSRIRSHICSHPGCGKTYFKSSHLKAHTRTHTGEKPFSCSWKGCERRFARSDELSRHRRTHTGEKKFACPMCDRRFMRSDHLTKHARRHLSAKKLPNWQMEVSKLNDIALPPTPAPTQ

SEQ ID NO: 815818 - protein, 469 aa, Homo sapiens
MEERMEMISERPKESMYSWNKTAEKSDFEAVEALMSMSCSWKSDFKKYVENRPVTPVSDLSEEENLLPGTPDFHTIPAFCLTPPYSPSDFEPSQVSNLMAPAPSTVHFKSLSDTAKPHIAAPFKEEEKSPVSAPKLPKAQATSVIRHTADAQLCNHQTCPMKAASILNYQNNSFRRRTHLNVEAARKNIPCAAVSPNRSKCERNTVADVDEKASAALYDFSVPSSETVICRSQPAPVSPQQKSVLVSPPAVSAGGVPPMPVICQMVPLPANNPVVTTVVPSTPPSQPPAVCPPVVFMGTQVPKGAVMFVVPQPVVQSSKPPVVSPNGTRLSPIAPAPGFSPSAAKVTPQIDSSRIRSHICSHPGCGKTYFKSSHLKAHTRTHTGEKPFSCSWKGCERRFARSDELSRHRRTHTGEKKFACPMCDRRFMRSDHLTKHARRHLSAKKLPNWQMEVSKLNDIALPPTPAPTQ

SEQ ID NO: 815819 - protein, 480 aa, Homo sapiens; identical to SEQ ID NO: 815817

SEQ ID NO: 815820 - protein, 480 aa, Homo sapiens; identical to SEQ ID NO: 815817

SEQ ID NO: 815821 - protein, 480 aa, Homo sapiens; identical to SEQ ID NO: 815817

SEQ ID NO: 815822 - protein, 482 aa, Homo sapiens
MLNFGASLQQTAEERMEMISERPKESMYSWNKTAEKSDFEAVEALMSMSCSWKSDFKKYVENRPVTPVSDLSEEENLLPGTPDFHTIPAFCLTPPYSPSDFEPSQVSNLMAPAPSTVHFKSLSDTAKPHIAAPFKEEEKSPVSAPKLPKAQATSVIRHTADAQLCNHQTCPMKAASILNYQNNSFRRRTHLNVEAARKNIPCAAVSPNRSKCERNTVADVDEKASAALYDFSVPSSETVICRSQPAPVSPQQKSVLVSPPAVSAGGVPPMPVICQMVPLPANNPVVTTVVPSTPPSQPPAVCPPVVFMGTQVPKGAVMFVVPQPVVQSSKPPVVSPNGTRLSPIAPAPGFSPSAAKVTPQIDSSRIRSHICSHPGCGKTYFKSSHLKAHTRTHTGEKPFSCSWKGCERRFARSDELSRHRRTHTGEKKFACPMCDRRFMRSDHLTKHARRHLSAKKLPNWQMEVSKLNDIALPPTPARQTYL

SEQ ID NO: 815823 - protein, 206 aa, Homo sapiens
MRAAPLLLARAASLSLGFLFLLFFWLDRSVLAKELKFVTLVFRHGDRSPIDTFPTDPIKESSWPQGFGQLTQLGMEQHYELGEYIRKRYRKFLNESYKHEQVYIRSTDVDRTLMSAMTNLAALFPPEGVSIWNPILLWQPIPVHTVPLSEDQLLYLPFRNCPRFQELESETLKSEEFQKRLHPYKDFIATLGKLSGLHGQDLLELE

SEQ ID NO: 815824 - protein, 111 aa, Homo sapiens
GRLLLLNSRPRRPELYFEKGEYFVEMYYRNETQHEPYPLMLPGCSPSCPLERFAELVGPVIPQDWSTECMTTNSHQGPAETAHSARRNHDIALPCGRSTCLENTVLYYHYG

SEQ ID NO: 815825 - protein, 193 aa, Homo sapiens
MRAAPLLLARAASLSLGFLFLLFFWLDRSVLAKELKFVTLVFRHGDRSPIDTFPTDPIKESSWPQGFGQLTQLGMEQHYELGEYIRKRYRKFLNESYKHEQVYIRSTDVDRTLMSAMTNLAALFPPEGVSIWNPILLWQPIPVHTVPLSEDQSHHRHDHRISLWLKLSLTAGPRLLPSDLWGRLLSSLSCQYP

SEQ ID NO: 815826 - protein, 201 aa, Homo sapiens
MRAAPLLLARAASLSLGFLFLLFFWLDRSVLAKELKFVTLVFRHGDRSPIDTFPTDPIKESSWPQGFGQLTQLGMEQHYELGEYIRKKKKKQKKNNLLCGAAWGPWRKFFKPILGWGARGPQLGRGPVGPRRGSQREHPGPKDKGGGILLPILKKAAGGDPGGVLVDKSPERAAGEGQTGGLITRGAPGEPKIKPATGGGG

SEQ ID NO: 815827 - protein, 206 aa, Homo sapiens; identical to SEQ ID NO: 815823

SEQ ID NO: 815828 - protein, 206 aa, Homo sapiens; identical to SEQ ID NO: 815823

SEQ ID NO: 815829 - protein, 206 aa, Homo sapiens; identical to SEQ ID NO: 815823

SEQ ID NO: 815830 - protein, 206 aa, Homo sapiens; identical to SEQ ID NO: 815823

SEQ ID NO: 815831 - protein, 206 aa, Homo sapiens; identical to SEQ ID NO: 815823

SEQ ID NO: 815832 - protein, 206 aa, Homo sapiens; identical to SEQ ID NO: 815823

SEQ ID NO: 815833 - protein, 206 aa, Homo sapiens; identical to SEQ ID NO: 815823

SEQ ID NO: 815834 - protein, 206 aa, Homo sapiens; identical to SEQ ID NO: 815823

SEQ ID NO: 815835 - protein, 206 aa, Homo sapiens; identical to SEQ ID NO: 815823

SEQ ID NO: 815836 - protein, 217 aa, Homo sapiens
MIGPHHRIARHRKPMGQPMTPTKPQPTIHIHRLVRYSRVHANGKIPSSAPSVSISNSSPVTIDTGQPLLTDYLMATGFGQLTQLGMEQHYELGEYIRKRYRKFLNESYKHEQVYIRSTDVDRTLMSAMTNLAALFPPEGVSIWNPILLWQPIPVHTVPLSEDQLLYLPFRNCPRFQELESETLKSEEFQKRLHPYKDFIATLGKLSGLHGQDLLELE

SEQ ID NO: 815837 - protein, 155 aa, Homo sapiens
MTKLRECAELSLLSLYGIHKQKEKSRLQGGVLVNEILNHMKRATQIPSYKKLIMYSAHDTTVSGLQMALDVYNGLLPPYASCHLTELYFEKGEYFVEMYYRNETQHEPYPLMLPGCSPSCPLERFAELVGPVIPQDWSTECMTTNSHQGTEDSTD

SEQ ID NO: 815838 - protein, 268 aa, Homo sapiens
MSGDILGYTSGRLGMLLASSGQRPGYCETSYNAQESSLQQTIVWPKISIMLKLRNLCRNFSFSVCVSGFYSYLGKTFRITWPGPFGIGVKSTTLYIVESVHNFTLPSWATEDTMTKLRECAELSLLSLYGIHKQKEKSRLQGGVLVNEILNHMKRATQIPSYKKLIMYSAHDTTVSGLQMALDVYNGLLPPYASCHLTELYFEKGEYFVEMYYRNETQHEPYPLMLPGCSPSCPLERFAELVGPVIPQDWSTECMTTNSHQGTEDSTD

SEQ ID NO: 815839 - protein, 137 aa, Homo sapiens
MRAAPLLLARAASLSLGFLFLLFFWLDRSVLAKELKFVTLVFRHGDRSPIDTFPSILGVRGGQITVTELYFEKGEYFVEMYYRNETQHEPYPLMLPGCSPSCPLERFAELVGPVIPQDWSTECMTTNSHQGTEDSTD

SEQ ID NO: 815840 - protein, 206 aa, Homo sapiens; identical to SEQ ID NO: 815823

SEQ ID NO: 815841 - protein, 111 aa, Homo sapiens; identical to SEQ ID NO: 815824

SEQ ID NO: 815842 - protein, 91 aa, Homo sapiens
CCRVLYPSTCAPDLVDTVDTVNPLILIDLLLIKPETIGPGKRPAHDHSSSAQLSAYTVISFNTSYVSHGTWSDVCCDLFHWIGQALFHIAS

SEQ ID NO: 815843 - protein, 685 aa, Homo sapiens
ARQELLSPSLCQDRRKYVPSLTMSWLSSSQGVVLTAYHPSGKDQAVGNSHAKAGEEATSSRRYGQYTMNQESTTIKVMEKPPFDRSISQDSLDELSMEDYWIELENIKKSSENSQEDQEVVVVKEPDEGELEEEWLKEAGLSNLFGESAGDPQESIVFLSTLTRTQAAAVQKRVETVSQTLRKKNKQYQIPDVRDIFAQQRESKETAPGGTESQSLRTNENKYQGRDDEASNLVGEEKLIPPEETPAPETDINLEVSFAEQALNQKESSKEKIQKSKGDDATLPSFRLPKDKTGTTRIGDLAPQDMKKVCHLALIELTALYDVLGIELKQQKAVKIKTKDSGLFCVPLTALLEQDQRKVPGMRIPLIFQKLISRIEERGLETEGLLRIPGAAIRIKNLCQELEAKFYEGTFNWESVKQHDAASLLKLFIRELPQPLLSVEYLKAFQAVQNLPTKKQQLQALNLLVILLPDANRDTLKALLEFLQRVIDNKEKNKMTVMNVAMVMAPNLFMCHALGLKSSEQREFVMAAGTANTMHLLIKYQKLLWTIPKFIVNQVRKQNTENHKKDKRAMKKLLKKMAYDREKYEKQDKSTNDADVPQGVIRVQAPHLSKVSMAIQLTEELKASDVLARFLSQESGVAQTLKKGEVFLYEIGGNIGERCLDDDTYMKDLYQLNPNAEWVIKSKPL

SEQ ID NO: 815844 - protein, 685 aa, Homo sapiens; identical to SEQ ID NO: 815843

SEQ ID NO: 815845 - protein, 685 aa, Homo sapiens; identical to SEQ ID NO: 815843

SEQ ID NO: 815846 - protein, 677 aa, Homo sapiens
ARQELLSPSLCQDRRKYVPSLTMSWLSSSQGVVLTAYHPSGKDQAVGNSHAKAGEEATSSRRYGQYTMNQESTTIKVMEKPPFDRSISQDSLDELSMEDYWIELENIKKSSENSQEDQEVVVVKEPDEGELEEEWLKEAGLSNLFGESAGDPQESIVFLSTLTRTQAAAVQKRVETVSQTLRKKNKQYQIPDVRDIFAQQRESKETAPGGTESQSLRTNENKYQGRDDEASNLVGEEKLIPPEETPAPETDINLEVSFAEQALNQKESSKEKIQKSKGDDATLPSFRLPKDKTGTTRIGDLAPQDMKKVCHLALIELTALYDVLGIELKQQKAVKIKTKDSGLFCVPLTALLEQDQRKVPGMRIPLIFQKLISRIEERGLETEGLLRIPGAAIRIKNLCQELEAKFYEGTFNWESVKQHDAASLLKLFIRELPQPLLSVEYLKAFQAVQNLPTKKQQLQALNLLVILLPDANRDTLKALLEFLQRVIDNKEKNKMTVMNVAMVMAPNLFMCHALGLKSSEQREFVMAAGTANTMHLLIKYQKLLWTIPKFIVNQVRKQNTENHKKDKRAMKKLLKKMAYDREKYEKQDKSTNDADVPQGVIRVQAPHLSKVSMAIQLTEELKASDVLARFLSQERGVAQTLKKGEVFCVKLAGIMGGRCLMMNLHEGFLSVTQCGWV

SEQ ID NO: 815847 - protein, 617 aa, Homo sapiens
MAEAKTHWLGAALSLIPLIFLISGAEAASFQRNQLLQKEPDLRLENVQKFPSPEMIRALEYIENLRQQAHKEESSPDYNPYQGVSVPLQQKENGDESHLPERDSLSEEDWMRIILEALRQAENEPQSAPKENKPYALNSEKNFPMDMSDDYETQQWPERKLKHMQFPPMYEENSRDNPFKRTNEIVEEQYTPQSLATLESVFQELGKLTGPNNQKRERMDEEQKLYTDDEDDIYKANNIAYEDVVGGEDWNPVEEKIESQTQEEVRDSKENIEKNEQINDEMKRSGQLGIQEEDLRKESKDQLSDDVSKVIAYLKRLVNAAGSGRLQNGQNGERATRLFEKPLDSQSIYQLIEISRNLQIPPEDLIEMLKTGEKPNGSVEPERELDLPVDLDDISEADLDHPDLFQNRMLSKSGYPKTPGRAGTEALPDGLSVEDILNLLGMESAANQKTSYFPNPYNQEKVLPRLPYGAGRSRSNQLPKAAWIPHVENRQMAYENLNDKDQELGEYLARMLVKYPEIINSNQVKRVPGQGSSEDDLQEEEQIEQAIKEHLNQGSSQETDKLAPVSKRFPVGPPKNDDTPNRQYWDEDLLMKVLEYLNQEKAEKGREHIAKRAMENM

SEQ ID NO: 815848 - protein, 644 aa, Homo sapiens
RVLLYLQHYVAAAFSSPPCPFARNLSNMAEAKTHWLGAALSLIPLIFLISGAEAASFQRNQLLQKEPDLRLENVQKFPSPEMIRALEYIENLRQQAHKEESSPDYNPYQGVSVPLQQKENGDESHLPERDSLSEEDWMRIILEALRQAENEPQSAPKENKPYALNSEKNFPMDMSDDYETQQWPERKLKHMQFPPMYEENSRDNPFKRTNEIVEEQYTPQSLATLESVFQELGKLTGPNNQKRERMDEEQKLYTDDEDDIYKANNIAYEDVVGGEDWNPVEEKIESQTQEEVRDSKENIEKNEQINDEMKRSGQLGIQEEDLRKESKDQLSDDVSKVIAYLKRLVNAAGSGRLQNGQNGERATRLFEKPLDSQSIYQLIEISRNLQIPPEDLIEMLKTGEKPNGSVEPERELDLPVDLDDISEADLDHPDLFQNRMLSKSGYPKTPGRAGTEALPDGLSVEDILNLLGMESAANQKTSYFPNPYNQEKVLPRLPYGAGRSRSNQLPKAAWIPHVENRQMAYENLNDKDQELGEYLARMLVKYPEIINSNQVKRVPGQGSSEDDLQEEEQIEQAIKEHLNQGSSQETDKLAPVSKRFPVGPPKNDDTPNRQYWDEDLLMKVLEYLNQEKAEKGREHIAKRAMENM

SEQ ID NO: 815849 - protein, 615 aa, Homo sapiens
MRPTHWLGAALSLIPLIFLISGAEAASFQRNQLLQKEPDLRLENVQKFPSPEMIRALEYIENLRQQAHKEESSPDYNPYQGVSVPLQQKENGDESHLPERDSLSEEDWMRIILEALRQAENEPQSAPKENKPYALNSEKNFPMDMSDDYETQQWPERKLKHMQFPPMYEENSRDNPFKRTNEIVEEQYTPQSLATLESVFQELGKLTGPNNQKRERMDEEQKLYTDDEDDIYKANNIAYEDVVGGEDWNPVEEKIESQTQEEVRDSKENIEKNEQINDEMKRSGQLGIQEEDLRKESKDQLSDDVSKVIAYLKRLVNAAGSGRLQNGQNGERATRLFEKPLDSQSIYQLIEISRNLQIPPEDLIEMLKTGEKPNGSVEPERELDLPVDLDDISEADLDHPDLFQNRMLSKSGYPKTPGRAGTEALPDGLSVEDILNLLGMESAANQKTSYFPNPYNQEKVLPRLPYGAGRSRSNQLPKAAWIPHVENRQMAYENLNDKDQELGEYLARMLVKYPEIINSNQVKRVPGQGSSEDDLQEEEQIEQAIKEHLNQGSSQETDKLAPVSKRFPVGPPKNDDTPNRQYWDEDLLMKVLEYLNQEKAEKGREHIAKRAMENM

SEQ ID NO: 815850 - protein, 454 aa, Homo sapiens
MQFPPMYEENSRDNPFKRTNEIVEEQYTPQSLATLESVFQELGKLTGPNNQKRERMDEEQKLYTDDEDDIYKANNIAYEDVVGGEDWNPVEEKIESQTQEEVRDSKENIEKNEQINDEMKRSGQLGIQEEDLRKESKDQLSDDVSKVIAYLKRLVNAAGSGRLQNGQNGERATRLFEKPLDSQSIYQLIEISRNLQIPPEDLIEMLKTGEKPNGSVEPERELDLPVDLDDISEADLDHPDLFQNRMLSKSGYPKTPGRAGTEALPDGLSVEDILNLLGMESAANQKTSYFPNPYNQEKVLPRLPYGAGRSRSNQLPKAAWIPHVENRQMAYENLNDKDQELGEYLARMLVKYPEIINSNQVKRVPGQGSSEDDLQEEEQIEQAIKEHLNQGSSQETDKLAPVSKRFPVGPPKNDDTPNRQYWDEDLLMKVLEYLNQEKAEKGREHIAKRAMENM

SEQ ID NO: 815851 - protein, 399 aa, Homo sapiens
MDEEQKLYTDDEDDIYKANNIAYEDVVGGEDWNPVEEKIESQTQEEVRDSKENIEKNEQINDEMKRSGQLGIQEEDLRKESKDQLSDDVSKVIAYLKRLVNAAGSGRLQNGQNGERATRLFEKPLDSQSIYQLIEISRNLQIPPEDLIEMLKTGEKPNGSVEPERELDLPVDLDDISEADLDHPDLFQNRMLSKSGYPKTPGRAGTEALPDGLSVEDILNLLGMESAANQKTSYFPNPYNQEKVLPRLPYGAGRSRSNQLPKAAWIPHVENRQMAYENLNDKDQELGEYLARMLVKYPEIINSNQVKRVPGQGSSEDDLQEEEQIEQAIKEHLNQGSSQETDKLAPVSKRFPVGPPKNDDTPNRQYWDEDLLMKVLEYLNQEKAEKGREHIAKRAMENM

SEQ ID NO: 815852 - protein, 1494 aa, Homo sapiens
MNGGKECDGGDKEGGLPAIQVPVGWQRRVDQNGVLYVSPSGSLLSCLEQVKTYLLTDGTCKCGLECPLILPKVFNFDPGAAVKQRTAEDVKADEDVTKLCIHKRKIIAVATLHKSMEAPHPSLVLTSPGGGTNATPVVPSRAATPRSVRNKSHEGITNSVMPECKNPFKLMIGSSNAMGRLYVQELPGSQQQELHPVYPRQRLGSSEHGQKSPFRGSHGGLPSPASSGSQIYGDGSISPRTDPLGSPDVFTRSNPGFHGAPNSSPIHLNRTPLSPPSVMLHGSPVQSSCAMAGRTNIPLSPTLTTKSPVMKKPMCNFSTNMEIPRAMFHHKPPQGPPPPPPPSCALQKKPLTSEKDPLGILDPIPSKPVNQNPVIINPTSFHSNVHSQVPMMNVSMPPAVVPLPSNLPLPTVKPGHMNHGSHVQRVQHSASTSLSPSPVTSPVHMMGTGIGRIEASPQRSRSSSTSSDHGNFMMPPVGPQATSSGIKVPPRSPRSTIGSPRPSMPSSPSTKSDGHHQYKDIPNPLIAGISNVLNTPSSAAFPTASAGSSSVKSQPGLLGMPLNQILNQHNAASFPASSLLSAAAKAQLANQNKLAGNNSSSSSNSGAVAGSGNTEGHSTLNTMFPPTANMLLPTGEGQSGRAALRDKLMSQQKDALRKRKQPPTTVLSLLRQSQMDSSAVPKPGPDLLRKQGQGSFPISSMSQLLQSMSCQSSHLSSNSTPGCGASNTALPCSANQLHFTDPSMNSSVLQNIPLRGEAVHCHNANTNFVHSNSPVPNHHLAGLINQIQASGNCGMLSQSGMALGNSLHPNPPQSRISTSSTPVIPNSIVSSYNQTSSEAGGSGPSSSIAIAGTNHPAITKTTSVLQDGVIVTTAAGNPLQSQLPIGSDFPFVGQEHALHFPSNSTSNNHLPHPLNPSLLSSLPISLPVNQQHLLNQNLLNILQPSAGEGDMSSINNTLSNHQLTHLQSLLNNNQMFPPNQQQQQLLQGYQNLQAFQGQSTIPCPANNNPMACLFQNFQVRMQEDAALLNKRISTQPGLTALPENPNTTLPPFQDTPCELQPRIDPSLGQQVKDGLVVGGPGDASVDAIYKAVVDAASKGMQVVITTAVNSTTQISPIPALSAMSAFTASIGDPLNLSSAVSAVIHGRNMGGVDHDGRLRNSRGARLPKNLDHGKNVNEGDGFEYFKSASCHTSKKQWDGEQSPRGERNRWKYEEFLDHPGHIHSSPCHERPNNVSTLPFLPGEQHPILLPPRNCPGDKILEENFRYNNYKRTMMSFKERLENTVERCAHINGNRPRQSRGFGELLSTAKQDLVLEEQSPSSSNSLENSLVKDYIHYNGDFNAKSVNGCVPSPSDAKSISSEDDLRNPDSPSSNELIHYRPRTFNVGDLVWGQIKGLTSWPGKLVREDDVHNSCQQSPEEGKVEPEKLKTLTEGLEAYSRVRKRNRKSGKLNNHLEAAIHEAMSELDKMSGTVHQIPQGDRQMRPPKPKRRKISR

SEQ ID NO: 815853 - protein, 130 aa, Homo sapiens
RTPMPITSQDLVLEEQSPSSSNSLENSLVKDYIHYNGDFNAKSVNGCVPSPSDAKSISSEDDLRNPDSPSSNELIHYRPRTFNVGDLVWGQIKGLTSWPGKLVREDDVHNSCQQSPEEGKVYQSLSIVKY

SEQ ID NO: 815854 - protein, 851 aa, Homo sapiens
MNGGKECDGGDKEGGLPAIQVPVGWQRRVDQNGVLYVSPSGSLLSCLEQVKTYLLTDGTCKCGLECPLILPKVFNFDPGAAVKQRTAEDVKADEDVTKLCIHKRKIIAVATLHKSMEAPHPSLVLTSPGGGTNATPVVPSRAATPRSVRNKSHEGITNSVMPECKNPFKLMIGSSNAMGRLYVQELPGSQQQELHPVYPRQRLGSSEHGQKSPFRGSHGGLPSPASSGSQIYGDGSISPRTDPLGSPDVFTRSNPGFHGAPNSSPIHLNRTPLSPPSVMLHGSPVQSSCAMAGRTNIPLSPTLTTKSPVMKKPMCNFSTNMEIPRAMFHHKPPQGPPPPPPPSCALQKKPLTSEKDPLGILDPIPSKPVNQNPVIINPTSFHSNVHSQVPMMNVSMPPAVVPLPSNLPLPTVKPGHMNHGSHVQRVQHSASTSLSPSPVTSPVHMMGTGIGRIEASPQRSRSSSTSSDHGNFMMPPVGPQATSSGIKVPPRSPRSTIGSPRPSMPSSPSTKSDGHHQYKDIPNPLIAGISNVLNTPSSAAFPTASAGSSSVKSQPGLLGMPLNQILNQHNAASFPASSLLSAAAKAQLANQNKLAGNNSSSSSNSGAVAGSGNTEGHSTLNTMFPPTANMLLPTGEGQSGRAALRDKLMSQQKDALRKRKQPPTTVLSLLRQSQMDSSAVPKPGPDLLRKQGQGSFPISSMSQLLQSMSCQSSHLSSNSTPGCGASNTALPCSANQLHFTDPSMNSSVLQNIPLRGEAVHCHNANTNFVHSNSPVPNHHLAGLINQIQASGNCGMLSQSGMALGNSLHPNPPQSRISTSSTPVIPNSIVSSYNQTSSEAGMVLLEKSTQRY

SEQ ID NO: 815855 - protein, 282 aa, Homo sapiens
MSCGRPPPDVDGMITLKVDNLTYRTSPDSLRRVFEKYGRVGDVYIPREPHTKAPRGFAFVRFHDRRDAQDAEAAMDGAELDGRELRVQVARYGRRDLPRSRQGEPRGRSRGGGYGRRSRSYGRRSRSPRRRHRSRSRGPSCSRSRSRSRYRGSRYSRSPYSRSPYSRSRYSRSPYSRSRYRESRYGGSHYSSSGYSNSRYSRYHSSRSHSKSGSSTSSRSASTSKSSSARRSKSSSVSRSRSRSRSSSMTRSPPRVSKRKSKSRSRSKRPPKSPEEEGQMSS

SEQ ID NO: 815856 - protein, 282 aa, Homo sapiens; identical to SEQ ID NO: 815855

SEQ ID NO: 815857 - protein, 282 aa, Homo sapiens; identical to SEQ ID NO: 815855

SEQ ID NO: 815858 - protein, 282 aa, Homo sapiens; identical to SEQ ID NO: 815855

SEQ ID NO: 815859 - protein, 282 aa, Homo sapiens; identical to SEQ ID NO: 815855

SEQ ID NO: 815860 - protein, 282 aa, Homo sapiens; identical to SEQ ID NO: 815855

SEQ ID NO: 815861 - protein, 282 aa, Homo sapiens; identical to SEQ ID NO: 815855

SEQ ID NO: 815862 - protein, 282 aa, Homo sapiens; identical to SEQ ID NO: 815855

SEQ ID NO: 815863 - protein, 185 aa, Homo sapiens
MAAGTCPAAARESHAAGPEAAATDGGAAATPRRRHRSRSRGPSCSRSRSRSRYRGSRYSRSPYSRSPYSRSRYSRSPYSRSRYRESRYGGSHYSSSGYSNSRYSRYHSSRSHSKSGSSTSSRSASTSKSSSARRSKSSSVSRSRSRSRSSSMTRSPPRVSKRKSKSRSRSKRPPKSPEEEGQMSS

SEQ ID NO: 815864 - protein, 262 aa, Homo sapiens
MSCGRPPPDVDGMITLKVDNLTYRTSPDSLRRVFEKYGRVGDVYIPREPHTKAPRGFAFVRFHDRRDAQDAEAAMDGAELDGRELRVQVARYGRRDLPRSRQGEPRGRSRGGGYGRRSRSYGRRSRSPRRRHRSRSRGPSCSRSRSRSRYRGSRYSRSPYSRSPYSRSRYSRSPYSRSRYRESRYGGSHYSSSGYSNSRYSRYHSSRSHSKSGSSTSSRSASTSKSSSARNPSQGRDPRGPPSLLKRKDRCPLKKMMHQEAT

SEQ ID NO: 815865 - protein, 282 aa, Homo sapiens; identical to SEQ ID NO: 815855

SEQ ID NO: 815866 - protein, 282 aa, Homo sapiens; identical to SEQ ID NO: 815855

SEQ ID NO: 815867 - protein, 160 aa, Homo sapiens
MSSAMLVTCLPDPSSSFREDAPRPPVPGEEGETPPCQPGVGKGQVTKPMPVSSNTRRNEDGLGEPEGRASPDSPLTRWTKSLHSLLGDQDGAYLFRTFLEREKCVDTLDFWFACNGFRQMNLKDTKTLRVANDFCHDILFYLYCKLCIIKSSFKENYLVQ

SEQ ID NO: 815868 - protein, 843 aa, Homo sapiens
MSSAMLVTCLPDPSSSFREDAPRPPVPGEEGETPPCQPGVGKGQVTKPMPVSSNTRRNEDGLGEPEGRASPDSPLTRWTKSLHSLLGDQDGAYLFRTFLEREKCVDTLDFWFACNGFRQMNLKDTKTLRVAKAIYKRYIENNSIVSKQLKPATKTYIRDGIKKQQIDSIMFDQAQTEIQSVMEENAYQMFLTSDIYLEYVRSGGENTAYMSNGGLGSLKVVCGYLPTLNEEEEWTCADFKCKLSPTVVGLSSKTLRATASVRSTETVDSGYRSFKRSDPVNPYHIGSGYVFAPATSANDSEISSDALTDDSMSMTDSSVDGIPPYRVGSKKQLQREMHRSVKANGQVSLPHFPRTHRLPKEMTPVEPATFAAELISRLEKLKLELESRHSLEERLQQIREDEEREGSELTLNSREGAPTQHPLSLLPSGSYEEDPQTILDDHLSRVLKTPGCQSPGVGRYSPRSRSPDHHHHHHSQYHSLLPPGGKLPPAAASPGACPLLGGKGFVTKQTTKHVHHHYIHHHAVPKTKEEIEAEATQRVHCFCPGGSEYYCYSKCKSHSKAPETMPSEQFGGSRGSTLPKRNGKGTEPGLALPAREGGAPGGAGALQLPREEGDRSQDVWQWMLESERQSKPKPHSAQSTKKAYPLESARSSPGERASRHHLWGGNSGHPRTTPRAHLFTQDPAMPPLTPPNTLAQLEEACRRLAEVSKPPKQRCCVASQQRDRNHSATVQTGATPFSNPSLAPEDHKEPKKLAGVHALQASELVVTYFFCGEEIPYRRMLKAQSLTLGHFKEQLSKKGNYRYYFKKASDEFACGAVFEEIWEDETVLPMYEGRILGKVERID

SEQ ID NO: 815869 - protein, 843 aa, Homo sapiens; identical to SEQ ID NO: 815868

SEQ ID NO: 815870 - protein, 843 aa, Homo sapiens; identical to SEQ ID NO: 815868

SEQ ID NO: 815871 - protein, 778 aa, Homo sapiens
MSSAMLVTCLPDPSSSFREDAPRPPVPGEEGETPPCQPGVGKGQVTKPMPVSSNTRRNEDGLGEPEGRASPDSPLTRWTKSLHSLLGDQDGAYLFRTFLEREKCVDTLDFWFACNGFRQMNLKDTKTLRVAKAIYKRYIENNSIVSKQLKPATKTYIRDGIKKQQIDSIMFDQAQTEIQSVMEENAYQMFLTSDIYLEYVRSGGENTAYMSNGGLGSLKVVCGYLPTLNEEEEWTCADFKCKLSPTVVGLSSKTLRATASVRSTETVDSGYRSFKRSDPVNPYHIGSGYVFAPATSANDSEISSDALTDDSMSMTDSSVDGIPPYRVGSKKQLQREMHRSVKANGQVSLPHFPRTHRLPKEMTPVEPATFAAELISRLEKLKLELESRHSLEERLQQIREDEEREGSELTLNSREGAPTQHPLSLLPSGSYEEDPQTILDDHLSRVLKTPGCQSPGVGRYSPRSRSPDHHHHHHSQYHSLLPPGGKLPPAAASPGACPLLGGKGFVTKQTTKHVHHHYIHHHAVPKTKEEIEAEATQRVHCFCPGGSEYYCYSKCKSHSKAPETMPSEQFGAQSTKKAYPLESARSSPGERASRHHLWGGNSGHPRTTPRAHLFTQDPAMPPLTPPNTLAQLEEACRRLAEVSKPPKQRCCVASQQRDRNHSATVQTGATPFSNPSLAPEDHKEPKKLAGVHALQASELVVTYFFCGEEIPYRRMLKAQSLTLGHFKEQLSKKGNYRYYFKKASDEFACGAVFEEIWEDETVLPMYEGRILGKVERID

SEQ ID NO: 815872 - protein, 144 aa, Homo sapiens [sequence omitted]

SEQ ID NO: 815873 - protein, 211 aa, Homo sapiens
LQIQRPVVKTSMEQLAQELQGLAQAQDNSVLGQRLQEEAQGLRNLHQEKVVPQQSLVAKLNLSVRALESSAPNLQLETSDVLANVTYLKGELPAWAARILRNVSECFLAREMGYFSQYVAWVREEVTQRIATCQPLSGALDNSRVILCDMMADPWNAFWFCLAWCTFFLIPSIIFAVKTSKYFRPIRKRLSSTSSEETQLFHIPRVTSLKL

SEQ ID NO: 815874 - protein, 131 aa, Homo sapiens
LSRGSLWLLLERALQPERGLRTVSECFLAREMGYFSQYVAWVREEVTQRIATCQPLSGALDNSRVILCDMMADPWNAFWFCLAWCTFFLIPSIIFAVKTSKYFRPIRKRLSSTSSEETQLFHIPRVTSLKL

SEQ ID NO: 815875 - protein, 211 aa, Homo sapiens; identical to SEQ ID NO: 815873

SEQ ID NO: 815876 - protein, 211 aa, Homo sapiens; identical to SEQ ID NO: 815873

SEQ ID NO: 815877 - protein, 207 aa, Homo sapiens
MAAGCSEAPRPAAASDGSLVGQAGVLPCLELPTYAAACALVNSRYSCLVAGPHQRHIALSPRYLNRKRTGIREQLDAELLRYSESLLGVPIAYDNIKVVGELGDIYDDQGHIHLNIEADFVIFCPEPGQKLMGIVNKVSSSHIGCLVHGCFNASIPKPEQLSAEQWQTMEINMGDELEFEVFRLDSDAAGVFCIRGKLNITSYIQAL

SEQ ID NO: 815878 - protein, 347 aa, Homo sapiens
RAVGTLTSSMAAGCSEAPRPAAASDGSLVGQAGVLPCLELPTYAAACALVNSRYSCLVAGPHQRHIALSPRYLNRKRTGIREQLDAELLRYSESLLGVPIAYDNIKVVGELGDIYDDQGHIHLNIEADFVIFCPEPGQKLMGIVNKVSSSHIGCLVHGCFNASIPKPEQLSAEQWQTMEINMGDELEFEVFRLDSDAAGVFCIRGKLNITSLQFKRSEVSEEVTENGTEEAAKKPKKKKKKKDPETYEVDSGTTKLADDADDTPMEESALQNTNNANGIWEEEPKKKKKKKKHQEVQDQDPVFQGSDSSGYQSDHKKKKKKRKHSEEAEFTPPLKCSPKRKGKSNFL

SEQ ID NO: 815879 - protein, 347 aa, Homo sapiens; identical to SEQ ID NO: 815878

SEQ ID NO: 815880 - protein, 170 aa, Homo sapiens
MEINMGDELEFEVFRLDSDAAGVFCIRGKLNITSLQFKRSEVSEEVTENGTEEAAKKPKKKKKKKDPETYEVDSGTTKLADDADDTPMEESALQNTNNANGIWEEEPKKKKKKKKHQEVQDQDPVFQGSDSSGYQSDHKKKKKKRKHSEEAEFTPPLKCSPKRKGKSNFL

SEQ ID NO: 815881 - protein, 217 aa, Homo sapiens
MAAGCSEAPRPAAASDGSLVGQAGVLPCLELPTYAAACALVNSRYSCLVAGPHQRHIALSPRYLNRKRTGIREQLDAELLRYSESLLGVPIAYDNIKVVGELGDIYDDQGHIHLNIEADFVIFCPEPGQKLMGIVNKVSSSHIGCLVHGCFNASIPKPEQLSAEQWQTMEINMGDELEFEFLKKLQKMALRKLLKNLKRRKRRKTQRHMKWTVVPQS

SEQ ID NO: 815882 - protein, 347 aa, Homo sapiens; identical to SEQ ID NO: 815878

SEQ ID NO: 815883 - protein, 347 aa, Homo sapiens; identical to SEQ ID NO: 815878

SEQ ID NO: 815884 - protein, 313 aa, Homo sapiens
MKLTDSVLRSFRVAKVFRENSDKINCFDFSPNGETVISSSDDDSIVLYDCQEGKPKRTLYSKKYGVDLIRYTHAANTVVYSSNKIDDTIRYLSLHDNKYIRYFPGHSKRVVALSMSPVDDTFISGSLDKTIRLWDLRSPNCQGLMHLQGKPVCSFDPEGLIFAAGVNSEMVKLYDLRSFDKGPFATFKMQYDRTCEWTGLKFSNDGKLILISTNGSFIRLIDAFKGVVMHTFGGYANSKAVTLEASFTPDSQFIMIGSEDGKIHVWNGESGIKVAVLDGKHTGPITCLQFNPKFMTFASACSNMAFWLPTIDD

SEQ ID NO: 815885 - protein, 279 aa, Homo sapiens
ISYSGASYDLPERWQSTDNPVTVKKYGVDLIKYPHVNEHSCIGLLTNIDDTILLLSLSDEINTTLMIVFPDIPIAVVALSMSPVDDTFISGSLDKTIRLWDLRSPNCQGLMHLQGKPVCSFDPEGLIFAAGVNSEMVKLYDLRSFDKGPFATFKMQYDRTCEWTGLKFSNDGKLILISTNGSFIRLIDAFKGVVMHTFGGYANSKAVTLEASFTPDSQFIMIGSEDGKIHVWNGESGIKVAVLDGKHTGPITCLQFNPKFMTFASACSNMAFWLPTIDD

SEQ ID NO: 815886 - protein, 313 aa, Homo sapiens; identical to SEQ ID NO: 815884

SEQ ID NO: 815887 - protein, 313 aa, Homo sapiens; identical to SEQ ID NO: 815884

SEQ ID NO: 815888 - protein, 313 aa, Homo sapiens; identical to SEQ ID NO: 815884

SEQ ID NO: 815889 - protein, 313 aa, Homo sapiens; identical to SEQ ID NO: 815884

SEQ ID NO: 815890 - protein, 313 aa, Homo sapiens; identical to SEQ ID NO: 815884

SEQ ID NO: 815891 - protein, 313 aa, Homo sapiens; identical to SEQ ID NO: 815884

SEQ ID NO: 815892 - protein, 313 aa, Homo sapiens; identical to SEQ ID NO: 815884

SEQ ID NO: 815893 - protein, 313 aa, Homo sapiens; identical to SEQ ID NO: 815884

SEQ ID NO: 815894 - protein, 313 aa, Homo sapiens; identical to SEQ ID NO: 815884

SEQ ID NO: 815895 - protein, 313 aa, Homo sapiens; identical to SEQ ID NO: 815884

SEQ ID NO: 815896 - protein, 313 aa, Homo sapiens; identical to SEQ ID NO: 815884

SEQ ID NO: 815897 - protein, 313 aa, Homo sapiens; identical to SEQ ID NO: 815884

SEQ ID NO: 815898 - protein, 235 aa, Homo sapiens
MKLTDSVLRSFRVAKVFRENSDKINCFDFSPNGETVISSSDDDSIVLYDCQEGKPKRTLYSKKYGVDLIRYTHAANTVVYSSNKIDDTIRYLSLHDNKYIRYFPGHSKRVVALSMSPVDDTFISGSLDKTIRLWDLRSPNCQGLMHLQGKPVCSFDPEGLIFAAGVNSEMVKLYDLRSFDKGPFATFKMQYDRTCEWTGLKFSNDGKLILISTNGSFIRLIDAFKGVVMHTFGRC

SEQ ID NO: 815899 - protein, 151 aa, Homo sapiens
MKLTDSVLRSFRVAKVFRENSDKINCFDFSPNGETVISSSDDDSIVLYDCQEGKPKRTLYSKKYGVDLIRYTHAANTVVYSSNKIDDTIRYLSLHDNKYIRYFPGHSKRVVALSMSPVDDTFISGSLDKTIRLWDLRSPNCQVMVPHSYTF

SEQ ID NO: 815900 - protein, 343 aa, Homo sapiens [sequence omitted]

SEQ ID NO: 815901 - protein, 343 aa, Homo sapiens [sequence omitted]

SEQ ID NO: 815902 - protein, 343 aa, Homo sapiens [sequence omitted]

SEQ ID NO: 815903 - protein, 343 aa, Homo sapiens [sequence omitted]

SEQ ID NO: 815904 - protein, 343 aa, Homo sapiens [sequence omitted]

SEQ ID NO: 815905 - protein, 329 aa, Homo sapiens
MCTRAPGGLSLHDYKLLKPSLAVNLADPYRSLKAPGARGPGPEGGGGGSYFSGQGSDTGASLKLASSELERLIVPNSNGVITTTPTPPGQYFYPRGGGSGGGAGGAGGGVTEEQEGFADGFVKALDDLHKMNHVTPPNVSLGATGGPPAGPGGVYAGPEPPPVYTNLSSYSPASASSGGAGAAVGTGSSYPTTTISYLPHAPPFAGGHPAQLGLGRGASTFKEEPQTVPEARSRDATPPVSPINMEDQERIKVERKRLRNRLAATKCRKRKLERIARLEDKVKTLKAENAGLSSTAGLLREQVAQLKQKVMTHVSNGCQLLLGVKGHAF

SEQ ID NO: 815906 - protein, 343 aa, Homo sapiens [sequence omitted]

SEQ ID NO: 815907 - protein, 343 aa, Homo sapiens [sequence omitted]

SEQ ID NO: 815908 - protein, 343 aa, Homo sapiens [sequence omitted]

SEQ ID NO: 815909 - protein, 343 aa, Homo sapiens [sequence omitted]

SEQ ID NO: 815910 - protein, 343 aa, Homo sapiens [sequence omitted]

SEQ ID NO: 815911 - protein, 343 aa, Homo sapiens [sequence omitted]

SEQ ID NO: 815912 - protein, 343 aa, Homo sapiens [sequence omitted]

SEQ ID NO: 815913 - protein, 74 aa, Homo sapiens
KQGYETMISEGRDSGTLGLWARLEDKVKTLKAENAGLSSTAGLLREQVAQLKQKVMTHVSNGCQLLLGVKGHAF

SEQ ID NO: 815914 - protein, 243 aa, Homo sapiens
MEQPFYHDDSYTATGYGRAPGGLSLHDYKLLKPSLAVNLADPYRSLKAPGARGPGPEGGGGGSYFSGQGSDTGASLKLASSELERLIVPNSNGVITTTPTPPGQYFYPRGGGSGGGAGGAGGGVTEEQEGFADGFVKALDDLHKMNHVTPPNVSLGATGGPPAGPGGVYAGPEPPPVYTNLSSYSPASASSGGAGAAVGTGSSYPTTTISYLPHAPPFAGRGMGWRGSTSGDGRRRQTEPPRD

SEQ ID NO: 815915 - protein, 201 aa, Homo sapiens
  misc_feature (1)..(1): Xaa can be any naturally occurring amino acid
XLEHVSLACWPMGWDLRAARPASEPAGSWELGETTPGKLSRQRGRRGLGKPDRAFAHSCRLAATRPRQPPRTRDQAPSPVTAAESSPLAAARPGAAPQGTLPRPPGPPGCALKWNSPSTTTFTSPPFHFFLYVFFLLETDSIHIEYNIFVYLTGRGRGGDSRRSWPRRLVLKPAGTLGRGPPPPALPSLHRTVEKKHALSL

SEQ ID NO: 815916 - protein, 356 aa, Homo sapiens
LQPGPAPAQLHSRASFCTARSGSAAALRMRPVRLMKVFVTRRIPAEGRVALARAADCEVEQWDSDEPIPAKELERGVAGAHGLLCLLSDHVDKRILDAAGANLKVISTMSVGIDHLALDEIKKRGIRVGYTPDVLTDTTAELAVSLLLTTCRRLPEAIEEVKNGGWTSWKPLWLCGYGLTQSTVGIIGLGRIGQAIARRLKPFGVQRFLYTGRQPRPEEAAEFQAEFVSTPELAAQSDFIVVACSLTPATEGLCNKDFFQKMKETAVFINISRGDVVNQDDLYQALASGKIAAAGLDVTSPEPLPTNHPLLTLKNCVILPHIGSATHRTRNTMSLLAANNLLAGLRGEPMPSELKL

SEQ ID NO: 815917 - protein, 347 aa, Homo sapiens
TPAWPRPGPATFPGQLLYCQVRVGGCTADETGATHEGVRHPQDTRRGCEVEQWDSDEPIPAKELERGVAGAHGLLCLLSDHVDKRILDAAGANLKVISTMSVGIDHLALDEIKKRGIRVGYTPDVLTDTTAELAVSLLLTTCRRLPEAIEEVKNGGWTSWKPLWLCGYGLTQSTVGIIGLGRIGQAIARRLKPFGVQRFLYTGRQPRPEEAAEFQAEFVSTPELAAQSDFIVVACSLTPATEGLCNKDFFQKMKETAVFINISRGDVVNQDDLYQALASGKIAAAGLDVTSPEPLPTNHPLLTLKNCVILPHIGSATHRTRNTMSLLAANNLLAGLRGEPMPSELKL

SEQ ID NO: 815918 - protein, 356 aa, Homo sapiens; identical to SEQ ID NO: 815916

SEQ ID NO: 815919 - protein, 356 aa, Homo sapiens; identical to SEQ ID NO: 815916

SEQ ID NO: 815920 - protein, 356 aa, Homo sapiens; identical to SEQ ID NO: 815916

SEQ ID NO: 815921 - protein, 303 aa, Homo sapiens
LQPGPAPAQLHSRASFCTARSGSAAALRMRPVRLMKVFVTRRIPAEGANLKVISTMSVGIDHLALDEIKKRGIRVGYTPDVLTDTTAELAVSLLLTTCRRLPEAIEEVKNGGWTSWKPLWLCGYGLTQSTVGIIGLGRIGQAIARRLKPFGVQRFLYTGRQPRPEEAAEFQAEFVSTPELAAQSDFIVVACSLTPATEGLCNKDFFQKMKETAVFINISRGDVVNQDDLYQALASGKIAAAGLDVTSPEPLPTNHPLLTLKNCVILPHIGSATHRTRNTMSLLAANNLLAGLRGEPMPSELKL

SEQ ID NO: 815922 - protein, 260 aa, Homo sapiens
MQVWANLKVISTMSVGIDHLALDEIKKRGIRVGYTPDVLTDTTAELAVSLLLTTCRRLPEAIEEVKNGGWTSWKPLWLCGYGLTQSTVGIIGLGRIGQAIARRLKPFGVQRFLYTGRQPRPEEAAEFQAEFVSTPELAAQSDFIVVACSLTPATEGLCNKDFFQKMKETAVFINISRGDVVNQDDLYQALASGKIAAAGLDVTSPEPLPTNHPLLTLKNCVILPHIGSATHRTRNTMSLLAANNLLAGLRGEPMPSELKL

SEQ ID NO: 815923 - protein, 356 aa, Homo sapiens; identical to SEQ ID NO: 815916

SEQ ID NO: 815924 - protein, 242 aa, Homo sapiens
MLPPRCLIRSGIRVGYTPDVLTDTTAELAVSLLLTTCRRLPEAIEEVKNGGWTSWKPLWLCGYGLTQSTVGIIGLGRIGQAIARRLKPFGVQRFLYTGRQPRPEEAAEFQAEFVSTPELAAQSDFIVVACSLTPATEGLCNKDFFQKMKETAVFINISRGDVVNQDDLYQALASGKIAAAGLDVTSPEPLPTNHPLLTLKNCVILPHIGSATHRTRNTMSLLAANNLLAGLRGEPMPSELKL

SEQ ID NO: 815925 - protein, 356 aa, Homo sapiens; identical to SEQ ID NO: 815916

SEQ ID NO: 815926 - protein, 250 aa, Homo sapiens
LQPGPAPAQLHSRASFCTARSGSAAALRMRPVRLMKVFVTRRIPAEGRVALARAADCEVEQWDSDEPIPAKELERGVAGAHGLLCLLSDHVDKRILDAAGANLKVISTMSVGIDHLALDEIKKRGIRVGYTPDVLTDTTAELAVSLLLTTCRRLPEAIEEVKNGGWTSWKPLWLCGYGLTQSTVGIIGLGRIGEAPTGPLARPGSHSVVCIPGTTCLKAEKTHMLSGHFACSRDISNEGYSFVKHRQIHK

SEQ ID NO: 815927 - protein, 241 aa, Homo sapiens
TPAWPRPGPATFPGQLLYCQVRVGGCTADETGATHEGVRHPQDTRRGCEVEQWDSDEPIPAKELERGVAGAHGLLCLLSDHVDKRILDAAGANLKVISTMSVGIDHLALDEIKKRGIRVGYTPDVLTDTTAELAVSLLLTTCRRLPEAIEEVKNGGWTSWKPLWLCGYGLTQSTVGIIGLGRIGEAPTGPLARPGSHSVVCIPGTTCLKAEKTHMLSGHFACSRDISNEGYSFVKHRQIHK

SEQ ID NO: 815928 - protein, 249 aa, Homo sapiens
LQPGPAPAQLHSRASFCTARSGSAAALRMRPVRLMKVFVTRRIPAEGRVALARAADGGWTSWKPLWLCGYGLTQSTVGIIGLGRIGQAIARRLKPFGVQRFLYTGRQPRPEEAAEFQAEFVSTPELAAQSDFIVVACSLTPATEGLCNKDFFQKMKETAVFINISRGDVVNQDDLYQALASGKIAAAGLDVTSPEPLPTNHPLLTLKNCVILPHIGSATHRTRNTMSLLAANNLLAGLRGEPMPSELKL

SEQ ID NO: 815929 - protein, 260 aa, Homo sapiens
MSLVALKVESFLLLICSAEWQCLIPLSVRDLEGGFIPWTTVRGAGFSAAPILVQGWASHLPLSLLLSGGWTSWKPLWLCGYGLTQSTVGIIGLGRIGQAIARRLKPFGVQRFLYTGRQPRPEEAAEFQAEFVSTPELAAQSDFIVVACSLTPATEGLCNKDFFQKMKETAVFINISRGDVVNQDDLYQALASGKIAAAGLDVTSPEPLPTNHPLLTLKNCVILPHIGSATHRTRNTMSLLAANNLLAGLRGEPMPSELKL

SEQ ID NO: 815930 - protein, 185 aa, Homo sapiens [sequence omitted]

SEQ ID NO: 815931 - protein, 229 aa, Homo sapiens
LQPGPAPAQLHSRASFCTARSGSAAALRMRPVRLMKVFVTRRIPAEGRVALARAADCEVEQWDSDEPIPAKELERGVAGAHGLLCLLSDHVDKRILDAAGANLKVISTMSVGIDHLALDEIKKRGIRVGYTPDVLTDTTAELAVSLLLTTCRRLPEAIEEVKNGGWTSWKPLWLCGYGLTQSTVGIIGLGRIGQAIARRLKPFGVQRFLYTGRQPRPEEAAEFQAEFGK

SEQ ID NO: 815932 - protein, 185 aa, Homo sapiens [sequence omitted]

SEQ ID NO: 815933 - protein, 423 aa, Homo sapiens
LQPGPAPAQLHSRASFCTARSGSAAALRMRPVRLMKVFVTRRIPAEGRVALARAADCEVEQWDSDEPIPAKELERGVAGAHGLLCLLSDHVDKRILDAAGANLKVISTMSVGIDHLALDEIKKRGIRVGYTPDVLTDTTAELAVSLLLTTCRRLPEAIEEVKNGGWTSWKPLWLCGYGLTQSTVGIIGLGRIGQAIARRLKPFGVQRFLYTGRQPRPEEAAEFQAEFVSTPELAAQSDFIVVACSLTPATEGLCNKDFFQKMKETAVFINISRYPRATLPSKPGEEPSPLLPSGDFLPRGLLVRPQAELAGFHKPNNQLRNSWEYTRPPYREEEPSEWAWPVCFSAVAPTRRGLAHSSVASGSVPREPLQAHYPPPQRAGLEDLKGPLEAASHTAEPGFVWLWFSDTLNLMLLGGQTLKLTWS

SEQ ID NO: 815934 - protein, 322 aa, Homo sapiens
LQPGPAPAQLHSRASFCTARSGSAAALRMRPVRLMKVFVTRRIPAEGRVALARAADCEVEQWDSDEPIPAKELERGVAGAHGLLCLLSDHVDKRILDAAGANLKVISTMSVGIDHLALDEIKKRGIRVGYTPDVLTDTTAELAVSLLLTTCRRLPEAIEEVKNGGWTSWKPLWLCGYGLTQSTVGIIGLGRIGQAIARRLKPFGVQRFLYTGRQPRPEEAAEFQAEFVSTPELAAQSDFIVVACSLTPATEGLCNKDFFQKMKETAVFINISRGDVVNQDDLYQALASGKIAAAGLDVTSPEPLPTNHPLLTLKNCGKNCTF

SEQ ID NO: 815935 - protein, 228 aa, Homo sapiens
LQPGPAPAQLHSRASFCTARSGSAAALRMRPVRLMKVFVTRRIPAEGRVALARAADCEVEQWDSDEPIPAKELERGVAGAHGLLCLLSDHVDKRILDAAGANLKVISTMSVGIDHLALDEIKKRGIRVGYTPDVLTDTTAELAVSLLLTTCRRLPEAIEEVKNGGWTSWKPLWLCGYGLTQSTVGIIGLGRIGQAIARRLKPFGVQRFLYTGRQPRPEEAATRTSSRR

SEQ ID NO: 815936 - protein, 311 aa, Homo sapiens
LQPGPAPAQLHSRASFCTARSGSAAALRMRPVRLMKVFVTRRIPAEGRVALARAADCEVEQWDSDEPIPAKELERGVAGAHGLLCLLSDHVDKRILDAAGANLKVISTMSVGIDHLALDEIKKRGIRVGYTPDVLTDTTAELAVSLLLTTCRRLPEAIEEVKNGGWTSWKPLWLCGYGLTQSTVGIIGLGRIGQAIARRLKPFGVQRFLYTGRQPRPEEAAEFQAEFVSTPELAAQSDFIVVACSLTPATEGLCNKDFFQKMKETAVFINISRGDVVNQDDLYQALASGKIAAAGLDVTSPEGRCDSLRKE

SEQ ID NO: 815937 - protein, 315 aa, Homo sapiens
LQPGPAPAQLHSRASFCTARSGSAAALRMRPVRLMKVFVTRRIPAEGRVALARAADCEVEQWDSDEPIPAKELERGVAGAHGLLCLLSDHVDKRILDAAGANLKVISTMSVGIDHLALDEIKKRGIRVGYTPDVLTDTTAELAVSLLLTTCRRLPEAIEEVKNGGWTSWKPLWLCGYGLTQSTVGIIGLGRIGQAIARRLKPFGVQRFLYTGRQPRPEEAAEFQAEFVSTPELAAQSDFIVVACSLTPATEGLCNKDFFQKMKETAVFINISRGDVVNQDDLYQALASGKIAAAGLDVTSPDSWVQAILLPQLPE

SEQ ID NO: 815938 - protein, 423 aa, Homo sapiens; identical to SEQ ID NO: 815933

SEQ ID NO: 815939 - protein, 293 aa, Homo sapiens
LQPGPAPAQLHSRASFCTARSGSAAALRMRPVRLMKVFVTRRIPAEGRVALARAADCEVEQWDSDEPIPAKELERGVAGAHGLLCLLSDHVDKRILDAAGANLKVISTMSVGIDHLALDEIKKRGIRVGYTPDVLTDTTAELAVSLLLTTCRRLPEAIEEVKNGGWTSWKPLWLCGYGLTQSTVGIIGLGRIGQAIARRLKPFGVQRFLYTGRQPRPEEAAEFQAEFVSTPELAAQSDFIVVACSLTPATEGLCNKDFFQKMKETAVFINISRGDVVNQDDLRGEPMPSELKL

SEQ ID NO: 815940 - protein, 423 aa, Homo sapiens; identical to SEQ ID NO: 815933

SEQ ID NO: 815941 - protein, 316 aa, Homo sapiens
LQPGPAPAQLHSRASFCTARSGSAAALRMRPVRLMKVFVTRRIPAEGRVALARAADGGWTSWKPLWLCGYGLTQSTVGIIGLGRIGQAIARRLKPFGVQRFLYTGRQPRPEEAAEFQAEFVSTPELAAQSDFIVVACSLTPATEGLCNKDFFQKMKETAVFINISRYPRATLPSKPGEEPSPLLPSGDFLPRGLLVRPQAELAGFHKPNNQLRNSWEYTRPPYREEEPSEWAWPVCFSAVAPTRRGLAHSSVASGSVPREPLQAHYPPPQRAGLEDLKGPLEAASHTAEPGFVWLWFSDTLNLMLLGGQTLKLTWS

SEQ ID NO: 815942 - protein, 262 aa, Homo sapiens
LQPGPAPAQLHSRASFCTARSGSAAALRMRPVRLMKVFVTRRIPAEGRVALARAADCEVEQWDSDEPIPAKELERGVAGAHGLLCLLSDHVDKRILDAAGANLKVISTMSVGIDHLALDEIKKRGIRVGYTPDVLTDTTAELAVSLLLTTCRRLPEAIEEVKNGGWTSWKPLWLCGYGLTQSTVGIIGLGRIGQAIARRLKPFGVQRFLYTGRQPRPEEAAEFQAEFVSTPELAAQSDFIVVACSLTPATEGLCNKDFFQKM

SEQ ID NO: 815943 - protein, 287 aa, Homo sapiens
LQPGPAPAQLHSRASFCTARSGSAAALRMRPVRLMKVFVTRRIPAEGRVALARAADCEVEQWDSDEPIPAKELERGVAGAHGLLCLLSDHVDKRILDAAGANLKVISTMSVGIDHLALDEIKKRGIRVGYTPDVLTDTTAELAVSLLLTTCRRLPEAIEEVKNGGWTSWKPLWLCGYGLTQSTVGIIGLGRIGQAIARRLKPFGVQRFLYTGRQPRPEEAAEFQAEFVSTPELAAQSDFIVVACSLTLILPHIGSATHRTRNTMSLLAANNLLAGLRGEPMPSELKL

SEQ ID NO: 815944 - protein, 250 aa, Homo sapiens; identical to SEQ ID NO: 815926

SEQ ID NO: 815945 - protein, 163 aa, Homo sapiens
LQPGPAPAQLHSRASFCTARSGSAAALRMRPVRLMKVFVTRRIPAEGRVALARAADCEVEQWDSDEPIPAKELERGVAGAHGLLCLLSDHVDKRILDAAGANLKVISTMSVGIDHLALDEIKKRGIRVGYTPDVLTDTTAELAVSLLLTTCRRLPEAIEEVKK

SEQ ID NO: 815946 - protein, 115 aa, Homo sapiens
TPAWPRPGPATFPGQLLYCQVRVGGCTADETGATHEGVRHPQDTRRGCEVEQWDSDEPIPAKELERGVAGAHGLLCLLSDHVDKRILDAAGANLKVISTMSVGIDHLALDEIKKR

SEQ ID NO: 815947 - protein, 264 aa, Homo sapiens
ILHRTRSSQLHPRGRLPGQWLGSARRHSNPSRPRLLDLLTGHRGRGLGPATSPRSPPPPPPPGFSLTHGSRPLPLFSLTARAPGGECVSRPGRGAVCISYAGSLAPGSRAASPAVAGAAKSAISGPLRPQASRRAVRSPSSSAQPAACGGVRRRQASASSSVSRCGRRSSLHLLLGPPSLPSSHFPSSGVSRPRSTLLQEQRKTPRRRRRHLRLLLRPAPGPRRRHQGARLSLPGGLGPASSCRLRARTRLSHLGPCRALKRSL

SEQ ID NO: 815948 - protein, 213 aa, Homo sapiens
MAQETNQTPGPMLCSTGCGFYGNPRTNGMCSVCYKEHLQRQQNSGRMSPMGTASGSNSPTSDSASVQRADTSLNNCEGAAGSTSEKSRNVPVAALPVTQQMTEMSISREDKITTPKTEVSEPVVTQPSPSVSQPSTSQSEEKAPELPKPKKNRCFMCRKKVGLTGFDCRCGNLFCGLHRYSDKHNCPYDYKAEAAAKIRKENPVVVAEKIQRI

SEQ ID NO: 815949 - protein, 474 aa, Homo sapiens
ILHRTRSSQLHPRGRLPGQWLGSARRHSNPSRPRLLDLLTGHRGRGLGPATSPRSPPPPPPPGFSLTHGSRPLPLFSLTARAPGGECVSRPGRGAVCISYAGSLAPGSRAASPAVAGAAKSAISGPLRPQASRRAVRSPSSSAQPAACGGVRRRQASASSSVSRCGRRSSLHLLLGPPSLPSSHFPSSGVSRPRSTLLQEQRKTPRRRRRHLRLLLRPAPGPRRRHQGARLSLPGGLGPASSCRLRARTRLSHLGPCRQKNMAQETNQTPGPMLCSTGCGFYGNPRTNGMCSVCYKEHLQRQQNSGRMSPMGTASGSNSPTSDSASVQRADTSLNNCEGAAGSTSEKSRNVPVAALPVTQQMTEMSISREDKITTPKTEVSEPVVTQPSPSVSQPSTSQSEEKAPELPKPKKNRCFMCRKKVGLTGFDCRCGNLFCGLHRYSDKHNCPYDYKAEAAAKIRKENPVVVAEKIQRI

SEQ ID NO: 815950 - protein, 392 aa, Homo sapiens
ILHRTRSSQLHPRGRLPGQWLGSARRHSNPSRPRLLDLLTGHRGRGLGPATSPRSPPPPPPPGFSLTHGSRPLPLFSLTARAPGGECVSRPGRGAVCISYAGSLAPGSRAASPAVAGAAKSAISGPLRPQASRRAVRSPSSSAQPAACGGVRRRQASASSSVSRCGRRSSLHLLLGPPSLPSSHFPSSGVSRPRSTLLQEQRKTPRRRRRHLRLLLRPAPGPRRRHQGARLSLPGGLGPASSCRLRARTRLSHLGPCRVSDTGLRVGAGLLVAGPGAGGSPPASPGSTKTEASSCRRGPRPGSRRPWLAPQHGRETMHGVPPLRGRPLGRSPPRRRPAWAPRPRETKRPRRRPRPLPVAAPPSSPLRGAVRGRGSGVGDPRGACRRRAGRAC

SEQ ID NO: 815951 - protein, 385 aa, Homo sapiens
ILHRTRSSQLHPRGRLPGQWLGSARRHSNPSRPRLLDLLTGHRGRGLGPATSPRSPPPPPPPGFSLTHGSRPLPLFSLTARAPGGECVSRPGRGAVCISYAGSLAPGSRAASPAVAGAAKSAISGPLRPQASRRAVRSPSSSAQPAACGGVRRRQASASSSVSRCGRRSSLHLLLGPPSLPSSHFPSSGVSRPRSTLLQEQRKTPRRRRRHLRLLLRPAPGPRRRHQGARLSLPGGLGPASSCRLRARTRLSHLGPCRVSDTGLRVGAGLLVAGPGAGVKGPGRRGPMAKPEQAGMAASGGGEPARQPRKHKDGGVILSSWPETWLPASLARSTARSGNNARRAASAGPASRPLASAAAPGVGTTTQRNKEAEAAAAPPARCSPP

SEQ ID NO: 815952 - protein, 342 aa, Homo sapiens
ILHRTRSSQLHPRGRLPGQWLGSARRHSNPSRPRLLDLLTGHRGRGLGPATSPRSPPPPPPPGFSLTHGSRPLPLFSLTARAPGGECVSRPGRGAVCISYAGSLAPGSRAASPAVAGAAKSAISGPLRPQASRRAVRSPSSSAQPAACGGVRRRQASASSSVSRCGRRSSLHLLLGPPSLPSSHFPSSGVSRPRSTLLQEQRKTPRRRRRHLRLLLRPAPGPRRRHQGARLSLPGGLGPASSCRLRARTRLSHLGPCRVSDTGLRVGAGLLVAGPGAGVKGPGRRGPMAKPEQAADGGVRGRGARPPAQEAQRRRRHPVVVARDLAPGVPGSLHSTALKRSL

SEQ ID NO: 815953 - protein, 264 aa, Homo sapiens; identical to SEQ ID NO: 815947

SEQ ID NO: 815954 - protein, 264 aa, Homo sapiens; identical to SEQ ID NO: 815947

SEQ ID NO: 815955 - protein, 552 aa, Homo sapiens
ILHRTRSSQLHPRGRLPGQWLGSARRHSNPSRPRLLDLLTGHRGRGLGPATSPRSPPPPPPPGFSLTHGSRPLPLFSLTARAPGGECVSRPGRGAVCISYAGSLAPGSRAASPAVAGAAKSAISGPLRPQASRRAVRSPSSSAQPAACGGVRRRQASASSSVSRCGRRSSLHLLLGPPSLPSSHFPSSGVSRPRSTLLQEQRKTPRRRRRHLRLLLRPAPGPRRRHQGARLSLPGGLGPASSCRLRARTRLSHLGPCRVSDTGLRVGAGLLVAGPGAGVKGPGRRGPMAKPEQAADGGVRGRGARPPAQEAQRRRRHPVVVARDLAPGVPGSLHSTQKNMAQETNQTPGPMLCSTGCGFYGNPRTNGMCSVCYKEHLQRQQNSGRMSPMGTASGSNSPTSDSASVQRADTSLNNCEGAAGSTSEKSRNVPVAALPVTQQMTEMSISREDKITTPKTEVSEPVVTQPSPSVSQPSTSQSEEKAPELPKPKKNRCFMCRKKVGLTGFDCRCGNLFCGLHRYSDKHNCPYDYKAEAAAKIRKENPVVVAEKIQRI

SEQ ID NO: 815956 - protein, 264 aa, Homo sapiens; identical to SEQ ID NO: 815947

SEQ ID NO: 815957 - protein, 264 aa, Homo sapiens; identical to SEQ ID NO: 815947

SEQ ID NO: 815958 - protein, 264 aa, Homo sapiens; identical to SEQ ID NO: 815947

SEQ ID NO: 815959 - protein, 113 aa, Homo sapiens
MTEMSISREDKITTPKTEVSEPVVTQPSPSVSQPSTSQSEEKAPELPKPKKNRCFMCRKKVGLTGFDCRCGNLFCGLHRYSDKHNCPYDYKAEAAAKIRKENPVVVAEKIQRI

SEQ ID NO: 815960 - protein, 264 aa, Homo sapiens; identical to SEQ ID NO: 815947

SEQ ID NO: 815961 - protein, 264 aa, Homo sapiens; identical to SEQ ID NO: 815947

SEQ ID NO: 815962 - protein, 264 aa, Homo sapiens; identical to SEQ ID NO: 815947

SEQ ID NO: 815963 - protein, 264 aa, Homo sapiens; identical to SEQ ID NO: 815947

SEQ ID NO: 815964 - protein, 264 aa, Homo sapiens; identical to SEQ ID NO: 815947

SEQ ID NO: 815965 - protein, 474 aa, Homo sapiens; identical to SEQ ID NO: 815949

SEQ ID NO: 815966 - protein, 264 aa, Homo sapiens; identical to SEQ ID NO: 815947

SEQ ID NO: 815967 - protein, 264 aa, Homo sapiens; identical to SEQ ID NO: 815947

SEQ ID NO: 815968 - protein, 335 aa, Homo sapiens
ILHRTRSSQLHPRGRLPGQWLGSARRHSNPSRPRLLDLLTGHRGRGLGPATSPRSPPPPPPPGFSLTHGSRPLPLFSLTARAPGGECVSRPGRGAVCISYAGSLAPGSRAASPAVAGAAKSAISGPLRPQASRRAVRSPSSSAQPAACGGVRRRQASASSSVSRCGRRSSLHLLLGPPSLPSSHFPSSGVSRPRSTLLQEQRKTPRRRRRHLRLLLRPAPGPRRRHQGARLSLPGGLGPASSCRLRARTRLSHLGPCRQKNMAQETNQTPGPMLCSTGCGFYGNPRTNGMCSVCYKEHLQRQQNSGRMSPMGKLFPRKNTFERTGGQKYRTKNWG

SEQ ID NO: 815969 - protein, 84 aa, Homo sapiens
  misc_feature (6)..(6): Xaa can be any naturally occurring amino acid
RANSQXILTLVQVQAILESPGGLVVRFGRFSPPRAGFVSRSGNPSFLGSDLGRGDMAKRTKKVGIVGKYGTRYGAIPPENGEEN

SEQ ID NO: 815970 - protein, 116 aa, Homo sapiens
LRAAMAVEKAASASRVLSRAWGGRRQREIFVFQVAATWPNVPRKSGSSVNTGPAMGPSLRKMVKKIEISQHAKYTCSFCGKTKMKRRAVGIWHCGSCMKTVAGGAWGRTIPLPLSR

SEQ ID NO: 815971 - protein, 98 aa, Homo sapiens
RERERERERERERERVAATWPNVPRKSGSSVNTGPAMGPSLRKMVKKIEISQHAKYTCSFCGKTKMKRRAVGIWHCGSCMKTVAGGAWGRTIPLPLSR

SEQ ID NO: 815972 - protein, 99 aa, Homo sapiens
  misc_feature (1)..(1): Xaa can be any naturally occurring amino acid
  misc_feature (9)..(9): Xaa can be any naturally occurring amino acid
XLDIEFAPXRYGCEETTKGDWPNVPRKSGSSVNTGPAMGPSLRKMVKKIEISQHAKYTCSFCGKTKMKRRAVGIWHCGSCMKTVAGGAWGRTIPLPLSR

SEQ ID NO: 815973 - protein, 94 aa, Homo sapiens
KKLGYYGLVLNQAEAWPNVPRKSGSSVNTGPAMGPSLRKMVKKIEISQHAKYTCSFCGKTKMKRRAVGIWHCGSCMKTVAGGAWGRTIPLPLSR

SEQ ID NO: 815974 - protein, 49 aa, Homo sapiens
MARGRGEKEGEERKGHRGGHKRVAPGHPEFPGATKGDKRGGPPKGGGNK

SEQ ID NO: 815975 - protein, 84 aa, Homo sapiens; identical to SEQ ID NO: 815969
  misc_feature (6)..(6): Xaa can be any naturally occurring amino acid

SEQ ID NO: 815976 - protein, 99 aa, Homo sapiens
MVRDMGNKRASWENLGHLQASGEEGHAVEDSGDHGGTNKARRGSLHGRELDFRTLAKPKIASWAELWDQAAGHVKMNFRGALVDNTLATEDTGHVMMPH

SEQ ID NO: 815977 - protein, 69 aa, Homo sapiens
RVDRREAPERVPYLPMKKIEISQHAKYTCSFCGKTKMKRRAVGIWHCGSCMKTVAGGAWGRTIPLPLSR

SEQ ID NO: 815978 - protein, 67 aa, Homo sapiens
PFEFPSEIRGRLLLLNSRPRRHQDEETSCGDLALWFLHEDSGWRCLGTYNTTSAVTVKSAIRRLEGV

SEQ ID NO: 815979 - protein, 93 aa, Homo sapiens
RIQRWIRIRHQPATWPNVPRKSGSSVNTGPAMGPSLRKMVKKIEISQHAKYTCSFCGKTKMKRRAVGIWHCGSCMKTVAGGAWGRTIPLPLSR

SEQ ID NO: 815980 - protein, 93 aa, Homo sapiens; identical to SEQ ID NO: 815979

SEQ ID NO: 815981 - protein, 103 aa, Homo sapiens
  misc_feature (81)..(81): Xaa can be any naturally occurring amino acid
VCQIDGLTDEADSEVKKIEISQHAKYTCSFCGKTKMKRRAVGIWHCGSCMKTVAGGAWGRTIPLPLSTVKAASGPFNASGXFNASGPFNASGPFNASGPFNAS

SEQ ID NO: 815982 - protein, 68 aa, Homo sapiens
SEVVAPLYPAGASILAPGAYETAKSPCSRDKPADLGRGDMAKRTKKVGIVGKYGTRYGAIPPENGEEN

SEQ ID NO: 815983 - protein, 98 aa, Homo sapiens
ATTAGTYGLGTRPGWCAATWPNVPRKSGSSVNTGPAMGPSLRKMVKKIEISQHAKYTCSFCGKTKMKRRAVGIWHCGSCMKTVAGGAWGRTIPLPLSR

SEQ ID NO: 815984 - protein, 98 aa, Homo sapiens; identical to SEQ ID NO: 815983

SEQ ID NO: 815985 - protein, 101 aa, Homo sapiens
MFGKAGRSTRRRKKAERRHHGGTPPTASHASSRMLCSRGETAAEPAKQQNTAAGKTAEKSQKADRQHAHNPHTGNGHTEANTTGDKHRQGANSGQPEPQTA

SEQ ID NO: 815986 - protein, 170 aa, Homo sapiens
MCVTQGSTHSSVNVPPLATLLKVGKISGVPQRRLTVGAQRPSQGHQGDSQYSEAMPDISKDTSEVTRSIRWPPSDDLNVSPLSLLRVFLATWPNVPRKSGSSVNTGPAMGPSLRKMVKKIEISQHAKYTCSFCGKTKMKRRAVGIWHCGSCMKTVAGGAWGRTIPLPLSR

SEQ ID NO: 815987 - protein, 99 aa, Homo sapiens
MVGIWEIKEPAGRTWDTSRPPEKKGTLLEDSGDHGGTNKARRGSLHGRELDFRTLAKPKIASWAELWDQAAGHVKMNFRGALVDNTLATEDTGHVMMPH

SEQ ID NO: 815988 - protein, 135 aa, Homo sapiens
MRQKTHDDNSQNQKQATGHTTTQIWKNNTTIERDKKNTAAKNKSEKKTKKRWKEDNNKKKHTRKISKATYRNKKKKKESKTRQEKTREKATRKLAKQDERETDKEKRREERKEKRRKKAKRRRTKQEKQEDQEER

SEQ ID NO: 815989 - protein, 97 aa, Homo sapiens
VLRLTKLVVDSHVQYRLGNVDAFQLADGLQYIFAHVGQLTGMYRYKYKLMRQIRMCKDLKHLIYYRFNTAKRTKKVGIVGKYGTRYGAIPPENGEEN

SEQ ID NO: 815990 - protein, 92 aa, Homo sapiens
GRRGSTHASVAATWPNVPRKSGSSVNTGPAMGPSLRKMVKKIEISQHAKYTCSFCGKTKMKRRAVGIWHCGSCMKTVAGGAWGRTIPLPLSR

SEQ ID NO: 815991 - protein, 105 aa, Homo sapiens
RPPTTTKFAAASTREDDRRGFLGAATWPNVPRKSGSSVNTGPAMGPSLRKMVKKIEISQHAKYTCSFCGKTKMKRRAVGIWHCGSCMKTVAGGAWGRTIPLPLSR

SEQ ID NO: 815992 - protein, 49 aa, Homo sapiens
MARGRGEKEGEERKGHRGGHKRVAPEHPEFPGATKGDKRGGPPKGGGNK

SEQ ID NO: 815993 - protein, 84 aa, Homo sapiens; identical to SEQ ID NO: 815969
  misc_feature (6)..(6): Xaa can be any naturally occurring amino acid

SEQ ID NO: 815994 - protein, 99 aa, Homo sapiens
MVRDMGNKRASWENLGHLQASGEEGHAVEDSGDHGGTNKARRGSLHGRELDFRTLAKPKIASWAELWESGGGPCEDEPPGSPVDNTLATEDTGHVMMPH

SEQ ID NO: 815995 - protein, 75 aa, Homo sapiens
MPPAWAKSILDSGRFMHAAEFRVNLPISPIAGRFTIHWSPFYNGVTVKPLALPNFAFEDNPLSPAWRSATGPPRP

SEQ ID NO: 815996 - protein, 110 aa, Homo sapiens
MGGKPLAQDTLAETNCFDAVRWSSSDKRVPWLKMSSWAILVDTTLLLQIMGRFQQRFALTEVGRNTTEEWASNTKLTGQPAFEKGTGSGLLNVPRWGNSGGRHMRNGYRS

SEQ ID NO: 815997 - protein, 62 aa, Homo sapiens
MNPFDRGSGFGNGVQRVFGGPKQRSKGNGHGVVELLTGLLDRGNPTMKVSLSMTKGYAGTGW

SEQ ID NO: 815998 - protein, 116 aa, Homo sapiens; identical to SEQ ID NO: 815970

SEQ ID NO: 815999 - protein, 105 aa, Homo sapiens; identical to SEQ ID NO: 815991

SEQ ID NO: 816000 - protein, 98 aa, Homo sapiens; identical to SEQ ID NO: 815971

SEQ ID NO: 816001 - protein, 110 aa, Homo sapiens; identical to SEQ ID NO: 815996

SEQ ID NO: 816002 - protein, 92 aa, Homo sapiens
RERERERERERERERVAATWPNVPRKSGSSVNTGPAMGPSLRKMVKKIEISQHAKYTCSFCGKTKMKRRAVGIWHCGSCMKTVAGGAWGRTK

SEQ ID NO: 816003 - protein, 105 aa, Homo sapiens
MESKCSDQGTGTEITVDTTWHDPIRLSPGKIIPWQDPVRLHFLASPHCKIQDHASLPSACKTCPSPQLQETDLSQAPVFLCSCGDLALWFLHERQWLAGLDVQVT

SEQ ID NO: 816004 - protein, 66 aa, Homo sapiens
MVKKIEISQHAKYTCSFCGKTKMKRRAVGIWHCGSCMKTVAGGAWGRTIPFPFLTLSAPIRELKEF

SEQ ID NO: 816005 - protein, 263 aa, Homo sapiens
GPDVRGRGGTAQAQKRGRRTRLVVLLPECRRRSCCCRSPASCPTMSSHLVEPPPPLHNNNNNCEENEQSLPPPAGLNSSWVELPMNSSNGNDNGNGKNGGLEHVPSSSSIHNGDMEKILLDAQHESGQSSSRGSSHCDSPSPQEDGQIMFDVEMHTSRDHSSQSEEEVVEGEKEVEALKKSADWVSDWSSRPENIPPKEFHFRHPKRSVSLSMRKSGAMKKGGIFSAEFLKVFIPSLFLSHVLALGLGIYIGKRLSTPSASTY

SEQ ID NO: 816006 - protein, 263 aa, Homo sapiens; identical to SEQ ID NO: 816005

SEQ ID NO: 816007 - protein, 263 aa, Homo sapiens; identical to SEQ ID NO: 816005

SEQ ID NO: 816008 - protein, 263 aa, Homo sapiens; identical to SEQ ID NO: 816005

SEQ ID NO: 816009 - protein, 263 aa, Homo sapiens; identical to SEQ ID NO: 816005

SEQ ID NO: 816010 - protein, 256 aa, Homo sapiens
GPDVRGRGGTAQAQKRGRRTRLVVLLPECRRRSCCCRSPASCPTMSSHLVEPPPPLHNNNNNCEENEQSLPPPAGLNSSWVELPMNSSNGNDNGNGKNGGLEHVPSSSSIHNGDMEKILLDAQHESGQSSSRGSSHCDSPSPQEDGQIMFDVEMHTSRDHSSQSEEEVVEGEKEVEALKKSADWVSDWSSRPENIPPKEFHFRHPKRSVSLSMSVHSISLPFSCFGFGARHLYWKATEHTLCQHLLRERKSPWKCV

SEQ ID NO: 816011 - protein, 208 aa, Homo sapiens
GSWARGRLGSRSGSGAGSADPPGSWVELPMNSSNGNDNGNGKNGGLEHVPSSSSIHNGDMEKILLDAQHESGQSSSRGSSHCDSPSPQEDGQIMFDVEMHTSRDHSSQSEEEVVEGEKEVEALKKSADWVSDWSSRPENIPPKEFHFRHPKRSVSLSMRKSGAMKKGGIFSAEFLKVFIPSLFLSHVLALGLGIYIGKRLSTPSASTY

SEQ ID NO: 816012 - protein, 115 aa, Homo sapiens
MSDAEDVVISAFPSESEEEVVEGEKEVEALKKSADWVSDWSSRPENIPPKEFHFRHPKRSVSLSMRKSGAMKKGGIFSAEFLKVFIPSLFLSHVLALGLGIYIGKRLSTPSASTY

SEQ ID NO: 816013 - protein, 263 aa, Homo sapiens; identical to SEQ ID NO: 816005

SEQ ID NO: 816014 - protein, 101 aa, Homo sapiens
AAIYTVRHPEWHLNSDYSYGFAYILAWVAFPLALLSGVIYVILLETRMRRPDGLSEALSVHREEEEGKTENKTKKKGKAQQKNILGNKKNILNQLWSHFFV

SEQ ID NO: 816015 - protein, 263 aa, Homo sapiens; identical to SEQ ID NO: 816005

SEQ ID NO: 816016 - protein, 263 aa, Homo sapiens; identical to SEQ ID NO: 816005

SEQ ID NO: 816017 - protein, 179 aa, Homo sapiens
MNSSNGNDNGNGKNGGLEHVPSSSSIHNGDMEKILLDAQHESGQSSSRGSSHCDSPSPQEDGQIMFDVEMHTSRDHSSQSEEEVVEGEKEVEALKKSADWVSDWSSRPENIPPKEFHFRHPKRSVSLSMRKSGAMKKGGIFSAEFLKVFIPSLFLSHVLALGLGIYIGKRLSTPSASTY

SEQ ID NO: 816018 - protein, 179 aa, Homo sapiens; identical to SEQ ID NO: 816017

SEQ ID NO: 816019 - protein, 85 aa, Homo sapiens
  misc_feature (6)..(6): Xaa can be any naturally occurring amino acid
  misc_feature (40)..(40): Xaa can be any naturally occurring amino acid
KVGVKXRGPTSGKLTQTSGKTTQTHRETAGDGKSIKAFKXICKADAGTPANSWELGLERWPRTPKEEAQSLEDLAGFKELFQTPD

SEQ ID NO: 816020 - protein, 149 aa, Homo sapiens
  misc_feature (141)..(141): Xaa can be any naturally occurring amino acid
GPDVRGRGGTAQAQKRGRRTRLVVLLPECRRRSCCCRSPASCPTMSSHLVEPPPPLHNNNNNCEENEQSLPPPAGLNSSWVELPMNSSNGNDNGNGKNGGLEHVPSSSSIHKNNEKGKDLYNALTKELGAEYKPNNIALLXISPWAIYV

SEQ ID NO: 816021 - protein, 252 aa, Homo sapiens
RSGAPANQRQSPNVGPAQPRPALLFVVSAGPRESNHNIRRAGGGGAGGGAAAAAVSASPGAPGGRPPAPAQPRVCVRPETPGPAPRRAMSVNMDELRHQVMINQFVLAAGCAADQAKQLLQAAHWQFETALSTFFQETNIPNSHHHHQMMCTPSNTPATPPNFPDALAMFSKLRASEGLQSSNSPMTAAACSPPANFSPFWASSPPSHQAPWIPPSSPTTFHHLHRPQPTWPPGAQQGGAQQKAMAAMDGQR

SEQ ID NO: 816022 - protein, 252 aa, Homo sapiens; identical to SEQ ID NO: 816021

SEQ ID NO: 816023 - protein, 178 aa, Homo sapiens
RSGAPANQRQSPNVGPAQPRPALLFVVSAGPRESNHNIRRAGGGGAGGGAAAAATALSTFFQETNIPNSHHHHQMMCTPSNTPATPPNFPDALAMFSKLRASEGLQSSNSPMTAAACSPPANFSPFWASSPPSHQAPWIPPSSPTTFHHLHRPQPTWPPGAQQGGAQQKAMAAMDGQR

SEQ ID NO: 816024 - protein, 223 aa, Homo sapiens
RSGAPANQRQSPNVGPAQPRPALLFVVSAGPRESNHNIRRAGGGGAGGGAAAAAVSASPGAPGGRPPAPAQPRVCVRPETPGPAPRRAMSVNMDELRHQVMINQFVLAAGCAADQAKQLLQAAHWQFETALSTFFQETNIPNSHHHHQMMCTPSNTPATPPNFPDALAMFSKLRASEGLQSSNSPMTAAACSPPANFSPFWASSPPSHQAPQQKAMAAMDGQR

SEQ ID NO: 816025 - protein, 170 aa, Homo sapiens
RSGAPANQRQSPNVGPAQPRPALLFVVSAGPRESNHNIRRAGGGGAGGGAAAAAVSASPGAPGGRPPAPAQPRVCVRPETPGPAPRRAMSVNMDELRHQVMINQFVLAAGCAADQAKQLLQAAHWQFETALSTFFQETNIPNSHHHHQMMCTPSNTPATPPNFPDAWKIL

SEQ ID NO: 816026 - protein, 252 aa, Homo sapiens; identical to SEQ ID NO: 816021

SEQ ID NO: 816027 - protein, 252 aa, Homo sapiens; identical to SEQ ID NO: 816021

SEQ ID NO: 816028 - protein, 252 aa, Homo sapiens; identical to SEQ ID NO: 816021

SEQ ID NO: 816029 - protein, 252 aa, Homo sapiens; identical to SEQ ID NO: 816021

SEQ ID NO: 816030 - protein, 252 aa, Homo sapiens; identical to SEQ ID NO: 816021

SEQ ID NO: 816031 - protein, 76 aa, Homo sapiens
MIAGEHRLDPATISLGVDQTDDHQQPTHSRIRKKRVSPTSVWFQPYFCILKTLCTTLDTVQDDATSSWMLICHVDF

SEQ ID NO: 816032 - protein, 517 aa, Homo sapiens
AACGGEGGFSGSMKRTPTAEEREREAKKLRLLEELEDTWLPYLTPKDDEFYQQWQLKYPKLILREASSVSEELHKEVQEAFLTLHKHGCLFRDLVRIQGKDLLTPVSRILIGNPGCTYKYLNTRLFTVPWPVKGSNIKHTEAEIAAACETFLKLNDYLQIETIQALEELAAKEKANEDAVPLCMSADFPRVGMGSSYNGQDEVDIKSRAAYNVTLLNFMDPQKMPYLKEEPYFGMGKMAVSWHHDENLVDRSAVAVYSYSCEGPEEESEDDSHLEGRDPDIWHVGFKISWDIETPGLAIPLHQGDCYFMLDDLNATHQHCVLAGSQPRFSSTHRVAECSTGTLDYILQRCQLALQNVCDDVDNDDVSLKSFEPAVLKQGEEIHNEVEFEWLRQFWFQGNRYRKCTDWWCQPMAQLEALWKKMEGVTNAVLHEVKREGLPVEQRNEILTAILASLTARQNLRREWHARCQSRIARTLPADQKPECRPYWEKDDASMPLPFDLTDIVSELRGQLLEAKP

SEQ ID NO: 816033 - protein, 569 aa, Homo sapiens
AACGGEGGFSGSMKRTPTAEEREREAKKLRLLEELEDTWLPYLTPKDDEFYQQWQLKYPKLILREASSVSEELHKEVQEAFLTLHKHGCLFRDLVRIQGKDLLTPVSRILIGNPGCTYKYLNTRLFTVPWPVKGSNIKHTEAEIAAACETFLKLNDYLQIETIQALEELAAKEKANEDAVPLCMSADFPRVGMGSSYNGQDEVDIKSRAAYNVTLLNFMDPQKMPYLKEEPYFGMGKMAVSWHHDENLVDRSAVAVYSYSCEGPEEESEDDSHLEGRDPDIWHVGFKISWDIETPGLAIPLHQGDCYFMLDDLNATHQHCVLAGSQPRFSSTHRVAECSTGTLDYILQRCQLALQNVCDDVDNDDVSLKSFEPAVLKQGEEIHNEVEFEWLRQFWFQGNRYRKCTDWWCQPMAQLEALWKKMEGVTNAVLHEVKREGLPVEQRNEILTAILASLTARQNLRREWHARAERSVGASHELPEHYLLIRSQNVGHTGKRMMLRCLCRLTSQTSFQNSEVSFWKQNPRRSTSLRRRRKRDRLFSSNVVMGLSKSSGDFSWPLDCSTRVPIQNS

SEQ ID NO: 816034 - protein, 170 aa, Homo sapiens
AGPVRNLSGEAVVAPRFFSWAVFYIYRLRLSPAPPGPWVEFEWLRQFWFQGNRYRKCTDWWCQPMAQLEALWKKMEGVTNAVLHEVKREGLPVEQRNEILTAILASLTARQNLRREWHARCQSRIARTLPADQKPECRPYWEKDDASMPLPFDLTDIVSELRGQLLEAKP

SEQ ID NO: 816035 - protein, 127 aa, Homo sapiens
MEWRKVSECNSVEPCREVKKWPYRCIHHGKNFSRMTNAVLHEVKREGLPVEQRNEILTAILASLTARQNLRREWHARCQSRIARTLPADQKPECRPYWEKDDASMPLPFDLTDIVSELRGQLLEAKP

SEQ ID NO: 816036 - protein, 139 aa, Homo sapiens
MGHPRAIQPSVFFSPYDVHFLLYPIRCPYLKIGRFHIKLKGLHFLFSFLFFFFETQSHSVTRLECSGTISAHCNLCLPGSSNSPASASQVAGTTGTCHHAQLIFVFLAEMGFHHIGQDGLDLNLVIHPPRSPKALGLQA

SEQ ID NO: 816037 - protein, 322 aa, Homo sapiens
AACGGEGGFSGSMKRTPTAEEREREAKKLRLLEELEDTWLPYLTPKDDEFYQQWQLKYPKLILREASSVSEELHKEVQEAFLTLHKHGCLFRDLVRIQGKDLLTPVSRILIGNPGCTYKYLNTRLFTVPWPVKGSNIKHTEAEIAAACETFLKLNDYLQIETIQALEELAAKEKANEDAVPLCMSADFPRVGMGSSYNGQDEVDIKSRAAYNVTLLNFMDPQKMPYLKEEPYFGMGKMAVSWHHDENLVDRSAVAVYSYSCEGPEEESEDDSHLEGRDPDIWHVGFKISWDIETPGLAIPLHQGDCYFMLGNLWKIKIILKL

SEQ ID NO: 816038 - protein, 794 aa, Homo sapiens
MRVRIGLTLLLCAVLLSLASASSDEEGSQDESLDSKTTLTSDESVKDHTTAGRVVAGQIFLDSEESELESSIQEEEDSLKSQEGESVTEDISFLESPNPENKDYEEPKKVRKPALTAIEGTAHGEPCHFPFLFLDKEYDECTSDGREDGRLWCATTYDYKADEKWGFCETEEEAAKRRQMQEAEMMYQTGMKILNGSNKKSQKREAYRYLQKAASMNHTKALERVSYALLFGDYLPQNIQAAREMFEKLTEEGSPKGQTALGFLYASGLGVNSSQAKALVYYTFGALGGNLIAHMVLGYRYWAGIGVLQSCESALTHYRLVANHVASDISLTGGSVVQRIRLPDEVENPGMNSGMLEEDLIQYYQFLAEKGDVQAQVGLGQLHLHGGRGVEQNHQRAFDYFNLAANAGNSHAMAFLGKMYSEGSDIVPQSNETALHYFKKAADMGNPVGQSGLGMAYLYGRGVQVNYDLALKYFQKAAEQGWVDGQLQLGSMYYNGIGVKRDYKQALKYFNLASQGGHILAFYNLAQMHASGTGVMRSCHTAVELFKNVCERGRWSERLMTAYNSYKDGDYNAAVIQYLLLAEQGYEVAQSNAAFILDQREASIVGENETYPRALLHWNRAASQGYTVARIKLGDYHFYGFGTDVDYETAFIHYRLASEQQHSAQAMFNLGYMHEKGLGIKQDIHLAKRFYDMAAEASPDAQVPVFLALCKLGVVYFLQYIRETNIRDMFTQLDMDQLLGPEWDLYLMTIIALLLGTVIAYRQRQHQDMPAPRPPGPRPAPPQQEGPPEQQPPQ

SEQ ID NO: 816039 - protein, 825 aa, Homo sapiens
KSSGEAAVVAESVVAEAKATALGVGTGPERRMRVRIGLTLLLCAVLLSLASASSDEEGSQDESLDSKTTLTSDESVKDHTTAGRVVAGQIFLDSEESELESSIQEEEDSLKSQEGESVTEDISFLESPNPENKDYEEPKKVRKPALTAIEGTAHGEPCHFPFLFLDKEYDECTSDGREDGRLWCATTYDYKADEKWGFCETEEEAAKRRQMQEAEMMYQTGMKILNGSNKKSQKREAYRYLQKAASMNHTKALERVSYALLFGDYLPQNIQAAREMFEKLTEEGSPKGQTALGFLYASGLGVNSSQAKALVYYTFGALGGNLIAHMVLGYRYWAGIGVLQSCESALTHYRLVANHVASDISLTGGSVVQRIRLPDEVENPGMNSGMLEEDLIQYYQFLAEKGDVQAQVGLGQLHLHGGRGVEQNHQRAFDYFNLAANAGNSHAMAFLGKMYSEGSDIVPQSNETALHYFKKAADMGNPVGQSGLGMAYLYGRGVQVNYDLALKYFQKAAEQGWVDGQLQLGSMYYNGIGVKRDYKQALKYFNLASQGGHILAFYNLAQMHASGTGVMRSCHTAVELFKNVCERGRWSERLMTAYNSYKDGDYNAAVIQYLLLAEQGYEVAQSNAAFILDQREASIVGENETYPRALLHWNRAASQGYTVARIKLGDYHFYGFGTDVDYETAFIHYRLASEQQHSAQAMFNLGYMHEKGLGIKQDIHLAKRFYDMAAEASPDAQVPVFLALCKLGVVYFLQYIRETNIRDMFTQLDMDQLLGPEWDLYLMTIIALLLGTVIAYRQRQHQDMPAPRPPGPRPAPPQQEGPPEQQPPQ

SEQ ID NO: 816040 - protein, 663 aa, Homo sapiens
KSSGEAAVVAESVVAEAKATALGVGTGPERRMRVRIGLTLLLCAVLLSLASASSDEEGSQDESLDSKTTLTSDESVKDHTTAGRVVAGQIFLDSEESELESSIQEEEDSLKSQEGESVTEDISFLESPNPENKDYEEPKKVRKPALTAIEGTAHGEPCHFPFLFLDKEYDECTSDGREDGRLWCATTYDYKADEKWGFCETEEEAAKRRQMQEAEMMYQTGMKILNGSNKKSQKREAYRYLQKAASMNHTKALERVSYALLFGDYLPQNIQAAREMFEKLTEEGSPKGQTALGFLYASGLGVNSSQAKALVYYTFGALGGNLIAHMVLGYRYWAGIGVLQSCESALTHYRLVANHVASDISLTGGSVVQRIRLPDEVENPGMNSGMLEEDLIQYYQFLAEKGDVQAQVGLGQLHLHGGRGVEQNHQRAFDYFNLAANAGNSHAMAFLGKMYSEGSDIVPQSNETALHYFKKAADMGNPVGQSGLGMAYLYGRGVQVNYDLALKYFQKAAEQGWVDGQLQLGSMYYNGIGVKRDYKQALKYFNLASQGGHILAFYNLAQMHASGTGVMRSCHTAVELFKNVCERGRWSERLMTAYNSYKDGDYNAAVIQYLLLAEQGYEVAQSNAAFILDQREASIVGENETYPRALLHWNRAASQATQCTSYV

SEQ ID NO: 816041 - protein, 768 aa, Homo sapiens
KSSGEAAVVAESVVAEAKATALGVGTGPERRMRVRIGLTLLLCAVLLSLASASSDEEGSQDESLDSKTTLTSDESVKDHTTAGRVVAGQIFLDSEESELESSIQEEEDSLKSQEGESVTEDISFLESPNPENKDYEEPKKVRKPALTAIEGTAHGEPCHFPFLFLDKEYDECTSDGREDGRLWCATTYDYKADEKWGFCETEEEAAKRRQMQEAEMMYQTGMKILNGSNKKSQKREAYRYLQKAASMNHTKALERVSYALLFGDYLPQNIQAAREMFEKLTEEGSPKGQTALGFLYASGLGVNSSQAKALVYYTFGALGGNLIAHMVLGYRYWAGIGVLQSCESALTHYRLVANHVASDISLTGGSVVQRIRLPDEVENPGMNSGMLEEDLIQYYQFLAEKGDVQAQVGLGQLHLHGGRGVEQNHQRAFDYFNLAANAGNSHAMAFLGKMYSEGSDIVPQSNETALHYFKKAADMGNPVGQSGLGMAYLYGRGVQVNYDLALKYFQKAAEQGWVDGQLQLGSMYYNGIGVKRDYKQALKYFNLASQGGHILAFYNLAQMHASGTGVMRSCHTAVELFKNVCERGRWSERLMTAYNSYKDGDYNAAVIQYLLLAEQGYEVAQSNAAFILDQREASIVGENETYPRALLHWNRAASQGYTVARIKLGDYHFYGFGTDVDYETAFIHYRLASEQQHSAQAMFNLGYMHEKGLGIKQDIHLAKRFYDMAAEASPDAQVPVFLALCKLGVVYFLQYIRETNVSGPYLFSLKYK

SEQ ID NO: 816042 - protein, 107 aa, Homo sapiens
NAHTSKIKFMTSILIALGTILFISLLLAMAFLLKLLNPLPQNLTLSINKVLVYLDQMTAKFWVCLALFVPRRMTLKYMKLLPPHVKLFYRVTDTGLASASSRVVNLP

SEQ ID NO: 816043 - protein, 184 aa, Homo sapiens
MWVFGYGSLIWKVDFPYQDKLVGYITNYSRRFWQGSTDHRGVPGKPGRVVTLVEDPAGCVWGVAYRLPVGKEEEVKAYLDFREKGGYRTTTVIFYPKDPTTKPFSVLLYIGTCDNPDYLGPAPLEDIAEQIFNAAGPSGRNTEYLFELANSIRNLVPEEADEHLFALEKLVKERLEGKQNLNCI

SEQ ID NO: 816044 - protein, 184 aa, Homo sapiens; identical to SEQ ID NO: 816043

SEQ ID NO: 816045 - protein, 184 aa, Homo sapiens; identical to SEQ ID NO: 816043

SEQ ID NO: 816046 - protein, 280 aa, Homo sapiens
MAPSGSLAVPLAVLVLLLWGAPWTHGRRSNVRVITDENWRELLEGDWMIEFYAPWCPACQNLQPEWESFAEWGEDLEVNIAKVDVTEQPGLSGRFIITALPTIYHCKDGEFRRYQGPRTKKDFINFISDKEWKSIEPVSSWFGPGSVLMSSMSALFQLSMWIRTCHNYFIEDLGLPVWGSYTVFALATLFSGLLLGLCMIFVADCLCPSKRRRPQPYPYPSKKLLSESAQPLKKVEEEQEADEEDVSEEEAESKEGTNKDFPQNAIRQRSLGPSLATDKS

SEQ ID NO: 816047 - protein, 105 aa, Homo sapiens
MAPSGSLAVPLAVLVLLLWGAPWTHGRRSNVRVITDENWRELLEGDWMIEFYAPWCPACQNLQPEWESFAEWGEDLEVNIAKVDVTEQPGLSGRFIITALPTIYQ

SEQ ID NO: 816048 - protein, 280 aa, Homo sapiens; identical to SEQ ID NO: 816046

SEQ ID NO: 816049 - protein, 280 aa, Homo sapiens; identical to SEQ ID NO: 816046

SEQ ID NO: 816050 - protein, 280 aa, Homo sapiens; identical to SEQ ID NO: 816046

SEQ ID NO: 816051 - protein, 280 aa, Homo sapiens; identical to SEQ ID NO: 816046

SEQ ID NO: 816052 - protein, 185 aa, Homo sapiens
MAPSGSLAVPLAVLVLLLWGAPWTHGRRSNVRVITDENWRELLEGDWMIEFYAPWCPACQNLQPEWESFAEWGEDLEVNIAKVDVTEQPGLSGRFIITALPTIYHCKDGEFRRYQGPRTKKDFINFISDKEWKSIEPVSSWFGPGSVLMSSMSALFQLSMWIRTCHNYFIEDLGLPVWGSYTVFN

SEQ ID NO: 816053 - protein, 394 aa, Homo sapiens
MDSQGRKVVVCDNGTGFVKCGYAGSNFPEHIFPALVGRPIIRSTTKVGNIEIKDLMVGDEASELRSMLEVNYPMENGIVRNWDDMKHLWDYTFGPEKLNIDTRNCKILLTEPPMNPTKNREKIVEVMFETYQFSGVYVAIQAVLTLYAQGLLTGVVVDSGDGVTHICPVYEGFSLPHLTRRLDIAGRDITRYLIKLLLLRGYAFNHSADFETVRMIKEKLCYVGYNIEQEQKLALETTVLVESYTLPDGRIIKVGGERFEAPEALFQPHLINVEGVGVAELLFNTIQAADIDTRSEFYKHIVLSGGSTMYPGLPSRLERELKQLYLERVLKGDVEKLSKFKIRIEDPPRRKHMVFLGGAVLADIMKDKDNFWMTRQEYQEKGVRVLEKLGVTVR

SEQ ID NO: 816054 - protein, 124 aa, Homo sapiens
MVGSARTSRLAPRPTRQLLRHIPLPQQNRCPSPACVFCSSLSSALSSCDTLGRKPQHRRCWPPLTPGKAPGTRSSEEPGWAATVTAEPEAELREGPRRSSIFYWSSPLPVALPARPTLFVQAFS

SEQ ID NO: 816055 - protein, 44 aa, Homo sapiens
MDSQGRKVVVCDNGTGVRAARGGLGGHRRRRGRAAGARALGPQG

SEQ ID NO: 816056 - protein, 78 aa, Homo sapiens
MDSQGRKVVVCDNGTGFVKCGYAGSNFPEHIFPALVGRPIIRSTTKVGNIEIKETEVAVSRDRAIALQPGRQEKLCLN

SEQ ID NO: 816057 - protein, 394 aa, Homo sapiens; identical to SEQ ID NO: 816053

SEQ ID NO: 816058 - protein, 339 aa, Homo sapiens
MVGDEASELRSMLEVNYPMENGIVRNWDDMKHLWDYTFGPEKLNIDTRNCKILLTEPPMNPTKNREKIVEVMFETYQFSGVYVAIQAVLTLYAQGLLTGVVVDSGDGVTHICPVYEGFSLPHLTRRLDIAGRDITRYLIKLLLLRGYAFNHSADFETVRMIKEKLCYVGYNIEQEQKLALETTVLVESYTLPDGRIIKVGGERFEAPEALFQPHLINVEGVGVAELLFNTIQAADIDTRSEFYKHIVLSGGSTMYPGLPSRLERELKQLYLERVLKGDVEKLSKFKIRIEDPPRRKHMVFLGGAVLADIMKDKDNFWMTRQEYQEKGVRVLEKLGVTVR

SEQ ID NO: 816059 - protein, 339 aa, Homo sapiens; identical to SEQ ID NO: 816058

SEQ ID NO: 816060 - protein, 394 aa, Homo sapiens; identical to SEQ ID NO: 816053

SEQ ID NO: 816061 - protein, 394 aa, Homo sapiens; identical to SEQ ID NO: 816053

SEQ ID NO: 816062 - protein, 394 aa, Homo sapiens; identical to SEQ ID NO: 816053

SEQ ID NO: 816063 - protein, 394 aa, Homo sapiens; identical to SEQ ID NO: 816053

SEQ ID NO: 816064 - protein, 394 aa, Homo sapiens; identical to SEQ ID NO: 816053

SEQ ID NO: 816065 - protein, 394 aa, Homo sapiens; identical to SEQ ID NO: 816053

SEQ ID NO: 816066 - protein, 394 aa, Homo sapiens; identical to SEQ ID NO: 816053

SEQ ID NO: 816067 - protein, 394 aa, Homo sapiens; identical to SEQ ID NO: 816053

SEQ ID NO: 816068 - protein, 394 aa, Homo sapiens; identical to SEQ ID NO: 816053

SEQ ID NO: 816069 - protein, 394 aa, Homo sapiens; identical to SEQ ID NO: 816053

SEQ ID NO: 816070 - protein, 394 aa, Homo sapiens; identical to SEQ ID NO: 816053

SEQ ID NO: 816071 - protein, 394 aa, Homo sapiens; identical to SEQ ID NO: 816053

SEQ ID NO: 816072 - protein, 1319 aa, Homo sapiens
MFGLDQFEPQVNSRNAGQGERNFNETGLSMNTHFKAPAFHTGGPPGPVDPAMSALGQPPILGMNMEPYGFHARGHSELHAGGLQAQPVHGFFGGQQPHHGHPGSHHPHQHHPHFGGNFGGPDPGASCLHGGRLLGYGGAAGGLGSQPPFAEGYEHMAESQGPESFGPQRPGNLPDFHSSGASSHRVPAPCLPLDQSPNRAASFHGLPSSSGSDSHSLEPRRVTNQGAVDSLEYNYRARRPRDILTCFRPLTPKGSCLIMQRVARFLGGGFPGAPSAMPRAAGMVGLSKMHAQPPQQQPQQQQQPQQQQQHGVFFERFSGARKMPVGLEPSVGSRHPLMQPPQQAPPPPQQQPPQQPPQQQPPPPPGLLVRQNSLPACAPSAPAGRGGHAQRRPAGRRPHAAQPARAIRVSHPPAGEPEHAPLFRACFQHAASSSAAGAQPAAAAFRRAPLHERGQEARFDFPGSAGVDRCASWNGSMHNGALDNHLSPSAYPGLPGEFTPPVPDSFPSGPPLQHPAPDHQSLQQQQQQQQQQQQQQQQQQQQQQQQQQQQRQNAALMIKQMASRNQQQRLRQPNLAQLGHPGDVGQGGLVHGGPVGGLAQPNFEREGGSTGAGRLGTFEQQAPHLAQESAWFSGPHPPPGDLLPRRMGGSGLPADCGPHDPSLAPPPPPGGSGVLFRGPLQEPMRMPGEATCRAAFTGLQFGGSLGGLGQLQSPGAGVGLPSAASERRPPPPDFATSALGGQPGFPFGAAGRQSTPHSGPGVNSPPSAGGGGGSSGGGGGGGAYPPQPDFQPSQRTSASKLGALSLGSFNKPSSKDNLFGQSCLAALSTACQNMIASLGAPNLNVTFNKKNPPEGKRKLSQNETDGAAVAGNPGSDYFPGGTAPGGPRTRRPSGTSSSGSKASGPPNPPAQGDGTSLSPNYTLESTSGNDGKPVSGGGGRGRGRRKRDSGHVSPGTFFDKYSAAPDSGGAPGVSPGQQQASGAAVGGSSAGETRGAPTPHEKALTSPSWGKGAELLLGDQPDLIGSLDGGAKSDSSSPNVGEFASDEVSTSYANEDEVSSSSDNPQALVKASRSPLVTGSPKLPPRGVGAGEHGPKAPPPALGLGIMSNSTSTPDSYGGGGGPGHPGTPGLEQVRTPTSSSGAPPPDEIHPLEILQAQIQLQRQQFSISEDQPLGLKGGKKGECAVGASGAQNGDSELGSCCSEAVKSAMSTIDLDSLMAEHSAAWYMPADKALVDSADDDKTLAPWEKAKPQNPNSKEAHDLPANKASASQPGSHLQCLSVHCTDDVGDAKARASVPTWRSLHSDISNRFGTFVAALT

SEQ ID NO: 816073 - protein, 1319 aa, Homo sapiens; identical to SEQ ID NO: 816072

SEQ ID NO: 816074 - protein, 149 aa, Homo sapiens
MLALQNERTERIRSLLERQAREIEAFDSESMRLGFSNMVLSNLSPEAFSHSYPGASGWSHNPTGGPGPHWGHPMGGPPQAWGHPMQGGPQPWGHPSGPMQGVPRGSSMGVRNSPQALRRTASGGRTEQGMSRSTSVTSQISNGSHMSYT

SEQ ID NO: 816075 - protein, 149 aa, Homo sapiens; identical to SEQ ID NO: 816074

SEQ ID NO: 816076 - protein, 149 aa, Homo sapiens; identical to SEQ ID NO: 816074

SEQ ID NO: 816077 - protein, 3138 aa, Homo sapiens
SDSSGSREVDPVAATTMPGAAGVLLLLLLSGGLGGVQAQRPQQQRQSQAHQQRGLFPAVLNLASNALITTNATCGEKGPEMYCKLVEHVPGQPVRNPQCRICNQNSSNPNQRHPITNAIDGKNTWWQSPSIKNGIEYHYVTITLDLQQVFQIAYVIVKAANSPRPGNWILERSLDDVEYKPWQYHAVTDTECLTLYNIYPRTGPPSYAKDDEVICTSFYSKIHPLENGEIHISLINGRPSADDPSPELLEFTSARYIRLRFQRIRTLNADLMMFAHKDPREIDPIVTRRYYYSVKDISVGGMCICYGHARACPLDPATNKSRCECEHNTCGDSCDQCCPGFHQKPWRAGTFLTKTECEACNCHGKAEECYYDENVARRNLSLNIRGKYIGGGVCINCTQNTAGINCETCTDGFFRPKGVSPNYPRPCQPCHCDPIGSLNEVCVKDEKHARRGLAPGSCHCKTGFGGVSCDRCARGYTGYPDCKACNCSGLGSKNEDPCFGPCICKENVEGGDCSRCKSGFFNLQEDNWKGCDECFCSGVSNRCQSSYWTYGKIQDMSGWYLTDLPGRIRVAPQQDDLDSPQQISISNAEARQALPHSYYWSAPAPYLGNKLPAVGGQLTFTISYDLEEEEEDTERVLQLMIILEGNDLSISTAQDEVYLHPSEEHTNVLLLKEESFTIHGTHFPVRRKEFMTVLANLKRVLLQITYSFGMDAIFRLSSVNLESAVSYPTDGSIAAAVEVCQCPPGYTGSSCESCWPRHRRVNGTIFGGICEPCQCFGHAESCDDVTGECLNCKDHTGGPYCDKCLPGFYGEPTKGTSEDCQPCACPLNIPSNNFSPTCHLDRSLGLICDGCPVGYTGPRCERCAEGYFGQPSVPGGSCQPCQCNDNLDFSIPGSCDSLSGSCLICKPGTTGRYCELCADGYFGDAVDAKNCQPCRCNAGGSFSEVCHSQTGQCECRANVQGQRCDKCKAGTFGLQSARGCVPCNCNSFGSKSFDCEESGQCWCQPGVTGKKCDRCAHGYFNFQEGGCTACECSHLGNNCDPKTGRCICPPNTIGEKCSKCAPNTWGHSITTGCKACNCSTVGSLDFQCNVNTGQCNCHPKFSGAKCTECSRGHWNYPRCNLCDCFLPGTDATTCDSETKKCSCSDQTGQCTCKVNVEGIHCDRCRPGKFGLDAKNPLGCSSCYCFGTTTQCSEAKGLIRTWVTLKAEQTILPLVDEALQHTTTKGIVFQHPEIVAHMDLMREDLHLEPFYWKLPEQFEGKKLMAYGGKLKYAIYFEAREETGFSTYNPQVIIRGGTPTHARIIVRHMAAPLIGQLTRHEIEMTEKEWKYYGDDPRVHRTVTREDFLDILYDIHYILIKATYGNFMRQSRISEISMEVAEQGRGTTMTPPADLIEKCDCPLGYSGLSCEACLPGFYRLRSQPGGRTPGPTLGTCVPCQCNGHSSLCDPETSICQNCQHHTAGDFCERCALGYYGIVKGLPNDCQQCACPLISSSNNFSPSCVAEGLDDYRCTACPRGYEGQYCERCAPGYTGSPGNPGGSCQECECDPYGSLPVPCDPVTGFCTCRPGATGRKCDGCKHWHAREGWECVFCGDECTGLLLGDLARLEQMVMSINLTGPLPAPYKMLYGLENMTQELKHLLSPQRAPERLIQLAEGNLNTLVTEMNELLTRATKVTADGEQTGQDAERTNTRAKSLGEFIKELARDAEAVNEKAIKLNETLGTRDEAFERNLEGLQKEIDQMIKELRRKNLETQKEIAEDELVAAEALLKKVKKLFGESRGENEEMEKDLREKLADYKNKVDDAWDLLREATDKIREANRLFAVNQKNMTALEKKKEAVESGKRQIENTLKEGNDILDEANRLADEINSIIDYVEDIQTKLPPMSEELNDKIDDLSQEIKDRKLAEKVSQAESHAAQLNDSSAVLDGILDEAKNISFNATAAFKAYSNIKDYIDEAEKVAKEAKDLAHEATKLATGPRGLLKEDAKGCLQKSFRILNEAKKLANDVKENEDHLNGLKTRIENADARNGDLLRTLNDTLGKLSAIPNDTAAKLQAVKDKARQANDTAKDVLAQITELHQNLDGLKKNYNKLADSVAKTNAVVKDPSKNKIIADADATVKNLEQEADRLIDKLKPIKELEDNLKKNISEIKELINQARKQANSIKVSVSSGGDCIRTYKPEIKKGSYNNIVVNVKTAVADNLLFYLGSAKFIDFLAIEMRKGKVSFLWDVGSGVGRVEYPDLTIDDSYWYRIVASRTGRNGTISVRALDGPKASIVPSTHHSTSPPGYTILDVDANAMLFVGGLTGKLKKADAVRVITFTGCMGETYFDNKPIGLWNFREKEGDCKGCTVSPQVEDSEGTIQFDGEGYALVSRPIRWYPNISTVMFKFRTFSSSALLMYLATRDLRDFMSVELTDGHIKVSYDLGSGMASVVSNQNHNDGKWKSFTLSRIQKQANISIVDIDTNQEENIATSSSGNNFGLDLKADDKIYFGGLPTLRNLSMKARPEVNLKKYSGCLKDIEISRTPYNILSSPDYVGVTKGCSLENVYTVSFPKPGFVELSPVPIDVGTEINLSFSTKNESGIILLGSGGTPAPPRRKRRQTGQAYYVILLNRGRLEVHLSTGARTMRKIVIRPEPNLFHDGREHSVHVERTRGIFTVQVDENRRYMQNLTVEQPIEVKKLFVGGAPPEFQPSPLRNIPPFEGCIWNLVINSVPMDFARPVSFKNADIGRCAHQKLREDEDGAAPAEIVIQPEPVPTPAFPTPTPVLTHGPCAAESEPALLIGSKQFGLSRNSHIAIAFDDTKVKNRLTIELEVRTEAESGLLFYMARINHADFATVQLRNGLPYFSYDLGSGDTHTMIPTKINDGQWHKIKIMRSKQEGILYVDGASNRTISPKKADILDVVGMLYVGGLPINYTTRRIGPVTYSIDGCVRNLHMAEAPADLEQPTSSFHVGTCFANAQRGTYFDGTGFAKAVGGFKVGLDLLVEFEFRTTTTTGVLLGISSQKMDGMGIEMIDEKLMFHVDNGAGRFTAVYDAGVPGHLCDGQWHKVTANKIKHRIELTVDGNQVEAQSPNPASTSADTNDPVFVGGFPDDLKQFGLTTSIPFRGCIRSLKLTKGTGKPLEVNFAKALELRGVQPVSCPAN

SEQ ID NO: 816078 - protein, 3123 aa, Homo sapiens
MNPVPQMEKQKSPVFCVAHAGSCRPELFLFGHLGSSPKGLFPAVLNLASNALITTNATCGEKGPEMYCKLVEHVPGQPVRNPQCRICNQNSSNPNQRHPITNAIDGKNTWWQSPSIKNGIEYHYVTITLDLQQVFQIAYVIVKAANSPRPGNWILERSLDDVEYKPWQYHAVTDTECLTLYNIYPRTGPPSYAKDDEVICTSFYSKIHPLENGEIHISLINGRPSADDPSPELLEFTSARYIRLRFQRIRTLNADLMMFAHKDPREIDPIVTRRYYYSVKDISVGGMCICYGHARACPLDPATNKSRCECEHNTCGDSCDQCCPGFHQKPWRAGTFLTKTECEACNCHGKAEECYYDENVARRNLSLNIRGKYIGGGVCINCTQNTAGINCETCTDGFFRPKGVSPNYPRPCQPCHCDPIGSLNEVCVKDEKHARRGLAPGSCHCKTGFGGVSCDRCARGYTGYPDCKACNCSGLGSKNEDPCFGPCICKENVEGGDCSRCKSGFFNLQEDNWKGCDECFCSGVSNRCQSSYWTYGKIQDMSGWYLTDLPGRIRVAPQQDDLDSPQQISISNAEARQALPHSYYWSAPAPYLGNKLPAVGGQLTFTISYDLEEEEEDTERVLQLMIILEGNDLSISTAQDEVYLHPSEEHTNVLLLKEESFTIHGTHFPVRRKEFMTVLANLKRVLLQITYSFGMDAIFRLSSVNLESAVSYPTDGSIAAAVEVCQCPPGYTGSSCESCWPRHRRVNGTIFGGICEPCQCFGHAESCDDVTGECLNCKDHTGGPYCDKCLPGFYGEPTKGTSEDCQPCACPLNIPSNNFSPTCHLDRSLGLICDGCPVGYTGPRCERCAEGYFGQPSVPGGSCQPCQCNDNLDFSIPGSCDSLSGSCLICKPGTTGRYCELCADGYFGDAVDAKNCQPCRCNAGGSFSEVCHSQTGQCECRANVQGQRCDKCKAGTFGLQSARGCVPCNCNSFGSKSFDCEESGQCWCQPGVTGKKCDRCAHGYFNFQEGGCTACECSHLGNNCDPKTGRCICPPNTIGEKCSKCAPNTWGHSITTGCKACNCSTVGSLDFQCNVNTGQCNCHPKFSGAKCTECSRGHWNYPRCNLCDCFLPGTDATTCDSETKKCSCSDQTGQCTCKVNVEGIHCDRCRPGKFGLDAKNPLGCSSCYCFGTTTQCSEAKGLIRTWVTLKAEQTILPLVDEALQHTTTKGIVFQHPEIVAHMDLMREDLHLEPFYWKLPEQFEGKKLMAYGGKLKYAIYFEAREETGFSTYNPQVIIRGGTPTHARIIVRHMAAPLIGQLTRHEIEMTEKEWKYYGDDPRVHRTVTREDFLDILYDIHYILIKATYGNFMRQSRISEISMEVAEQGRGTTMTPPADLIEKCDCPLGYSGLSCEACLPGFYRLRSQPGGRTPGPTLGTCVPCQCNGHSSLCDPETSICQNCQHHTAGDFCERCALGYYGIVKGLPNDCQQCACPLISSSNNFSPSCVAEGLDDYRCTACPRGYEGQYCERCAPGYTGSPGNPGGSCQECECDPYGSLPVPCDPVTGFCTCRPGATGRKCDGCKHWHAREGWECVFCGDECTGLLLGDLARLEQMVMSINLTGPLPAPYKMLYGLENMTQELKHLLSPQRAPERLIQLAEGNLNTLVTEMNELLTRATKVTADGEQTGQDAERTNTRAKSLGEFIKELARDAEAVNEKAIKLNETLGTRDEAFERNLEGLQKEIDQMIKELRRKNLETQKEIAEDELVAAEALLKKVKKLFGESRGENEEMEKDLREKLADYKNKVDDAWDLLREATDKIREANRLFAVNQKNMTALEKKKEAVESGKRQIENTLKEGNDILDEANRLADEINSIIDYVEDIQTKLPPMSEELNDKIDDLSQEIKDRKLAEKVSQAESHAAQLNDSSAVLDGILDEAKNISFNATAAFKAYSNIKDYIDEAEKVAKEAKDLAHEATKLATGPRGLLKEDAKGCLQKSFRILNEAKKLANDVKENEDHLNGLKTRIENADARNGDLLRTLNDTLGKLSAIPNDTAAKLQAVKDKARQANDTAKDVLAQITELHQNLDGLKKNYNKLADSVAKTNAVVKDPSKNKIIADADATVKNLEQEADRLIDKLKPIKELEDNLKKNISEIKELINQARKQANSIKVSVSSGGDCIRTYKPEIKKGSYNNIVVNVKTAVADNLLFYLGSAKFIDFLAIEMRKGKVSFLWDVGSGVGRVEYPDLTIDDSYWYRIVASRTGRNGTISVRALDGPKASIVPSTHHSTSPPGYTILDVDANAMLFVGGLTGKLKKADAVRVITFTGCMGETYFDNKPIGLWNFREKEGDCKGCTVSPQVEDSEGTIQFDGEGYALVSRPIRWYPNISTVMFKFRTFSSSALLMYLATRDLRDFMSVELTDGHIKVSYDLGSGMASVVSNQNHNDGKWKSFTLSRIQKQANISIVDIDTNQEENIATSSSGNNFGLDLKADDKIYFGGLPTLRNLSMKARPEVNLKKYSGCLKDIEISRTPYNILSSPDYVGVTKGCSLENVYTVSFPKPGFVELSPVPIDVGTEINLSFSTKNESGIILLGSGGTPAPPRRKRRQTGQAYYVILLNRGRLEVHLSTGARTMRKIVIRPEPNLFHDGREHSVHVERTRGIFTVQVDENRRYMQNLTVEQPIEVKKLFVGGAPPEFQPSPLRNIPPFEGCIWNLVINSVPMDFARPVSFKNADIGRCAHQKLREDEDGAAPAEIVIQPEPVPTPAFPTPTPVLTHGPCAAESEPALLIGSKQFGLSRNSHIAIAFDDTKVKNRLTIELEVRTEAESGLLFYMARINHADFATVQLRNGLPYFSYDLGSGDTHTMIPTKINDGQWHKIKIMRSKQEGILYVDGASNRTISPKKADILDVVGMLYVGGLPINYTTRRIGPVTYSIDGCVRNLHMAEAPADLEQPTSSFHVGTCFANAQRGTYFDGTGFAKAVGGFKVGLDLLVEFEFRTTTTTGVLLGISSQKMDGMGIEMIDEKLMFHVDNGAGRFTAVYDAGVPGHLCDGQWHKVTANKIKHRIELTVDGNQVEAQSPNPASTSADTNDPVFVGGFPDDLKQFGLTTSIPFRGCIRSLKLTKGTGKPLEVNFAKALELRGVQPVSCPAN

SEQ ID NO: 816079 - protein, 666 aa, Homo sapiens
SSRSGVIDATKIYFGGLPTLRNLSMKARPEVNLKKYSGCLKDIEISRTPYNILSSPDYVGVTKGCSLENVYTVSFPKPGFVELSPVPIDVGTEINLSFSTKNESGIILLGSGGTPAPPRRKRRQTGQAYYVILLNRGRLEVHLSTGARTMRKIVIRPEPNLFHDGREHSVHVERTRGIFTVQVDENRRYMQNLTVEQPIEVKKLFVGGAPPEFQPSPLRNIPPFEGCIWNLVINSVPMDFARPVSFKNADIGRCAHQKLREDEDGAAPAEIVIQPEPVPTPAFPTPTPVLTHGPCAAESEPALLIGSKQFGLSRNSHIAIAFDDTKVKNRLTIELEVRTEAESGLLFYMARINHADFATVQLRNGLPYFSYDLGSGDTHTMIPTKINDGQWHKIKIMRSKQEGILYVDGASNRTISPKKADILDVVGMLYVGGLPINYTTRRIGPVTYSIDGCVRNLHMAEAPADLEQPTSSFHVGTCFANAQRGTYFDGTGFAKAVGGFKVGLDLLVEFEFRTTTTTGVLLGISSQKMDGMGIEMIDEKLMFHVDNGAGRFTAVYDAGVPGHLCDGQWHKVTANKIKHRIELTVDGNQVEAQSPNPASTSADTNDPVFVGGFPDDLKQFGLTTSIPFRGCIRSLKLTKGTGKPLEVNFAKALELRGVQPVSCPAN

SEQ ID NO: 816080 - protein, 628 aa, Homo sapiens
MRFKDWNRTFRIFIVHSYRLQFGIGHETPTNVYTVSFPKPGFVELSPVPIDVGTEINLSFSTKNESGIILLGSGGTPAPPRRKRRQTGQAYYVILLNRGRLEVHLSTGARTMRKIVIRPEPNLFHDGREHSVHVERTRGIFTVQVDENRRYMQNLTVEQPIEVKKLFVGGAPPEFQPSPLRNIPPFEGCIWNLVINSVPMDFARPVSFKNADIGRCAHQKLREDEDGAAPAEIVIQPEPVPTPAFPTPTPVLTHGPCAAESEPALLIGSKQFGLSRNSHIAIAFDDTKVKNRLTIELEVRTEAESGLLFYMARINHADFATVQLRNGLPYFSYDLGSGDTHTMIPTKINDGQWHKIKIMRSKQEGILYVDGASNRTISPKKADILDVVGMLYVGGLPINYTTRRIGPVTYSIDGCVRNLHMAEAPADLEQPTSSFHVGTCFANAQRGTYFDGTGFAKAVGGFKVGLDLLVEFEFRTTTTTGVLLGISSQKMDGMGIEMIDEKLMFHVDNGAGRFTAVYDAGVPGHLCDGQWHKVTANKIKHRIELTVDGNQVEAQSPNPASTSADTNDPVFVGGFPDDLKQFGLTTSIPFRGCIRSLKLTKGTGKPLEVNFAKALELRGVQPVSCPAN

SEQ ID NO: 816081 - protein, 477 aa, Homo sapiens
MQNLTVEQPIEVKKLFVGGAPPEFQPSPLRNIPPFEGCIWNLVINSVPMDFARPVSFKNADIGRCAHQKLREDEDGAAPAEIVIQPEPVPTPAFPTPTPVLTHGPCAAESEPALLIGSKQFGLSRNSHIAIAFDDTKVKNRLTIELEVRTEAESGLLFYMARINHADFATVQLRNGLPYFSYDLGSGDTHTMIPTKINDGQWHKIKIMRSKQEGILYVDGASNRTISPKKADILDVVGMLYVGGLPINYTTRRIGPVTYSIDGCVRNLHMAEAPADLEQPTSSFHVGTCFANAQRGTYFDGTGFAKAVGGFKVGLDLLVEFEFRTTTTTGVLLGISSQKMDGMGIEMIDEKLMFHVDNGAGRFTAVYDAGVPGHLCDGQWHKVTANKIKHRIELTVDGNQVEAQSPNPASTSADTNDPVFVGGFPDDLKQFGLTTSIPFRGCIRSLKLTKGTGKPLEVNFAKALELRGVQPVSCPAN

SEQ ID NO: 816082 - protein, 3123 aa, Homo sapiens; identical to SEQ ID NO: 816078

SEQ ID NO: 816083 - protein, 3030 aa, Homo sapiens
MNPVPQMEKQKSPVFCVAHAGSCRPELFLFGHLGSSPKGLFPAVLNLASNALITTNATCGEKGPEMYCKLVEHVPGQPVRNPQCRICNQNSSNPNQRHPITNAIDGKNTWWQSPSIKNGIEYHYVTITLDLQQVFQIAYVIVKAANSPRPGNWILERSLDDVEYKPWQYHAVTDTECLTLYNIYPRTGPPSYAKDDEVICTSFYSKIHPLENGEIHISLINGRPSADDPSPELLEFTSARYIRLRFQRIRTLNADLMMFAHKDPREIDPIVTRRYYYSVKDISVGGMCICYGHARACPLDPATNKSRCECEHNTCGDSCDQCCPGFHQKPWRAGTFLTKTECEACNCHGKAEECYYDENVARRNLSLNIRGKYIGGGVCINCTQNTAGINCETCTDGFFRPKGVSPNYPRPCQPCHCDPIGSLNEVCVKDEKHARRGLAPGSCHCKTGFGGVSCDRCARGYTGYPDCKACNCSGLGSKNEDPCFGPCICKENVEGGDCSRCKSGFFNLQEDNWKGCDECFCSGVSNRCQSSYWTYGKIQDMSGWYLTDLPGRIRVAPQQDDLDSPQQISISNAEARQALPHSYYWSAPAPYLGNKLPAVGGQLTFTISYDLEEEEEDTERVLQLMIILEGNDLSISTAQDEVYLHPSEEHTNVLLLKEESFTIHGTHFPVRRKEFMTVLANLKRVLLQITYSFGMDAIFRLSSVNLESAVSYPTDGSIAAAVEVCQCPPGYTGSSCESCWPRHRRVNGTIFGGICEPCQCFGHAESCDDVTGECLNCKDHTGGPYCDKCLPGFYGEPTKGTSEDCQPCACPLNIPSNNFSPTCHLDRSLGLICDGCPVGYTGPRCERCAEGYFGQPSVPGGSCQPCQCNDNLDFSIPGSCDSLSGSCLICKPGTTGRYCELCADGYFGDAVDAKNCQPCRCNAGGSFSEVCHSQTGQCECRANVQGQRCDKCKAGTFGLQSARGCVPCNCNSFGSKSFDCEESGQCWCQPGVTGKKCDRCAHGYFNFQEGGCTACECSHLGNNCDPKTGRCICPPNTIGEKCSKCAPNTWGHSITTGCKACNCSTVGSLDFQCNVNTGQCNCHPKFSGAKCTECSRGHWNYPRCNLCDCFLPGTDATTCDSETKKCSCSDQTGQCTCKVNVEGIHCDRCRPGKFGLDAKNPLGCSSCYCFGTTTQCSEAKGLIRTWVTLKAEQTILPLVDEALQHTTTKGIVFQHPEIVAHMDLMREDLHLEPFYWKLPEQFEGKKLMAYGGKLKYAIYFEAREETGFSTYNPQVIIRGGTPTHARIIVRHMAAPLIGQLTRHEIEMTEKEWKYYGDDPRVHRTVTREDFLDILYDIHYILIKATYGNFMRQSRISEISMEVAEQGRGTTMTPPADLIEKCDCPLGYSGLSCEACLPGFYRLRSQPGGRTPGPTLGTCVPCQCNGHSSLCDPETSICQNCQHHTAGDFCERCALGYYGIVKGLPNDCQQCACPLISSSNNFSPSCVAEGLDDYRCTACPRGYEGQYCERCAPGYTGSPGNPGGSCQECECDPYGSLPVPCDPVTGFCTCRPGATGRKCDGCKHWHAREGWECVFCGDECTGLLLGDLARLEQMVMSINLTGPLPAPYKMLYGLENMTQELKHLLSPQRAPERLIQLAEGNLNTLVTEMNELLTRATKVTADGEQTGQDAERTNTRAKSLGEFIKELARDAEAVNEKAIKLNETLGTRDEAFERNLEGLQKEIDQMIKELRRKNLETQKEIAEDELVAAEALLKKVKKLFGESRGENEEMEKDLREKLADYKNKVDDAWDLLREATDKIREANRLFAVNQKNMTALEKKKEAVESGKRQIENTLKEGNDILDEANRLADEINSIIDYVEDIQTKLPPMSEELNDKIDDLSQEIKDRKLAEKVSQAESHAAQLNDSSAVLDGILDEAKNISFNATAAFKAYSNIKDYIDEAEKVAKEAKDLAHEATKLATGPRGLLKEDAKGCLQKSFRILNEAKKLANDVKENEDHLNGLKTRIENADARNGDLLRTLNDTLGKLSAIPNDTAAKLQAVKDKARQANDTAKDVLAQITELHQNLDGLKKNYNKLADSVAKTNAVVKDPSKNKIIADADATVKNLEQEADRLIDKLKPIKELEDNLKKNISEIKELINQARKQANSIKVSVSSGGDCIRTYKPEIKKGSYNNIVVNVKTAVADNLLFYLGSAKFIDFLAIEMRKGKVSFLWDVGSGVGRVEYPDLTIDDSYWYRIVASRTGRNGTISVRALDGPKASIVPSTHHSTSPPGYTILDVDANAMLFVGGLTGKLKKADAVRVITFTGCMGETYFDNKPIGLWNFREKEGDCKGCTVSPQVEDSEGTIQFDGEGYALVSRPIRWYPNISTVMFKFRTFSSSALLMYLATRDLRDFMSVELTDGHIKVSYDLGSGMASVVSNQNHNDGKWKSFTLSRIQKQANISIVDIDTNQEENIATSSSGNNFGLDLKADDKIYFGGLPTLRNLSMKARPEVNLKKYSGCLKDIEISRTPYNILSSPDYVGVTKGCSLENVYTVSFPKPGFVELSPVPIDVGTEINLSFSTKNESGIILLGSGGTPAPPRRKRRQTGQAYYVILLNRGRLEVHLSTGARTMRKIVIRPEPNLFHDGREHSVHVERTRGIFTVQVDENRRYMQNLTVEQPIEVKKLFVGGAPPEFQPSPLRNIPPFEGCIWNLVINSVPMDFARPVSFKNADIGRCAHQKLREDEDGAAPAEIVIQPEPVPTPAFPTPTPVLTHGPCAAESEPALLIGSKQFGLSRNSHIAIAFDDTKVKNRLTIELEVRTEAESGLLFYMARINHADFATVQLRNGLPYFSYDLGSGDTHTMIPTKINDGQWHKIKIMRSKQEGILYVDGASNRTISPKKADILDVVGMLYVGGLPINYTTRRIGPVTYSIDGCVRNLHMAEAPADLEQPTSSFHVGTCFANAQRGTYFDGTGFAKAVGGFKVGLDLLVEFEFRTTTTTGVLLGLGFQGICVMDNGIKSLPTRSNTKGTGKPLEVNFAKALELRGVQPVSCPAN

SEQ ID NO: 816084 - protein, 3019 aa, Homo sapiens
MNPVPQMEKQKSPVFCVAHAGSCRPELFLFGHLGSSPKGLFPAVLNLASNALITTNATCGEKGPEMYCKLVEHVPGQPVRNPQCRICNQNSSNPNQRHPITNAIDGKNTWWQSPSIKNGIEYHYVTITLDLQQVFQIAYVIVKAANSPRPGNWILERSLDDVEYKPWQYHAVTDTECLTLYNIYPRTGPPSYAKDDEVICTSFYSKIHPLENGEIHISLINGRPSADDPSPELLEFTSARYIRLRFQRIRTLNADLMMFAHKDPREIDPIVTRRYYYSVKDISVGGMCICYGHARACPLDPATNKSRCECEHNTCGDSCDQCCPGFHQKPWRAGTFLTKTECEACNCHGKAEECYYDENVARRNLSLNIRGKYIGGGVCINCTQNTAGINCETCTDGFFRPKGVSPNYPRPCQPCHCDPIGSLNEVCVKDEKHARRGLAPGSCHCKTGFGGVSCDRCARGYTGYPDCKACNCSGLGSKNEDPCFGPCICKENVEGGDCSRCKSGFFNLQEDNWKGCDECFCSGVSNRCQSSYWTYGKIQDMSGWYLTDLPGRIRVAPQQDDLDSPQQISISNAEARQALPHSYYWSAPAPYLGNKLPAVGGQLTFTISYDLEEEEEDTERVLQLMIILEGNDLSISTAQDEVYLHPSEEHTNVLLLKEESFTIHGTHFPVRRKEFMTVLANLKRVLLQITYSFGMDAIFRLSSVNLESAVSYPTDGSIAAAVEVCQCPPGYTGSSCESCWPRHRRVNGTIFGGICEPCQCFGHAESCDDVTGECLNCKDHTGGPYCDKCLPGFYGEPTKGTSEDCQPCACPLNIPSNNFSPTCHLDRSLGLICDGCPVGYTGPRCERCAEGYFGQPSVPGGSCQPCQCNDNLDFSIPGSCDSLSGSCLICKPGTTGRYCELCADGYFGDAVDAKNCQPCRCNAGGSFSEVCHSQTGQCECRANVQGQRCDKCKAGTFGLQSARGCVPCNCNSFGSKSFDCEESGQCWCQPGVTGKKCDRCAHGYFNFQEGGCTACECSHLGNNCDPKTGRCICPPNTIGEKCSKCAPNTWGHSITTGCKACNCSTVGSLDFQCNVNTGQCNCHPKFSGAKCTECSRGHWNYPRCNLCDCFLPGTDATTCDSETKKCSCSDQTGQCTCKVNVEGIHCDRCRPGKFGLDAKNPLGCSSCYCFGTTTQCSEAKGLIRTWVTLKAEQTILPLVDEALQHTTTKGIVFQHPEIVAHMDLMREDLHLEPFYWKLPEQFEGKKLMAYGGKLKYAIYFEAREETGFSTYNPQVIIRGGTPTHARIIVRHMAAPLIGQLTRHEIEMTEKEWKYYGDDPRVHRTVTREDFLDILYDIHYILIKATYGNFMRQSRISEISMEVAEQGRGTTMTPPADLIEKCDCPLGYSGLSCEACLPGFYRLRSQPGGRTPGPTLGTCVPCQCNGHSSLCDPETSICQNCQHHTAGDFCERCALGYYGIVKGLPNDCQQCACPLISSSNNFSPSCVAEGLDDYRCTACPRGYEGQYCERCAPGYTGSPGNPGGSCQECECDPYGSLPVPCDPVTGFCTCRPGATGRKCDGCKHWHAREGWECVFCGDECTGLLLGDLARLEQMVMSINLTGPLPAPYKMLYGLENMTQELKHLLSPQRAPERLIQLAEGNLNTLVTEMNELLTRATKVTADGEQTGQDAERTNTRAKSLGEFIKELARDAEAVNEKAIKLNETLGTRDEAFERNLEGLQKEIDQMIKELRRKNLETQKEIAEDELVAAEALLKKVKKLFGESRGENEEMEKDLREKLADYKNKVDDAWDLLREATDKIREANRLFAVNQKNMTALEKKKEAVESGKRQIENTLKEGNDILDEANRLADEINSIIDYVEDIQTKLPPMSEELNDKIDDLSQEIKDRKLAEKVSQAESHAAQLNDSSAVLDGILDEAKNISFNATAAFKAYSNIKDYIDEAEKVAKEAKDLAHEATKLATGPRGLLKEDAKGCLQKSFRILNEAKKLANDVKENEDHLNGLKTRIENADARNGDLLRTLNDTLGKLSAIPNDTAAKLQAVKDKARQANDTAKDVLAQITELHQNLDGLKKNYNKLADSVAKTNAVVKDPSKNKIIADADATVKNLEQEADRLIDKLKPIKELEDNLKKNISEIKELINQARKQANSIKVSVSSGGDCIRTYKPEIKKGSYNNIVVNVKTAVADNLLFYLGSAKFIDFLAIEMRKGKVSFLWDVGSGVGRVEYPDLTIDDSYWYRIVASRTGRNGTISVRALDGPKASIVPSTHHSTSPPGYTILDVDANAMLFVGGLTGKLKKADAVRVITFTGCMGETYFDNKPIGLWNFREKEGDCKGCTVSPQVEDSEGTIQFDGEGYALVSRPIRWYPNISTVMFKFRTFSSSALLMYLATRDLRDFMSVELTDGHIKVSYDLGSGMASVVSNQNHNDGKWKSFTLSRIQKQANISIVDIDTNQEENIATSSSGNNFGLDLKADDKIYFGGLPTLRNLSMKARPEVNLKKYSGCLKDIEISRTPYNILSSPDYVGVTKGCSLENVYTVSFPKPGFVELSPVPIDVGTEINLSFSTKNESGIILLGSGGTPAPPRRKRRQTGQAYYVILLNRGRLEVHLSTGARTMRKIVIRPEPNLFHDGREHSVHVERTRGIFTVQVDENRRYMQNLTVEQPIEVKKLFVGGAPPEFQPSPLRNIPPFEGCIWNLVINSVPMDFARPVSFKNADIGRCAHQKLREDEDGAAPAEIVIQPEPVPTPAFPTPTPVLTHGPCAAESEPALLIGSKQFGLSRNSHIAIAFDDTKVKNRLTIELEVRTEAESGLLFYMARINHADFATVQLRNGLPYFSYDLGSGDTHTMIPTKINDGQWHKIKIMRSKQEGILYVDGASNRTISPKKADILDVVGMLYVGGLPINYTTRRIGPVTYSIDGCVRNLHMAEAPADLEQPTSSFHVGTCFANAQRGTYFDGTGFAKAVGGFKVGLDLLVEFEFRTTTTTGVLLGPTNKNKCNPRKSLSKQVYQVKQTNIFYLYMLIKLICACT

SEQ ID NO: 816085 - protein, 2495 aa, Homo sapiens
MNPVPQMEKQKSPVFCVAHAGSCRPELFLFGHLGSSPKGLFPAVLNLASNALITTNATCGEKGPEMYCKLVEHVPGQPVRNPQCRICNQNSSNPNQRHPITNAIDGKNTWWQSPSIKNGIEYHYVTITLDLQQVFQIAYVIVKAANSPRPGNWILERSLDDVEYKPWQYHAVTDTECLTLYNIYPRTGPPSYAKDDEVICTSFYSKIHPLENGEIHISLINGRPSADDPSPELLEFTSARYIRLRFQRIRTLNADLMMFAHKDPREIDPIVTRRYYYSVKDISVGGMCICYGHARACPLDPATNKSRCECEHNTCGDSCDQCCPGFHQKPWRAGTFLTKTECEACNCHGKAEECYYDENVARRNLSLNIRGKYIGGGVCINCTQNTAGINCETCTDGFFRPKGVSPNYPRPCQPCHCDPIGSLNEVCVKDEKHARRGLAPGSCHCKTGFGGVSCDRCARGYTGYPDCKACNCSGLGSKNEDPCFGPCICKENVEGGDCSRCKSGFFNLQEDNWKGCDECFCSGVSNRCQSSYWTYGKIQDMSGWYLTDLPGRIRVAPQQDDLDSPQQISISNAEARQALPHSYYWSAPAPYLGNKLPAVGGQLTFTISYDLEEEEEDTERVLQLMIILEGNDLSISTAQDEVYLHPSEEHTNVLLLKEESFTIHGTHFPVRRKEFMTVLANLKRVLLQITYSFGMDAIFRLSSVNLESAVSYPTDGSIAAAVEVCQCPPGYTGSSCESCWPRHRRVNGTIFGGICEPCQCFGHAESCDDVTGECLNCKDHTGGPYCDKCLPGFYGEPTKGTSEDCQPCACPLNIPSNNFSPTCHLDRSLGLICDGCPVGYTGPRCERCAEGYFGQPSVPGGSCQPCQCNDNLDFSIPGSCDSLSGSCLICKPGTTGRYCELCADGYFGDAVDAKNCQPCRCNAGGSFSEVCHSQTGQCECRANVQGQRCDKCKAGTFGLQSARGCVPCNCNSFGSKSFDCEESGQCWCQPGVTGKKCDRCAHGYFNFQEGGCTACECSHLGNNCDPKTGRCICPPNTIGEKCSKCAPNTWGHSITTGCKACNCSTVGSLDFQCNVNTGQCNCHPKFSGAKCTECSRGHWNYPRCNLCDCFLPGTDATTCDSETKKCSCSDQTGQCTCKVNVEGIHCDRCRPGKFGLDAKNPLGCSSCYCFGTTTQCSEAKGLIRTWVTLKAEQTILPLVDEALQHTTTKGIVFQHPEIVAHMDLMREDLHLEPFYWKLPEQFEGKKLMAYGGKLKYAIYFEAREETGFSTYNPQVIIRGGTPTHARIIVRHMAAPLIGQLTRHEIEMTEKEWKYYGDDPRVHRTVTREDFLDILYDIHYILIKATYGNFMRQSRISEISMEVAEQGRGTTMTPPADLIEKCDCPLGYSGLSCEACLPGFYRLRSQPGGRTPGPTLGTCVPCQCNGHSSLCDPETSICQNCQHHTAGDFCERCALGYYGIVKGLPNDCQQCACPLISSSNNFSPSCVAEGLDDYRCTACPRGYEGQYCERCAPGYTGSPGNPGGSCQECECDPYGSLPVPCDPVTGFCTCRPGATGRKCDGCKHWHAREGWECVFCGDECTGLLLGDLARLEQMVMSINLTGPLPAPYKMLYGLENMTQELKHLLSPQRAPERLIQLAEGNLNTLVTEMNELLTRATKVTADGEQTGQDAERTNTRAKSLGEFIKELARDAEAVNEKAIKLNETLGTRDEAFERNLEGLQKEIDQMIKELRRKNLETQKEIAEDELVAAEALLKKVKKLFGESRGENEEMEKDLREKLADYKNKVDDAWDLLREATDKIREANRLFAVNQKNMTALEKKKEAVESGKRQIENTLKEGNDILDEANRLADEINSIIDYVEDIQTKLPPMSEELNDKIDDLSQEIKDRKLAEKVSQAESHAAQLNDSSAVLDGILDEAKNISFNATAAFKAYSNIKDYIDEAEKVAKEAKDLAHEATKLATGPRGLLKEDAKGCLQKSFRILNEAKKLANDVKENEDHLNGLKTRIENADARNGDLLRTLNDTLGKLSAIPNDTAAKLQAVKDKARQANDTAKDVLAQITELHQNLDGLKKNYNKLADSVAKTNAVVKDPSKNKIIADADATVKNLEQEADRLIDKLKPIKELEDNLKKNISEIKELINQARKQANSIKVSVSSGGDCIRTYKPEIKKGSYNNIVVNVKTAVADNLLFYLGSAKFIDFLAIEMRKGKVSFLWDVGSGVGRVEYPDLTIDDSYWYRIVASRTGRNGTISVRALDGPKASIVPSTHHSTSPPGYTILDVDANAMLFVGGLTGKLKKADAVRVITFTGCMGETYFDNKPIGLWNFREKEGDCKGCTVSPQVEDSEGTIQFDGEGYALVSRPIRWYPNISTVMFKFRTFSSSALLMYLATRDLRDFMSVELTDGHIKVSYDLGSGMASVVSNQNHNDGKWKSFTLSRIQKQATGMDLEVIILSDITQKQKIQYHMFSLTRREAKQWIHEDVKMETIDTGDSKRGEGGEGVKI

SEQ ID NO: 816086 - protein, 71 aa, Homo sapiens
LRSPQRLTDEISCLRCAEGYFGQPSVPGGSCQPCQCNDNLDFSIPGSCDSLSGSCLICKPGTTGRYCELCA

SEQ ID NO: 816087 - protein, 159 aa, Homo sapiens
MLQARKQHMSTELTIESEAPSDSSGINLSGFGSEQLDTNDESDVSSALSYILPYLSLRNLGAESILLPFTEQLFSNVQDGDRLLSILKNNRKSPSQSSLLGNKFKNKIFEKKIRNCATTGKPPGKDSKCRQKPAESEQSPHGPKEHPGKALQKGGKAQH

SEQ ID NO: 816088 - protein, 179 aa, Homo sapiens
MIYQTTEEASVGNPEGAFMKMLQARKQHMSTELTIESEAPSDSSGINLSGFGSEQLDTNDESDVSSALSYILPYLSLRNLGAESILLPFTEQLFSNVQDGDRLLSILKNNRKSPSQSSLLGNKFKNKIFEKKIRNCATTGKPPGKDSKCRQKPAESEQSPHGPKEHPGKALQKGGKAQH

SEQ ID NO: 816089 - protein, 309 aa, Homo sapiens
MIYQTTEEASVGNPEGAFMKMLQARKQHMSTELTIESEAPSDSSGINLSGFGSEQLDTNDESDVSSALSYILPYLSLRNLGAESILLPFTEQLFSNVQDGDRLLSILKNNRKSPSQSSLLGDQLEIQLTEQLRSLIPNEDVRKFMSHVIWTLKMECSETHVQGSCAKLMSRTGLLMKLLSEQQEAKALNVEWDTDQQKTNYINENMEQNEQKEQKSSELMKEVPGYDYKNKLIFAISVTVILIILIIIFCFIEVKTIINSGFQNTILCLCGFRIHKLKTNVTFPLDILLLSFKAEVCFVLLLQCIFQDC

SEQ ID NO: 816090 - protein, 221 aa, Homo sapiens
MLQARKQHMSTELTIESEAPSDSSGINLSGFGSDQLEIQLTEQLRSLIPNEDVRKFMSHVIWTLKMECSETHVQGSCAKLMSRTGLLMKLLSEQQEAKALNVEWDTDQQKTNYINENMEQNEQKEQKSSELMKEVPGYDYKNKLIFAISVTVILIILIIIFCFIEVKTIINSGFQNTILCLCGFRIHKLKTNVTFPLDILLLSFKAEVCFVLLLQCIFQDC

SEQ ID NO: 816091 - protein, 269 aa, Homo sapiens
MIYQTTEEASVGNPEGAFMKMLQARKQHMSTELTIESEAPSDSSGINLSGFGSEQLDTNDESDVSSALSYILPYLSLRNLGDQLEIQLTEQLRSLIPNEDVRKFMSHVIWTLKMECSETHVQGSCAKLMSRTGLLMKLLSEQQEAKALNVEWDTDQQKTNYINENMEQNEQKEQKSSELMKEVPGYDYKNKLIFAISVTVILIILIIIFCFIEVKTIINSGFQNTILCLCGFRIHKLKTNVTFPLDILLLSFKAEVCFVLLLQCIFQDC

SEQ ID NO: 816092 - protein, 269 aa, Homo sapiens
GYLEDPYQPLHATSYFLALLSTPSNSEMRDTSRWDESTRYVHVQGLHAMPNTPLPGPPGSLPQVLTWRTPHEHSPGFGRERRGMKALDMNSCRSLIPNEDVRKFMSHVIWTLKMECSETHVQGSCAKLMSRTGLLMKLLSEQQEAKALNVEWDTDQQKTNYINENMEQNEQKEQKSSELMKEVPGYDYKNKLIFAISVTVILIILIIIFCFIEVKTIINSGFQNTILCLCGFRIHKLKTNVTFPLDILLLSFKAEVCFVLLLQCIFQDC

SEQ ID NO: 816093 - protein, 111 aa, Homo sapiens
AVVVMDRKRVRRACLEASIREGCPRCRRSFLQVLLEDFWLASASPFSQRLGPDVIISLSLAAPEKSRSRQVTRSPPPGGEVKSARVLLVQGLHTGKKQGKSVRNSFCSTAF

SEQ ID NO: 816094 - protein, 159 aa, Homo sapiens; identical to SEQ ID NO: 816087

SEQ ID NO: 816095 - protein, 244 aa, Homo sapiens
MLAKRPLFSAAKSLIHSQGIFSSLGDLSPQENPLLEVVAPSERFTENTNVKDTTNVKDTKEMCSKTISENTNYNHPPEAVSAGTAFNLEPTVKQTETKWEYNNVGIDLSPEPKSFNYPLLSSPGDQLEIQLTEQLRSLIPNEDVRKFMSHVIWTLKMECSETHVQGSCAKLMSRTGLLMKLLSEQQEAKALNVEWDTDQQKTNYINENMEQNEQKEQKSSEVRSTQKHETQISHHLAYARKVPT

SEQ ID NO: 816096 - protein, 205 aa, Homo sapiens
LLCVTGAYSYGLSMKDDQRYFMIKAVSSFLTAEEASVGNPEGAFMKMLQARKQHMSTELTIESEAPSDSSGINLSGFGSEQLDTNDESDVSSALSYILPYLSLRNLGAESILLPFTEQLFSNVQDGDRLLSILKNNRKSPSQSSLLGNKFKNKIFEKKIRNCATTGKPPGKDSKCRQKPAESEQSPHGPKEHPGKALQKGGKAQH

SEQ ID NO: 816097 - protein, 113 aa, Homo sapiens
MHTVPWGVDFALIAMKNFISQWSSFFRSGMGKSQTGYLPRVPREQPFAAGLWGLAAALSHLAVNAFSLLCPPLPKTSCSLNPHGDVESRKVHATVENVYISALNLPWVRVKWC

SEQ ID NO: 816098 - protein, 74 aa, Homo sapiens
EEEQEAPYLNDLPEEAGPASSSAETGLHSMCSLLSSFFFLLKCSCLIPSTFLQSPHKAASPTHCYANKVLFNFI

SEQ ID NO: 816099 - protein, 131 aa, Homo sapiens
MGLIFSCLAFEEMVEFKLTGKPNQHPPLCSERLETSGPPHCPCPWQALKSGEVTTGLKISQCQHCLPCKVQLSPHSAFIVSLTTALGRRWKPEDVWVSQLTDKLPCHTQCPRMLTYIQQTTTLLPSSASKG

SEQ ID NO: 816100 - protein, 131 aa, Homo sapiens; identical to SEQ ID NO: 816099

SEQ ID NO: 816101 - protein, 522 aa, Homo sapiens
MALLPRALSAGAGPSWRRAARAFRGFLLLLPEPAALTRALSRAMACRQEPQPQGPPPAAGAVASYDYLVIGGGSGGLASARRAAELGARAAVVESHKLGGTCVNVGCVPKKVMWNTAVHSEFMHDHADYGFPSCEGKFNWRVIKEKRDAYVSRLNAIYQNNLTKSHIEIIRGHAAFTSDPKPTIEVSGKKYTAPHILIATGGMPSTPHESQIPGASLGITSDGFFQLEELPGRSVIVGAGYIAVEMAGILSALGSKTSLMIRHDKVLRSFDSMISTNCTEELENAGVEVLKFSQVKEVKKTLSGLEVSMVTAVPGRLPVMTMIPDVDCLLWAIGRVPNTKDLSLNKLGIQTDDKGHIIVDEFQNTNVKGIYAVGDVCGKALLTPVAIAAGRKLAHRLFEYKEDSKLDYNNIPTVVFSHPPIGTVGLTEDEAIHKYGIENVKTYSTSFTPMYHAVTKRKTKCVMKMVCANKEEKVVGIHMQGLGCDEMLQGFAVAVKMGATKADFDNTVAIHPTSSEELVTLR

SEQ ID NO: 816102 - protein, 522 aa, Homo sapiens; identical to SEQ ID NO: 816101

SEQ ID NO: 816103 - protein, 522 aa, Homo sapiens; identical to SEQ ID NO: 816101

SEQ ID NO: 816104 - protein, 449 aa, Homo sapiens
MALLPRALSAGAGPSWRRAARAFRGFLLLLPEPAALTRALSRAMACRQEPQPQGPPPAAGAVASYDYLVIGGGSGGLASARRAAELGARAAVVESHKLGGTCVNVGCVPKKVMWNTAVHSEFMHDHADYGFPSCEGKFNWRVIKEKRDAYVSRLNAIYQNNLTKSHIEIIRGHAAFTSDPKPTIEVSGKKYTAPHILIATGGMPSTPHESQIPGASLGITSDGFFQLEELPGRSVIVGAGYIAVEMAGILSALGSKTSLMIRHDKVLRSFDSMISTNCTEELENAGVEVLKFSQVKEVKKTLSGLEVSMVTAVPGRLPVMTMIPDVDCLLWAIGRVPNTKDLSLNKLGIQTDDKGHIIVDEFQNTNVKGIYAVGDVCGKALLTPVAIAAGRKLAHRLFEYKEDSKLDYNNIPTVVFSHPPIGTVGLTEGRYLKTEGHLWFPSSFPCPQL

SEQ ID NO: 816105 - protein, 102 aa, Homo sapiens
KKTLSGLEVSMVTAVPGRLPVMTMIPDVDCLLWAIGRVPNTKDLSLNKLVSWLGLPETFVNLLGVLWFYFPPRHPKLGWIPLDSFLFFPCIQFVIKFHCFFL

SEQ ID NO: 816106 - protein, 464 aa, Homo sapiens
MGSPAHRPALLLLLPPLLLLLLLRVPPSRSFPGSGDSPLEDDEVGYSHPRYKDTPWCSPIKVKYGDVYCRAPQGGYYKTALGTRCDIRCQKGYELHGSSLLICQSNKRWSDKVICKQKRCPTLAMPANGGFKCVDGAYFNSRCEYYCSPGYTLKGERTVTCMDNKAWSGRPASCVDMEPPRIKCPSVKERIAEPNKLTVRVSWETPEGRDTADGILTDVILKGLPPGSNFPEGDHKIQYTVYDRAENKGTCKFRVKVRVKRCGKLNAPENGYMKCSSDGDNYGATCEFSCIGGYELQGSPARVCQSNLAWSGTEPTCAAMNVNVGVRTAAALLDQFYEKRRLLIVSTPTARNLLYRLQLGMLQQAQCGLDLRHITVVELVGVFPTLIGRIGAKIMPPALALQLRLLLRIPLYSFSMVLVDKHGMDKERYVSLVMPVALFNLIDTFPLRKEEMVLQAEMSQTCNT

SEQ ID NO: 816107 - protein, 464 aa, Homo sapiens; identical to SEQ ID NO: 816106

SEQ ID NO: 816108 - protein, 419 aa, Homo sapiens
MGSPAHRPALLLLLPPLLLLLLLRVPPSRSFPGSGDSPLEDDEVGYSHPRYKDTPWCSPIKVKYGDVYCRAPQGGYYKTALGTRCDIRCQKGYELHGSSLLICQSNKRWSDKVICKQKRCPTLAMPANGGFKCVDGAYFNSRCEYYCSPGYTLKGERTVTCMDNKAWSGRPASCVDMEPPRIKCPSVKERIAEPNKLTVRVSWETPEGRDTADGILTDVILKGLPPGSNFPEGDHKIQYTVYDRAENKGTCKFRVKVRVKRCGKLNAPENGYMKCSSDGDNYGATCEFSCIGGYELQGSPARVCQSNLAWSGTEPTCAAMNVNVGVRTAAALLDQFYEKRRLLIVSTPTARNLLYRLQLGMLQQAQCGLDLRHITVVELVGVFPTLIGRIGAKIMPPALALQLSFITLTKLEPWILVSE

SEQ ID NO: 816109 - protein, 145 aa, Homo sapiens [sequence omitted]

SEQ ID NO: 816110 - protein, 379 aa, Homo sapiens
MGSPAHRPALLLLLPPLLLLLLLRVPPSRSFPGSGDSPLEDDEVGYSHPRYKDTPWCSPIKVKYGDVYCRAPQGGYYKTALGTRCDIRCQKGYELHGSSLLICQSNKRWSDKVICKQKRCPTLAMPANGGFKCVDGAYFNSRCEYYCSPGYTLKGERTVTCMDNKAWSGRPASCVDMEPPRIKCPSVKERIAEPNKLTVRVSWETPEGRDTADGILTDVILKGLPPGSNFPEGDHKIQYTVYDRAENKGTCKFRVKVRVKRCGKLNAPENGYMKCSSDGDNYGATCEFSCIGGYELQGSPARVCQSNLAWSGTEPTCAAMNVNVGVRTAAALLDQFYEKRRLLIVSTPTARNLLYRLQLGMLQAVAANPTLLLQYGASG

SEQ ID NO: 816111 - protein, 138 aa, Homo sapiens
MATKRLFGATRTWAGWGAWELLNPATSGRLLARDYAKKPVMKGAKSGKGAVTSEALKDPDVCTDPVQLTTYAMGVNIYKEGQDVPLKPDAEYPEWLFEMNLGPPKTLEELDPESREYWRRLRKQNIWRHNRLSKNKRL

SEQ ID NO: 816112 - protein, 138 aa, Homo sapiens; identical to SEQ ID NO: 816111

SEQ ID NO: 816113 - protein, 138 aa, Homo sapiens; identical to SEQ ID NO: 816111

SEQ ID NO: 816114 - protein, 91 aa, Homo sapiens
MKEPGPNFVTVRKGLHSFKMAFVKHLLLECSGSITDHCSLHLPVQEILMSQPPEQLGLQTNLGNQESSGMMKLFMPRPKVLAQYESIQFMP

SEQ ID NO: 816115 - protein, 91 aa, Homo sapiens; identical to SEQ ID NO: 816114

SEQ ID NO: 816116 - protein, 91 aa, Homo sapiens; identical to SEQ ID NO: 816114

SEQ ID NO: 816117 - protein, 673 aa, Homo sapiens
MFDFEGSLSPVIAPKKARPSETGSDDDWEYLLNSDYHQSVESHLLNRSLCLSPSEASQMKDEDFSQNLSLDSSTLLFTHIPAIFFVLRLVYEELKLNTLMGEGICSLLNFSFSWQGQTGFMHHPSFFTSEPPSIYQWVSSCLKGEGMPPYPYLPGICERSRLVVLSIALYILGDESSVSDESSQYLTRITVAPQKLQAEQEENRFSFRHSTSVSSLAERLVGWMTNVGFTLRDLETLPFGIALPIRDAIYHCREQPASDWPEAVCLLTGRQDLSKQACEGNLPKGKSVLSSDVPSGTETEEEDDGMNDMNHEVMSLIWSEDLRVQDVRRLLQSAHPVRVNVVQYPELSDHEFIEEKENRLLQLCQRTMALPVGRGMFTLFSYHPVPTEPLPIPKLNLTGRAPPRNTTVDLNSGNIDVPPNMTSWASFHNGVAAGLKIAPASQIDSAWIVYNKPKHAELANEYAGFLMALGLNGHLTKLATLNIHDYLTKGHEMTSIGLLLGVSAAKLGTMDMSITRLLSIRIPALLPPTSTELDVPHNVQVAAVVGIGLVYQGTAHRHTAEVLLAEIGRPPGPEMEYCTDRKSYSLAAGLALGMVCLGHGSNLIGMSDLNVPEQLYQYMVGGHRRFQTGMHREKHKSPSYQIKEGDTINVDVTCPGATLALAMIYLKTNNSVF

SEQ ID NO: 816118 - protein, 673 aa, Homo sapiens; identical to SEQ ID NO: 816117

SEQ ID NO: 816119 - protein, 673 aa, Homo sapiens; identical to SEQ ID NO: 816117

SEQ ID NO: 816120 - protein, 659 aa, Homo sapiens
MFDFEGSLSPVIAPKKARPSETGSDDDWEYLLNSDYHQSVESHLLNRSLCLSPSEASQMKDEDFSQNLSLDSSTLLFTHIPAIFFVLRLVYEELKLNTLMGEGICSLLNFSFSWQGQTGFMHHPSFFTSEPPSIYQWVSSCLKGEGMPPYPYLPGICERSRLVVLSIALYILGDESSVSDESSQYLTRITVAPQKLQAEQEENRFSFRHSTSVSSLAERLVGWMTNVGFTLRDLETLPFGIALPIRDAIYHCREQPASDWPEAVCLLTGRQDLSKQACEGNLPKGKSVLSSDVPSGTETEEEDDGMNDMNHEVMSLIWSEDLRVQDVRRLLQSAHPVRVNVVQYPELSDHEFIEEKENRLLQLCQRTMALPVGRGMFTLFSYHPVPTEPLPIPKLNLTGRAPPRNTTVDLNSGNIDVPPNMTSWASFHNGVAAGLKIAPASQIDSAWIVYNKPKHAELANEYAGFLMALGLNGHLTKLATLNIHDYLTKGHEMTSIGLLLGVSAAKLGTMDMSITRLLSIRIPALLPPTSTELDVPHNVQVAAVVGIGLVYQGTAHRHTAEVLLAEIGRPPGPEMEYCTDRKSYSLAAGLALGMVCLGHGSNLIGMSDLNVPEQLYQYMVGGHRRFQTGMHREKHKSPSYQIKVSTQQSNRSKVWKLGS

SEQ ID NO: 816121 - protein, 628 aa, Homo sapiens
MFDFEGSLSPVIAPKKARPSETGSDDDWEYLLNSDYHQSVESHLLNRSLCLSPSEASQMKDEDFSQNLSLDSSTLLFTHIPAIFFVLRLVYEELKLNTLMGEGICSLLNFSFSWQGQTGFMHHPSFFTSEPPSIYQWVSSCLKGEGMPPYPYLPGICERSRLVVLSIALYILGDESSVSDESSQYLTRITVAPQKLQAEQEENRFSFRHSTSVSSLAERLVGWMTNVGFTLRDLETLPFGIALPIRDAIYHCREQPASDWPEAVCLLTGRQDLSKQACEGNLPKGKSVLSSDVPSGTETEEEDDGMNDMNHEVMSLIWSEDLRVQDVRRLLQSAHPVRVNVVQYPELSDHEFIEEKENRLLQLCQRTMALPVGRGMFTLFSYHPVPTEPLPIPKLNLTGRAPPRNTTVDLNSGNIDVPPNMTSWASFHNGVAAGLKIAPASQIDSAWIVYNKPKHAELANEYAGFLMALGLNGHLTKLATLNIHDYLTKGHEMTSIGLLLGVSAAKLGTMDMSITRLLSIRIPALLPPTSTELDVPHNVQVAAVVGIGLVYQGTAHRHTAEVLLAEIGRPPGPEMEYCTDRKSYSLAAGLALGMVCLGEGDTINVDVTCPGATLALAMIYLKTNNSVF

SEQ ID NO: 816122 - protein, 692 aa, Homo sapiens
MFDFEGSLSPVIAPKKARPSETGSDDDWEYLLNSDYHQSVESHLLNRSLCLSPSEASQMKDEDFSQNLSLDSSTLLFTHIPAIFFVLRLVYEELKLNTLMGEGICSLLNFSFSWQGQTGFMHHPSFFTSEPPSIYQWVSSCLKGEGMPPYPYLPGICERSRLVVLSIALYILGDESSVSDESSQYLTRITVAPQKLQAEQEENRFSFRHSTSVSSLAERLVGWMTNVGFTLRDLETLPFGIALPIRDAIYHCREQPASDWPEAVCLLTGRQDLSKQACEGNLPKGKSVLSSDVPSGTETEEEDDGMNDMNHEVMSLIWSEDLRVQDVRRLLQSAHPVRVNVVQYPELSDHEFIEEKENRLLQLCQRTMALPVGRGMFTLFSYHPVPTEPLPIPKLNLTGRAPPRNTTVDLNSGNIDVPPNMTSWASFHNGVAAGLKIAPASQIDSAWIVYNKPKHAELANEYAGFLMALGLNGHLTKLATLNIHDYLTKGHEMTSIGLLLGVSAAKLGTMDMSITRLLSIRIPALLPPTSTELDVPHNVQVAAVVGIGLVYQGTAHRHTAEVLLAEIGRPPGPEMEYCTDRKSYSLAAGLALGMVCLGHGSNLIGMSDLNVPEQLYQYMVGGHRRFQTGMHREKHKSPSYQIKEGDTINVDVTCPGATLALAMIYLKTNNRLQSAVAPAQNSAQCPSVLSRC

SEQ ID NO: 816123 - protein, 659 aa, Homo sapiens; identical to SEQ ID NO: 816120

SEQ ID NO: 816124 - protein, 46 aa, Homo sapiens
MVSFLSFLFVSHIRWAVLESPTGTEKMTTKQQQNPQEYPVVFGQSS

SEQ ID NO: 816125 - protein, 46 aa, Homo sapiens; identical to SEQ ID NO: 816124

SEQ ID NO: 816126 - protein, 542 aa, Homo sapiens
SSSPRAARAGLGAVLGGLGNRAVWRSEAPGTRGKRRAGRQPEEPRVLELGAGSWESGGERSPEPGARGGASGSGASRLDGAPAGLRHAPSPGLAFIGPRLRRAHSCPDFQPRRRRTEPRTPAPTMRLNSSAPGTPGTPAADPFQRAQAGLEEALLAPGFGNASGNASERVLAAPSSELDVNTDIYSKVLVTAVYLALFVVGTVGNTVTAFTLARKKSLQSLQSTVHYHLGSLALSDLLTLLLAMPVELYNFIWVHHPWAFGDAGCRGYYFLRDACTYATALNVASLSVERYLAICHPFKAKTLMSRSRTKKFISAIWLASALLTVPMLFTMGEQNRSADGQHAGGLVCTPTIHTATVKVVIQVNTFMSFIFPMVVISVLNTIIANKLTVMVRQAAEQGQVCTVGGEHSTFSMAIEPGRVQALRHGVRVLRAVVIAFVVCWLPYHVRRLMFCYISDEQWTPFLYDFYHYFYMVTNALFYVSSTINPILYNLVSANFRHIFLATLACLCPVWRRRRKRPAFSRKADSVSSNHTLSSNATRETLY

SEQ ID NO: 816127 - protein, 542 aa, Homo sapiens; identical to SEQ ID NO: 816126

SEQ ID NO: 816128 - protein, 784 aa, Homo sapiens
MRARPRPRPLWATVLALGALAGVGVGGPNICTTRGVSSCQQCLAVSPMCAWCSDEALPLGSPRCDLKENLLKDNCAPESIEFPVSEARVLEDRPLSDKGSGDSSQVTQVSPQRIALRLRPDDSKNFSIQVRQVEDYPVDIYYLMDLSYSMKDDLWSIQNLGTKLATQMRKLTSNLRIGFGAFVDKPVSPYMYISPPEALENPCYDMKTTCLPMFGYKHVLTLTDQVTRFNEEVKKQSVSRNRDAPEGGFDAIMQATVCDEKIGWRNDASHLLVFTTDAKTHIALDGRLAGIVQPNDGQCHVGSDNHYSASTTMDYPSLGLMTEKLSQKNINLIFAVTENVVNLYQNYSELIPGTTVGVLSMDSSNVLQLIVDAYGKIRSKVELEVRDLPEELSLSFNATCLNNEVIPGLKSCMGLKIGDTVSFSIEAKVRGCPQEKEKSFTIKPVGFKDSLIVQVTFDCDCACQAQAEPNSHRCNNGNGTFECGVCRCGPGWLGSQCECSEEDYRPSQQDECSPREGQPVCSQRGECLCGQCVCHSSDFGKITGKYCECDDFSCVRYKGEMCSGHGQCSCGDCLCDSDWTGYYCNCTTRTDTCMSSNGLLCSGRGKCECGSCVCIQPGSYGDTCEKCPTCPDACTFKKECVECKKFDRGALHDENTCNRYCRDEIESVKELKDTGKDAVNCTYKNEDDCVVRFQYYEDSSGKSILYVVEEPECPKGPDILVVLLSVMGAILLIGLAALLIWKLLITIHDRKEFAKFEEERARAKWDTHYAQSLRKWNQPVSIDG

SEQ ID NO: 816129 - protein, 794 aa, Homo sapiens
PREADEMRARPRPRPLWATVLALGALAGVGVGGPNICTTRGVSSCQQCLAVSPMCAWCSDEALPLGSPRCDLKENLLKDNCAPESIEFPVSEARVLEDRPLSDKGSGDSSQVTQVSPQRIALRLRPDDSKNFSIQVRQVEDYPVDIYYLMDLSYSMKDDLWSIQNLGTKLATQMRKLTSNLRIGFGAFVDKPVSPYMYISPPEALENPCYDMKTTCLPMFGYKHVLTLTDQVTRFNEEVKKQSVSRNRDAPEGGFDAIMQATVCDEKIGWRNDASHLLVFTTDAKTHIALDGRLAGIVQPNDGQCHVGSDNHYSASTTMDYPSLGLMTEKLSQKNINLIFAVTENVVNLYQNYSELIPGTTVGVLSMDSSNVLQLIVDAYGKIRSKVELEVRDLPEELSLSFNATCLNNEVIPGLKSCMGLKIGDTVSFSIEAKVRGCPQEKEKSFTIKPVGFKDSLIVQVTFDCDCACQAQAEPNSHRCNNGNGTFECGVCRCGPGWLGSQCECSEEDYRPSQQDECSPREGQPVCSQRGECLCGQCVCHSSDFGKITGKYCECDDFSCVRYKGEMCSGHGQCSCGDCLCDSDWTGYYCNCTTRTDTCMSSNGLLCSGRGKCECGSCVCIQPGSYGDTCEKCPTCPDACTFKKECVECKKFDRGALHDENTCNRYCRDEIESVKELKDTGKDAVNCTYKNEDDCVVRFQYYEDSSGKSILYVVEEPECPKGPDILVVLLSVMGAILLIGLAALLIWKLLITIHDRKEFAKFEEERARAKWDTANNPLYKEATSTFTNITYRGT

SEQ ID NO: 816130 - protein, 794 aa, Homo sapiens; identical to SEQ ID NO: 816129

SEQ ID NO: 816131 - protein, 794 aa, Homo sapiens; identical to SEQ ID NO: 816129

SEQ ID NO: 816132 - protein, 443 aa, Homo sapiens
MRARPRPRPLWATVLALGALAGVGVGGPNICTTRGVSSCQQCLAVSPMCAWCSDEALPLGSPRCDLKENLLKDNCAPESIEFPVSEARVLEDRPLSDKGSGDSSQVTQVSPQRIALRLRPDDSKNFSIQVRQVEDYPVDIYYLMDLSYSMKDDLWSIQNLGTKLATQMRKLTSNLRIGFGAFVDKPVSPYMYISPPEALENPCYDMKTTCLPMFGYKHVLTLTDQVTRFNEEVKKQSVSRNRDAPEGGFDAIMQATVCDEKIGWRNDASHLLVFTTDAKTHIALDGRLAGIVQPNDGQCHVGSDNHYSASTTMDYPSLGLMTEKLSQKNINLIFAVTENVVNLYQNYSELIPGTTVGVLSMDSSNVLQLIVDAYGKIRSKVELEVRDLPEELSLSFNATCLNNEVIPGLKSCMGLKIGDTVRWAGQGLCPGASVGTQPPFFLL

SEQ ID NO: 816133 - protein, 780 aa, Homo sapiens
MRARPRPRPLWATVLALGALAGVGVGGPNICTTRGVSSCQQCLAVSPMCAWCSDEALPLGSPRCDLKENLLKDNCAPESIEFPVSEARVLEDRPLSDKGSGDSSQVTQVSPQRIALRLRPDDSKNFSIQVRQVEDYPVDIYYLMDLSYSMKDDLWSIQNLGTKLATQMRKLTSNLRIGFGAFVDKPVSPYMYISPPEALENPCYDMKTTCLPMFGYKHVLTLTDQVTRFNEEVKKQSVSRNRDAPEGGFDAIMQATVCDEKIGWRNDASHLLVFTTDAKTHIALDGRLAGIVQPNDGQCHVGSDNHYSASTTMDYPSLGLMTEKLSQKNINLIFAVTENVVNLYQNYSELIPGTTVGVLSMDSSNVLQLIVDAYGKIRSKVELEVRDLPEELSLSFNATCLNNEVIPGLKSCMGLKIGDTVSFSIEAKVRGCPQEKEKSFTIKPVGFKDSLIVQVTFDCDCACQAQAEPNSHRCNNGNGTFECGVCRCGPGWLGSQCECSEEDYRPSQQDECSPREGQPVCSQRGECLCGQCVCHSSDFGKITGKYCECDDFSCVRYKGEMCSGHGQCSCGDCLCDSDWTGYYCNCTTRTDTCMSSNGLLCSGRGKCECGSCVCIQPGSYGDTCEKCPTCPDACTFKKECVECKKFDRGALHDENTCNRYCRDEIESVKELKDTGKDAVNCTYKNEDDCVVRFQYYEDSSGKSILYVVEEPECPKGPDILVVLLSVMGAILLIGLAALLIWKLLITIHDRKEFAKFEEERARAKWDTVRDGAGRFLKSLV

SEQ ID NO: 816134 - protein, 443 aa, Homo sapiens; identical to SEQ ID NO: 816132

SEQ ID NO: 816135 - protein, 119 aa, Homo sapiens
AAAASVNVAAVSVSSRAPMGTPVRSAPPAQMPAPLRSECGVWREPGGWEVGEDPLTRIPSSPGVFLAHQSLRERSPLQPDGCLSFCQRLWASWNRANCEGAKVERAGLRLRMSSPRVTS

SEQ ID NO: 816136 - protein, 863 aa, Homo sapiens
QKKLRARLALAHKTFSNFIESMVLEKENTHERSPSSPKGEKGKSRLRQGSWRAFLKSKDAGSPKKPTLVSLPLGPEVLSPAETDSHCEERAEDKEGYVFSDHWAPPLASTPLSSSLVSPEHRRKSEPTIKCTATQEGDAKPDEQKEESREGGQGPRGLGTVPWLRDLPGSENHMPWEEPAGEKPSCSHSQKAFHMEPAQKPCFTTDMVTWALLCISAETVRGEAPSQPRGIPHRSPVSVDDLWLEKTQRKKLQKQAHVERRLHIGAVHKDGVKCWRKTIITSPESLNLPRRSHPLSQSAPTGLNHMGWPEHTPGTAMPDGALDTAVCADEVGSEEDLYDDLHSSSHHYSHPGGGGEQLAINELISDGSVVCAEALWDHVTMDDQELGFKAGDVIEVMDATNREWWWGRVADGEGWFPASFVRLRVNQDEPADDDAPLAGNSGAEDGGAEAQSSKDQMRTNVINEILSTERDYIKHLRDICEGYVRQCRKRADMFSEEQLRTIFGNIEDIYRCQKAFVKALEQRFNRERPHLSELGACFLEHQADFQIYSEYCNNHPNACVELSRLTKLSKYVYFFEACRLLQKMIDISLDGFLLTPVQKICKYPLQLAELLKYTHPQHRDFKDVEAALHAMKNVAQLINERKRRLENIDKIAQWQSSIEDWEGEDLLVRSSELIYSGELTRVTQPQAKSQQRMFFLFDHQLIYCKKDLLRRDVLYYKGRLDMDGLEVVDLEDGKDRDLHVSIKNAFRLHRGATGDSHLLCTRKPEQKQRWLKAFAREREQVQLDQETGFSITELQRKQAMLNASKQQVTGKPKAVGRPCYLTRQKHPALPSNRPQQQVLVLAEPRRKPSTFWHSISRLAPFRK

SEQ ID NO: 816137 - protein, 843 aa, Homo sapiens
QKKLRARLALAHKTFSNFIESMVLEKENTHERSPSSPKGEKGKSRLRQGSWRAFLKSKDAGSPKKPTLVSLPLGPEVLSPAETDSHCEERAEDKEGYVFSDHWAPPLASTPLSSSLVSPEHRRKSEPTIKCTATQEGDAKPDEQKEESREGGQGPRGLGTVPWLRDLPGSENHMPWEEPAGEKPSCSHSQKAFHMEPAQKPCFTTDMVTWALLCISAETVRGEAPSQPRGIPHRSPVSVDDLWLEKTQRKKLQKQAHVERRLHIGAVHKDGVKCWRKTIITSPESLNLPRRSHPLSQSAPTGLNHMGWPEHTPGTAMPDGALDTAVCADEVGSEEDLYDDLHSSSHHYSHPGGGGEQLAINELISDGSVVCAEALWDHVTMDDQELGFKAGDVIEVMDATNREWWWGRVADGEGWFPASFVRLRVNQDEPADDDAPLAGNSGAEDGGAEAQSSKDQMRTNVINEILSTERDYIKHLRDICEGYVRQCRKRADMFSEEQLRTIFGNIEDIYRCQKAFVKALEQRFNRERPHLSELGACFLEHQADFQIYSEYCNNHPNACVELSRLTKLSKYVYFFEACRLLQKMIDISLDGFLLTPVQKICKYPLQLAELLKYTHPQHRDFKDVEAALHAMKNVAQLINERKRRLENIDKIAQWQSSIEDWEGEDLLVRSSELIYSGELTRVTQPQAKSQQRMFFLFDHQLIYCKKDLLRRDVLYYKGRLDMDGLEVVDLEDGKDRDLHVSIKNAFRLHRGATGDSHLLCTRKPEQKQRWLKAFAREREQVQLDQETGFSITELQRKQAMLNASKQQVTGKPKGRRTAAPPPRLPGPYPADIIPFSEPQSQAS

SEQ ID NO: 816138 - protein, 619 aa, Homo sapiens
MRPDGQQALDAVVRSFDCHSEAALRQRNDVIYCSLPRTAQGIVQREDQLEVLVSLREVWGRRRGRDGTCTGAMPDGALDTAVCADEVGSEEDLYDDLHSSSHHYSHPGGGGEQLAINELISDGSVVCAEALWDHVTMDDQELGFKAGDVIEVMDATNREWWWGRVADGEGWFPASFVRLRVNQDEPADDDAPLAGNSGAEDGGAEAQSSKDQMRTNVINEILSTERDYIKHLRDICEGYVRQCRKRADMFSEEQLRTIFGNIEDIYRCQKAFVKALEQRFNRERPHLSELGACFLEHQADFQIYSEYCNNHPNACVELSRLTKLSKYVYFFEACRLLQKMIDISLDGFLLTPVQKICKYPLQLAELLKYTHPQHRDFKDVEAALHAMKNVAQLINERKRRLENIDKIAQWQSSIEDWEGEDLLVRSSELIYSGELTRVTQPQAKSQQRMFFLFDHQLIYCKKDLLRRDVLYYKGRLDMDGLEVVDLEDGKDRDLHVSIKNAFRLHRGATGDSHLLCTRKPEQKQRWLKAFAREREQVQLDQETGFSITELQRKQAMLNASKQQVTGKPKAVGRPCYLTRQKHPALPSNRPQQQVLVLAEPRRKPSTFWHSISRLAPFRK

SEQ ID NO: 816139 - protein, 726 aa, Homo sapiens
LRGRSPRPASAGAPPLPGRCGPPARPCAAGSRGRTEREAGRHGEGPAAPARPRGARERPARPAALQPAPRRPARGGLRRAGAPGSHQRRTDLPAGLPLSGRAGRRAGVSGAGDGTPAVATRGLRTGRGGKASFHPMCSLPGPGPGVSPSGCLRGVVARVSQGPSVLCALLGSGGCGGEGGGQNGASLRVTEDADSAGAPRLLVWKRSACDRWVSDPRLHLCRLSQLISDGSVVCAEALWDHVTMDDQELGFKAGDVIEVMDATNREWWWGRVADGEGWFPASFVRLRVNQDEPADDDAPLAGNSGAEDGGAEAQSSKDQMRTNVINEILSTERDYIKHLRDICEGYVRQCRKRADMFSEEQLRTIFGNIEDIYRCQKAFVKALEQRFNRERPHLSELGACFLEHQADFQIYSEYCNNHPNACVELSRLTKLSKYVYFFEACRLLQKMIDISLDGFLLTPVQKICKYPLQLAELLKYTHPQHRDFKDVEAALHAMKNVAQLINERKRRLENIDKIAQWQSSIEDWEGEDLLVRSSELIYSGELTRVTQPQAKSQQRMFFLFDHQLIYCKKDLLRRDVLYYKGRLDMDGLEVVDLEDGKDRDLHVSIKNAFRLHRGATGDSHLLCTRKPEQKQRWLKAFAREREQVQLDQETGFSITELQRKQAMLNASKQQVTGKPKAVGRPCYLTRQKHPALPSNRPQQQVLVLAEPRRKPSTFWHSISRLAPFRK

SEQ ID NO: 816140 - protein, 233 aa, Homo sapiens
MKNVAQLINERKRRLENIDKIAQWQSSIEDWEGEDLLVRSSELIYSGELTRVTQPQAKSQQRMFFLFDHQLIYCKKDLLRRDVLYYKGRLDMDGLEVVDLEDGKDRDLHVSIKNAFRLHRGATGDSHLLCTRKPEQKQRWLKAFAREREQVQLDQETGFSITELQRKQAMLNASKQQVTGKPKAVGRPCYLTRQKHPALPSNRPQQQVLVLAEPRRKPSTFWHSISRLAPFRK

SEQ ID NO: 816141 - protein, 222 aa, Homo sapiens
MKNVAQLINERKRRLENIDKIAQWQSSIEDWEGEDLLVRSSELIYSGELTRVTQPQAKSQQRMFFLFDHQLIYCKKGRLDMDGLEVVDLEDGKDRDLHVSIKNAFRLHRGATGDSHLLCTRKPEQKQRWLKAFAREREQVQLDQETGFSITELQRKQAMLNASKQQVTGKPKAVGRPCYLTRQKHPALPSNRPQQQVLVLAEPRRKPSTFWHSISRLAPFRK

SEQ ID NO: 816142 - protein, 188 aa, Homo sapiens
LRGRSPRPASAGAPPLPGRCGPPARPCAAGSRGRTEREAGRHGEGPAAPARPRGARERPARPAALQPAPRRPARGGLRRAGAPGSHQRRTDLPAGLPLSGRAGRRAGVSGAGDGTPAVATRGLRTGRGGKASFHPMCSLPGPGPGVSPSGCLRGVVARVSQGPSVLCALWGVGAAGARGEAKMARLCE

SEQ ID NO: 816143 - protein, 608 aa, Homo sapiens
LRGRSPRPASAGAPPLPGRCGPPARPCAAGSRGRTEREAGRHGEGPAAPARPRGARERPARPAALQPAPRRPARGGLRRAGAPGSHQRRTDLPAGLPLSGRAGRRAGLISDGSVVCAEALWDHVTMDDQELGFKAGDVIEVMDATNREWWWGRVADGEGWFPASFVRLRVNQDEPADDDAPLAGNSGAEDGGAEAQSSKDQMRTNVINEILSTERDYIKHLRDICEGYVRQCRKRADMFSEEQLRTIFGNIEDIYRCQKAFVKALEQRFNRERPHLSELGACFLEHQADFQIYSEYCNNHPNACVELSRLTKLSKYVYFFEACRLLQKMIDISLDGFLLTPVQKICKYPLQLAELLKYTHPQHRDFKDVEAALHAMKNVAQLINERKRRLENIDKIAQWQSSIEDWEGEDLLVRSSELIYSGELTRVTQPQAKSQQRMFFLFDHQLIYCKKDLLRRDVLYYKGRLDMDGLEVVDLEDGKDRDLHVSIKNAFRLHRGATGDSHLLCTRKPEQKQRWLKAFAREREQVQLDQETGFSITELQRKQAMLNASKQQVTGKPKAVGRPCYLTRQKHPALPSNRPQQQVLVLAEPRRKPSTFWHSISRLAPFRK

SEQ ID NO: 816144 - protein, 407 aa, Homo sapiens
MRTNVINEILSTERDYIKHLRDICEGYVRQCRKRADMFSEEQLRTIFGNIEDIYRCQKAFVKALEQRFNRERPHLSELGACFLEHQADFQIYSEYCNNHPNACVELSRLTKLSKYVYFFEACRLLQKMIDISLDGFLLTPVQKICKYPLQLAELLKYTHPQHRDFKDVEAALHAMKNVAQLINERKRRLENIDKIAQWQSSIEDWEGEDLLVRSSELIYSGELTRVTQPQAKSQQRMFFLFDHQLIYCKKDLLRRDVLYYKGRLDMDGLEVVDLEDGKDRDLHVSIKNAFRLHRGATGDSHLLCTRKPEQKQRWLKAFAREREQVQLDQETGFSITELQRKQAMLNASKQQVTGKPKAVGRPCYLTRQKHPALPSNRPQQQVLVLAEPRRKPSTFWHSISRLAPFRK

SEQ ID NO: 816145 - protein, 462 aa, Homo sapiens
LRGRSPRPASAGAPPLPGRCGPPARPCAAGSRGRTEREAGRHGEGPAAPARPRGARERPARPAALQPAPRRPARGGLRRAGAPGSHQRRTDLPAGLPLSGRAGRRAGLISDGSVVCAEALWDHVTMDDQELGFKAGDVIEVMDATNREWWWGRVADGEGWFPASFVRLRVNQDEPADDDAPLAGNSGAEDGGAEAQSSKDQMRTNVINEILSTERDYIKHLRDICEGYVRQCRKRADMFSEEQLRTIFGNIEDIYRCQKAFVKALEQRFNRERPHLSELGACFLEHQADFQIYSEYCNNHPNACVELSRLTKLSKYVYFFEACRLLQKMIDISLDGFLLTPVQKICKYPLQLAELLKYTHPQHRDFKDVEAALHAMKNVAQLINERKRRLENIDKIAQWQSSIEDWEGEDLLVRSSELIYSGELTRVTQPQAKSQQRMFFLFDHQLIYCKKVPELLCPAAPS

SEQ ID NO: 816146 - protein, 41 aa, Homo sapiens
MGSTFIVCHVPVAVPSEFSITENKPAGPFCRKLKKQRELKR

SEQ ID NO: 816147 - protein, 254 aa, Homo sapiens
MDGGDDGNLIIKKRFVSEAELDERRKRRQEEWEKVRKPEDPEECPEEVYDPRSLYERLQEQKDRKQQEYEEQFKFKNMVRGLDEDETNFLDEVSRQQELIEKQRREEELKELKEYRNNLKKVGISQENKKEVEKKLTVKPIETKNKFSQAKLLAGAVKHKSSESGNSVKRLKPDPEPDDKNQEPSSCKSLGNTSLSGPSIHCPSAAVCIGILPGLGAYSGSSDSESSSDSEGTINATGKIVSSIFRTNTFLEAP

SEQ ID NO: 816148 - protein, 254 aa, Homo sapiens; identical to SEQ ID NO: 816147

SEQ ID NO: 816149 - protein, 254 aa, Homo sapiens; identical to SEQ ID NO: 816147

SEQ ID NO: 816150 - protein, 254 aa, Homo sapiens; identical to SEQ ID NO: 816147

SEQ ID NO: 816151 - protein, 272 aa, Homo sapiens
SGSPEVGRDSIVAIGCFIMDGGDDGNLIIKKRFVSEAELDERRKRRQEEWEKVRKPEDPEECPEEVYDPRSLYERLQEQKDRKQQEYEEQFKFKNMVRGLDEDETNFLDEVSRQQELIEKQRREEELKELKEYRNNLKKVGISQENKKEVEKKLTVKPIETKNKFSQAKLLAGAVKHKSSESGNSVKRLKPDPEPDDKNQEPSSCKSLGNTSLSGPSIHCPSAAVCIGILPGLGAYSGSSDSESSSDSEGTINATGKIVSSIFRTNTFLEAP

SEQ ID NO: 816152 - protein, 254 aa, Homo sapiens; identical to SEQ ID NO: 816147

SEQ ID NO: 816153 - protein, 254 aa, Homo sapiens; identical to SEQ ID NO: 816147

SEQ ID NO: 816154 - protein, 254 aa, Homo sapiens; identical to SEQ ID NO: 816147

SEQ ID NO: 816155 - protein, 254 aa, Homo sapiens; identical to SEQ ID NO: 816147

SEQ ID NO: 816156 - protein, 254 aa, Homo sapiens; identical to SEQ ID NO: 816147

SEQ ID NO: 816157 - protein, 254 aa, Homo sapiens; identical to SEQ ID NO: 816147

SEQ ID NO: 816158 - protein, 254 aa, Homo sapiens; identical to SEQ ID NO: 816147

SEQ ID NO: 816159 - protein, 254 aa, Homo sapiens; identical to SEQ ID NO: 816147

SEQ ID NO: 816160 - protein, 254 aa, Homo sapiens; identical to SEQ ID NO: 816147

SEQ ID NO: 816161 - protein, 254 aa, Homo sapiens; identical to SEQ ID NO: 816147

SEQ ID NO: 816162 - protein, 254 aa, Homo sapiens; identical to SEQ ID NO: 816147

SEQ ID NO: 816163 - protein, 177 aa, Homo sapiens
MVRGLDEDETNFLDEVSRQQELIEKQRREEELKELKEYRNNLKKVGISQENKKEVEKKLTVKPIETKNKFSQAKLLAGAVKHKSSESGNSVKRLKPDPEPDDKNQEPSSCKSLGNTSLSGPSIHCPSAAVCIGILPGLGAYSGSSDSESSSDSEGTINATGKIVSSIFRTNTFLEAP

SEQ ID NO: 816164 - protein, 254 aa, Homo sapiens; identical to SEQ ID NO: 816147

SEQ ID NO: 816165 - protein, 224 aa, Homo sapiens
  misc_feature (82)..(82): Xaa can be any naturally occurring amino acid
MDGGDDGNLIIKKRFVSEAELDERRKRRQEEWEKVRKPEDPEECPEEVYDPRSLYERLQEQKDRKQQEYEEQFKFKNMFDPXTGTHNNLKKVGISQENKKEVEKKLTVKPIETKNKFSQAKLLAGAVKHKSSESGNSVKRLKPDPEPDDKNQEPSSCKSLGNTSLSGPSIHCPSAAVCIGILPGLGAYSGSSDSESSSDSEGTINATGKIVSSIFRTNTFLEAP

SEQ ID NO: 816166 - protein, 260 aa, Homo sapiens
SGSPEVGRDSIVAIGCFIMDGGDDGNLIIKKRFVSEAELDERRKRRQEEWEKVRKPEDPEECPEEVYDPRSLYERLQEQKDRKQQEYEEQFKFKNMVRGLDEDETNFLDEVSRQQELIEKQRREEELKELKEYRNNLKKVGISQENKKEVEKKLTVKPIETKNKFSQAKLLAGAVKHKSSESGNSVCKEPSSCKSLGNTSLSGPSIHCPSAAVCIGILPGLGAYSGSSDSESSSDSEGTINATGKIVSSIFRTNTFLEAP

SEQ ID NO: 816167 - protein, 213 aa, Homo sapiens
  misc_feature (4)..(5): Xaa can be any naturally occurring amino acid
RRMXXGRRGEDPEECPEEVYDPRSLYERLQEQKDRKQQEYEEQFKFKNMVRGLDEDETNFLDEVSRQQELIEKQRREEELKELKEYRNNLKKVGISQENKKEVEKKLTVKPIETKNKFSQAKLLAGAVKHKSSESGNSVCKEPSSCKSLGNTSLSGPSIHCPSAAVCIGILPGLGAYSGSSDSESSSDSEGTINATGKIVSSIFRTNTFLEAP

SEQ ID NO: 816168 - protein, 270 aa, Homo sapiens
MDGGDDGNLIIKKRFVSEAELDERRKRRQEEWEKVRKPEDPEECPEEVYDPRSLYERLQEQKDRKQQEYEEQFKFKNMVRGLDEDETNFLDEVSRQQELIEKQRREEELKELKEYRNNLKKVGISQENKKEVEKKLTVKPIETKNKFSQAKLLAGAVKHKSSESGNSVKRLKPDPEPDDKNQEPSSCKSLGNTSLSGPSIHCPSAAVCIGILPGLGAYSGSSDSESSSDSEGTINATGKIVSSIFRTNTFLEAPLIFFPAPSTRGSFLSP

SEQ ID NO: 816169 - protein, 242 aa, Homo sapiens
MDGGDDGNLIIKKRFVSEAELDERRKRRQEEWEKVRKPEDPEECPEEVYDPRSLYERLQEQKDRKQQEYEEQFKFKNMVRGLDEDETNFLDEVSRQQELIEKQRREEELKELKEYRNNLKKVGISQENKKEVEKKLTVKPIETKNKFSQAKLLAGAVKHKSSESGNSVKRLKPDPEPDDKNQEPSSCKSLGNTSLSGPSIHCPSAAHKEVRAVIGQVLFKHSIVNECVVWFYCIVEHAGEEN

SEQ ID NO: 816170 - protein, 273 aa, Homo sapiens
MDGGDDGNLIIKKRFVSEAELDERRKRRQEEWEKVRKPEDPEECPEEVYDPRSLYERLQEQKDRKQQEYEEQFKFKNMVRGLDEDETNFLDEVSRQQELIEKQRREEELKELKEYRNNLKKVGISQENKKEVEKKLTVKPIETKNKFSQAKLLAGAVKHKSSESGNSVKRLKPDPEPDDKNQEPSSCKSLGNTSLSGPSIHCPSAAVCIGILPGLGAYSGSSDSESSSDSEGTINATGKIVSSIFRTNFLRPSFRLREPPRVMGGRAKVLSKK

SEQ ID NO: 816171 - protein, 294 aa, Homo sapiens
MATHGQTCARPMCIPPSYADLGKAARDIFNKGFGFGLVKLDVKTKSCSGVEFSTSGSSNTDTGKVTGTLETKYKWCEYGLTFTEKWNTDNTLGTEIAIEDQICQGLKLTFDTTFSPNTGKKSGKIKSSYKRECINLGCDVDFDFAGPAIHGSAVFGYEGWLAGYQMTFDSAKSKLTRNNFAVGYRTGDFQLHTNVNDGTEFGGSIYQKVCEDLDTSVNLAWTSGTNCTRFGIAAKYQLDPTASISAKVNNSSLIGVGYTQTLRPGVKLTLSALVDGKSINAGGHKVGLALELEA

SEQ ID NO: 816172 - protein, 318 aa, Homo sapiens
LQLQQLEGEVKETPFRFPSSRGLAMATHGQTCARPMCIPPSYADLGKAARDIFNKGFGFGLVKLDVKTKSCSGVEFSTSGSSNTDTGKVTGTLETKYKWCEYGLTFTEKWNTDNTLGTEIAIEDQICQGLKLTFDTTFSPNTGKKSGKIKSSYKRECINLGCDVDFDFAGPAIHGSAVFGYEGWLAGYQMTFDSAKSKLTRNNFAVGYRTGDFQLHTNVNDGTEFGGSIYQKVCEDLDTSVNLAWTSGTNCTRFGIAAKYQLDPTASISAKVNNSSLIGVGYTQTLRPGVKLTLSALVDGKSINAGGHKVGLALELEA

SEQ ID NO: 816173 - protein, 277 aa, Homo sapiens
GSPKKPLRHTTQHSKAVTPRFPSSRGLAMATHGQTCARPMCIPPSYADLGKAARDIFNKGFGFGLVKLDVKTKSCSGVEFSTSGSSNTDTGKVTGTLETKYKWCEYGLTFTEKWNTDNTLGTEIAIEDQICQGLKLTFDTTFSPNTGKKSGKIKSSYKRECINLGCDVDFDFAGPAIHGSAVFGYEGWLAGYQMTFDSAKSKLTRNNFAVGYRTGDFQLHTNVHAGAALRGSLFRTVVEILPFVTCLPRSLASFGCANIVVLVLWERPAWGGPPGGA

SEQ ID NO: 816174 - protein, 238 aa, Homo sapiens
PPTDGGSPPAGPGRCRSTWPLWSRFPSSRGLAMATHGQTCARPMCIPPSYADLGKAARDIFNKGFGFGLVKLDVKTKSCSGVEFSTSGSSNTDTGKVTGTLETKYKWCEYGLTFTEKWNTDNTLGTEIAIEDQICQGLKLTFDTTFSPNTGKKSGKIKSSYKRECINLGCDVDFDFAGPAIHGSAVFGYEGWLAGYQMTFDSAKSKLTRNNFAVGYRTGDFQLHTNVNDGTRLRGTEL

SEQ ID NO: 816175 - protein, 104 aa, Homo sapiens [sequence omitted]

SEQ ID NO: 816176 - protein, 203 aa, Homo sapiens
  misc_feature (186)..(186): Xaa can be any naturally occurring amino acid
INAECPLWPGARDIFNKGFGFGLVKLDVKTKSCSGVEFSTSGSSNTDTGKVTGTLETKYKWCEYGLTFTEKWNTDNTLGTEIAIEDQICQGLKLTFDTTFSPNTGKKSGKIKSSYKRECINLGCDVDFDFAGPAIHGSAVFGYEGWLAGYQMTFDSAKSKLTRNNFAVGYRTGDFQLHTNVNEWGXEIGRDPFYPEKFCGKIL

SEQ ID NO: 816177 - protein, 294 aa, Homo sapiens; identical to SEQ ID NO: 816171

SEQ ID NO: 816178 - protein, 294 aa, Homo sapiens; identical to SEQ ID NO: 816171

SEQ ID NO: 816179 - protein, 294 aa, Homo sapiens; identical to SEQ ID NO: 816171

SEQ ID NO: 816180 - protein, 294 aa, Homo sapiens; identical to SEQ ID NO: 816171

SEQ ID NO: 816181 - protein, 294 aa, Homo sapiens; identical to SEQ ID NO: 816171

SEQ ID NO: 816182 - protein, 294 aa, Homo sapiens; identical to SEQ ID NO: 816171

SEQ ID NO: 816183 - protein, 294 aa, Homo sapiens; identical to SEQ ID NO: 816171

SEQ ID NO: 816184 - protein, 294 aa, Homo sapiens; identical to SEQ ID NO: 816171

SEQ ID NO: 816185 - protein, 246 aa, Homo sapiens
MATHGQTCARPMCIPPSYADLGKAARDIFNKGFGFGLVKLDVKTKSCSGVEFSTSGSSNTDTGKVTGTLETKYKWCEYGLTFTEKWNTDNTLGTEIAIEDQICQGLKLTFDTTFSPNTGKKSGKIKSSYKRECINLGCDVDFDFAGPAIHGSAVFGYEGWLAGYQMTFDSAKSKLTRNNFAVGYRTGDFQLHTNVNDGTEFGGSIYQKVCEDLDTSVNLAWTSGTNCTRFGIAAKYQLDPTASISV

SEQ ID NO: 816186 - protein, 335 aa, Homo sapiens
RWPRCPAALAPLCPGSPFGPLTPAYRTSCPSRRFPSSRGLAMATHGQTCARPMCIPPSYADLGKAARDIFNKGFGFGLVKLDVKTKSCSGVEFSTSGSSNTDTGKVTGTLETKYKWCEYGLTFTEKWNTDNTLGTEIAIEDQICQGLKLTFDTTFSPNTGKKSGKIKSSYKRECINLGCDVDFDFAGPAIHGSAVFGYEGWLAGYQMTFDSAKSKLTRNNFAVGYRTGDFQLHTNVNDGTEFGGSIYQKVCEDLDTSVNLAWTSGTNCTRFGIAAKYQLDPTASISAKVNNSSLIGVGYTQTLRPGVKLTLSALVDGKSINAGGHKVGLALELEA

SEQ ID NO: 816187 - protein, 322 aa, Homo sapiens
GSPKKPLRHTTQHSKAVTPRFPSSRGLAMATHGQTCARPMCIPPSYADLGKAARDIFNKGFGFGLVKLDVKTKSCSGVEFSTSGSSNTDTGKVTGTLETKYKWCEYGLTFTEKWNTDNTLGTEIAIEDQICQGLKLTFDTTFSPNTGKKSGKIKSSYKRECINLGCDVDFDFAGPAIHGSAVFGYEGWLAGYQMTFDSAKSKLTRNNFAVGYRTGDFQLHTNVNDGTEFGGSIYQKVCEDLDTSVNLAWTSGTNCTRFGIAAKYQLDPTASISAKVNNSSLIGVGYTQTLRPGVKLTLSALVDGKSINAGGHKVGLALELEA

SEQ ID NO: 816188 - protein, 317 aa, Homo sapiens
GTRITFNGPPQDTTRFPSSRGLAMATHGQTCARPMCIPPSYADLGKAARDIFNKGFGFGLVKLDVKTKSCSGVEFSTSGSSNTDTGKVTGTLETKYKWCEYGLTFTEKWNTDNTLGTEIAIEDQICQGLKLTFDTTFSPNTGKKSGKIKSSYKRECINLGCDVDFDFAGPAIHGSAVFGYEGWLAGYQMTFDSAKSKLTRNNFAVGYRTGDFQLHTNVNDGTEFGGSIYQKVCEDLDTSVNLAWTSGTNCTRFGIAAKYQLDPTASISAKVNNSSLIGVGYTQTLRPGVKLTLSALVDGKSINAGGHKVGLALELEA

SEQ ID NO: 816189 - protein, 319 aa, Homo sapiens
MATHGQTCARPMCIPPSYADLGKAARDIFNKGFGFGLVKLDVKTKSCSGVEFSTSGSSNTDTGKVTGTLETKYKWCEYGLTFTEKWNTDNTLGTEIAIEDQICQGLKLTFDTTFSPNTGKKSGKIKSSYKRECINLGCDVDFDFAGPAIHGSAVFGYEGWLAGYQMTFDSAKSKLTRNNFAVGYRTGDFQLHTNVNDGTEFGGSIYQKVCEDLDTSVNLAWTSGTNCTRFGIAAKYQLDPTASISAKVNNSSLIGVGYTQTLRPAGVKLNSLSGRWEEHNVGKGGRLEWRLSVKNLDGSEIGKIHGEKGFSRKIKGSEG

SEQ ID NO: 816190 - protein, 296 aa, Homo sapiens
TLEDSRRRTMARPMCIPPSYADLGKAARDIFNKGFGFGLVKLDVKTKSCSGVEFSTSGSSNTDTGKVTGTLETKYKWCEYGLTFTEKWNTDNTLGTEIAIEDQICQGLKLTFDTTFSPNTGKKSGKIKSSYKRECINLGCDVDFDFAGPAIHGSAVFGYEGWLAGYQMTFDSAKSKLTRNNFAVGYRTGDFQLHTNVNDGTEFGGSIYQKVCEDLDTSVNLAWTSGTNCTRFGIAAKYQLDPTASISAKVNNSSLIGVGYTQTLRPGVKLTLSALVDGKSINAGGHKVGLALELEA

SEQ ID NO: 816191 - protein, 273 aa, Homo sapiens
RGSAYVWTHQEDCFGLVKLDVKTKSCSGVEFSTSGSSNTDTGKVTGTLETKYKWCEYGLTFTEKWNTDNTLGTEIAIEDQICQGLKLTFDTTFSPNTGKKSGKIKSSYKRECINLGCDVDFDFAGPAIHGSAVFGYEGWLAGYQMTFDSAKSKLTRNNFAVGYRTGDFQLHTNVNDGTEFGGSIYQKVCEDLDTSVNLAWTSGTNCTRFGIAAKYQLDPTASISAKVNNSSLIGVGYTQTLRPGVKLTLSALVDGKSINAGGHKVGLALELEA

SEQ ID NO: 816192 - protein, 282 aa, Homo sapiens
PIQATWICHCFSRECLGEAGFGFGLVKLDVKTKSCSGVEFSTSGSSNTDTGKVTGTLETKYKWCEYGLTFTEKWNTDNTLGTEIAIEDQICQGLKLTFDTTFSPNTGKKSGKIKSSYKRECINLGCDVDFDFAGPAIHGSAVFGYEGWLAGYQMTFDSAKSKLTRNNFAVGYRTGDFQLHTNVNDGTEFGGSIYQKVCEDLDTSVNLAWTSGTNCTRFGIAAKYQLDPTASISAKVNNSSLIGVGYTQTLRPGVKLTLSALVDGKSINAGGHKVGLALELEA

SEQ ID NO: 816193 - protein, 234 aa, Homo sapiens
MATHGQTCARPMCIPPSYADLGKAARDIFNKGFGFGLVKLDVKTKSCSGVEFSTSGSSNTDTGKVTGTLETKYKWCEYGLTFTEKWNTDNTLGTEIAIEDQICQGLKLTFDTTFSPNTGKKSGKIKSSYKRECINLGCDVDFDFAGPAIHGSAVFGYEGWLAGYQMTFDSAKSKLTRNNFAVGYRTGDFQLHTNVNDGTEFGGSIYQKVCEDALQLNISWIPLLPFLQKSTTLA

SEQ ID NO: 816194 - protein, 255 aa, Homo sapiens
MLVIPATQEAEEFSTSGSSNTDTGKVTGTLETKYKWCEYGLTFTEKWNTDNTLGTEIAIEDQICQGLKLTFDTTFSPNTGKKSGKIKSSYKRECINLGCDVDFDFAGPAIHGSAVFGYEGWLAGYQMTFDSAKSKLTRNNFAVGYRTGDFQLHTNVNDGTEFGGSIYQKVCEDLDTSVNLAWTSGTNCTRFGIAAKYQLDPTASISAKVNNSSLIGVGYTQTLRPGVKLTLSALVDGKSINAGGHKVGLALELEA

SEQ ID NO: 816195 - protein, 255 aa, Homo sapiens; identical to SEQ ID NO: 816194

SEQ ID NO: 816196 - protein, 283 aa, Homo sapiens
MCIPPSYADLGKAARDIFNKGFGFGLVKLDVKTKSCSGVEFSTSGSSNTDTGKVTGTLETKYKWCEYGLTFTEKWNTDNTLGTEIAIEDQICQGLKLTFDTTFSPNTGKKSGKIKSSYKRECINLGCDVDFDFAGPAIHGSAVFGYEGWLAGYQMTFDSAKSKLTRNNFAVGYRTGDFQLHTNVNDGTEFGGSIYQKVCEDLDTSVNLAWTSGTNCTRFGIAAKYQLDPTASISAKVNNSSLIGVGYTQTLRPGVKLTLSALVDGKSINAGGHKVGLALELEA

SEQ ID NO: 816197 - protein, 104 aa, Homo sapiens [sequence omitted]

SEQ ID NO: 816198 - protein, 227 aa, Homo sapiens
ESALYLNIRVYGLTFTEKWNTDNTLGTEIAIEDQICQGLKLTFDTTFSPNTGKKSGKIKSSYKRECINLGCDVDFDFAGPAIHGSAVFGYEGWLAGYQMTFDSAKSKLTRNNFAVGYRTGDFQLHTNVNDGTEFGGSIYQKVCEDLDTSVNLAWTSGTNCTRFGIAAKYQLDPTASISAKVNNSSLIGVGYTQTLRPGVKLTLSALVDGKSINAGGHKVGLALELEA

SEQ ID NO: 816199 - protein, 185 aa, Homo sapiens
DAWVDPRVRGKKSGKIKSSYKRECINLGCDVDFDFAGPAIHGSAVFGYEGWLAGYQMTFDSAKSKLTRNNFAVGYRTGDFQLHTNVNDGTEFGGSIYQKVCEDLDTSVNLAWTSGTNCTRFGIAAKYQLDPTASISAKVNNSSLIGVGYTQTLRPGVKLTLSALVDGKSINAGGHKVGLALELEA

SEQ ID NO: 816200 - protein, 184 aa, Homo sapiens
MTPSAPIRGKKSGKIKSSYKRECINLGCDVDFDFAGPAIHGSAVFGYEGWLAGYQMTFDSAKSKLTRNNFAVGYRTGDFQLHTNVNDGTEFGGSIYQKVCEDLDTSVNLAWTSGTNCTRFGIAAKYQLDPTASISAKVNNSSLIGVGYTQTLRPGVKLTLSALVDGKSINAGGHKVGLALELEA

SEQ ID NO: 816201 - protein, 123 aa, Homo sapiens
MATHGQTCARPMCIPPSYADLGKAARDIFNKGFGFGLVKLDVKTKSCSGVEFSTSGSSNTDTGKVTGTLETKYKWCEYGLTFTEKWNTDNTLGTEIAIEDQICQGLKLTFDTTFSPNTGPNQS

SEQ ID NO: 816202 - protein, 206 aa, Homo sapiens
MATHGQTCARPMCIPPSYADLGKAARDIFNKGFGFGLVKLDVKTKSCSGVEFSTSGSSNTDTGKVTGTLETKYKWCEYGLTFTEKWNTDNTLGTEIAIEDQICQGLKLTFDTTFSPNTGKKSGKIKSSYKRECINLGCDVDFDFAGPAIHGSAVFGYEGWLAGYQMTFDSAKSKLTRNNFAVGYRTGDFQLHTNVNDGTRLRGTEL

SEQ ID NO: 816203 - protein, 217 aa, Homo sapiens
  misc_feature (200)..(200): Xaa can be any naturally occurring amino acid
MATHGQTCARPMCIPPSYADLGKAARDIFNKGFGFGLVKLDVKTKSCSGVEFSTSGSSNTDTGKVTGTLETKYKWCEYGLTFTEKWNTDNTLGTEIAIEDQICQGLKLTFDTTFSPNTGKKSGKIKSSYKRECINLGCDVDFDFAGPAIHGSAVFGYEGWLAGYQMTFDSAKSKLTRNNFAVGYRTGDFQLHTNVNEWGXEIGRDPFYPEKFCGKIL

SEQ ID NO: 816204 - protein, 195 aa, Homo sapiens
MATHGQTCARPMCIPPSYADLGKAARDIFNKGFGFGLVKLDVKTKSCSGVEFSTSGSSNTDTGKVTGTLETKYKWCEYGLTFTEKWNTDNTLGTEIAIEDQICQGLKLTFDTTFSPNTGKKSGKIKSSYKRECINLGCDVDFDFAGPAIHGSAVFGYEGWLAGYQMTFDSAKSKLTRNNFAVGYRTGDFQLHTNV

SEQ ID NO: 816205 - protein, 156 aa, Homo sapiens
MLVIPATQEAEEFSTSGSSNTDTGKVTGTLETKYKWCEYGLTFTEKWNTDNTLGTEIAIEDQICQGLKLTFDTTFSPNTGKKSGKIKSSYKRECINLGCDVDFDFAGPAIHGSAVFGYEGWLAGYQMTFDSAKSKLTRNNFAVGYRTGDFQLHTNV

SEQ ID NO: 816206 - protein, 85 aa, Homo sapiens
PGGQRRGPVWERTGLRRAERCLLHFALQLLQLQPDRERAKRLQQLAERWRRPPSGHHQIPLFPRPRHGDPRTDLRASNVYSSIIC

SEQ ID NO: 816207 - protein, 108 aa, Homo sapiens
MADPRVRQIKIKTGVVKRLVKEKVMYEKEAKQQEEKIEKMRAEDGENYDIKKQAEILQESRMMIPDCQRRLEAAYLDLQRILENEKDLEEAEEYKEARLVLDSVKLEA

SEQ ID NO: 816208 - protein, 66 aa, Homo sapiens
HARRRPRLNSRSLCASPSTVTPALRPSFSRRSRDHGRSSRETDQDQDRRGEARRGLNMLPSLVWNS

SEQ ID NO: 816209 - protein, 112 aa, Homo sapiens
  misc_feature (13)..(14): Xaa can be any naturally occurring amino acid
GAPGPGQPGSVFXXMMRFGTRMLVKEKVMYEKEAKQQEEKIEKMRAEDGENYDIKKQAEILQESRMMIPDCQRRLEAAYLDLQRILENEKDLEEAEEYKEARLVLDSVKLEA

SEQ ID NO: 816210 - protein, 108 aa, Homo sapiens; identical to SEQ ID NO: 816207

SEQ ID NO: 816211 - protein, 133 aa, Homo sapiens
VKDHNMKKKSGAVAAVPLLRLVKEKVMYEKEAKQQEEKIEKMRAEDGENYDIKKQAGLQLLASSDPPTPASQSPGMISAEILQESRMMIPDCQRRLEAAYLDLQRILENEKDLEEAEEYKEARLVLDSVKLEA

SEQ ID NO: 816212 - protein, 129 aa, Homo sapiens
MADPRVRQIKIKTGVVKRLVKEKVMYEKEAKQQEEKIEKMRAEDGENYDIKKQAEILQESRMMIPDCQRRLEAAYLDLQRILVSKDFCVMFKFFFSIQYMESQKFKYLTLRTSWQYFLFTCPLYRYILK

SEQ ID NO: 816213 - protein, 163 aa, Homo sapiens
MADPRVRQIKIKTGVVKRLVKEKVMYEKEAKQQEEKKKKKKKLVCGGARLGPLRERFLEDTHSGVGARGGPRGLGEPGPKSAGAKRRETAGAMRDKRRGASSLTKYYIKKARAGGEHQRGVFLRTKLPKSGGTREGPIHGRLISTGERYQGETSHIKNIRPGA

SEQ ID NO: 816214 - protein, 108 aa, Homo sapiens; identical to SEQ ID NO: 816207

SEQ ID NO: 816215 - protein, 108 aa, Homo sapiens; identical to SEQ ID NO: 816207

SEQ ID NO: 816216 - protein, 116 aa, Homo sapiens
MRAGDHAYIAAASARRPPRLPRLSAPPSRGARGTMADPRVRQIKIKTGVVKRLVKEKVMYEKEAKQQEEKIEKMRAEDGENYDIKKQAEILQESRMMIPDCQRRLEAAYLDLQRIL

SEQ ID NO: 816217 - protein, 102 aa, Homo sapiens
MADPRVRQIKIKTGVVKRLVKEKVMYEKEAKQQEEKIEKMRAEDGENYDIKKQAEILQESRMMIPDCQRRLEAAYLDLQRILEMKKTWWKLRSNKEHALDTE

SEQ ID NO: 816218 - protein, 108 aa, Homo sapiens; identical to SEQ ID NO: 816207

SEQ ID NO: 816219 - protein, 122 aa, Homo sapiens
LGIMLTRTSWFHGFFSWFSSSICWSTLSKFLRLVKEKVMYEKEAKQQEEKIEKMRAEDGENYDIKKQAEILQESRMMIPDCQRRLEAAYLDLQRILENEKDLEEAEEYKEARLVLDSVKLEA

SEQ ID NO: 816220 - protein, 113 aa, Homo sapiens
  misc_feature (15)..(15): Xaa can be any naturally occurring amino acid
GRPTWPAVSGLFTGXWGLENQILLVKEKVMYEKEAKQQEEKIEKMRAEDGENYDIKKQAEILQESRMMIPDCQRRLEAAYLDLQRILENEKDLEEAEEYKEARLVLDSVKLEA

SEQ ID NO: 816221 - protein, 113 aa, Homo sapiens; identical to SEQ ID NO: 816220
  misc_feature (15)..(15): Xaa can be any naturally occurring amino acid

SEQ ID NO: 816222 - protein, 76 aa, Homo sapiens
  misc_feature (10)..(10): Xaa can be any naturally occurring amino acid
  misc_feature (12)..(13): Xaa can be any naturally occurring amino acid
  misc_feature (18)..(18): Xaa can be any naturally occurring amino acid
  misc_feature (20)..(20): Xaa can be any naturally occurring amino acid
GGAVWKEFWXFXXQLRAXYXLAEILQESRMMIPDCQRRLEAAYLDLQRILENEKDLEEAEEYKEARLVLDSVKLEA

SEQ ID NO: 816223 - protein, 139 aa, Homo sapiens
GAQVYFSLQTCFCGPQRDGEPGGCGKKSLGFQGRIFSRPRKEKPLPRERLVKEKVMYEKEAKQQEEKIEKMRAEDGENYDIKKQAEILQESRMMIPDCQRRLEAAYLDLQRILENEKDLEEAEEYKEARLVLDSVKLEA

SEQ ID NO: 816224 - protein, 108 aa, Homo sapiens; identical to SEQ ID NO: 816207

SEQ ID NO: 816225 - protein, 108 aa, Homo sapiens; identical to SEQ ID NO: 816207

SEQ ID NO: 816226 - protein, 51 aa, Homo sapiens
ASRNTTLRIMNPQCHSEEKSLVIAEQFLPQRLMYLPTPNHDFTLPKAHVLM

SEQ ID NO: 816227 - protein, 376 aa, Homo sapiens
MESYDIIANQPVVIDNGSGVIKAGFAGDQIPKYCFPNYVGRPKHMRVMAGALEGDLFIGPKAEEHRGLLTIRYPMEHGVVRDWNDMERIWQYVYSKDQLQTFSEEHPVLLTEAPLNPSKNREKAAEVFFETFNVPALFISMQAVLSLYATGRTTGVVLDSGDGVTHAVPIYEGFAMPHSIMRVDIAGRDVSRYLRLLLRKEGVDFHTSAEFEVVRTIKERACYLSINPQKDEALETEKVQYTLPDGSTLDVGPARFRAPELLFQPDLVGDESEGLHEVVAFAIHKSDMDLRRTLFANIVLSGGSTLFKGFGDRLLSEVKKLAPKDIKIKISAPQERLYSTWIGGSILASLDTFKKMWVSKKEYEEDGSRAIHRKTF

SEQ ID NO: 816228 - protein, 376 aa, Homo sapiens; identical to SEQ ID NO: 816227

SEQ ID NO: 816229 - protein, 454 aa, Homo sapiens
MESYDIIANQPVVIDNGSGVIKAGFAGDQIPKYCFPNYVGRPKHMRVMAGALEGDLFIGPKAEEHRGLLTIRYPMEHGVVRDWNDMERIWQYVYSKDQLQTFSEEHPVLLTEAPLNPSKNREKAAEVFFETFNVPALFISMQAVLSLWVLPKPGLPESCPPCAVLLAMTRVCLPWKNSPLMTVPLGSPSCPLFRLDNADVPGFLPWVRGPRASVAEVRGCCPGDRYATGRTTGVVLDSGDGVTHAVPIYEGFAMPHSIMRVDIAGRDVSRYLRLLLRKEGVDFHTSAEFEVVRTIKERACYLSINPQKDEALETEKVQYTLPDGSTLDVGPARFRAPELLFQPDLVGDESEGLHEVVAFAIHKSDMDLRRTLFANIVLSGGSTLFKGFGDRLLSEVKKLAPKDIKIKISAPQERLYSTWIGGSILASLDTFKKMWVSKKEYEEDGSRAIHRKTF

SEQ ID NO: 816230 - protein, 266 aa, Homo sapiens
MESYDIIANQPVVIDNGSGVIKAGFAGDQIPKYCFPNYVGRPKHMRVMAGALEGDLFIGPKAEEHRGLLTIRYPMEHGVVRDWNDMERIWQYVYSKDQLQTFSEEHPVLLTEAPLNPSKNREKAAEVFFETFNVPALFISMQAVLSLARKGLTSIPRLSLRLSGQSKSERATCPSTHRRMRLWRRRRCSTRCQTAARLMWGLHDSGPPSCCSSRTLWGMRVRGSMRWWPSPYTSPTWTCAGRCSPTSCSQVAQRFSKASETDYSVK

SEQ ID NO: 816231 - protein, 376 aa, Homo sapiens; identical to SEQ ID NO: 816227

SEQ ID NO: 816232 - protein, 142 aa, Homo sapiens
YKDRPISDCLLPAANRSCKVELQERIKAEEQRRADVQDRLERTMRAMHMTKEALEHLASKLDHITVADSAPEEAPPRAPQDVRGSSTITQVDSRPKVHSREPTPCPVQYMRGPNTGETPTCSAGPCTRISAPQERLYSTWIG

SEQ ID NO: 816233 - protein, 376 aa, Homo sapiens; identical to SEQ ID NO: 816227

SEQ ID NO: 816234 - protein, 376 aa, Homo sapiens; identical to SEQ ID NO: 816227

SEQ ID NO: 816235 - protein, 376 aa, Homo sapiens; identical to SEQ ID NO: 816227

SEQ ID NO: 816236 - protein, 376 aa, Homo sapiens; identical to SEQ ID NO: 816227

SEQ ID NO: 816237 - protein, 376 aa, Homo sapiens; identical to SEQ ID NO: 816227

SEQ ID NO: 816238 - protein, 343 aa, Homo sapiens
MESYDIIANQPVVIDNGSGVIKAGFAGDQIPKYCFPNYVGRPKHMRVMAGALEGDLFIGPKAEEHRGLLTIRYPMEHGVVRDWNDMERIWQYVYSKDQLQTFSEEHPVLLTEAPLNPSKNREKAAEVFFETFNVPALFISMQAVLSLYATGRTTGVVLDSGDGVTHAVPIYEGFAMPHSIMRVDIAGRDVSRYLRLLLRKEGVDFHTSAEFEVVRTIKERACYLSINPQKDEALETEKVQYTLPDGSTLDVGPARFRAPELLFQPDLVGDESEGLHEVVAFAIHKSDMDLRRTLFANIVLSGGSTLFKGFGDRLLSEVKKLAPKDIKIKISAPQERLYSTWIG

SEQ ID NO: 816239 - protein, 347 aa, Homo sapiens
MESYDIIANQPVVIDNGSGVIKAGFAGDQIPKYCFPNYVGRPKHMRVMAGALEGDLFIGPKAEEHRGLLTIRYPMEHGVVRDWNDMERIWQYVYSKDQLQTFSEEHPVLLTEAPLNPSKNREKAAEVFFETFNVPALFISMQAVLSLYATGRTTGVVLDSGDGVTHAVPIYEGFAMPHSIMRVDIAGRDVSRYLRLLLRKEGVDFHTSAEFEVVRTIKERACYLSINPQKDEALETEKVQYTLPDGSTLDVGPARFRAPELLFQPDLVGDESEGLHEVVAFAIHKSDMDLRRTLFARAEDARWLEPLHYPFQSTSSTCSSLYPRHPGWERVDAHHLLRGSHLIRSQT

SEQ ID NO: 816240 - protein, 128 aa, Homo sapiens
MESYDIIANQPVVIDNGSGVIKAGFAGDQIPKYCFPNYVGRPKHMRVMAGALEGDLFIGPKAEEHRGLLTIRYPMEHGVVRDWNDMERIWQYVYSKDQLQTFSEEHPVLLTEAPAQPTELIIFYIFFW

SEQ ID NO: 816241 - protein, 35 aa, Homo sapiens
DWNDMERIWQYVYSKDQLQTFSEEVWRLPLLHALH

SEQ ID NO: 816242 - protein, 1807 aa, Homo sapiens
MEPWSSRWKTKRWLWDFTVTTLALTFLFQAREVRGAAPVDVLKALDFHNSPEGISKTTGFCTNRKNSKGSDTAYRVSKQAQLSAPTKQLFPGGTFPEDFSILFTVKPKKGIQSFLLSIYNEHGIQQIGVEVGRSPVFLFEDHTGKPAPEDYPLFRTVNIADGKWHRVAISVEKKTVTMIVDCKKKTTKPLDRSERAIVDTNGITVFGTRILDEEVFEGDIQQFLITGDPKAAYDYCEHYSPDCDSSAPKAAQAQEPQIDEYAPEDIIEYDYEYGEAEYKEAESVTEGPTVTEETIAQTEANIVDDFQEYNYGTMESYQTEAPRHVSGTNEPNPVEEIFTEEYLTGEDYDSQRKNSEDTLYENKEIDGRDSDLLVDGDLGEYDFYEYKEYEDKPTSPPNEEFGPGVPAETDITETSINGHGAYGEKGQKGEPAVVEPGMLVEGPPGPAGPAGIMGPPGLQGPTGPPGDPGDRGPPGRPGLPGADGLPGPPGTMLMLPFRYGGDGSKGPTISAQEAQAQAILQQARIALRGPPGPMGLTGRPGPVGGPGSSGAKGESGDPGPQGPRGVQGPPGPTGKPGKRGRPGADGGRGMPGEPGAKGDRGFDGLPGLPGDKGHRGERGPQGPPGPPGDDGMRGEDGEIGPRGLPGEAGPRGLLGPRGTPGAPGQPGMAGVDGPPGPKGNMGPQGEPGPPGQQGNPGPQGLPGPQGPIGPPGEKGPQGKPGLAGLPGADGPPGHPGKEGQSGEKGALGPPGPQGPIGYPGPRGVKGADGVRGLKGSKGEKGEDGFPGFKGDMGLKGDRGEVGQIGPRGEDGPEGPKGRAGPTGDPGPSGQAGEKGKLGVPGLPGYPGRQGPKGSTGFPGFPGANGEKGARGVAGKPGPRGQRGPTGPRGSRGARGPTGKPGPKGTSGGDGPPGPPGERGPQGPQGPVGFPGPKGPPGPPGKDGLPGHPGQRGETGFQGKTGPPGPGGVVGPQGPTGETGPIGERGHPGPPGPPGEQGLPGAAGKEGAKGDPGPQGISGKDGPAGLRGFPGERGLPGAQDGAPGLKGGEGPQGPPGPVGSPGERGSAGTAGPIGLPGRPGPQGPPGPAGEKGAPGEKGPQGPAGRDGVQGPVGLPGPAGPAGSPGEDGDKGEIGEPGQKGSKGDKGENGPPGPPGLQGPVGAPGIAGGDGEPGPRGQQGMFGQKGDEGARGFPGPPGPIGLQGLPGPPGEKGENGDVGPMGPPGPPGPRGPQGPNGADGPQGPPGSVGSVGGVGEKGEPGEAGNPGPPGEAGVGGPKGERGEKGEAGPPGAAGPPGAKGPPGDDGPKGNPGPVGFPGDPGPPGEPGPAGQDGVGGDKGEDGDPGQPGPPGPSGEAGPPGPPGKRGPPGAAGAEGRQGEKGAKGEAGAEGPPGKTGPVGPQGPAGKPGPEGLRGIPGPVGEQGLPGAAGQDGPPGPMGPPGLPGLKGDPGSKGEKGHPGLIGLIGPPGEQGEKGDRGLPGTQGSPGAKGDGGIPGPAGPLGPPGPPGLPGPQGPKGNKGSTGPAGQKGDSGLPGPPGPPGPPGEVIQPLPILSSKKTRRHTEGMQADADDNILDYSDGMEEIFGSLNSLKQDIEHMKFPMGTQTNPARTCKDLQLSHPDFPDGEYWIDPNQGCSGDSFKVYCNFTSGGETCIYPDKKSEGVRISSWPKEKPGSWFSEFKRGKLLSYLDVEGNSINMVQMTFLKLLTASARQNFTYHCHQSAAWYDVSSGSYDKALRFLGSNDEEMSYDNNPFIKTLYDGCASRKGYEKTVIEINTPKIDQVPIVDVMINDFGDQNQKFGFEVGPVCFLG

SEQ ID NO: 816243 - protein, 246 aa, Homo sapiens
MQADADDNILDYSDGMEEIFGSLNSLKQDIEHMKFPMGTQTNPARTCKDLQLSHPDFPDGEYWIDPNQGCSGDSFKVYCNFTSGGETCIYPDKKSEGVRISSWPKEKPGSWFSEFKRGKLLSYLDVEGNSINMVQMTFLKLLTASARQNFTYHCHQSAAWYDVSSGSYDKALRFLGSNDEEMSYDNNPFIKTLYDGCASRKGYEKTVIEINTPKIDQVPIVDVMINDFGDQNQKFGFEVGPVCFLG

SEQ ID NO: 816244 - protein, 222 aa, Homo sapiens
RGSGIEWHMKFPMGTQTNPARTCKDLQLSHPDFPDGEYWIDPNQGCSGDSFKVYCNFTSGGETCIYPDKKSEGVRISSWPKEKPGSWFSEFKRGKLLSYLDVEGNSINMVQMTFLKLLTASARQNFTYHCHQSAAWYDVSSGSYDKALRFLGSNDEEMSYDNNPFIKTLYDGCASRKGYEKTVIEINTPKIDQVPIVDVMINDFGDQNQKFGFEVGPVCFLG

SEQ ID NO: 816245 - protein, 1611 aa, Homo sapiens
MEPWSSRWKTKRWLWDFTVTTLALTFLFQAREVRGAAPVDVLKALDFHNSPEGISKTTGFCTNRKNSKGSDTAYRVSKQAQLSAPTKQLFPGGTFPEDFSILFTVKPKKGIQSFLLSIYNEHGIQQIGVEVGRSPVFLFEDHTGKPAPEDYPLFRTVNIADGKWHRVAISVEKKTVTMIVDCKKKTTKPLDRSERAIVDTNGITVFGTRILDEEVFEGDIQQFLITGDPKAAYDYCEHYSPDCDSSAPKAAQAQEPQIDEYAPEDIIEYDYEYGEAEYKEAESVTEGPTVTEETIAQTEANIVDDFQEYNYGTMESYQTEAPRHVSGTNEPNPVEEIFTEEYLTGEDYDSQRKNSEDTLYENKEIDGRDSDLLVDGDLGEYDFYEYKEYEDKPTSPPNEEFGPGVPAETDITETSINGHGAYGEKGQKGEPAVVEPGMLVEGPPGPAGPAGIMGPPGLQGPTGPPGDPGDRGPPGRPGLPGADGLPGPPGTMLMLPFRYGGDGSKGPTISAQEAQAQAILQQARIALRGPPGPMGLTGRPGPVGGPGSSGAKGESGDPGPQGPRGVQGPPGPTGKPGKRGRPGADGGRGMPGEPGAKGDRGFDGLPGLPGDKGHRGERGPQGPPGPPGDDGMRGEDGEIGPRGLPGEAGPRGLLGPRGTPGAPGQPGMAGVDGPPGPKGNMGPQGEPGPPGQQGNPGPQGLPGPQGPIGPPGEKGPQGKPGLAGLPGADGPPGHPGKEGQSGEKGALGPPGPQGPIGYPGPRGVKGADGVRGLKGSKGEKGEDGFPGFKGDMGLKGDRGEVGQIGPRGEDGPEGPKGRAGPTGDPGPSGQAGEKGKLGVPGLPGYPGRQGPKGSTGFPGFPGANGEKGARGVAGKPGPRGQRGPTGPRGSRGARGPTGKPGPKGTSGGDGPPGPPGERGPQGPQGPVGFPGPKGPPGPPGKDGLPGHPGQRGETGFQGKTGPPGPGGVVGPQGPTGETGPIGERGHPGPPGPPGEQGLPGAAGKEGAKGDPGPQGISGKDGPAGLRGFPGERGLPGAQDGAPGLKGGEGPQGPPGPVGSPGERGSAGTAGPIGLPGRPGPQGPPGPAGEKGAPGEKGPQGPAGRDGVQGPVGLPGPAGPAGSPGEDGDKGEIGEPGQKGSKGDKGENGPPGPPGLQGPVGAPGIAGGDGEPGPRGQQGMFGQKGDEGARGFPGPPGPIGLQGLPGPPGEKGENGDVGPMGPPGPPGPRGPQGPNGADGPQGPPGSVGSVGGVGEKGEPGEAGNPGPPGEAGVGGPKGERGEKGEAGPPGAAGPPGAKGPPGDDGPKGNPGPVGFPGDPGPPGEPGPAGQDGVGGDKGEDGDPGQPGPPGPSGEAGPPGPPGKRGPPGAAGAEGRQGEKGAKGEAGAEGPPGKTGPVGPQGPAGKPGPEGLRGIPGPVGEQGLPGAAGQDGPPGPMGPPGLPGLKGDPGSKGEKGHPGLIGLIGPPGEQGEKGDRGLPGTQGSPGAKGDGGIPGPAGPLGPPGPPGLPGPQGPKGNKGSTGPAGQKGDSGLPGPPGPPGPPGEVIQPLPILSSKKTRRHTEGMQADADDNILDYSDGMEEIFGSLNSLKQDIEHMKFPMGTQTNPFCATCKF

SEQ ID NO: 816246 - protein, 273 aa, Homo sapiens [sequence omitted]

SEQ ID NO: 816247 - protein, 738 aa, Homo sapiens
MEPWSSRWKTKRWLWDFTVTTLALTFLFQAREVRGAAPVDVLKALDFHNSPEGISKTTGFCTNRKNSKGSDTAYRVSKQAQLSAPTKQLFPGGTFPEDFSILFTVKPKKGIQSFLLSIYNEHGIQQIGVEVGRSPVFLFEDHTGKPAPEDYPLFRTVNIADGKWHRVAISVEKKTVTMIVDCKKKTTKPLDRSERAIVDTNGITVFGTRILDEEVFEGDIQQFLITGDPKAAYDYCEHYSPDCDSSAPKAAQAQEPQIDEYAPEDIIEYDYEYGEAEYKEAESVTEGPTVTEETIAQTEANIVDDFQEYNYGTMESYQTEAPRHVSGTNEPNPVEEIFTEEYLTGEDYDSQRKNSEDTLYENKEIDGRDSDLLVDGDLGEYDFYEYKEYEDKPTSPPNEEFGPGVPAETDITETSINGHGAYGEKGQKGEPAVVEPGMLVEGPPGPAGPAGIMGPPGLQGPTGPPGDPGDRGPPGRPGLPGADGLPGPPGTMLMLPFRYGGDGSKGPTISAQEAQAQAILQQARIALRGPPGPMGLTGRPGPVGGPGSSGAKGESGDPGPQGPRGVQGPPGPTGKPGKRGRPGADGGRGMPGEPGAKGDRGFDGLPGLPGDKGHRGERGPQGPPGPPGDDGMRGEDGEIGPRGLPGEAGMAGVDGPPGPKGNMGPQGEPGPPGQQGNPGPQGLPGPQGPIGPPGEKVSFSFSLFYKKVIKFACDKRFVGRHDERKVVKLSLPLYLIYE

SEQ ID NO: 816248 - protein, 108 aa, Homo sapiens
MTPLRRGQSPPAEKRLKGDAWRDGGGPTRGPAARAAVLALLLLLLAPLPPGAPPGADAYFPEERWSPESPLQAPRVLIALLARNAAHALPTTLGALERLRHPRERTAL

SEQ ID NO: 816249 - protein, 622 aa, Homo sapiens
MAAAPRAGRRRGQPLLALLLLLLAPLPPGAPPGADAYFPEERWSPESPLQAPRVLIALLARNAAHALPTTLGALERLRHPRERTALWVATDHNMDNTSTVLREWLVAVKSLYHSVEWRPAEEPRSYPDEEGPKHWSDSRYEHVMKLRQAALKSARDMWADYILFVDADNLILNPDTLSLLIAENKTVVAPMLDSRAAYSNFWCGMTSQGYYKRTPAYIPIRKRDRRGCFAVPMVHSTFLIDLRKAASRNLAFYPPHPDYTWSFDDIIVFAFSCKQAEVQMYVCNKEEYGFLPVPLRAHSTLQDEAESFMHVQLEVMVKHPPAEPSRFISAPTKTPDKMGFDEVFMINLRRRQDRRERMLRALQAQEIECRLVEAVDGKAMNTSQVEALGIQMLPGYRDPYHGRPLTKGELGCFLSHYNIWKEVVDRGLQKSLVFEDDLRFEIFFKRRLMNLMRDVEREGLDWDLIYVGRKRMQVEHPEKAVPRVRNLVEADYSYWTLAYVISLQGARKLLAAEPLSKMLPVDEFLPVMFDKHPVSEYKAHFSLRNLHAFSVEPLLIYPTHYTGDDGYVSDTETSVVWNNEHVKTDWDRAKSQKMREQQALSREAKNSDVLQSPLDSAARDEL

SEQ ID NO: 816250 - protein, 507 aa, Homo sapiens
RGFLAEEPRSYPDEEGPKHWSDSRYEHVMKLRQAALKSARDMWADYILFVDADNLILNPDTLSLLIAENKTVVAPMLDSRAAYSNFWCGMTSQGYYKRTPAYIPIRKRDRRGCFAVPMVHSTFLIDLRKAASRNLAFYPPHPDYTWSFDDIIVFAFSCKQAEVQMYVCNKEEYGFLPVPLRAHSTLQDEAESFMHVQLEVMVKHPPAEPSRFISAPTKTPDKMGFDEVFMINLRRRQDRRERMLRALQAQEIECRLVEAVDGKAMNTSQVEALGIQMLPGYRDPYHGRPLTKGELGCFLSHYNIWKEVVDRGLQKSLVFEDDLRFEIFFKRRLMNLMRDVEREGLDWDLIYVGRKRMQVEHPEKAVPRVRNLVEADYSYWTLAYVISLQGARKLLAAEPLSKMLPVDEFLPVMFDKHPVSEYKAHFSLRNLHAFSVEPLLIYPTHYTGDDGYVSDTETSVVWNNEHVKTDWDRAKSQKMREQQALSREAKNSDVLQSPLDSAARDEL

SEQ ID NO: 816251 - protein, 622 aa, Homo sapiens; identical to SEQ ID NO: 816249

SEQ ID NO: 816252 - protein, 151 aa, Homo sapiens
MQVEHPEKAVPRVRNLVEADYSYWTLAYVISLQGARKLLAAEPLSKMLPVDEFLPVMFDKHPVSEYKAHFSLRNLHAFSVEPLLIYPTHYTGDDGYVSDTETSVVWNNEHVKTDWDRAKSQKMREQQALSREAKNSDVLQSPLDSAARDEL

SEQ ID NO: 816253 - protein, 105 aa, Homo sapiens
MLPVDEFLPVMFDKHPVSEYKAHFSLRNLHAFSVEPLLIYPTHYTGDDGYVSDTETSVVWNNEHVKTDWDRAKSQKMREQQALSREAKNSDVLQSPLDSAARDEL

SEQ ID NO: 816254 - protein, 463 aa, Homo sapiens
MAAAPRAGRRRGQPLLALLLLLLAPLPPGAPPGADAYFPEERWSPESPLQAPRVLIALLARNAAHALPTTLGALERLRHPRERTALWVATDHNMDNTSTVLREWLVAVKSLYHSVEWRPAEEPRSYPDEEGPKHWSDSRYEHVMKLRQAALKSARDMWADYILFVDADNLILNPDTLSLLIAENKTVVAPMLDSRAAYSNFWCGMTSQGYYKRTPAYIPIRKRDRRGCFAVPMVHSTFLIDLRKAASRNLAFYPPHPDYTWSFDDIIVFAFSCKQAVKHPPAEPSRFISAPTKTPDKMGFDEVFMINLRRRQDRRERMLRALQAQEIECRLVEAVDGKAMNTSQVEALGIQMLPGYRDPYHGRPLTKGELGCFLSHYNIWKEVVDRGLQKSLVFEDDLRFEIFFKRRLMNLMRDVEREGLDWDLIYVGRKRMQVEHPEKAVPRVRNLVEADYSYWTSAARDEL

SEQ ID NO: 816255 - protein, 622 aa, Homo sapiens; identical to SEQ ID NO: 816249

SEQ ID NO: 816256 - protein, 491 aa, Homo sapiens
  misc_feature (466)..(466): Xaa can be any naturally occurring amino acid
  misc_feature (469)..(469): Xaa can be any naturally occurring amino acid
  misc_feature (485)..(485): Xaa can be any naturally occurring amino acid
MAAAPRAGRRRGQPLLALLLLLLAPLPPGAPPGADAYFPEERWSPESPLQAPRVLIALLARNAAHALPTTLGALERLRHPRERTALWVATDHNMDNTSTVLREWLVAVKSLYHSVEWRPAEEPRSYPDEEGPKHWSDSRYEHVMKLRQAALKSARDMWADYILFVDADNLILNPDTLSLLIAENKTVVAPMLDSRAAYSNFWCGMTSQGYYKRTPAYIPIRKRDRRGCFAVPMVHSTFLIDLRKAASRNLAFYPPHPDYTWSFDDIIVFAFSCKQAEVQMYVCNKEEYGFLPVPLRAHSTLQDEAESFMHVQLEVMVKHPPAEPSRFISAPTKTPDKMGFDEVFMINLRRRQDRRERMLRALQAQEIECRLVEAVDGKAMNTSQVEALGIQMLPGYRDPYHGRPLTKGELGCFLSHYNIWKEVVDRGLQKSLVFEDDLRFEIFFKRRLMNLMRDVEREGLDWDLIXMTXSCTCMKLSASSWRVLXARNGTG

SEQ ID NO: 816257 - protein, 352 aa, Homo sapiens
MAAAPRAGRRRGQPLLALLLLLLAPLPPGAPPGADAYFPEERWSPESPLQAPRVLIALLARNAAHALPTTLGALERLRHPRERTALWVATDHNMDNTSTVLREWLVAVKSLYHSVEWRPAEEPRSYPDEEGPKHWSDSRYEHVMKLRQAALKSARDMWADYILFVDADNLILNPDTLSLLIAENKTVVAPMLDSRAAYSNFWCGMTSQGYYKRTPAYIPIRKRDRRGCFAVPMVHSTFLIDLRKAASRNLAFYPPHPDYTWSFDDIIVFAFSCKQAEVQMYVCNKEEYGFLPVPLRAHSTLQDEAESFMHVQLEVMAPAPEPSRFIARPGRRPGAEGKARLILIFSTNTDGH

SEQ ID NO: 816258 - protein, 161 aa, Homo sapiens
PQWEGGRQEQHEPPVPSSPQDDFKEGYLETVAAYYEEQHPELTPLLEKERDGLRCRGNRSPVPDVEDPATEEPGESFCDKVMRWFQAMLQRLQTWWHGVLAWVKEKVVALVHAVQALWKQFQSFCCSLSELFMSSFQSYGAPRGDKEELTPQKCSEPQSSK

SEQ ID NO: 816259 - protein, 188 aa, Homo sapiens
MCFPKVLSDDMKKLKARMHQAIERFYDKMQNAESGRGQVMSSLAELEDDFKEGYLETVAAYYEEQHPELTPLLEKERDGLRCRGNRSPVPDVEDPATEEPGESFCDKVMRWFQAMLQRLQTWWHGVLAWVKEKVVALVHAVQALWKQFQSFCCSLSELFMSSFQSYGAPRGDKEELTPQKCSEPQSSK

SEQ ID NO: 816260 - protein, 85 aa, Homo sapiens
MCFPKVLSDDMKKLKARMHQAIERFYDKMQNAESGRGQVMSSLAELEDDFKEGYLETVAAYYEEQHPELTSLLVRILPDEPWEAL

SEQ ID NO: 816261 - protein, 109 aa, Homo sapiens
MCFPKVLSDDMKKLKARMVMLLPTSAQGLGAWVSACDTEDTVGHLGPWRDKDPALWCQLCLSSQHQAIERFYDKMQNAESGRGQVGGFPLRHQVTCPRPQALHPVWGSG

SEQ ID NO: 816262 - protein, 102 aa, Homo sapiens
ELPQPAVPSLDFPSAPPHSQAGGVGKAAHSWAQRLPPQLRGSRGPARDGPSFLPGTPDLCLSRVSLHLCLSLSLSLSLSVFHALSKASCPERGSAHYPPLSP

SEQ ID NO: 816263 - protein, 261 aa, Homo sapiens
GVAPASCPESGLSLCPSPLSGWWGGESSPFLGSETPTPAQREQGPSQGRTLIPPRDPRPLSLSGPWLLELLAAMCFPKVLSDDMKKLKARMHQAIERFYDKMQNAESGRGQVMSSLAELEDDFKEGYLETVAAYYEEQHPELTPLLEKERDGLRCRGNRSPVPDVEDPATEEPGESFCDKVMRWFQAMLQRLQTWWHGVLAWVKEKVVALVHAVQALWKQFQSFCCSLSELFMSSFQSYGAPRGDKEELTPQKCSEPQSSK

SEQ ID NO: 816264 - protein, 188 aa, Homo sapiens; identical to SEQ ID NO: 816259

SEQ ID NO: 816265 - protein, 188 aa, Homo sapiens; identical to SEQ ID NO: 816259

SEQ ID NO: 816266 - protein, 261 aa, Homo sapiens; identical to SEQ ID NO: 816263

SEQ ID NO: 816267 - protein, 261 aa, Homo sapiens; identical to SEQ ID NO: 816263

SEQ ID NO: 816268 - protein, 234 aa, Homo sapiens
MCFPKVLSDDMKKLKARMVMLLPTSAQGLGAWVSACDTEDTVGHLGPWRDKDPALWCQLCLSSQHQAIERFYDKMQNAESGRGQVMSSLAELEDDFKEGYLETVAAYYEEQHPELTPLLEKERDGLRCRGNRSPVPDVEDPATEEPGESFCDKVMRWFQAMLQRLQTWWHGVLAWVKEKVVALVHAVQALWKQFQSFCCSLSELFMSSFQSYGAPRGDKEELTPQKCSEPQSSK

SEQ ID NO: 816269 - protein, 188 aa, Homo sapiens; identical to SEQ ID NO: 816259

SEQ ID NO: 816270 - protein, 188 aa, Homo sapiens; identical to SEQ ID NO: 816259

SEQ ID NO: 816271 - protein, 188 aa, Homo sapiens; identical to SEQ ID NO: 816259

SEQ ID NO: 816272 - protein, 307 aa, Homo sapiens
GVAPASCPESGLSLCPSPLSGWWGGESSPFLGSETPTPAQREQGPSQGRTLIPPRDPRPLSLSGPWLLELLAAMCFPKVLSDDMKKLKARMVMLLPTSAQGLGAWVSACDTEDTVGHLGPWRDKDPALWCQLCLSSQHQAIERFYDKMQNAESGRGQVMSSLAELEDDFKEGYLETVAAYYEEQHPELTPLLEKERDGLRCRGNRSPVPDVEDPATEEPGESFCDKVMRWFQAMLQRLQTWWHGVLAWVKEKVVALVHAVQALWKQFQSFCCSLSELFMSSFQSYGAPRGDKEELTPQKCSEPQSSK

SEQ ID NO: 816273 - protein, 188 aa, Homo sapiens; identical to SEQ ID NO: 816259

SEQ ID NO: 816274 - protein, 188 aa, Homo sapiens; identical to SEQ ID NO: 816259

SEQ ID NO: 816275 - protein, 234 aa, Homo sapiens; identical to SEQ ID NO: 816268

SEQ ID NO: 816276 - protein, 212 aa, Homo sapiens
MCFPKGLGAWVSACDTEDTVGHLGPWRDKDPALWCQLCLSSQHQAIERFYDKMQNAESGRGQVMSSLAELEDDFKEGYLETVAAYYEEQHPELTPLLEKERDGLRCRGNRSPVPDVEDPATEEPGESFCDKVMRWFQAMLQRLQTWWHGVLAWVKEKVVALVHAVQALWKQFQSFCCSLSELFMSSFQSYGAPRGDKEELTPQKCSEPQSSK

SEQ ID NO: 816277 - protein, 168 aa, Homo sapiens
MCFPKVLSDDMKKLKARMVMSSLAELEDDFKEGYLETVAAYYEEQHPELTPLLEKERDGLRCRGNRSPVPDVEDPATEEPGESFCDKVMRWFQAMLQRLQTWWHGVLAWVKEKVVALVHAVQALWKQFQSFCCSLSELFMSSFQSYGAPRGDKEELTPQKCSEPQSSK

SEQ ID NO: 816278 - protein, 163 aa, Homo sapiens
RGSLARWKSGRGQVMSSLAELEDDFKEGYLETVAAYYEEQHPELTPLLEKERDGLRCRGNRSPVPDVEDPATEEPGESFCDKVMRWFQAMLQRLQTWWHGVLAWVKEKVVALVHAVQALWKQFQSFCCSLSELFMSSFQSYGAPRGDKEELTPQKCSEPQSSK

SEQ ID NO: 816279 - protein, 168 aa, Homo sapiens; identical to SEQ ID NO: 816277

SEQ ID NO: 816280 - protein, 149 aa, Homo sapiens [sequence omitted]

SEQ ID NO: 816281 - protein, 149 aa, Homo sapiens [sequence omitted]

SEQ ID NO: 816282 - protein, 184 aa, Homo sapiens
MCQSRRRTCLLLKVWREKAGGRTGFKEFNPDVGQVMSSLAELEDDFKEGYLETVAAYYEEQHPELTPLLEKERDGLRCRGNRSPVPDVEDPATEEPGESFCDKVMRWFQAMLQRLQTWWHGVLAWVKEKVVALVHAVQALWKQFQSFCCSLSELFMSSFQSYGAPRGDKEELTPQKCSEPQSSK

SEQ ID NO: 816283 - protein, 183 aa, Homo sapiens
  misc_feature (8)..(8): Xaa can be any naturally occurring amino acid
ELGHLRPXSFELLAAMCFPEVLSDDMKKLKARMVMSSLAELEDDFKEGYLETVAAYYEEQHPELTPLLEKERDGLRCRGNRSPVPDVEDPATEEPGESFCDKVMRWFQAMLQRLQTWWHGVLAWVKEKVVALVHAVQALWKQFQSFCCSLSELFMSSFQSYGAPRGDKEELTPQKCSEPQSSK

SEQ ID NO: 816284 - protein, 225 aa, Homo sapiens
MCFPKVLSDDMKKLKARMVMLLPTSAQGLGAWVSACDTEDTVGHLGPWRDKDPALWCQLCLSSQHQAIERFYDKMQNAESGRGQDDFKEGYLETVAAYYEEQHPELTPLLEKERDGLRCRGNRSPVPDVEDPATEEPGESFCDKVMRWFQAMLQRLQTWWHGVLAWVKEKVVALVHAVQALWKQFQSFCCSLSELFMSSFQSYGAPRGDKEELTPQKCSEPQSSK

SEQ ID NO: 816285 - protein, 161 aa, Homo sapiens; identical to SEQ ID NO: 816258

SEQ ID NO: 816286 - protein, 159 aa, Homo sapiens
MCFPKVLSDDMKKLKARMDDFKEGYLETVAAYYEEQHPELTPLLEKERDGLRCRGNRSPVPDVEDPATEEPGESFCDKVMRWFQAMLQRLQTWWHGVLAWVKEKVVALVHAVQALWKQFQSFCCSLSELFMSSFQSYGAPRGDKEELTPQKCSEPQSSK

SEQ ID NO: 816287 - protein, 188 aa, Homo sapiens; identical to SEQ ID NO: 816259

SEQ ID NO: 816288 - protein, 188 aa, Homo sapiens; identical to SEQ ID NO: 816259

SEQ ID NO: 816289 - protein, 127 aa, Homo sapiens
MRSSTQKLTPLLEKERDGLRCRGNRSPVPDVEDPATEEPGESFCDKVMRWFQAMLQRLQTWWHGVLAWVKEKVVALVHAVQALWKQFQSFCCSLSELFMSSFQSYGAPRGDKEELTPQKCSEPQSSK

SEQ ID NO: 816290 - protein, 153 aa, Homo sapiens
VDELSNRRVIVNELVGGAGDRWLAYDEALLTHKLTPLLEKERDGLRCRGNRSPVPDVEDPATEEPGESFCDKVMRWFQAMLQRLQTWWHGVLAWVKEKVVALVHAVQALWKQFQSFCCSLSELFMSSFQSYGAPRGDKEELTPQKCSEPQSSK

SEQ ID NO: 816291 - protein, 261 aa, Homo sapiens; identical to SEQ ID NO: 816263

SEQ ID NO: 816292 - protein, 168 aa, Homo sapiens; identical to SEQ ID NO: 816277

SEQ ID NO: 816293 - protein, 261 aa, Homo sapiens; identical to SEQ ID NO: 816263

SEQ ID NO: 816294 - protein, 261 aa, Homo sapiens; identical to SEQ ID NO: 816263

SEQ ID NO: 816295 - protein, 252 aa, Homo sapiens
GVAPASCPESGLSLCPSPLSGWWGGESSPFLGSETPTPAQREQGPSQGRTLIPPRDPRPLSLSGPWLLELLAAMCFPKVLSDDMKKLKARMHQAIERFYDKMQNAESGRGQVMSSLAELEDDFKEGYLETVAAYYEEQHPELTPLLEKERDGLRCRGNRSPVPDVEDPATEEPGESFCDKVMRWFQAMLQRLQTWWHGVLAWVKEKVVALVHAVQALWKQFQSFCCSLSELFMSSFHLGPVQSLGPVQSLGP

SEQ ID NO: 816296 - protein, 198 aa, Homo sapiens
GVAPASCPESGLSLCPSPLSGWWGGESSPFLGSETPTPAQREQGPSQGRTLIPPRDPRPLSLSGPWLLELLAAMCFPKVLSDDMKKLKARMHQAIERFYDKMQNAESGRGQVMSSLAELEDDFKEGYLETVAAYYEEQHPELTPLLEKERDGLRCRGNRSPVPDVEDPATEEPGESFCDKVLRSPTGGQGGADTPEVL

SEQ ID NO: 816297 - protein, 125 aa, Homo sapiens
MCFPKVLSDDMKKLKARMHQAIERFYDKMQNAESGRGQVMSSLAELEDDFKEGYLETVAAYYEEQHPELTPLLEKERDGLRCRGNRSPVPDVEDPATEEPGESFCDKVLRSPTGGQGGADTPEVL

SEQ ID NO: 816298 - protein, 221 aa, Homo sapiens
GVAPASCPESGLSLCPSPLSGWWGGESSPFLGSETPTPAQREQGPSQGRTLIPPRDPRPLSLSGPWLLELLAAMCFPKVLSDDMKKLKARMHQAIERFYDKMQNAESGRGQVMSSLAELEDDFKEGYLETVAAYYEEQHPELTPLLEKERDGLRCRGNRSPVPDVEDPATEEPGESFCDKVMRWFQAMLQRLQTWWHGPVIPDTQEAEAGESLEPGRQRLQ

SEQ ID NO: 816299 - protein, 204 aa, Homo sapiens
GVAPASCPESGLSLCPSPLSGWWGGESSPFLGSETPTPAQREQGPSQGRTLIPPRDPRPLSLSGPWLLELLAAMCFPKVLSDDMKKLKARMHQAIERFYDKMQNAESGRGQVMSSLAELEDDFKEGYLETVAAYYEEQHPELTPLLEKERDGLRCRGNRSPVPDVEDPATEEPGESFCDKVMRWFQVLRSPTGGQGGADTPEVL

SEQ ID NO: 816300 - protein, 107 aa, Homo sapiens
MTDVGCRGGLGLEPSALFLTVMSSLAELEDDFKEGYLETVAAYYEEQHPELTPLLEKERDGLRCRGNRSPVPDVEDPATEEPGESFCDKVLRSPTGGQGGADTPEVL

SEQ ID NO: 816301 - protein, 121 aa, Homo sapiens
MCFPKVLSDDMKKLKARMVMSSLAELEDDFKEGYLETVAAYYEEQHPELTPLLEKERDGLRCRGNRSPVPDVEDPATEEPGESFCDKVMRWFQAMLQRLQTWWHGVLAWVKEKVVAIIPKI

SEQ ID NO: 816302 - protein, 184 aa, Homo sapiens
MAAAGGARLLRAASAVLGGPAGRWLHHAGSRAGSSGLLRNRGPGGSAEASRSLSVSARARSSSEDKITVHFINRDGETLTTKGKVGDSLLDVVVENNLDIDGFGACEGTLACSTCHLIFEDHIYEKLDAITDEENDMLDLAYGLTDRSRLGCQICLTKSMDNMTVRVPETVADARQSIDVGKTS

SEQ ID NO: 816303 - protein, 184 aa, Homo sapiens; identical to SEQ ID NO: 816302

SEQ ID NO: 816304 - protein, 184 aa, Homo sapiens; identical to SEQ ID NO: 816302

SEQ ID NO: 816305 - protein, 184 aa, Homo sapiens; identical to SEQ ID NO: 816302

SEQ ID NO: 816306 - protein, 164 aa, Homo sapiens
MAAAGGARLLRAASAVLGGPAGRWLHHAGSRAGSSGLLRNRGPGGSAEASRSLSVSARARSSSEDKITVHFINRDGETLTTKGKVGDSLLDVVVENNLDIDGFGACEGTLACSTCHLIFEDHIYEKLDAITDEENDMLDLAYGLTDRSRLGCQICLTIDVGKTS

SEQ ID NO: 816307 - protein, 186 aa, Homo sapiens
MAAAGGARLLRAASAVLGGPAGRWLHHAGSRAGSSGLLRNRGPGGSAEASRSLSVSARARSSSEDKITVHFINRDGETLTTKGKVGDSLLDVVVENNLDIDGFGACEGTLACSTCHLIFEDHIYEKLDAITDEENDMLDLAYGLTDRSRLGCQICLTKSMDNMTVRVPETVADARQSYFYNYYFLK

SEQ ID NO: 816308 - protein, 118 aa, Homo sapiens
MAAAGGARLLRAASAVLGGPAGRWLHHAGSRAGSSGLLRNRGPGGSAEASRSLSVSARARSSSEDKITVHFINRDGETLTTKGKVGDSLLDVVVENNLDIDGFEQPLSCLTLGTLPMG

SEQ ID NO: 816309 - protein, 369 aa, Homo sapiens
MTLEAIRYSRGSLQILDQLLLPKQSRYEAVGSVHQAWEAIRAMKVRGAPAIALVGCLSLAVELQAGAGGPGLAALVAFVRDKLSFLVTARPTAVNMARAARDLADVAAREAEREGATEEAVRERVICCTEDMLEKDLRDNRSIGDLGARHLLERVAPSGGKVTVLTHCNTGALATAGYGTALGVIRSLHSLGRLEHAFCTETRPYNQGARLTAFELVYEQIPATLITDSMVAAAMAHRGVSAVVVGADRVVANGDTANKVGTYQLAIVAKHHGIPFYVAAPSSSCDLRLETGKEIIIEERPGQELTDVNGVRIAAPGIGVWNPAFDVTPHDLITGGIITELGVFAPEELRTALTTTISSRDGTLDGPQM

SEQ ID NO: 816310 - protein, 369 aa, Homo sapiens; identical to SEQ ID NO: 816309

SEQ ID NO: 816311 - protein, 369 aa, Homo sapiens; identical to SEQ ID NO: 816309

SEQ ID NO: 816312 - protein, 369 aa, Homo sapiens; identical to SEQ ID NO: 816309

SEQ ID NO: 816313 - protein, 436 aa, Homo sapiens
MTLEAIRYSRGSLQILDQLLLPKQSRYEAVGSVHQAWEAIRAMKVRGAPAIALVGCLSLAVELQAGAGGPGLAALVAFVRDKLSFLVTARPTAVNMARAARDLADVAAREAEREGATEEAVRERVICCTEDMLEKDLRDNRSIGDLGARHLLERVAPSGGKVTVLTHCNTGALATAGYGTALDVKRSYASIGKSIPGRGNCHCEGPWAGLCSVSLWQSTPRLGACTPNQWTTLSVCPSPGPSPGGWGPRRCDSLTAQPGPLEHAFCTETRPYNQGARLTAFELVYEQIPATLITDSMVAAAMAHRGVSAVVVGADRVVANGDTANKVGTYQLAIVAKHHGIPFYVAAPSSSCDLRLETGKEIIIEERPGQELTDVNGVRIAAPGIGVWNPAFDVTPHDLITGGIITELGVFAPEELRTALTTTISSRDGTLDGPQM

SEQ ID NO: 816314 - protein, 351 aa, Homo sapiens
MTLEAIRYSRGSLQILDQLLLPKQSRYEAVGSVHQAWEAIRAMKVRGAPAIALVGCLSLAVELQAGAGGPGLAALVAFVRDKLSFLVTARPTAVNMARAARDLADVAAREAEREGATEEAVRERVICCTEDMLEKDLRDNRSIGDLGARHLLERVAPSGGKVTVLTHCNTGALATAGYGTALGVIRSLHSLGRLEHAFCTETRPYNQGARLTAFELVYEQIPATLITDSMVAAAMAHRGVSAVVVGADRVVANGDTANKVGTYQLAIVAKHHGIPFYVAAPSSSCDLRLETGKEIIIEERPGQELTDVNGVRIAAPGIGVWNPAFDVTPHDLITGGIITELGVFAPEEPPE

SEQ ID NO: 816315 - protein, 369 aa, Homo sapiens; identical to SEQ ID NO: 816309

SEQ ID NO: 816316 - protein, 140 aa, Homo sapiens [sequence omitted]

SEQ ID NO: 816317 - protein, 374 aa, Homo sapiens
MTLEAIRYSRGSLQILDQLLLPKQSRYEAVGSVHQAWEAIRAMKVRGAPAIALVGCLSLAVELQAGAGGPGLAALVAFVRDKLSFLVTARPTAVNMARAARDLADVAAREAEREGATEEAVRERVICCTEDMLEKDLRDNRSIGDLGARHLLERVAPSGGKVTVLTHCNTGALATAGYGTALDVKRSYASIGKSIPGRGNCHCEGPWAGLCSGARLTAFELVYEQIPATLITDSMVAAAMAHRGVSAVVVGADRVVANGDTANKVGTYQLAIVAKHHGIPFYVAAPSSSCDLRLETGKEIIIEERPGQELTDVNGVRIAAPGIGVWNPAFDVTPHDLITGGIITELGVFAPEELRTALTTTISSRDGTLDGPQM

SEQ ID NO: 816318 - protein, 369 aa, Homo sapiens; identical to SEQ ID NO: 816309

SEQ ID NO: 816319 - protein, 415 aa, Homo sapiens
MTLEAIRYSRGSLQILDQLLLPKQSRYEAVGSVHQAWEAIRAMKVRGAPAIALVGCLSLAVELQAGAGGPGLAALVAFVRDKLSFLVTARPTAVNMARAARDLADVAAREAEREGATEEAVRERVICCTEDMLEKDLRDNRSIGDLGARHLLERVAPSGGKTVKRSYASIGKSIPGRGNCHCEGPWAGLCSVSLWQSTPRLGACTPNQWTTLSVCPSPGPSPGGWGPRRCDSLTAQPGPLEHAFCTETRPYNQGARLTAFELVYEQIPATLITDSMVAAAMAHRGVSAVVVGADRVVANGDTANKVGTYQLAIVAKHHGIPFYVAAPSSSCDLRLETGKEIIIEERPGQELTDVNGVRIAAPGIGVWNPAFDVTPHDLITGGIITELGVFAPEELRTALTTTISSRDGTLDGPQM

SEQ ID NO: 816320 - protein, 179 aa, Homo sapiens
TRGSTHASRTRGSALQPGARLTAFELVYEQIPATLITDSMVAAAMAHRGVSAVVVGADRVVANGDTANKVGTYQLAIVAKHHGIPFYVAAPSSSCDLRLETGKEIIIEERPGQELTDVNGVRIAAPGIGVWNPAFDVTPHDLITGGIITELGVFAPEELRTALTTTISSRDGTLDGPQM

SEQ ID NO: 816321 - protein, 356 aa, Homo sapiens
MTLEAIRYSRGSLQILDQLLLPKQSRYEAVGSVHQAWEAIRAMKVRGAPAIALVGCLSLAVELQAGAGGPGLAALVAFVRDKLSFLVTARPTAVNMARAARDLADVAAREAEREGATEEAVRERVICCTEDMLEKDLRDNRSIGDLGARHLLERVAPSGGKVTVLTHCNTGALATAGYGTALDVKRSYASIGKSIPGRGNCHCEGPWAGLCSGARLTAFELVYEQIPATLITDSMVAAAMAHRGVSAVVVGADRVVANGDTANKVGTYQLAIVAKHHGIPFYVAAPSSSCDLRLETGKEIIIEERPGQELTDVNGVRIAAPGIGVWNPAFDVTPHDLITGGIITELGVFAPEEPPE

SEQ ID NO: 816322 - protein, 179 aa, Homo sapiens; identical to SEQ ID NO: 816320

SEQ ID NO: 816323 - protein, 369 aa, Homo sapiens; identical to SEQ ID NO: 816309

SEQ ID NO: 816324 - protein, 369 aa, Homo sapiens; identical to SEQ ID NO: 816309

SEQ ID NO: 816325 - protein, 369 aa, Homo sapiens; identical to SEQ ID NO: 816309

SEQ ID NO: 816326 - protein, 145 aa, Homo sapiens
NAQSRCCILSIDMLQYAMGTENGLQDNDIKLRVSEWEVIQESGTKLKPMYGPGYTGLKNLGNSCYLSSVMQAIFSIPEFQRAYVGNLPRIFDYSPLDPTQDFNTQMTKLGHGLLSGQYSKPPVKSELIEQVMKEEHKPQQNAILR

SEQ ID NO: 816327 - protein, 894 aa, Homo sapiens
AEFRGIPRRRRRQTPRSGSGSARSAPVRAEAMQRRGALFGMPGGSGGRKMAAGDIGELLVPHMPTIRVPRSGDRVYKNECAFSYDSPNSEGGLYVCMNTFLAFGREHVERHFRKTGQSVYMHLKRHVREKVRGASGGALPKRRNSKIFLDLDTDDDLNSDDYEYEDEAKLVIFPDHYEIALPNIEELPALVTIACDAVLSSKSPYRKQDPDTWENELPVSKYANNLTQLDNGVRIPPSGWKCARCDLRENLWLNLTDGSVLCGKWFFDSSGGNGHALEHYRDMGYPLAVKLGTITPDGADVYSFQEEEPVLDPHLAKHLAHFGIDMLHMHGTENGLQDNDIKLRVSEWEVIQESGTKLKPMYGPGYTGLKNLGNSCYLSSVMQAIFSIPEFQRAYVGNLPRIFDYSPLDPTQDFNTQMTKLGHGLLSGQYSKPPVKSELIEQVMKEEHKPQQNGISPRMFKAFVSKSHPEFSSNRQQDAQEFFLHLVNLVERNRIGSENPSDVFRFLVEERIQCCQTRKVRYTERVDYLMQLPVAMEAATNKDELIAYELTRREAEANRRPLPELVRAKIPFSACLQAFSEPENVDDFWSSALQAKSAGVKTSRFASFPEYLVVQIKKFTFGLDWVPKKFDVSIDMPDLLDINHLRARGLQPGEEELPDISPPIVIPDDSKDRLMNQLIDPSDIDESSVMQLAEMGFPLEACRKAVYFTGNMGAEVAFNWIIVHMEEPDFAEPLTMPGYGGAASAGASVFGASGLDNQPPEEIVAIITSMGFQRNQAIQALRATNNNLERALDWIFSHPEFEEDSDFVIEMENNANANIISEAKPEGPRVKDGSGTYELFAFISHMGTSTMSGHYICHIKKEGRWVIYNDHKVCASERPPKDLGYMYFYRRIPS

SEQ ID NO: 816328 - protein, 894 aa, Homo sapiens; identical to SEQ ID NO: 816327

SEQ ID NO: 816329 - protein, 1020 aa, Homo sapiens
ASSELPLCKPTIRDRKHLRGVFPGPSRAAFGRQPARAPAPTPQGFALRPPPPRPAHAQGPSPAPPPRHAAAGAPQPRLTLQLGRRLAIGLKIASPVRPKPAVPAPAPQPALPARPGSAGCRCPRSPPVSPLRWRRRRRQTPRSGSGSARSAPVRAEAMQRRGALFGMPGGSGGRKMAAGDIGELLVPHMPTIRVPRSGDRVYKNECAFSYDSPNSEGGLYVCMNTFLAFGREHVERHFRKTGQSVYMHLKRHVREKVRGASGGALPKRRNSKIFLDLDTDDDLNSDDYEYEDEAKLVIFPDHYEIALPNIEELPALVTIACDAVLSSKSPYRKQDPDTWENELPVSKYANNLTQLDNGVRIPPSGWKCARCDLRENLWLNLTDGSVLCGKWFFDSSGGNGHALEHYRDMGYPLAVKLGTITPDGADVYSFQEEEPVLDPHLAKHLAHFGIDMLHMHGTENGLQDNDIKLRVSEWEVIQESGTKLKPMYGPGYTGLKNLGNSCYLSSVMQAIFSIPEFQRAYVGNLPRIFDYSPLDPTQDFNTQMTKLGHGLLSGQYSKPPVKSELIEQVMKEEHKPQQNGISPRMFKAFVSKSHPEFSSNRQQDAQEFFLHLVNLVERNRIGSENPSDVFRFLVEERIQCCQTRKVRYTERVDYLMQLPVAMEAATNKDELIAYELTRREAEANRRPLPELVRAKIPFSACLQAFSEPENVDDFWSSALQAKSAGVKTSRFASFPEYLVVQIKKFTFGLDWVPKKFDVSIDMPDLLDINHLRARGLQPGEEELPDISPPIVIPDDSKDRLMNQLIDPSDIDESSVMQLAEMGFPLEACRKAVYFTGNMGAEVAFNWIIVHMEEPDFAEPLTMPGYGGAASAGASVFGASGLDNQPPEEIVAIITSMGFQRNQAIQALRATNNNLERALDWIFSHPEFEEDSDFVIEMENNANANIISEAKPEGPRVKDGSGTYELFAFISHMGTSTMSGHYICHIKKEGRWVIYNDHKVCASERPPKDLGYMYFYRRIPS

SEQ ID NO: 816330 - protein, 256 aa, Homo sapiens
ASSELPLCKPTIRDRKHLRGVFPGPSRAAFGRQPARAPAPTPQGFALRPPPPRPAHAQGPSPAPPPRHAAAGAPQPRLTLQLGRRLAIGLKIASPVRPKPAVPAPAPQPALPARPGSAGCRCPRSPPVSPLRWRRRRRQTPRSGSGSARSAPVRAEAMQRRGALFGMPGGSGGRKMAAGDIGELLVPHMPTIRVPRSGDRVYKNECAFSYDSPNSEGGLYVCMNTFLAFGREHVERHFRKTGQSVYMHLKRHVREI

SEQ ID NO: 816331 - protein, 43 aa, Homo sapiens
LTVLQVDVPHVKCKDQEPQPLGESKEHPRWEENCEEEAGGGPA

SEQ ID NO: 816332 - protein, 461 aa, Homo sapiens
MSSPTTSSLDTPLPGNGPPQPGAPSSSPTVKEEGPEPWPGGPDPDVPGTDEASSACSTDWVIPDPEEEPERKRKKGPAPKMLGHELCRVCGDKASGFHYNVLSCEGCKGFFRRSVVRGGARRYACRGGGTCQMDAFMRRKCQQCRLRKCKEAGMREQCVLSEEQIRKKKIRKQQQQESQSQSQSPVGPQGSSSSASGPGASPGGSEAGSQGSGEGEGVQLTAAQELMIQQLVAAQLQCNKRSFSDQPKVTPWPLGADPQSRDARQQRFAHFTELAIISVQEIVDFAKQVPGFLQLGREDQIALLKASTIEIMLLETARRYNHETECITFLKDFTYSKDDFHRAGLQVEFINPIFEFSRAMRRLGLDDAEYALLIAINIFSADRPNVQEPGRVEALQQPYVEALLSYTRIKRPQDQLRFPRMLMKLVSLRTLSSVHSEQVFALRLQDKKLPPLLSEIWDVHE

SEQ ID NO: 816333 - protein, 461 aa, Homo sapiens; identical to SEQ ID NO: 816332

SEQ ID NO: 816334 - protein, 555 aa, Homo sapiens
MSSPTTSSLDTPLPGNGPPQPGAPSSSPTVKEEGPEPWPGGPDPDVPGTDEASSACSTDWVIPDPEEEPERKRKKGPAPKMLGHELCRVCGDKASGFHYNVLSCEGCKGFFRRSVVRGGARRYACRGGGTCQMDAFMRRKCQQCRLRKCKEAGMREQCVLSEEQIRKKKIRKQQQQESQSQSQSPVGPQGSSSSASGPGASPGGSEAGSQGSGEGEGVQLTAAQELMIQQLVAAQLQCNKRSFSDQPKVTPWPLGADPQSRDARQQRFAHFTELAIISVQEIVDFAKQVPGFLQLGREDQIALLKASTIEIMLLETARRYNHETECITFLKDFTYSKDDFHRAGLQVEFINPIFEFSRAMRRLGLDDAEYALLIAINIFSADRPNVQEPGRVEALQQPYVEALLSYTRIKRPQVGPRRASAQSQLRPAAHVVRSGWVLPATLPSPPQSLSSGPTLLDWEPGLVQAQRRAPRWLPRLVGEGPSFLLEVGLPKPGRAGAQPAPTCLLPQDQLRFPRMLMKLVSLRTLSSVHSEQVFALRLQDKKLPPLLSEIWDVHE

SEQ ID NO: 816335 - protein, 461 aa, Homo sapiens; identical to SEQ ID NO: 816332

SEQ ID NO: 816336 - protein, 461 aa, Homo sapiens; identical to SEQ ID NO: 816332

SEQ ID NO: 816337 - protein, 264 aa, Homo sapiens
MSSPTTSSLDTPLPGNGPPQPGAPSSSPTVKEEGPEPWPGGPDPDVPGTDEASSACSTDWVIPDPEEEPERKRKKGPAPKMLGHELCRVCGDKASGFHYNVLSCEGCKGFFRRSVVRGGARRYACRGGGTCQMDAFMRRKCQQCRLRKCKEAGMREQCVLSEEQIRKKKIRKQQQQESQSQSQSPVGPQGSSSSASGPGASPGGSEAGSQGSGEGEGVQLTAAQELMIQQLVAAQLQCNKRSFSDQPKVTLGRACRPIGSHPLG

SEQ ID NO: 816338 - protein, 285 aa, Homo sapiens
MSSPTTSSLDTPLPGNGPPQPGAPSSSPTVKEEGPEPWPGGPDPDVPGTDEASSACSTDWVIPDPEEEPERKRKKGPAPKMLGHELCRVCGDKASGFHYNVLSCEGCKGFFRRSVVRGGARRYACRGGGTCQMDAFMRRKCQQCRLRKCKEAGMREQCVLSEEQIRKKKIRKQQQQESQSQSQSPVGPQGSSSSASGPGASPGGSEAGSQGSGEGEGVQLTAAQELPEGVKGLQVPTTDPSRLPSLPSLHLKPSTQCTLNRGRGGPMALPPSPGDQGPSSSSAFI

SEQ ID NO: 816339 - protein, 461 aa, Homo sapiens; identical to SEQ ID NO: 816332

SEQ ID NO: 816340 - protein, 461 aa, Homo sapiens; identical to SEQ ID NO: 816332

SEQ ID NO: 816341 - protein, 461 aa, Homo sapiens; identical to SEQ ID NO: 816332

SEQ ID NO: 816342 - protein, 488 aa, Homo sapiens
MSSPTTSSLDTPLPGNGPPQPGAPSSSPTVKEEGPEPWPGGPDPDVPGTDEASSACSTDWVIPDPEEEPERKRKKGPAPKMLGHELCRVCGDKASGFHYNVLSCEGCKGFFRRSVVRGGARRYACRGGGTCQMDAFMRRKCQQCRLRKCKEAGMREQCECSGRGRCRPGPPPSPGVLLRPAPPTGVLSEEQIRKKKIRKQQQQESQSQSQSPVGPQGSSSSASGPGASPGGSEAGSQGSGEGEGVQLTAAQELMIQQLVAAQLQCNKRSFSDQPKVTPWPLGADPQSRDARQQRFAHFTELAIISVQEIVDFAKQVPGFLQLGREDQIALLKASTIEIMLLETARRYNHETECITFLKDFTYSKDDFHRAGLQVEFINPIFEFSRAMRRLGLDDAEYALLIAINIFSADRPNVQEPGRVEALQQPYVEALLSYTRIKRPQDQLRFPRMLMKLVSLRTLSSVHSEQVFALRLQDKKLPPLLSEIWDVHE

SEQ ID NO: 816343 - protein, 461 aa, Homo sapiens; identical to SEQ ID NO: 816332

SEQ ID NO: 816344 - protein, 235 aa, Homo sapiens
MIQQLVAAQLQCNKRSFSDQPKVTPWPLGADPQSRDARQQRFAHFTELAIISVQEIVDFAKQVPGFLQLGREDQIALLKASTIEIMLLETARRYNHETECITFLKDFTYSKDDFHRAGLQVEFINPIFEFSRAMRRLGLDDAEYALLIAINIFSADRPNVQEPGRVEALQQPYVEALLSYTRIKRPQDQLRFPRMLMKLVSLRTLSSVHSEQVFALRLQDKKLPPLLSEIWDVHE

SEQ ID NO: 816345 - protein, 364 aa, Homo sapiens
MSSPTTSSLDTPLPGNGPPQPGAPSSSPTVKEEGPEPWPGGPDPDVPGTDEASSACSTDWGVLSEEQIRKKKIRKQQQQESQSQSQSPVGPQGSSSSASGPGASPGGSEAGSQGSGEGEGVQLTAAQELMIQQLVAAQLQCNKRSFSDQPKVTPWPLGADPQSRDARQQRFAHFTELAIISVQEIVDFAKQVPGFLQLGREDQIALLKASTIEIMLLETARRYNHETECITFLKDFTYSKDDFHRAGLQVEFINPIFEFSRAMRRLGLDDAEYALLIAINIFSADRPNVQEPGRVEALQQPYVEALLSYTRIKRPQDQLRFPRMLMKLVSLRTLSSVHSEQVFALRLQDKKLPPLLSEIWDVHE

SEQ ID NO: 816346 - protein, 217 aa, Homo sapiens
  misc_feature (2)..(3): Xaa can be any naturally occurring amino acid
PXXQLRLGARLGVNRPRDARQQRFAHFTELAIISVQEIVDFAKQVPGFLQLGREDQIALLKASTIEIMLLETARRYNHETECITFLKDFTYSKDDFHRAGLQVEFINPIFEFSRAMRRLGLDDAEYALLIAINIFSADRPNVQEPGRVEALQQPYVEALLSYTRIKRPQDQLRFPRMLMKLVSLRTLSSVHSEQVFALRLQDKKLPPLLSEIWDVHE

SEQ ID NO: 816347 - protein, 150 aa, Homo sapiens
MLLETARRYNHETECITFLKDFTYSKDDFHRAGLQVEFINPIFEFSRAMRRLGLDDAEYALLIAINIFSADRPNVQEPGRVEALQQPYVEALLSYTRIKRPQDQLRFPRMLMKLVSLRTLSSVHSEQVFALRLQDKKLPPLLSEIWDVHE

SEQ ID NO: 816348 - protein, 161 aa, Homo sapiens
DRNDKNAVITAVFPAPETVGSARVQDVGHGFGLRESRAASRPAGLQVEFINPIFEFSRAMRRLGLDDAEYALLIAINIFSADRPNVQEPGRVEALQQPYVEALLSYTRIKRPQDQLRFPRMLMKLVSLRTLSSVHSEQVFALRLQDKKLPPLLSEIWDVHE

SEQ ID NO: 816349 - protein, 264 aa, Homo sapiens; identical to SEQ ID NO: 816337

SEQ ID NO: 816350 - protein, 633 aa, Homo sapiens
MANQVNGNAVQLKEEEEPMDTSSVTHTEHYKTLIEAGLPQKVAERLDEIFQTGLVAYVDLDERAIDALREFNEEGALSVLQQFKESDLSHVQNKSAFLCGVMKTYRQREKQGSKVQESTKGPDEAKIKALLERTGYTLDVTTGQRKYGGPPPDSVYSGVQPGIGTEVFVGKIPRDLYEDELVPLFEKAGPIWDLRLMMDPLSGQNRGYAFITFCGKEAAQEAVKLCDSYEIRPGKHLGVCISVANNRLFVGSIPKNKTKENILEEFSKVTEGLVDVILYHQPDDKKKNRGFCFLEYEDHKSAAQARRRLMSGKVKVWGNVVTVEWADPVEEPDPEVMAKVKVLFVRNLATTVTEEILEKSFSEFGKLERVKKLKDYAFVHFEDRGAAVKAMDEMNGKEIEGEEIEIVLAKPPDKKRKERQAARQASRSTAYEDYYYHPPPRMPPPIRGRGRGGGRGGYGYPPDYYGYEDYYDDYYGYDYHDYRGGYEDPYYGYDDGYAVRGRGGGRGGRGAPPPPRGRGAPPPRGRAGYSQRGAPLGPPRGSRGGRGGPAQQQRGRGSRGSRGNRGGNVGGKRKADGYNQPDSKRRQTNNQQNWGSQPIAQQPLQQGGDYSGNYGYNNDNQEFYQDTYGQQWK

SEQ ID NO: 816351 - protein, 623 aa, Homo sapiens
CCRDRVSVHQGGEGVARAPFLVVFKAPRADSHGPGCRPPLCPGLVAYVDLDERAIDALREFNEEGALSVLQQFKESDLSHVQNKSAFLCGVMKTYRQREKQGSKVQESTKGPDEAKIKALLERTGYTLDVTTGQRKYGGPPPDSVYSGVQPGIGTEVFVGKIPRDLYEDELVPLFEKAGPIWDLRLMMDPLSGQNRGYAFITFCGKEAAQEAVKLCDSYEIRPGKHLGVCISVANNRLFVGSIPKNKTKENILEEFSKVTEGLVDVILYHQPDDKKKNRGFCFLEYEDHKSAAQARRRLMSGKVKVWGNVVTVEWADPVEEPDPEVMAKVKVLFVRNLATTVTEEILEKSFSEFGKLERVKKLKDYAFVHFEDRGAAVKAMDEMNGKEIEGEEIEIVLAKPPDKKRKERQAARQASRSTAYEDYYYHPPPRMPPPIRGRGRGGGRGGYGYPPDYYGYEDYYDDYYGYDYHDYRGGYEDPYYGYDDGYAVRGRGGGRGGRGAPPPPRGRGAPPPRGRAGYSQRGAPLGPPRGSRGGRGGPAQQQRGRGSRGSRGNRGGNVGGKRKADGYNQPDSKRRQTNNQQNWGSQPIAQQPLQQGGDYSGNYGYNNDNQEFYQDTYGQQWK

SEQ ID NO: 816352 - protein, 623 aa, Homo sapiens; identical to SEQ ID NO: 816351

SEQ ID NO: 816353 - protein, 633 aa, Homo sapiens; identical to SEQ ID NO: 816350

SEQ ID NO: 816354 - protein, 612 aa, Homo sapiens
SDRLAEFSLTIVFKAPRADSHGPGCRPPLCPGLVAYVDLDERAIDALREFNEEGALSVLQQFKESDLSHVQNKSAFLCGVMKTYRQREKQGSKVQESTKGPDEAKIKALLERTGYTLDVTTGQRKYGGPPPDSVYSGVQPGIGTEVFVGKIPRDLYEDELVPLFEKAGPIWDLRLMMDPLSGQNRGYAFITFCGKEAAQEAVKLCDSYEIRPGKHLGVCISVANNRLFVGSIPKNKTKENILEEFSKVTEGLVDVILYHQPDDKKKNRGFCFLEYEDHKSAAQARRRLMSGKVKVWGNVVTVEWADPVEEPDPEVMAKVKVLFVRNLATTVTEEILEKSFSEFGKLERVKKLKDYAFVHFEDRGAAVKAMDEMNGKEIEGEEIEIVLAKPPDKKRKERQAARQASRSTAYEDYYYHPPPRMPPPIRGRGRGGGRGGYGYPPDYYGYEDYYDDYYGYDYHDYRGGYEDPYYGYDDGYAVRGRGGGRGGRGAPPPPRGRGAPPPRGRAGYSQRGAPLGPPRGSRGGRGGPAQQQRGRGSRGSRGNRGGNVGGKRKADGYNQPDSKRRQTNNQQNWGSQPIAQQPLQQGGDYSGNYGYNNDNQEFYQDTYGQQWK

SEQ ID NO: 816355 - protein, 633 aa, Homo sapiens; identical to SEQ ID NO: 816350

SEQ ID NO: 816356 - protein, 623 aa, Homo sapiens; identical to SEQ ID NO: 816351

SEQ ID NO: 816357 - protein, 547 aa, Homo sapiens
CCRDRVSVHQGGEGVARAPFLVVFKAPRADSHGPGCRPPLCPGLVAYVDLDERAIDALREFNEEGALSVLQQFKESDLSHVQNKSAFLCGVMKTYRQREKQGSKVQESTKGPDEAKIKALLERTGYTLDVTTGQRKYGGPPPDSVYSGVQPGIGTEVFVGKIPRDLYEDELVPLFEKAGPIWDLRLMMDPLSGQNRGYAFITFCGKEAAQEAVKLCDSYEIRPGKHLGVCISVANNRLFVGSIPKNKTKENILEEFSKVTEGLVDVILYHQPDDKKKNRGFCFLEYEDHKSAAQARRRLMSGKVKVWGNVVTVEWADPVEEPDPEVMAKVKVLFVRNLATTVTEEILEKSFSEFGKLERVKKLKDYAFVHFEDRGAAVKAMDEMNGKEIEGEEIEIVLAKPPDKKRKERQAARQASRSTAYEDYYYHPPPRMPPPIRGRGRGGGRGGYGYPPDYYGYEDYYDDYYGYDYHDYRGSRGNRGGNVGGKRKADGYNQPDSKRRQTNNQQNWGSQPIAQQPLQQGGDYSGNYGYNNDNQEFYQDTYGQQWK

SEQ ID NO: 816358 - protein, 623 aa, Homo sapiens; identical to SEQ ID NO: 816351

SEQ ID NO: 816359 - protein, 595 aa, Homo sapiens
MANQVNGNAVQLKEEEEPMDTSSVTHTEHYKTLIEAGLPQKVAERLDEIFQTGLVAYVDLDERAIDALREFNEEGALSVLQQFKESDLSHVQNKSAFLCGVMKTYRQREKQGSKVQESTKGPDEAKIKVFVGKIPRDLYEDELVPLFEKAGPIWDLRLMMDPLSGQNRGYAFITFCGKEAAQEAVKLCDSYEIRPGKHLGVCISVANNRLFVGSIPKNKTKENILEEFSKVTEGLVDVILYHQPDDKKKNRGFCFLEYEDHKSAAQARRRLMSGKVKVWGNVVTVEWADPVEEPDPEVMAKVKVLFVRNLATTVTEEILEKSFSEFGKLERVKKLKDYAFVHFEDRGAAVKAMDEMNGKEIEGEEIEIVLAKPPDKKRKERQAARQASRSTAYEDYYYHPPPRMPPPIRGRGRGGGRGGYGYPPDYYGYEDYYDDYYGYDYHDYRGGYEDPYYGYDDGYAVRGRGGGRGGRGAPPPPRGRGAPPPRGRAGYSQRGAPLGPPRGSRGGRGGPAQQQRGRGSRGSRGNRGGNVGGKRKADGYNQPDSKRRQTNNQQNWGSQPIAQQPLQQGGDYSGNYGYNNDNQEFYQDTYGQQWK

SEQ ID NO: 816360 - protein, 532 aa, Homo sapiens
MKTYRQREKQGSKVQESTKGPDEAKIKALLERTGYTLDVTTGQRKYGGPPPDSVYSGVQPGIGTEVFVGKIPRDLYEDELVPLFEKAGPIWDLRLMMDPLSGQNRGYAFITFCGKEAAQEAVKLCDSYEIRPGKHLGVCISVANNRLFVGSIPKNKTKENILEEFSKVTEGLVDVILYHQPDDKKKNRGFCFLEYEDHKSAAQARRRLMSGKVKVWGNVVTVEWADPVEEPDPEVMAKVKVLFVRNLATTVTEEILEKSFSEFGKLERVKKLKDYAFVHFEDRGAAVKAMDEMNGKEIEGEEIEIVLAKPPDKKRKERQAARQASRSTAYEDYYYHPPPRMPPPIRGRGRGGGRGGYGYPPDYYGYEDYYDDYYGYDYHDYRGGYEDPYYGYDDGYAVRGRGGGRGGRGAPPPPRGRGAPPPRGRAGYSQRGAPLGPPRGSRGGRGGPAQQQRGRGSRGSRGNRGGNVGGKRKADGYNQPDSKRRQTNNQQNWGSQPIAQQPLQQGGDYSGNYGYNNDNQEFYQDTYGQQWK

SEQ ID NO: 816361 - protein, 585 aa, Homo sapiens
CCRDRVSVHQGGEGVARAPFLVVFKAPRADSHGPGCRPPLCPGLVAYVDLDERAIDALREFNEEGALSVLQQFKESDLSHVQNKSAFLCGVMKTYRQREKQGSKVQESTKGPDEAKIKVFVGKIPRDLYEDELVPLFEKAGPIWDLRLMMDPLSGQNRGYAFITFCGKEAAQEAVKLCDSYEIRPGKHLGVCISVANNRLFVGSIPKNKTKENILEEFSKVTEGLVDVILYHQPDDKKKNRGFCFLEYEDHKSAAQARRRLMSGKVKVWGNVVTVEWADPVEEPDPEVMAKVKVLFVRNLATTVTEEILEKSFSEFGKLERVKKLKDYAFVHFEDRGAAVKAMDEMNGKEIEGEEIEIVLAKPPDKKRKERQAARQASRSTAYEDYYYHPPPRMPPPIRGRGRGGGRGGYGYPPDYYGYEDYYDDYYGYDYHDYRGGYEDPYYGYDDGYAVRGRGGGRGGRGAPPPPRGRGAPPPRGRAGYSQRGAPLGPPRGSRGGRGGPAQQQRGRGSRGSRGNRGGNVGGKRKADGYNQPDSKRRQTNNQQNWGSQPIAQQPLQQGGDYSGNYGYNNDNQEFYQDTYGQQWK

SEQ ID NO: 816362 - protein, 574 aa, Homo sapiens
MANQVNGNAVQLKEEEEPMDTSSVTHTEHYKTLIEAGLPQKVAERLDEIFQTGLVAYVDLDERAIDALREFNEEGALSVLQQFKESDLSHVQNKSAFLCGVMKTYRQREKQGSKVQESTKGPDEAKIKALLERTGYTLDVTTGQRKYGGPPPDSVYSGVQPGIGTECDSYEIRPGKHLGVCISVANNRLFVGSIPKNKTKENILEEFSKVTEGLVDVILYHQPDDKKKNRGFCFLEYEDHKSAAQARRRLMSGKVKVWGNVVTVEWADPVEEPDPEVMAKVKVLFVRNLATTVTEEILEKSFSEFGKLERVKKLKDYAFVHFEDRGAAVKAMDEMNGKEIEGEEIEIVLAKPPDKKRKERQAARQASRSTAYEDYYYHPPPRMPPPIRGRGRGGGRGGYGYPPDYYGYEDYYDDYYGYDYHDYRGGYEDPYYGYDDGYAVRGRGGGRGGRGAPPPPRGRGAPPPRGRAGYSQRGAPLGPPRGSRGGRGGPAQQQRGRGSRGSRGNRGGNVGGKRKADGYNQPDSKRRQTNNQQNWGSQPIAQQPLQQGGDYSGNYGYNNDNQEFYQDTYGQQWK

SEQ ID NO: 816363 - protein, 564 aa, Homo sapiens
CCRDRVSVHQGGEGVARAPFLVVFKAPRADSHGPGCRPPLCPGLVAYVDLDERAIDALREFNEEGALSVLQQFKESDLSHVQNKSAFLCGVMKTYRQREKQGSKVQESTKGPDEAKIKALLERTGYTLDVTTGQRKYGGPPPDSVYSGVQPGIGTECDSYEIRPGKHLGVCISVANNRLFVGSIPKNKTKENILEEFSKVTEGLVDVILYHQPDDKKKNRGFCFLEYEDHKSAAQARRRLMSGKVKVWGNVVTVEWADPVEEPDPEVMAKVKVLFVRNLATTVTEEILEKSFSEFGKLERVKKLKDYAFVHFEDRGAAVKAMDEMNGKEIEGEEIEIVLAKPPDKKRKERQAARQASRSTAYEDYYYHPPPRMPPPIRGRGRGGGRGGYGYPPDYYGYEDYYDDYYGYDYHDYRGGYEDPYYGYDDGYAVRGRGGGRGGRGAPPPPRGRGAPPPRGRAGYSQRGAPLGPPRGSRGGRGGPAQQQRGRGSRGSRGNRGGNVGGKRKADGYNQPDSKRRQTNNQQNWGSQPIAQQPLQQGGDYSGNYGYNNDNQEFYQDTYGQQWK

SEQ ID NO: 816364 - protein, 507 aa, Homo sapiens
KDIARGAWVCNRPRAVKEIDLSHVQNKSAFLCGVMKTYRQREKQGSKVQESTKGPDEAKIKALLERTGYTLDVTTGQRKYGGPPPDSVYSGVQPGIGTECDSYEIRPGKHLGVCISVANNRLFVGSIPKNKTKENILEEFSKVTEGLVDVILYHQPDDKKKNRGFCFLEYEDHKSAAQARRRLMSGKVKVWGNVVTVEWADPVEEPDPEVMAKVKVLFVRNLATTVTEEILEKSFSEFGKLERVKKLKDYAFVHFEDRGAAVKAMDEMNGKEIEGEEIEIVLAKPPDKKRKERQAARQASRSTAYEDYYYHPPPRMPPPIRGRGRGGGRGGYGYPPDYYGYEDYYDDYYGYDYHDYRGGYEDPYYGYDDGYAVRGRGGGRGGRGAPPPPRGRGAPPPRGRAGYSQRGAPLGPPRGSRGGRGGPAQQQRGRGSRGSRGNRGGNVGGKRKADGYNQPDSKRRQTNNQQNWGSQPIAQQPLQQGGDYSGNYGYNNDNQEFYQDTYGQQWK

SEQ ID NO: 816365 - protein, 526 aa, Homo sapiens
CCRDRVSVHQGGEGVARAPFLVVFKAPRADSHGPGCRPPLCPGLVAYVDLDERAIDALREFNEEGALSVLQQFKESDLSHVQNKSAFLCGVMKTYRQREKQGSKVQESTKGPDEAKIKCDSYEIRPGKHLGVCISVANNRLFVGSIPKNKTKENILEEFSKVTEGLVDVILYHQPDDKKKNRGFCFLEYEDHKSAAQARRRLMSGKVKVWGNVVTVEWADPVEEPDPEVMAKVKVLFVRNLATTVTEEILEKSFSEFGKLERVKKLKDYAFVHFEDRGAAVKAMDEMNGKEIEGEEIEIVLAKPPDKKRKERQAARQASRSTAYEDYYYHPPPRMPPPIRGRGRGGGRGGYGYPPDYYGYEDYYDDYYGYDYHDYRGGYEDPYYGYDDGYAVRGRGGGRGGRGAPPPPRGRGAPPPRGRAGYSQRGAPLGPPRGSRGGRGGPAQQQRGRGSRGSRGNRGGNVGGKRKADGYNQPDSKRRQTNNQQNWGSQPIAQQPLQQGGDYSGNYGYNNDNQEFYQDTYGQQWK

SEQ ID NO: 816366 - protein, 490 aa, Homo sapiens
CCRDRVSVHQGGEGVARAPFLVVFKAPRADSHGPGCRPPLCPGLVAYVDLDERAIDALREFNEEGALSVLQQFKESDLSHVQNKSAFLCGVMKTYRQREKQGSKVQESTKGPDEAKIKALLERTGYTLDVTTGQRKYGGPPPDSVYSGVQPGIGTEVFVGKIPRDLYEDELVPLFEKAGPIWDLRLMMDPLSGQNRGYAFITFCGKEAAQEAVKLCDSYEIRPGKHLGVCISVANNRLFVGSIPKNKTKENILEEFSKVTEGLVDVILYHQPDDKKKNRGFCFLEYEDHKSAAQARRRLMSGKVKVWGNVVTVEWADPVEEPDPEVMAKVKVLFVRNLATTVTEEILEKSFSEFGKLERVKKLKDYAFVHFEDRGAAVKAMDEMNGKEIEGEEIEIVLAKPPDKKRKERQAARQASRSTAYEDYYYHPPPRMPPPIRGRGRGGGRGGYGYPPDYYGYEDYYDDYYGYDYHDYRGGRGRWITRSGDRDHPG

SEQ ID NO: 816367 - protein, 447 aa, Homo sapiens
CCRDRVSVHQGGEGVARAPFLVVFKAPRADSHGPGCRPPLCPGLVAYVDLDERAIDALREFNEEGALSVLQQFKESDLSHVQNKSAFLCGVMKTYRQREKQGSKVQESTKGPDEAKIKALLERTGYTLDVTTGQRKYGGPPPDSVYSGVQPGIGTEVFVGKIPRDLYEDELVPLFEKAGPIWDLRLMMDPLSGQNRGYAFITFCGKEAAQEAVKLCDSYEIRPGKHLGVCISVANNRLFVGSIPKNKTKENILEEFSKVTEGLVDVILYHQPDDKKKNRGFCFLEYEDHKSAAQARRRLMSGKVKVWGNVVTVEWADPVEEPDPEVMAKVKVLFVRNLATTVTEEILEKSFSEFGKLERVKKLKDYAFVHFEDRGAAVKAMDEMNGKEIEGEEIEIVLAKPPDKKRKERQAARQASRSTAYEDYYYHPPPRMPPPIRGRGRGGGRLL

SEQ ID NO: 816368 - protein, 247 aa, Homo sapiens
MSILMKEQLMLSGNLMKKELCLYYSSSRKVTYHMFRTKVHFYVEYEDYYYHPPPRMPPPIRGRGRGGGRGGYGYPPDYYGYEDYYDDYYGYDYHDYRGGYEDPYYGYDDGYAVRGRGGGRGGRGAPPPPRGRGAPPPRGRAGYSQRGAPLGPPRGSRGGRGGPAQQQRGRGSRGSRGNRGGNVGGKRKADGYNQPDSKRRQTNNQQNWGSQPIAQQPLQQGGDYSGNYGYNNDNQEFYQDTYGQQWK

SEQ ID NO: 816369 - protein, 270 aa, Homo sapiens
MANQVNGNAVQLKEEEEPMDTSSVTHTEHYKTLIEAGLPQKVAERLDEIFQTGLVAYVDLDERAIDALREFNEEGALSVLQQFKESDLSHVQGGYGYPPDYYGYEDYYDDYYGYDYHDYRGGYEDPYYGYDDGYAVRGRGGGRGGRGAPPPPRGRGAPPPRGRAGYSQRGAPLGPPRGSRGGRGGPAQQQRGRGSRGSRGNRGGNVGGKRKADGYNQPDSKRRQTNNQQNWGSQPIAQQPLQQGGDYSGNYGYNNDNQEFYQDTYGQQWK

SEQ ID NO: 816370 - protein, 418 aa, Homo sapiens
CCRDRVSVHQGGEGVARAPFLVVFKAPRADSHGPGCRPPLCPGLVAYVDLDERAIDALREFNEEGALSVLQQFKESDLSHVQNKSAFLCGVMKTYRQREKQGSKVQESTKGPDEAKIKALLERTGYTLDVTTGQRKYGGPPPDSVYSGVQPGIGTEVFVGKIPRDLYEDELVPLFEKAGPIWDLRLMMDPLSGQNRGYAFITFCGKEAAQEAVKLCDSYEIRPGKHLGVCISVANNRLFVGSIPKNKTKENILEEFSKVTEGLVDVILYHQPDDKKKNRGFCFLEYEDHKSAAQARRRLMSGKVKVWGNVVTVEWADPVEEPDPEVMAKVKVLFVRNLATTVTEEILEKSFSEFGKLERVKKLKDYAFVHFEDRGAAVKAMDDMMANEFGKGTQFELVLGQHQTRKEERSCKRLQSMV

SEQ ID NO: 816371 - protein, 337 aa, Homo sapiens
CCRDRVSVHQGGEGVARAPFLVVFKAPRADSHGPGCRPPLCPGLVAYVDLDERAIDALREFNEEGALSVLQQFKESDLSHVQNKSAFLCGVMKTYRQREKQGSKVQESTKGPDEAKIKALLERTGYTLDVTTGQRKYGGPPPDSVYSGVQPGIGTEVFVGKIPRDLYEDELVPLFEKAGPIWDLRLMMDPLSGQNRGYAFITFCGKEAAQEAVKLCDSYEIRPGKHLGVCISVANNRLFVGSIPKNKTKENILEEFSKVTEGLVDVILYHQPDDKKKNRGFCFLEYEDHKSAAQARRRLMSGKVKVWGNVVTVEWADPVEEPDPEVMAKVNTVAWNG

SEQ ID NO: 816372 - protein, 284 aa, Homo sapiens
CCRDRVSVHQGGEGVARAPFLVVFKAPRADSHGPGCRPPLCPGLVAYVDLDERAIDALREFNEEGALSVLQQFKESDLSHVQNKSAFLCGVMKTYRQREKQGSKVQESTKGPDEAKIKALLERTGYTLDVTTGQRKYGGPPPDSVYSGVQPGIGTEVFVGKIPRDLYEDELVPLFEKAGPIWDLRLMMDPLSGQNRGYAFITFCGKEAAQEAVKLCDSYEIRPGKHLGVCISVANNRLFVGSIPKNKTKENILEEFSKVTGKTKMYLEITFAKYVVLLTSAQKN

SEQ ID NO: 816373 - protein, 233 aa, Homo sapiens
MANQVNGNAVQLKEEEEPMDTSSVTHTEHYKTLIEAGLPQKVAERLDEIFQTGLVAYVDLDERAIDALREFNEEGALSVLQQFKESDLSHVQNKSAFLCGVMKTYRQREKQGSKVQESTKGPDEAKIKALLERTGYTLDVTTGQRKYGGPPPDSVYSGVQPGIGTEVFVGKIPRDLYEDELVPLFEKAGPIWDLRLMMDPLSGQNRGYAFITFCGKEAAQEAVKLVCDNYPLS

SEQ ID NO: 816374 - protein, 742 aa, Homo sapiens
RKRSREPWSFRACPVLLRKTYRGGSLRCVLGKLLGQLLCFQSERCVRFPEGLLRHRGCGLLSSRLSAGKPPLRTSFFGSWGVLPPLADAASMSGVRAVRISIESACEKQVHEVGLDGTETYLPPLSMSQNLARLAQRIDFSQGSGSEEEEAAGTEGDAQDWPGAGSSADQDDEEGVVKFQPSLWPWDSVRNNLRSALTEMCVLYDVLSIVRDKKFMTLDPVSQDALPPKQNPQTLQLISKKKSLAGAAQILLKGAERLTKSVTENQENKLQRDFNSELLRLRQHWKLRKVGDKILGDLSYRSAGSLFPHHGTFEVIKNTDLDLDKKIPEDYCPLDVQIPSDLEGSAYIKVSIQKQAPDIGDLGTVNLFKRPLPKSKPGSPHWQTKLEAAQNVLLCKEIFAQLSREAVQIKSQVPHIVVKNQIISQPFPSLQLSISLCHSSNDKKSQKFATEKQCPEDHLYVLEHNLHLLIREFHKQTLSSIMMPHPASAPFGHKRMRLSGPQAFDKNEINSLQSSEGLLEKIIKQAKHIFLRSRAAATIDSLASRIEDPQIQAHWSNINDVYESSVKVLITSQGYEQICKSIQLQLNIGVEQIRVVHRDGRVITLSYQEQELQDFLLSQMSQHQVHAVQQLAKVMGWQVLSFSNHVGLGPIESIGNASAITVASPSGDYAISVRNGPESGSKIMVQFPRNQCKDLPKSDVLQDNKWSHLRGPFKEVQWNKMEGRNFVYKMELLMSALSPCLL

SEQ ID NO: 816375 - protein, 236 aa, Homo sapiens
RKRSREPWSFRACPVLLRKTYRGGSLRCVLGKLLGQLLCFQSERCVRFPEGLLRHRGCGLLSSRLSAGKPPLRTSFFGSWGVLPPLADAASMSGVRAVRISIESACEKQVHEVGLDGTETYLPPLSMSQNLARLAQRIDFSQGSGSEEEEAAGTEGDAQDWPGAGSSADQDDEEGVVKFQPSLWPWDSVRNNLRSALTEMCVLYDVLSIVRDKKFMTLDPVSQDALPPKQVFVDFN

SEQ ID NO: 816376 - protein, 742 aa, Homo sapiens; identical to SEQ ID NO: 816374

SEQ ID NO: 816377 - protein, 742 aa, Homo sapiens; identical to SEQ ID NO: 816374

SEQ ID NO: 816378 - protein, 742 aa, Homo sapiens; identical to SEQ ID NO: 816374

SEQ ID NO: 816379 - protein, 429 aa, Homo sapiens
QARVQWRSLGSPQRLPPRFKRFSCLSLPSSWDYRHAPPFLANFVFLVEMGFLHVGQAGLEHPTSGSPHWQTKLEAAQNVLLCKEIFAQLSREAVQIKSQVPHIVVKNQIISQPFPSLQLSISLCHSSNDKKSQKFATEKQCPEDHLYVLEHNLHLLIREFHKQTLSSIMMPHPASAPFGHKRMRLSGPQAFDKNEINSLQSSEGLLEKIIKQAKHIFLRSRAAATIDSLASRIEDPQIQAHWSNINDVYESSVKVLITSQGYEQICKSIQLQLNIGVEQIRVVHRDGRVITLSYQEQELQDFLLSQMSQHQVHAVQQLAKVMGWQVLSFSNHVGLGPIESIGNASAITVASPSGDYAISVRNGPESGSKIMVQFPRNQCKDLPKSDVLQDNKWSHLRGPFKEVQWNKMEGRNFVYKMELLMSALSPCLL

SEQ ID NO: 816380 - protein, 261 aa, Homo sapiens [sequence omitted]

SEQ ID NO: 816381 - protein, 123 aa, Homo sapiens
MSQHQVHAVQQLAKVMGWQVLSFSNHVGLGPIESIGNASAITVASPSGDYAISVRNGPESGSKIMVQFPRNQCKDLPKSDVLQDNKWSHLRGPFKEVQWNKMEGRNFVYKMELLMSALSPCLL

SEQ ID NO: 816382 - protein, 264 aa, Homo sapiens
MHNPDGSASPTADPGSELQTLGQAARRPPPPRAGHDAPRRTRPSARKPLSCFSRRPMPTREPPKTRGSRGHLHTHPPGPGPPLQGLAPRGLKTSAPRPPCQPQPGPHKAKTKKIVFEDELLSQALLGAKKPIGAIPKGHKPRPHPVPDYELKYPPVSSERERSRYVAVFQDQYGEFLELQHEVGCAQAKLRQLEALLSSLPPPQSQKEAQVAARVWREFEMKRMDPGFLDKQARCHYLKGKLRHLKTQIQKFDDQGDSEGSVYF

SEQ ID NO: 816383 - protein, 109 aa, Homo sapiens
ALLSDPASRVHPAVNAQPGRKCLSDSRSRLGAPDAGTGRPQTTPAARGTRRPPQDPPISPETPELLLPEADAHPGAPKDSRLPGAPAYSPAWAWAPGEPDREGVPRPGL

SEQ ID NO: 816384 - protein, 130 aa, Homo sapiens
GRRCGPIACVYANSGRSGELCSRGVRVGRSSAELPARPFSVRVVRRVLSACPPTAARRPPPPRAGHDAPRRTRPSARKPLSCFSRRPMPTREPPKTRGSRGHLHTHPPGPGPPVSLTGRGSPGRASRQKI

SEQ ID NO: 816385 - protein, 208 aa, Homo sapiens
MPTREPPKTRGSRGHLHTHPPGPGPPLQGLAPRGLKTSAPRPPCQPQPGPHKAKTKKIVFEDELLSQALLGAKKPIGAIPKGHKPRPHPVPDYELKYPPVSSERERSRYVAVFQDQYGEFLELQHEVGCAQAKLRQLEALLSSLPPPQSQKEAQVAARVWREFEMKRMDPGFLDKQARCHYLKGKLRHLKTQIQKFDDQGDSEGSVYF

SEQ ID NO: 816386 - protein, 284 aa, Homo sapiens
MHNPDGSASPTADPGSELQTLGQAARRPPPPRAGHDAPRRTRPSARKPLSCFSRRPMPTREPPKTRGSRGHLHTHPPGPGPPLQGLAPRGLKTSAPRPPCQPQPGPHKAKTKKIVFEDELLSQALLGAKKPIGAIPKGHKPRPHPVPDYELKYPPVSSERERSRYVAVFQDQYGEFLELQHEVGCAQAKLRQLEALLSSLPPPQSQKEAQVAARVWREFEMKRMAGVQWYDLSSLQPQRPGFKRFSCLSWDHRRPPPCLANFCICSRDGVSPCWPGWSRTPDLK

SEQ ID NO: 816387 - protein, 109 aa, Homo sapiens; identical to SEQ ID NO: 816383

SEQ ID NO: 816388 - protein, 109 aa, Homo sapiens; identical to SEQ ID NO: 816383

SEQ ID NO: 816389 - protein, 245 aa, Homo sapiens
MHNPDGSASPTADPGSELQTLGQAARRPPPPRAGHDAPRRTRPSARKPLSCFSRRPMPTREPPKTRGSRGHLHTHPPGPGPPLQGLAPRGLKTSAPRPPCQPQPGPHKAKTKKIVFEDELLSQALLGAKKPIGAIPKGHKPRPHPVPDYELKYPPVSSERERSRYVAVFQDQYGEFLELQHEVGCAQAKLRQLEALLSSLPPPQSQKEAQVAARVWREFEMKRMLPLPGVAFSWIANASSVWTQL

SEQ ID NO: 816390 - protein, 130 aa, Homo sapiens; identical to SEQ ID NO: 816384

SEQ ID NO: 816391 - protein, 130 aa, Homo sapiens
ALLSDPASRVHPAVNAQPGRKCLSDSRSRLGAPDAGTGRPQTTPAARGTRRPPQDPPISPETPELLLPEADAHPGAPKDSRLPGAPAYSPAWAWAPAAGTGAPRPQNQRPPPSVPAPAGTPQGKDQEDCV

SEQ ID NO: 816392 - protein, 130 aa, Homo sapiens; identical to SEQ ID NO: 816391

SEQ ID NO: 816393 - protein, 245 aa, Homo sapiens; identical to SEQ ID NO: 816389

SEQ ID NO: 816394 - protein, 130 aa, Homo sapiens; identical to SEQ ID NO: 816384

SEQ ID NO: 816395 - protein, 342 aa, Homo sapiens
MSEESDSLRTSPSVASLSENELPPPPEPPGYVCSLTEDLVTKAREELQEKPEWRLRDVQALRDMVRKEYPNLSTSLDDAFLLRFLRARKFDYDRALQLLVNYHSCRRSWPEVFNNLKPSALKDVLASGFLTVLPHTDPRGCHVVCIRPDRWIPSNYPITENIRAIYLTLEKLIQSEETQVNGIVILADYKGVSLSKASHFGPFIAKKVIGILQDGFPIRIKAVHVVNEPRIFKGIFAIIKPFLKEKIANRFFLHGSDLNSLHTNLPRSILPKEYGGTAGELDTATWNAVLLASEDDFVKEFCQPVPACDSILGQTLLPEGLTSDAQCDDSLRAVKSQLYSCY

SEQ ID NO: 816396 - protein, 308 aa, Homo sapiens
MSEESDSLRTSPSVASLSENELPPPPEPPGYVCSLTEDLVTKAREELQEKPEWRLRDVQALRDMVRKEYPNLSTSLDDAFLLRFLRARKFDYDRALQLLVNYHSCRRSWPEVFNNLKPSALKDVLASGFLTVLPHTDPRGCHVVCIRPDRWIPSNYPITENIRAIYLTLEKLIQSEETQDGFPIRIKAVHVVNEPRIFKGIFAIIKPFLKEKIANRFFLHGSDLNSLHTNLPRSILPKEYGGTAGELDTATWNAVLLASEDDFVKEFCQPVPACDSILGQTLLPEGLTSDAQCDDSLRAVKSQLYSCY

SEQ ID NO: 816397 - protein, 288 aa, Homo sapiens
MAATFFGEVVKAPCRAGTEDEEEEEEGRRETPEDREVRLQLARKREVRLLRRQTKTSLEVSLLEKYPCSKFIIAIGNNAVAFLSSFVMNSGVWEEVGCAKLWNEWCRTTDTTHLSSTEAFCVFYHLKSNPSVFLCQCSCYVAEDQQYQWLEKVFGSCPRKNMQITILTCRHVTDYKTSESTGSLPSPFLRALKTQNFKDSACCPLLEQPNIVHDLPAAVLSYCQVWKIPAILYLCYTDVMKLDLITVEAFKPILSTRSLKGLVKNIPQSTEILKKLMTTNEIQSNIYT

SEQ ID NO: 816398 - protein, 201 aa, Homo sapiens
MNSGVWEEVGCAKLWNEWCRTTDTTHLSSTEAFCVFYHLKSNPSVFLCQCSCYVAEDQQYQWLEKVFGSCPRKNMQITILTCRHVTDYKTSESTGSLPSPFLRALKTQNFKDSACCPLLEQPNIVHDLPAAVLSYCQVWKIPAILYLCYTDVMKLDLITVEAFKPILSTRSLKGLVKNIPQSTEILKKLMTTNEIQSNIYT

SEQ ID NO: 816399 - protein, 271 aa, Homo sapiens
MAATFFGEVVKAPCRAGTEDEEEEEEGRRETPEDREVRLQLARKREVRLLRRQTKTSLEVSLLEKYPCSKFIIAIGNNAVAFLSSFVMNSGVWEEVGCAKLWNEWCRTTDTTHLSSTEAFCVFYHLKSNPSVFLCQCSCYVAEDQQYQWLEKVFGSCPRKNMQITILTCRHVTDYKTQNFKDSACCPLLEQPNIVHDLPAAVLSYCQVWKIPAILYLCYTDVMKLDLITVEAFKPILSTRSLKGLVKNIPQSTEILKKLMTTNEIQSNIYT

SEQ ID NO: 816400 - protein, 144 aa, Homo sapiens
MAATFFGEVVKAPCRAGTEDEEEEEEGRRETPEDREVRLQLARKREVRLLRRQTKTSLEVSLLEKYPCSKFIIAIGNNAVAFLSSFVMNSGVWEEVGCAKLWNEWCRTTDTTHLSSTEAFCVFYHLKSNPSKHRISKTRRVVHC

SEQ ID NO: 816401 - protein, 133 aa, Homo sapiens
MAATFFGEVVKAPCRAGTEDEEEEEEGRRETPEDREVRLQLARKREVRLLRRQTKTSLEVSLLEKYPCSKFIIAIGNNAVAFLSSFVMNSGVWEEVGCAKLWNEWCRTTDTTHLSSTEAFCVFYHLKSNPSKP

SEQ ID NO: 816402 - protein, 103 aa, Homo sapiens
MPGPPESLDMGPLTFRDVAIEFSLEEWQCLDTAQQDLYRKVMLENYRNLVFLAGIAVSKPDLVTCLEQGKDPWNMKGHSTVVKPPVETGFHRFGQDGLYLLTS

SEQ ID NO: 816403 - protein, 113 aa, Homo sapiens
MPGPPESLDMGPLTFRDVAIEFSLEEWQCLDTAQQDLYRKVMLENYRNLVFLAGIAVSKPDLVTCLEQGKDPWNMKGHSTVVKPPVICSHFAEDFCPGPGIKDSFQKVILREY

SEQ ID NO: 816404 - protein, 1312 aa, Homo sapiens
RRSRTIRAAGDATKPGGRRLRAPSQQPGGQKPPVLGPRASDAGKCPHPGNLQRSAAAATLSGRQNGGGGGGGLVLRGSQVLTTPGTGRAGPRQPPRSSPRSAPPGILGVAGTDSGRLSVRPQARGRCPGALLSPPELIIYIVKNFNSPGDFLEGSFSLLLRRKLWIYQIKKSFVWATYIDVFMKRSEKPEGYRQMRPKTFPASNYTVSSRQMLQEIRESLRNLSKPSDAAKAEHNMSKMSTEDPRQVRNPPKFGTHHKALQEIRNSLLPFANETNSSRSTSEVNPQMLQDLQAAGFDEDMVIQALQKTNNRSIEAAIEFISKMSYQDPRREQMAAAAARPINASMKPGNVQQSVNRKQSWKGSKESLVPQRHGPPLGESVAYHSESPNSQTDVGRPLSGSGISAFVQAHPSNGQRVNPPPPPQVRSVTPPPPPRGQTPPPRGTTPPPPSWEPNSQTKRYSGNMEYVISRISPVPPGAWQEGYPPPPLNTSPMNPPNQGQRGISSVPVGRQPIIMQSSSKFNFPSGRPGMQNGTGQTDFMIHQNVVPAGTVNRQPPPPYPLTAANGQSPSALQTGGSAAPSSYTNGSIPQSMMVPNRNSHNMELYNISVPGLQTNWPQSSSAPAQSSPSSGHEIPTWQPNIPVRSNSFNNPLGNRASHSANSQPSATTVTAITPAPIQQPVKSMRVLKPELQTALAPTHPSWIPQPIQTVQPSPFPEGTASNVTVMPPVAEAPNYQGPPPPYPKHLLHQNPSVPPYESISKPSKEDQPSLPKEDESEKSYENVDSGDKEKKQITTSPITVRKNKKDEERRESRIQSYSPQAFKFFMEQHVENVLKSHQQRLHRKKQLENEMMRVGLSQDAQDQMRKMLCQKESNYIRLKRAKMDKSMFVKIKTLGIGAFGEVCLARKVDTKALYATKTLRKKDVLLRNQVAHVKAERDILAEADNEWVVRLYYSFQDKDNLYFVMDYIPGGDMMSLLIRMGIFPESLARFYIAELTCAVESVHKMGFIHRDIKPDNILIDRDGHIKLTDFGLCTGFRWTHDSKYYQSGDHPRQDSMDFSNEWGDPSSCRCGDRLKPLERRAARQHQRCLAHSLVGTPNYIAPEVLLRTGYTQLCDWWSVGVILFEMLVGQPPFLAQTPLETQMKVINWQTSLHIPPQAKLSPEASDLIIKLCRGPEDRLGKNGADEIKAHPFFKTIDFSSDLRQQSASYIPKITHPTDTSNFDPVDPDKLWSDDNEEENVNDTLNGWYKNGKHPEHAFYEFTFRRFFDDNGYPYNYPKPIEYEYINSQGSEQQSDEDDQNTGSEIKNRDLVYV

SEQ ID NO: 816405 - protein, 442 aa, Homo sapiens
RRSRTIRAAGDATKPGGRRLRAPSQQPGGQKPPVLGPRASDAGKCPHPGNLQRSAAAATLSGRQNGGGGGGGLVLRGSQVLTTPGTGRAGPRQPPRSSPRSAPPGILGVAGTDSGRLSVRPQARGRCPGALLSPPELIIYIVKNFNSPGDFLEGSFSLLLRRKLWIYQIKKSFVWATYIDVFMKRSEKPEGYRQMRPKTFPASNYTVSSRQMLQEIRESLRNLSKPSDAAKAEHNMSKMSTEDPRQVRNPPKFGTHHKALQEIRNSLLPFANETNSSRSTSEVNPQMLQDLQAAGFDEEDHLSVACSPISLTKPFLHLKMSFEILNPLGQDMVIQALQKTNNRSIEAAIEFISKMSYQDPRREQMAAAAARPINASMKPGNVQQSVNRKQSWKGSKESLVPQRHGPPLGESVAYHSESPNSQTDVGRPLSGSGISAFVQAHP

SEQ ID NO: 816406 - protein, 872 aa, Homo sapiens
RRSRTIRAAGDATKPGGRRLRAPSQQPGGQKPPVLGPRASDAGKCPHPGNLQRSAAAATLSGRQNGGGGGGGLVLRGSQVLTTPGTGRAGPRQPPRSSPRSAPPGILGVAGTDSGRLSVRPQARGRCPGALLSPPELIIYIVKNFNSPGDFLEGSFSLLLRRKLWIYQIKKSFVWATYIDVFMKRSEKPEGYRQMRPKTFPASNYTVSSRQMLQEIRESLRNLSKPSDAAKAEHNMSKMSTEDPRQVRNPPKFGTHHKALQEIRNSLLPFANETNSSRSTSEVNPQMLQDLQAAGFDEDMVIQALQKTNNRSIEAAIEFISKMSYQDPRREQMAAAAARPINASMKPGNVQQSVNRKQSWKGSKESLVPQRHGPPLGESVAYHSESPNSQTDVGRPLSGSGISAFVQAHPSNGQRVNPPPPPQVRSVTPPPPPRGQTPPPRGTTPPPPSWEPNSQTKRYSGNMEYVISRISPVPPGAWQEGYPPPPLNTSPMNPPNQGQRGISSVPVGRQPIIMQSSSKFNFPSGRPGMQNGTGQTDFMIHQNVVPAGTVNRQPPPPYPLTAANGQSPSALQTGGSAAPSSYTNGSIPQSMMVPNRNSHNMELYNISVPGLQTNWPQSSSAPAQSSPSSGHEIPTWQPNIPVRSNSFNNPLGNRASHSANSQPSATTVTAITPAPIQQPVKSMRVLKPELQTALAPTHPSWIPQPIQTVQPSPFPEGTASNVTVMPPVAEAPNYQGPPPPYPKHLLHQNPSVPPYESISKPSKEDQPSLPKEDESEKSYENVDSGDKEKKQITTSPITVRKNKKDEERRESRIQSYSPQAFKFFMEQHVENVLKSHQQRLHRKKQLENEMMRVKPFKMSIFILNHLFAWCLF

SEQ ID NO: 816407 - protein, 870 aa, Homo sapiens
RRSRTIRAAGDATKPGGRRLRAPSQQPGGQKPPVLGPRASDAGKCPHPGNLQRSAAAATLSGRQNGGGGGGGLVLRGSQVLTTPGTGRAGPRQPPRSSPRSAPPGILGVAGTDSGRLSVRPQARGRCPGALLSPPELIIYIVKNFNSPGDFLEGSFSLLLRRKLWIYQIKKSFVWATYIDVFMKRSEKPEGYRQMRPKTFPASNYTVSSRQMLQEIRESLRNLSKPSDAAKAEHNMSKMSTEDPRQVRNPPKFGTHHKALQEIRNSLLPFANETNSSRSTSEVNPQMLQDLQAAGFDEDMVIQALQKTNNRSIEAAIEFISKMSYQDPRREQMAAAAARPINASMKPGNVQQSVNRKQSWKGSKESLVPQRHGPPLGESVAYHSESPNSQTDVGRPLSGSGISAFVQAHPSNGQRVNPPPPPQVRSVTPPPPPRGQTPPPRGTTPPPPSWEPNSQTKRYSGNMEYVISRISPVPPGAWQEGYPPPPLNTSPMNPPNQGQRGISSVPVGRQPIIMQSSSKFNFPSGRPGMQNGTGQTDFMIHQNVVPAGTVNRQPPPPYPLTAANGQSPSALQTGGSAAPSSYTNGSIPQSMMVPNRNSHNMELYNISVPGLQTNWPQSSSAPAQSSPSSGHEIPTWQPNIPVRSNSFNNPLGNRASHSANSQPSATTVTAITPAPIQQPVKSMRVLKPELQTALAPTHPSWIPQPIQTVQPSPFPEGTASNVTVMPPVAEAPNYQGPPPPYPKHLLHQNPSVPPYESISKPSKEDQPSLPKEDESEKSYENVDSGDKEKKQITTSPITVRKNKKDEERRESRIQSYSPQAFKFFMEQHVENVLKSHQQRLHRKKQLENEMMRVGLSQMPGSMCRCLPFDL

SEQ ID NO: 816408 - protein, 450 aa, Homo sapiens [sequence omitted]

SEQ ID NO: 816409 - protein, 141 aa, Homo sapiens
ALETRPTVTPRAGGQASALLPYSRAHCSLSPGATRSPNTMVRYRVRSLSERSHEVYRQQLHGQEQGHHGQEEQGLSPEHVEVYERTHGQSHYRRRHCSRRRLHRIHRRQHRSCRRRKRRSCRHRRRHRRGCRTRKRTCRRH

SEQ ID NO: 816410 - protein, 141 aa, Homo sapiens; identical to SEQ ID NO: 816409

SEQ ID NO: 816411 - protein, 141 aa, Homo sapiens; identical to SEQ ID NO: 816409

SEQ ID NO: 816412 - protein, 148 aa, Homo sapiens
VSHINIGKRVSGRILGYKAGGQASALLPYSRAHCSLSPGATRSPNTMVRYRVRSLSERSHEVYRQQLHGQEQGHHGQEEQGLSPEHVEVYERTHGQSHYRRRHCSRRRLHRIHRRQHRSCRRRKRRSCRHRRRHRRGCRTRKRTCRRH

SEQ ID NO: 816413 - protein, 141 aa, Homo sapiens
VSHINIGKRVSGRILGYKAGGQASALCSLSPGATRSPNTMVRYRVRSLSERSHEVYRQQLHGQEQGHHGQEEQGLSPEHVEVYERTHGQSHYRRRHCSRRRLHRIHRRQHRSCRRRKRRSCRHRRRHRRGCRTRKRTCRRH

SEQ ID NO: 816414 - protein, 222 aa, Homo sapiens
MKFPAGLLLPASSPVGGSDDAGLLGRPVDRFSPGFWMQPQQAKVLHSCTGNTDTGVTKMLKQDVQELLRSAHVTRALPPPPPIFALVARPWAPPLPHQTGGGVLLGMEVGDARLLETPAERGGMAGRMLAARVWPPGSAARPRPGLADLVAQVPPRREVCGKFCSCFPARASGGVVTQRLGILAGTEEREGEAGRDWETEQQEKGRTLGSSWTRRVLLSATP

SEQ ID NO: 816415 - protein, 122 aa, Homo sapiens
LVETWSLPGVWPSPGLVPGNGVREAEPSLNPDPFPVDPSLSPSPAALPPAPGTELSYLNGTFRLLQKPLRWHDALLLCESHNASLAYVPDPYTQAFLTQAHPGATAWDNVNMDSKTWPFLCS

SEQ ID NO: 816416 - protein, 1479 aa, Homo sapiens
MGPGRPAPAPWPRHLLRCVLLLGCLHLGRPGAPGDAALPEPNVFLIFSHGLQGCLEAQGGQVRVTPACNTSLPAQRWKWVSRNRLFNLGTMQCLGTGWPGTNTTASLGMYECDREALNLRWHCRTLGDQLSLLLGARTSNISKPGTLERGDQTRSGQWRIYGSEEDLCALPYHEVYTIQGNSHGKPCTIPFKYDNQWFHGCTSTGREDGHLWCATTQDYGKDERWGFCPIKSNDCETFWDKDQLTDSCYQFNFQSTLSWREAWASCEQQGADLLSITEIHEQTYINGLLTGYSSTLWIGLNDLDTSGGWQWSDNSPLKYLNWESDQPDNPSEENCGVIRTESSGGWQNRDCSIALPYVCKKKPNATAEPTPPDRWANVKVECEPSWQPFQGHCYRLQAEKRSWQESKKACLRGGGDLVSIHSMAELEFITKQIKQEVEELWIGLNDLKLQMNFEWSDGSLVSFTHWHPFEPNNFRDSLEDCVTIWGPEGRWNDSPCNQSLPSICKKAGQLSQGAAEEDHGCRKGWTWHSPSCYWLGEDQVTYSEARRLCTDHGSQLVTITNRFEQAFVSSLIYNWEGEYFWTALQDLNSTGSFFWLSGDEVMYTHWNRDQPGYSRGGCVALATGSAMGLWEVKNCTSFRARYICRQSLGTPVTPELPGPDPTPSLTGSCPQGWASDTKLRYCYKVFSSERLQDKKSWVQAQGACQELGAQLLSLASYEEEHFVANMLNKIFGESEPEIHEQHWFWIGLNRRDPRGGQSWRWSDGVGFSYHNFDRSRHDDDDIRGCAVLDLASLQWVAMQCDTQLDWICKIPRGTDVREPDDSPQGRREWLRFQEAEYKFFEHHSTWAQAQRICTWFQAELTSVHSQAELDFLSHNLQKFSRAQEQHWWIGLHTSESDGRFRWTDGSIINFISWAPGKPRPVGKDKKCVYMTASREDWGDQRCLTALPYICKRSNVTKETQPPDLPTTALGGCPSDWIQFLNKCFQVQGQEPQSRVKWSEAQFSCEQQEAQLVTITNPLEQAFITASLPNVTFDLWIGLHASQRDFQWVEQEPLMYANWAPGEPSGPSPAPSGNKPTSCAVVLHSPSAHFTGRWDDRSCTEETHGFICQKGTDPSLSPSPAALPPAPGTELSYLNGTFRLLQKPLRWHDALLLCESHNASLAYVPDPYTQAFLTQAARGLRTPLWIGLAGEEGSRRYSWVSEEPLNYVGWQDGEPQQPGGCTYVDVDGAWRTTSCDTKLQGAVCGVSSGPPPPRRISYHGSCPQGLADSAWIPFREHCYSFHMELLLGHKEARQRCQRAGGAVLSILDEMENVFVWEHLQSYEGQSRGAWLGMNFNPKGGTLVWQDNTAVNYSNWGPPGLGPSMLSHNSCYWIQSNSGLWRPGACTNITMGVVCKLPRAEQSSFSPSALPENPAALVVVLMAVLLLLALLTAALILYRRRQSIERGAFEGARYSRSSSSPTEATEKNILVSDMEMNEQQE

SEQ ID NO: 816417 - protein, 1479 aa, Homo sapiens; identical to SEQ ID NO: 816416

SEQ ID NO: 816418 - protein, 704 aa, Homo sapiens
AWHGACLGPVCLQARLLPPGSAPALPRPPPGPGVQPLPGRRSHARAAPAGRREWLRFQEAEYKFFEHHSTWAQAQRICTWFQAELTSVHSQAELDFLSHNLQKFSRAQEQHWWIGLHTSESDGRFRWTDGSIINFISWAPGKPRPVGKDKKCVYMTASREDWGDQRCLTALPYICKRSNVTKETQPPDLPTTALGGCPSDWIQFLNKCFQVQGQEPQSRVKWSEAQFSCEQQEAQLVTITNPLEQAFITASLPNVTFDLWIGLHASQRDFQWVEQEPLMYANWAPGEPSGPSPAPSGNKPTSCAVVLHSPSAHFTGRWDDRSCTEETHGFICQKGTDPSLSPSPAALPPAPGTELSYLNGTFRLLQKPLRWHDALLLCESHNASLAYVPDPYTQAFLTQAARGLRTPLWIGLAGEEGSRRYSWVSEEPLNYVGWQDGEPQQPGGCTYVDVDGAWRTTSCDTKLQGAVCGVSSGPPPPRRISYHGSCPQGLADSAWIPFREHCYSFHMELLLGHKEARQRCQRAGGAVLSILDEMENVFVWEHLQSYEGQSRGAWLGMNFNPKGGTLVWQDNTAVNYSNWGPPGLGPSMLSHNSCYWIQSNSGLWRPGACTNITMGVVCKLPRAEQSSFSPSALPENPAALVVVLMAVLLLLALLTAALILYRRRQSIERGAFEGARYSRSSSSPTEATEKNILVSDMEMNEQQE

SEQ ID NO: 816419 - protein, 1479 aa, Homo sapiens; identical to SEQ ID NO: 816416

SEQ ID NO: 816420 - protein, 1323 aa, Homo sapiens
MGPGRPAPAPWPRHLLRCVLLLGCLHLGRPGAPGDAALPEPNVFLIFSHGLQGCLEAQGGQVRVTPACNTSLPAQRWKWVSRNRLFNLGTMQCLGTGWPGTNTTASLGMYECDREALNLRWHCRTLGDQLSLLLGARTSNISKPGTLERGDQTRSGQWRIYGSEEDLCALPYHEVYTIQGNSHGKPCTIPFKYDNQWFHGCTSTGREDGHLWCATTQDYGKDERWGFCPIKSNDCETFWDKDQLTDSCYQFNFQSTLSWREAWASCEQQGADLLSITEIHEQTYINGLLTGYSSTLWIGLNDLDTSGGWQWSDNSPLKYLNWESDQPDNPSEENCGVIRTESSGGWQNRDCSIALPYVCKKKPNATAEPTPPDRWANVKVECEPSWQPFQGHCYRLQAEKRSWQESKKACLRGGGDLVSIHSMAELEFITKQIKQEVEELWIGLNDLKLQMNFEWSDGSLVSFTHWHPFEPNNFRDSLEDCVTIWGPEGRWNDSPCNQSLPSICKKAGQLSQGAAEEDHGCRKGWTWHSPSCYWLGEDQVTYSEARRLCTDHGSQLVTITNRFEQAFVSSLIYNWEGEYFWTALQDLNSTGSFFWLSGDEVMYTHWNRDQPGYSRGGCVALATGSAMGLWEVKNCTSFRARYICRQSLGTPVTPELPGPDPTPSLTGSCPQGWASDTKLRYCYKVFSSERLQDKKSWVQAQGACQELGAQLLSLASYEEEHFVANMLNKIFGESEPEIHEQHWFWIGLNRRDPRGGQSWRWSDGVGFSYHNFDRSRHDDDDIRGCAVLDLASLQWVAMQCDTQLDWICKIPRGTDVREPDDSPQGRREWLRFQEAEYKFFEHHSTWAQAQRICTWFQAELTSVHSQAELDFLSHNLQKFSRAQEQHWWIGLHTSESDGRFRWTDGSIINFISWAPGKPRPVGKDKKCVYMTASREDWGDQRCLTALPYICKRSNVTKETQPPDLPTTALGGCPSDWIQFLNKCFQVQGQEPQSRVKWSEAQFSCEQQEAQLVTITNPLEQAFITASLPNVTFDLWIGLHASQRDFQWVEQEPLMYANWAPGEPSGPSPAPSGNKPTSCAVVLHSPSAHFTGRWDDRSCTEETHGFICQKGTDPSLSPSPAALPPAPGTELSYLNGTFRLLQKPLRWHDALLLCESHNASLAYVPDPYTQAFLTQAARGLRTPLWIGLAGEEGSRRYSWVSEEPLNYVGWQDGEPQQPGGCTYVDVDGAWRTTSCDTKLQGAVCGVSSGPPPPRRISYHGSCPQGLADSAWIPFREHCYSFHMELLLGHKEARQRCQRAGGAVLSILDEMENVFVWKSPLWGPK

SEQ ID NO: 816421 - protein, 907 aa, Homo sapiens
MGPGRPAPAPWPRHLLRCVLLLGCLHLGRPGAPGDAALPEPNVFLIFSHGLQGCLEAQGGQVRVTPACNTSLPAQRWKWVSRNRLFNLGTMQCLGTGWPGTNTTASLGMYECDREALNLRWHCRTLGDQLSLLLGARTSNISKPGTLERGDQTRSGQWRIYGSEEDLCALPYHEVYTIQGNSHGKPCTIPFKYDNQWFHGCTSTGREDGHLWCATTQDYGKDERWGFCPIKSNDCETFWDKDQLTDSCYQFNFQSTLSWREAWASCEQQGADLLSITEIHEQTYINGLLTGYSSTLWIGLNDLDTSGGWQWSDNSPLKYLNWESDQPDNPSEENCGVIRTESSGGWQNRDCSIALPYVCKKKPNATAEPTPPDRWANVKVECEPSWQPFQGHCYRLQAEKRSWQESKKACLRGGGDLVSIHSMAELEFITKQIKQEVEELWIGLNDLKLQMNFEWSDGSLVSFTHWHPFEPNNFRDSLEDCVTIWGPEGRWNDSPCNQSLPSICKKAGQLSQGAAEEDHGCRKGWTWHSPSCYWLGEDQVTYSEARRLCTDHGSQLVTITNRFEQAFVSSLIYNWEGEYFWTALQDLNSTGSFFWLSGDEVMYTHWNRDQPGYSRGGCVALATGSAMGLWEVKNCTSFRARYICRQSLGTPVTPELPGPDPTPSLTGSCPQGWASDTKLRYCYKVFSSERLQDKKSWVQAQGACQELGAQLLSLASYEEEHFVANMLNKIFGESEPEIHEQHWFWIGLNRRDPRGGQSWRWSDGVGFSYHNFDRSRHDDDDIRGCAVLDLASLQWVAMQCDTQLDWICKIPRGTDVREPDDSPQGRREWLRFQEAEYKFFEHHSTWAQAQRICTWFQAELTSVHSQAELDFLSHNLQKFSRAQEQHWWIGLHTSESDGRFRRNPGRQ

SEQ ID NO: 816422 - protein, 285 aa, Homo sapiens
MGPGRPAPAPWPRHLLRCVLLLGCLHLGRPGAPGDAALPEPNVFLIFSHGLQGCLEAQGGQVRVTPACNTSLPAQRWKWVSRNRLFNLGTMQCLGTGWPGTNTTASLGMYECDREALNLRWHCRTLGDQLSLLLGARTSNISKPGTLERGDQTRSGQWRIYGSEEDLCALPYHEVYTIQGNSHGKPCTIPFKYDNQWFHGCTSTGREDGHLWCATTQDYGKEEQESGRAQSSPSSGSRRSSTRALEWPSTLPRGHSPSQDKVCGPSWCDSVGQCEHGLEDMALSL

SEQ ID NO: 816423 - protein, 901 aa, Homo sapiens
MGPGRPAPAPWPRHLLRCVLLLGCLHLGRPGAPGDAALPEPNVFLIFSHGLQGCLEAQGGQVRVTPACNTSLPAQRWKWVSRNRLFNLGTMQCLGTGWPGTNTTASLGMYECDREALNLRWHCRTLGDQLSLLLGARTSNISKPGTLERGDQTRSGQWRIYGSEEDLCALPYHEVYTIQGNSHGKPCTIPFKYDNQWFHGCTSTGREDGHLWCATTQDYGKDERWGFCPIKSNDCETFWDKDQLTDSCYQFNFQSTLSWREAWASCEQQGADLLSITEIHEQTYINGLLTGYSSTLWIGLNDLDTSGGWQWSDNSPLKYLNWESDQPDNPSEENCGVIRTESSGGWQNRDCSIALPYVCKKKPNATAEPTPPDRWANVKVECEPSWQPFQGHCYRLQAEKRSWQESKKACLRGGGDLVSIHSMAELEFITKQIKQEVEELWIGLNDLKLQMNFEWSDGSLVSFTHWHPFEPNNFRDSLEDCVTIWGPEGRWNDSPCNQSLPSICKKAGQLSQGAAEEDHGCRKGWTWHSPSCYWLGEDQVTYSEARRLCTDHGSQLVTITNRFEQAFVSSLIYNWEGEYFWTALQDLNSTGSFFWLSGDEVMYTHWNRDQPGYSRGGCVALATGSAMGLWEVKNCTSFRARYICRQSLGTPVTPELPGPDPTPSLTGSCPQGWASDTKLRYCYKVFSSERLQDKKSWVQAQGACQELGAQLLSLASYEEEHFVANMLNKIFGESEPEIHEQHWFWIGLNRRDPRGGQSWRWSDGVGFSYHNFDRSRHDDDDIRGCAVLDLASLQWVAMQCDTQLDWICKIPRGTDVREPDDSPQGRREWLRFQEAEYKFFEHHSTCTCAAPVPTWSGAQRTCTRPPGSAILLDLDLRAFVLLTHLRISWVSSGSSLAVCRT

SEQ ID NO: 816424 - protein, 211 aa, Homo sapiens
MGPGRPAPAPWPRHLLRCVLLLGCLHLGRPGAPGDAALPEPNVFLIFSHGLQGCLEAQGGQVRVTPACNTSLPAQRWKWVSRNRLFNLGTMQCLGTGWPGTNTTASLGMYECDREALNLRWHCRTLGDQLSLLLGARTSNISKPGTLERGDQTRSGQWRIYGSEEDLCALPYHEVYTIQGNSHGKPCTIPFKYDNQWFHGCTILVRQRGTM

SEQ ID NO: 816425 - protein, 553 aa, Homo sapiens
MGPGRPAPAPWPRHLLRCVLLLGCLHLGRPGAPGDAALPEPNVFLIFSHGLQGCLEAQGGQVRVTPACNTSLPAQRWKWVSRNRLFNLGTMQCLGTGWPGTNTTASLGMYECDREALNLRWHCRTLGDQLSLLLGARTSNISKPGTLERGDQTRSGQWRIYGSEEDLCALPYHEVYTIQGNSHGKPCTIPFKYDNQWFHGCTSTGREDGHLWCATTQDYGKDERWGFCPIKSNDCETFWDKDQLTDSCYQFNFQSTLSWREAWASCEQQGADLLSITEIHEQTYINGLLTGYSSTLWIGLNDLDTSGGWQWSDNSPLKYLNWESDQPDNPSEENCGVIRTESSGGWQNRDCSIALPYVCKKKPNATAEPTPPDRWANVKVECEPSWQPFQGHCYRLQAEKRSWQESKKACLRGGGDLVSIHSMAELEFITKQIKQEVEELWIGLNDLKLQMNFEWSDGSLVSFTHWHPFEPNNFRDSLEDCVTIWGPEGRWNDSPCNQSLPSICKKAGQLSQGAAEEDHGCRKSPSQDKVCGPSWCDSVGQCEHGLEDMALSL

SEQ ID NO: 816426 - protein, 129 aa, Homo sapiens
MGPGRPAPAPWPRHLLRCVLLLGCLHLGRPGAPGDAALPEPNVFLIFSHGLQGCLEAQGGQVRVTPACNTSLPAQRWKWVSRNRLFNLGTMQCLGTGWPGTNTTASLGMYECDREALNLRILVRQRGTM

SEQ ID NO: 816427 - protein, 240 aa, Homo sapiens
KEAGWRGGCWRPGSGHLGQLHAPAPGWPDLVAQVPPRREVCGKFCSCFPARASGGVVTQRLGILAGTEEREGEAGRDWETEQQEKGRTLGSSWTRRVLLSATPFSPSRRSSPRPAPPPLPLPRCPLPFPSTPRTLLPGSALLPPPGLPPPSSSPGGITSSRPGGGREPLAGGHHSPASGLPQRVAPVRPRSPRPLSAALGDGARPAGPRALASSPAALRPAPRVPAPRPSRRPWGRRPPG

SEQ ID NO: 816428 - protein, 347 aa, Homo sapiens
METNGAKIVSTRAWKKNEKLELLVGCIAELREADEGLLRAGENDFSIMYSTRKRSAQLWLGPAAFINHDCKPNCKFVPADGNAACVKVLRDIEPGDEVTCFYGEGFFGEKNEHCECHTCERKGEGAFRTRPREPALPPRPLDKYQLRETKRRLQQGLDSGSRQGLLGPRACVHPSPLRRDPFCAACQPLRLPACSARPDTSPLWLQWLPQPQPRVRPRKRRRPRPRRAPVLSTHHAARVSLHRWGGCGPHCRLRGEALVALGQPPHARWAPQQDWHWARRYGLPYVVRVDLRRLAPAPPATPAPAGTPGPILIPKQALAFAPFSPPKRLRLVVSHGSIDLDVGGEEL

SEQ ID NO: 816429 - protein, 347 aa, Homo sapiens; identical to SEQ ID NO: 816428

SEQ ID NO: 816430 - protein, 462 aa, Homo sapiens
MGPDRVTARELCENDDLATSLVLDPYLGFRTHKMNVSPVPPLRRQQHLRSALETFLRQRDLEAAYRALTLGGWTARYFQSRGPRQEAALKTHVYRYLRAFLPESGFTILPCTRYSMETNGAKIVSTRAWKKNEKLELLVGCIAELREADEGLLRAGENDFSIMYSTRKRSAQLWLGPAAFINHDCKPNCKFVPADGNAACVKVLRDIEPGDEVTCFYGEGFFGEKNEHCECHTCERKGEGAFRTRPREPALPPRPLDKYQLRETKRRLQQGLDSGSRQGLLGPRACVHPSPLRRDPFCAACQPLRLPACSARPDTSPLWLQWLPQPQPRVRPRKRRRPRPRRAPVLSTHHAARVSLHRWGGCGPHCRLRGEALVALGQPPHARWAPQQDWHWARRYGLPYVVRVDLRRLAPAPPATPAPAGTPGPILIPKQALAFAPFSPPKRLRLVVSHGSIDLDVGGEEL

SEQ ID NO: 816431 - protein, 447 aa, Homo sapiens
MGPDRVTARELCENDDLATSLVLDPYLGFRTHKMNVSPVPPLRRQQHLRSALETFLRQRDLEAAYRALTLGGWTARYFQSRGPRQEAASRPTSIATSVPSCRKVALPSCPARATPWRPTGPRSCPLVLELREADEGLLRAGENDFSIMYSTRKRSAQLWLGPAAFINHDCKPNCKFVPADGNAACVKVLRDIEPGDEVTCFYGEGFFGEKNEHCECHTCERKGEGAFRTRPREPALPPRPLDKYQLRETKRRLQQGLDSGSRQGLLGPRACVHPSPLRRDPFCAACQPLRLPACSARPDTSPLWLQWLPQPQPRVRPRKRRRPRPRRAPVLSTHHAARVSLHRWGGCGPHCRLRGEALVALGQPPHARWAPQQDWHWARRYGLPYVVRVDLRRLAPAPPATPAPAGTPGPILIPKQALAFAPFSPPKRLRLVVSHGSIDLDVGGEEL

SEQ ID NO: 816432 - protein, 456 aa, Homo sapiens
MGPDRVTARELCENDDLATSLVLDPYLGFRTHKMNVRSIATSVPSCRKVALPSCPARATPWRPTGPRSCPLVLAVPLVNEELTYSLDAAVWACICMRLREGRLRGLLDAARVSELDVSGILVAIVEALGYAGRSLMPWWPCGLTPAFSTLERDCSLQRAPELRETRCVAVLPCANVMPSAVKGDSGGHLQVLVALRLHHAFLPRDGASSAMKELSDCELRTTCDDGHRDWKGEGAFRTRPREPALPPRPLDKYQLRETKRRLQQGLDSGSRQGLLGPRACVHPSPLRRDPFCAACQPLRLPACSARPDTSPLWLQWLPQPQPRVRPRKRRRPRPRRAPVLSTHHAARVSLHRWGGCGPHCRLRGEALVALGQPPHARWAPQQDWHWARRYGLPYVVRVDLRRLAPAPPATPAPAGTPGPILIPKQALAFAPFSPPKRLRLVVSHGSIDLDVGGEEL

SEQ ID NO: 816433 - protein, 319 aa, Homo sapiens
RNATFRGSAVAPFQERTLRARVPGQVWGVGEPSPVPWARALSGLGPQFVPADGNAACVKVLRDIEPGDEVTCFYGEGFFGEKNEHCECHTCERKGEGAFRTRPREPALPPRPLDKYQLRETKRRLQQGLDSGSRQGLLGPRACVHPSPLRRDPFCAACQPLRLPACSARPDTSPLWLQWLPQPQPRVRPRKRRRPRPRRAPVLSTHHAARVSLHRWGGCGPHCRLRGEALVALGQPPHARWAPQQDWHWARRYGLPYVVRVDLRRLAPAPPATPAPAGTPGPILIPKQALAFAPFSPPKRLRLVVSHGSIDLDVGGEEL

SEQ ID NO: 816434 - protein, 230 aa, Homo sapiens
MGPDRVTARELCENDDLATSLVLDPYLGFRTHKMNVSPVPPLRRQQHLRSALETFLRQRDLEAAYRALTLGGWTARYFQSRGPRQEAALKTHVYRYLRAFLPESGFTILPCTRYSMETNGAKIVSTRAWKKNEKLELLVGCIAELREADEGLLRAGENDFSIMYSTRKRSAQLWLGPAAFINHDCKPNCKVRPWDSGGEGTQEERVPVAWGKGFWSVKSQTPAGRGGSCL

SEQ ID NO: 816435 - protein, 72 aa, Homo sapiens
MELGSRRRSVGCRCRGLCLAVRREQVTFEDVVVDFSQEEWGQLKPAQRTLYRDVMLDTFRLLVSVAPLCLPP

SEQ ID NO: 816436 - protein, 692 aa, Homo sapiens
MELGSRRRSVGCRCRGLCLAVRRSRASRSCQKPGMTPGVRVSTDPEQVTFEDVVVDFSQEEWGQLKPAQRTLYRDVMLDTFRLLVSVGHWLPKPNVISLLEQEAELWAVESRLPQGVYPDLETRPKVKLSVLKQGISEEISNSVILVERFLWDGLWYCRGEDTEGHWEWSCESLESLAVPVAFTPVKTPVLEQWQRNGFGENISLNPDLPHQPMTPERQSPHTWGTRGKREKPDLNVLQKTCVKEKPYKCQECGKAFSHSSALIEHHRTHTGERPYECHECLKGFRNSSALTKHQRIHTGEKPYKCTQCGRTFNQIAPLIQHQRTHTGEKPYECSECGKSFSFRSSFSQHERTHTGEKPYECSECGKAFRQSIHLTQHLRIHTGEKPYQCGECGKAFSHSSSLTKHQRIHTGEKPYECHECGKAFTQITPLIQHQRTHTGEKPYECGECGKAFSQSTLLTEHRRIHTGEKPYGCNECGKTFSHSSSLSQHERTHTGEKPYECSQCGKAFRQSTHLTQHQRIHTGEKPYECNDCGKAFSHSSSLTKHQRIHTGEKPYECNQCGRAFSQLAPLIQHQRIHTGEKPYECNQCGRAFSQSSLLIEHQRIHTKEKPYGCNECGKSFSHSSSLSQHERTHTGEKPYECHDCGKSFRQSTHLTQHRRIHTGEKPYACRDCGKAFTHSSSLTKHQRTHTG

SEQ ID NO: 816437 - protein, 153 aa, Homo sapiens
LIIEVSLLHRVICKTFRSGLLPSFSIRGSTQERNPMNVTSVAEPSARAPFSSNTRGFTPRKSRMGAMSVGNPSATAPRSASTKGRTLGKSPMSVTIAESPLGRAPTSLSTGGSTQERSHMHAGTVERPLPTAPPLPSTRELTLDKPTPHVLGT

SEQ ID NO: 816438 - protein, 145 aa, Homo sapiens
MELGSRRRSVGCRCRGLCLAVRRSRASRSCQKPGMTPGVRVSTDPEQVTFEDVVVDFSQEEWGQLKPAQRTLYRDVMLDTFRLLVSVGHWLPKPNVISLLEQEAELWAVESRLPQGVYPGEMGALRGREKPVHACFLVSPSASAL

SEQ ID NO: 816439 - protein, 1096 aa, Homo sapiens
MGSEDHGAQNPSCKIMTFRPTMEEFKDFNKYVAYIESQGAHRAGLAKIIPPKEWKPRQTYDDIDDVVIPAPIQQVVTGQSGLFTQYNIQKKAMTVGEYRRLANSEKYCTPRHQDFDDLERKYWKNLTFVSPIYGADISGSLYDDDVAQWNIGSLRTILDMVERECGTIIEGVNTPYLYFGMWKTTFAWHTEDMDLYSINYLHFGEPKSWYAIPPEHGKRLERLAIGFFPGSSQGCDAFLRHKMTLISPIILKKYGIPFSRITQEAGEFMITFPYGYHAGFNHGFNCAESTNFATLRWIDYGKVATQCTCRKDMVKISMDVFVRILQPERYELWKQGKDLTVLDHTRPTALTSPELSSWSASRASLKAKLLRRSHRKRSQPKKPKPEDPKFPGEGTAGAALLEEAGGSVKEEAGPEVDPEEEEEEPQPLPHGREAEGAEEDGRGKLRPTKAKSERKKKSFGLLPPQLPPPPAHFPSEEALWLPSPLEPPVLGPGPAAMEESPLPAPLNVVPPEVPSEELEAKPRPIIPMLYVVPRPGKAAFNQEHVSCQQAFEHFAQKGPTWKEPVSPMELTGPEDGAASSGAGRMETKARAGEGQAPSTFSKLKMEIKKSRRHPLGRPPTRSPLSVVKQEASSDEEASPFSGEEDVSDPDALRPLLSLQWKNRAASFQAERKFNAAAARTEPYCAICTLFYPYCQALQTEKEAPIASLGEGCPATLPSKSRQKTRPLIPEMCFTSGGENTEPLPANSYIGDDGTSPLIACGKCCLQVHASCYGIRPELVNEGWTCSRCAAHAWTAECCLCNLRGGALQMTTDRRWIHVICAIAVPEARFLNVIERHPVDISAIPEQRWKLKCVYCRKRMKKVSGACIQCSYEHCSTSFHVTCAHAAGVLMEPDDWPYVVSITCLKHKSGGHAVQLLRAVSLGQVVITKNRNGLYYRCRVIGAASQTCYEVNFDDGSYSDNLYPESITSRDCVQLGPPSEGELVELRWTDGNLYKAKFISSVTSHIYQVEFEDGSQLTVKRGDIFTLEEELPKRVRSRLSLSTGAPQEPAFSGEEAKAAKRPRVGTPLATEDSGRSQDYVAFVESLLQVQGRPGAPF

SEQ ID NO: 816440 - protein, 630 aa, Homo sapiens
GSRPKLFFFRSLLALVGRSLPPVLGPGPAAMEESPLPAPLNVVPPEVPSEELEAKPRPIIPMLYVVPRPGKAAFNQEHVSCQQAFEHFAQKGPTWKEPVSPMELTGPEDGAASSGAGRMETKARAGEGQAPSTFSKLKMEIKKSRRHPLGRPPTRSPLSVVKQEASSDEEASPFSGEEDVSDPDALRPLLSLQWKNRAASFQAERKFNAAAARTEPYCAICTLFYPYCQALQTEKEAPIASLGEGCPATLPSKSRQKTRPLIPEMCFTSGGENTEPLPANSYIGDDGTSPLIACGKCCLQVHASCYGIRPELVNEGWTCSRCAAHAWTAECCLCNLRGGALQMTTDRRWIHVICAIAVPEARFLNVIERHPVDISAIPEQRWKLKCVYCRKRMKKVSGACIQCSYEHCSTSFHVTCAHAAGVLMEPDDWPYVVSITCLKHKSGGHAVQLLRAVSLGQVVITKNRNGLYYRCRVIGAASQTCYEVNFDDGSYSDNLYPESITSRDCVQLGPPSEGELVELRWTDGNLYKAKFISSVTSHIYQVEFEDGSQLTVKRGDIFTLEEELPKRVRSRLSLSTGAPQEPAFSGEEAKAAKRPRVGTPLATEDSGRSQDYVAFVESLLQVQGRPGAPF

SEQ ID NO: 816441 - protein, 1130 aa, Homo sapiens
MGSEDHGAQNPSCKIMTFRPTMEEFKDFNKYVAYIESQGAHRAGLAKIIPPKEWKPRQTYDDIDDVVIPAPIQQVVTGQSGLFTQYNIQKKAMTVGEYRRLANSEKYCTPRHQDFDDLERKYWKNLTFVSPIYGADISGSLYDDDVAQWNIGSLRTILDMVERECGTIIEGVNTPYLYFGMWKTTFAWHTEDMDLYSINYLHFGEPKSWYAIPPEHGKRLERLAIGFFPGSSQGCDAFLRHKMTLISPIILKKYGIPFSRITQEAGEFMITFPYGYHAGFNHGFNCAESTNFATLRWIDYGKVATQCTCRKDMVKISMDVFVRILQPERYELWKQGKDLTVLDHTRPTALTSPELSSWSASRASLKAKLLRRQISLKENRHWRKTEEERKPSLERKKEQTKRPGLSSHRKRSQPKKPKPEDPKFPGEGTAGAALLEEAGGSVKEEAGPEVDPEEEEEEPQPLPHGREAEGAEEDGRGKLRPTKAKSERKKKSFGLLPPQLPPPPAHFPSEEALWLPSPLEPPVLGPGPAAMEESPLPAPLNVVPPEVPSEELEAKPRPIIPMLYVVPRPGKAAFNQEHVSCQQAFEHFAQKGPTWKEPVSPMELTGPEDGAASSGAGRMETKARAGEGQAPSTFSKLKMEIKKSRRHPLGRPPTRSPLSVVKQEASSDEEASPFSGEEDVSDPDALRPLLSLQWKNRAASFQAERKFNAAAARTEPYCAICTLFYPYCQALQTEKEAPIASLGEGCPATLPSKSRQKTRPLIPEMCFTSGGENTEPLPANSYIGDDGTSPLIACGKCCLQVHASCYGIRPELVNEGWTCSRCAAHAWTAECCLCNLRGGALQMTTDRRWIHVICAIAVPEARFLNVIERHPVDISAIPEQRWKLKCVYCRKRMKKVSGACIQCSYEHCSTSFHVTCAHAAGVLMEPDDWPYVVSITCLKHKSGGHAVQLLRAVSLGQVVITKNRNGLYYRCRVIGAASQTCYEVNFDDGSYSDNLYPESITSRDCVQLGPPSEGELVELRWTDGNLYKAKFISSVTSHIYQVEFEDGSQLTVKRGDIFTLEEELPKRVRSRLSLSTGAPQEPAFSGEEAKAAKRPRVGTPLATEDSGRSQDYVAFVESLLQVQGRPGAPF

SEQ ID NO: 816442 - protein, 770 aa, Homo sapiens
MGAFFFNTSICLQISLKENRHWRKTEEERKPSLERKKEQTKRPGLSSHRKRSQPKKPKPEDPKFPGEGTAGAALLEEAGGSVKEEAGPEVDPEEEEEEPQPLPHGREAEGAEEDGRGKLRPTKAKSERKKKSFGLLPPQLPPPPAHFPSEEALWLPSPLEPPVLGPGPAAMEESPLPAPLNVVPPEVPSEELEAKPRPIIPMLYVVPRPGKAAFNQEHVSCQQAFEHFAQKGPTWKEPVSPMELTGPEDGAASSGAGRMETKARAGEGQAPSTFSKLKMEIKKSRRHPLGRPPTRSPLSVVKQEASSDEEASPFSGEEDVSDPDALRPLLSLQWKNRAASFQAERKFNAAAARTEPYCAICTLFYPYCQALQTEKEAPIASLGEGCPATLPSKSRQKTRPLIPEMCFTSGGENTEPLPANSYIGDDGTSPLIACGKCCLQVHASCYGIRPELVNEGWTCSRCAAHAWTAECCLCNLRGGALQMTTDRRWIHVICAIAVPEARFLNVIERHPVDISAIPEQRWKLKCVYCRKRMKKVSGACIQCSYEHCSTSFHVTCAHAAGVLMEPDDWPYVVSITCLKHKSGGHAVQLLRAVSLGQVVITKNRNGLYYRCRVIGAASQTCYEVNFDDGSYSDNLYPESITSRDCVQLGPPSEGELVELRWTDGNLYKAKFISSVTSHIYQVEFEDGSQLTVKRGDIFTLEEELPKRVRSRLSLSTGAPQEPAFSGEEAKAAKRPRVGTPLATEDSGRSQDYVAFVESLLQVQGRPGAPF

SEQ ID NO: 816443 - protein, 131 aa, Homo sapiens [sequence omitted]

SEQ ID NO: 816444 - protein, 1130 aa, Homo sapiens; identical to SEQ ID NO: 816441

SEQ ID NO: 816445 - protein, 503 aa, Homo sapiens
MGSEDHGAQNPSCKIMTFRPTMEEFKDFNKYVAYIESQGAHRAGLAKIIPPKEWKPRQTYDDIDDVVIPAPIQQVVTGQSGLFTQYNIQKKAMTVGEYRRLANSEKYCTPRHQDFDDLERKYWKNLTFVSPIYGADISGSLYDDDVAQWNIGSLRTILDMVERECGTIIEGVNTPYLYFGMWKTTFAWHTEDMDLYSINYLHFGEPKSWYAIPPEHGKRLERLAIGFFPGSSQGCDAFLRHKMTLISPIILKKYGIPFSRITQEAGEFMITFPYGYHAGFNHGFNCAESTNFATLRWIDYGKVATQCTCRKDMVKISMDVFVRILQPERYELWKQGKDLTVLDHTRPTALTSPELSSWSASRASLKAKLLRRQISLKENRHWRKTEEERKPSLERKKEQTKRPGLSSHRKRSQPKKPKPEDPKFPGEGTAGAALLEEAGGSVKEEAGPEVDPEEEEEEPQPLPHGSRARRARGPARGAPHSTTQNFKPCKLSSSRKGATAMPY

SEQ ID NO: 816446 - protein, 131 aa, Homo sapiens [sequence omitted]

SEQ ID NO: 816447 - protein, 1130 aa, Homo sapiens; identical to SEQ ID NO: 816441

SEQ ID NO: 816448 - protein, 1130 aa, Homo sapiens; identical to SEQ ID NO: 816441

SEQ ID NO: 816449 - protein, 1130 aa, Homo sapiens; identical to SEQ ID NO: 816441

SEQ ID NO: 816450 - protein, 911 aa, Homo sapiens
MGSEDHGAQNPSCKIMTFRPTMEEFKDFNKYVAYIESQGAHRAGLAKIIPPKEWKPRQTYDDIDDVVIPAPIQQVVTGQSGLFTQYNIQKKAMTVGEYRRLANSEKYCTPRHQDFDDLERKYWKNLTFVSPIYGADISGSLYDDDVAQWNIGSLRTILDMVERECGTIIEGVNTPYLYFGMWKTTFAWHTEDMDLYSINYLHFGEPKSWYAIPPEHGKRLERLAIGFFPGSSQGCDAFLRHKMTLISPIILKKYGIPFSRITQEAGEFMITFPYGYHAGFNHGFNCAESTNFATLRWIDYGKVATQCTCRKDMVKISMDVFVRILQPERYELWKQGKDLTVLDHTRPTALTSPELSSWSASRASLKAKLLRRQISLKENRHWRKTEEERKPSLERKKEQTKRPGLSSHRKRSQPKKPKPEDPKFPGEGTAGAALLEEAGGSVKEEAGPEVDPEEEEEEPQPLPHGREAEGAEEDGRGKLRPTKAKSERKKKSFGLLPPQLPPPPAHFPSEEALWLPSPLEPPVLGPGPAAMEESPLPAPLNVVPPEVPSEELEAKPRPIIPMLYVVPRPGKAAFNQEHVSCQQAFEHFAQKGPTWKEPVSPMELTGPEDGAASSGAGRMETKARAGEGQAPSTFSKLKMEIKKSRRHPLGRPPTRSPLSVVKQEASSDEEASPFSGEEDVSDPDALRPLLSLQWKNRAASFQAERKFNAAAARTEPYCAICTLFYPYCQALQTEKEAPIASLGEGCPATLPSKSRQKTRPLIPEMCFTSGGENTEPLPANSYIGDDGTSPLIACGKCCLQVHASCYGIRPELVNEGWTCSRCAAHAWTAECCLCNLRGGALQMTTDRRWIHVICAIAVPEARFLNVIERHPVDISAIPEQRWKLVRSLGPGGAWPIMAWAAALQGCLLHTL

SEQ ID NO: 816451 - protein, 1130 aa, Homo sapiens; identical to SEQ ID NO: 816441

SEQ ID NO: 816452 - protein, 357 aa, Homo sapiens
MGSEDHGAQNPSCKIMTFRPTMEEFKDFNKYVAYIESQGAHRAGLAKIIPPKEWKPRQTYDDIDDVVIPAPIQQVVTGQSGLFTQYNIQKKAMTVGEYRRLANSEKYCTPRHQDFDDLERKYWKNLTFVSPIYGADISGSLYDDDVAQWNIGSLRTILDMVERECGTIIEGVNTPYLYFGMWKTTFAWHTEDMDLYSINYLHFGEPKSWYAIPPEHGKRLERLAIGFFPGSSQGCDAFLRHKMTLISPIILKKYGIPFSRITQEAGEFMITFPYGYHAGFNHGFNCAESTNFATLRWIDYGKVATQGQGVGGLASSGARFHQPENALPLMAKMVSPLCEYTSSCVAHLVNCRAHESH

SEQ ID NO: 816453 - protein, 569 aa, Homo sapiens
MAMESTATAAVAAELVSADKIEDVPAPSTSADKVESLDVDSEAKKLLGLGQKHLVMGDIPAAVNAFQEAASLLGKKYGETANECGEAFFFYGKSLLELARMENGVLGNALEGVHVEEEEGEKTEDESLVENNDNIDEEAREELREQVYDAMGEKEEAKKTEDKSLAKPETDKEQDSEMEKGGREDMDISKSAEEPQEKVDLTLDWLTETSEEAKGGAAPEGPNEAEVTSGKPEQEVPDAEEEKSVSGTDVQEECREKGGQEKQGEVIVSIEEKPKEVSEEQPVVTLEKQGTAVEVEAESLDPTVKPVDVGGDEPEEKVVTSENEAGKAVLEQLVGQEVPPAEESPEVTTEAAEASAVEAGSEVSEKPGQEAPVLPKDGAVNGPSVVGDQTPIEPQTSIERLTETKDGSGLEEKVRAKLVPSQEETKLSVEESEAAGDGVDTKVAQGATEKSPEDKVQIAANEETQEREEQMKEGEETEGSEEDDKENDKTEEMPNDSVLENKSLQENEEEEIGNLELAWDMLDLAKIIFKRQETKEAQLYAAQAHLKLGEVSVESENYVQAVGGVPVLP

SEQ ID NO: 816454 - protein, 230 aa, Homo sapiens
MAMESTATAAVAAELVSADKIEDVPAPSTSADKVESLDVDSEAKKLLGLGQKHLVMGDIPAAVNAFQEAASLLGKKYGETANECGEAFFFYGKSLLELARMENGVLGNALEGVHVEEEEGEKTEDESLVENNDNIDETEGSEEDDKENDKTEEMPNDSVLENKSLQENEEEEIGNLELAWDMLDLAKIIFKRQETKEAQLYAAQAHLKLGEVSVESENYVQAVGGVPVLP

SEQ ID NO: 816455 - protein, 230 aa, Homo sapiens; identical to SEQ ID NO: 816454

SEQ ID NO: 816456 - protein, 230 aa, Homo sapiens; identical to SEQ ID NO: 816454

SEQ ID NO: 816457 - protein, 230 aa, Homo sapiens; identical to SEQ ID NO: 816454

SEQ ID NO: 816458 - protein, 230 aa, Homo sapiens; identical to SEQ ID NO: 816454

SEQ ID NO: 816459 - protein, 230 aa, Homo sapiens; identical to SEQ ID NO: 816454

SEQ ID NO: 816460 - protein, 230 aa, Homo sapiens; identical to SEQ ID NO: 816454

SEQ ID NO: 816461 - protein, 230 aa, Homo sapiens; identical to SEQ ID NO: 816454

SEQ ID NO: 816462 - protein, 230 aa, Homo sapiens; identical to SEQ ID NO: 816454

SEQ ID NO: 816463 - protein, 230 aa, Homo sapiens; identical to SEQ ID NO: 816454

SEQ ID NO: 816464 - protein, 230 aa, Homo sapiens; identical to SEQ ID NO: 816454

SEQ ID NO: 816465 - protein, 230 aa, Homo sapiens; identical to SEQ ID NO: 816454

SEQ ID NO: 816466 - protein, 571 aa, Homo sapiens
MFLLLLHLQIKWRATINLLSVTEDGLHFVEYYLNRIIHLDVDSEAKKLLGLGQKHLVMGDIPAAVNAFQEAASLLGKKYGETANECGEAFFFYGKSLLELARMENGVLGNALEGVHVEEEEGEKTEDESLVENNDNIDEEAREELREQVYDAMGEKEEAKKTEDKSLAKPETDKEQDSEMEKGGREDMDISKSAEEPQEKVDLTLDWLTETSEEAKGGAAPEGPNEAEVTSGKPEQEVPDAEEEKSVSGTDVQEECREKGGQEKQGEVIVSIEEKPKEVSEEQPVVTLEKQGTAVEVEAESLDPTVKPVDVGGDEPEEKVVTSENEAGKAVLEQLVGQEVPPAEESPEVTTEAAEASAVEAGSEVSEKPGQEAPVLPKDGAVNGPSVVGDQTPIEPQTSIERLTETKDGSGLEEKVRAKLVPSQEETKLSVEESEAAGDGVDTKVAQGATEKSPEDKVQIAANEETQEREEQMKEGEETEGSEEDDKENDKTEEMPNDSVLENKSLQENEEEEIGNLELAWDMLDLAKIIFKRQETKEAQLYAAQAHLKLGEVSVESENYVQAVGGVPVLP

SEQ ID NO: 816467 - protein, 514 aa, Homo sapiens
MGDIPAAVNAFQEAASLLGKKYGETANECGEAFFFYGKSLLELARMENGVLGNALEGVHVEEEEGEKTEDESLVENNDNIDEEAREELREQVYDAMGEKEEAKKTEDKSLAKPETDKEQDSEMEKGGREDMDISKSAEEPQEKVDLTLDWLTETSEEAKGGAAPEGPNEAEVTSGKPEQEVPDAEEEKSVSGTDVQEECREKGGQEKQGEVIVSIEEKPKEVSEEQPVVTLEKQGTAVEVEAESLDPTVKPVDVGGDEPEEKVVTSENEAGKAVLEQLVGQEVPPAEESPEVTTEAAEASAVEAGSEVSEKPGQEAPVLPKDGAVNGPSVVGDQTPIEPQTSIERLTETKDGSGLEEKVRAKLVPSQEETKLSVEESEAAGDGVDTKVAQGATEKSPEDKVQIAANEETQEREEQMKEGEETEGSEEDDKENDKTEEMPNDSVLENKSLQENEEEEIGNLELAWDMLDLAKIIFKRQETKEAQLYAAQAHLKLGEVSVESENYVQAVGGVPVLP

SEQ ID NO: 816468 - protein, 452 aa, Homo sapiens
MPLSLNSKTCLCFMFFNHVEEAREELREQVYDAMGEKEEAKKTEDKSLAKPETDKEQDSEMEKGGREDMDISKSAEEPQEKVDLTLDWLTETSEEAKGGAAPEGPNEAEVTSGKPEQEVPDAEEEKSVSGTDVQEECREKGGQEKQGEVIVSIEEKPKEVSEEQPVVTLEKQGTAVEVEAESLDPTVKPVDVGGDEPEEKVVTSENEAGKAVLEQLVGQEVPPAEESPEVTTEAAEASAVEAGSEVSEKPGQEAPVLPKDGAVNGPSVVGDQTPIEPQTSIERLTETKDGSGLEEKVRAKLVPSQEETKLSVEESEAAGDGVDTKVAQGATEKSPEDKVQIAANEETQEREEQMKEGEETEGSEEDDKENDKTEEMPNDSVLENKSLQENEEEEIGNLELAWDMLDLAKIIFKRQETKEAQLYAAQAHLKLGEVSVESENYVQAVGGVPVLP

SEQ ID NO: 816469 - protein, 532 aa, Homo sapiens
MAMESTATAAVAAELVSADKIEDVPAPSTSADKVERGKKYGETANECGEAFFFYGKSLLELARMENGVLGNALEGVHVEEEEGEKTEDESLVENNDNIDEEAREELREQVYDAMGEKEEAKKTEDKSLAKPETDKEQDSEMEKGGREDMDISKSAEEPQEKVDLTLDWLTETSEEAKGGAAPEGPNEAEVTSGKPEQEVPDAEEEKSVSGTDVQEECREKGGQEKQGEVIVSIEEKPKEVSEEQPVVTLEKQGTAVEVEAESLDPTVKPVDVGGDEPEEKVVTSENEAGKAVLEQLVGQEVPPAEESPEVTTEAAEASAVEAGSEVSEKPGQEAPVLPKDGAVNGPSVVGDQTPIEPQTSIERLTETKDGSGLEEKVRAKLVPSQEETKLSVEESEAAGDGVDTKVAQGATEKSPEDKVQIAANEETQEREEQMKEGEETEGSEEDDKENDKTEEMPNDSVLENKSLQENEEEEIGNLELAWDMLDLAKIIFKRQETKEAQLYAAQAHLKLGEVSVESENYVQAVGGVPVLP

SEQ ID NO: 816470 - protein, 232 aa, Homo sapiens
MFLLLLHLQIKWRATINLLSVTEDGLHFVEYYLNRIIHLDVDSEAKKLLGLGQKHLVMGDIPAAVNAFQEAASLLGKKYGETANECGEAFFFYGKSLLELARMENGVLGNALEGVHVEEEEGEKTEDESLVENNDNIDETEGSEEDDKENDKTEEMPNDSVLENKSLQENEEEEIGNLELAWDMLDLAKIIFKRQETKEAQLYAAQAHLKLGEVSVESENYVQAVGGVPVLP

SEQ ID NO: 816471 - protein, 230 aa, Homo sapiens; identical to SEQ ID NO: 816454

SEQ ID NO: 816472 - protein, 249 aa, Homo sapiens
MLPRHILNSEKLVLNLKTMCKLWEEFQSCLNLQEQYLEAHDRLLAETHYQLGLAYGYNSQYDEAVAQFSKSIEVIENRMAVLNEQVKEAEGSSAEYKKEIEELKELLPEIREKIEDAKESQRSGNVAELALKATLVESSTSGFTPGGGGSSVSMIASRKPTDGASSSNCVTDISHLVRKKRKPEEESPRKDDAKKAKQEPEVNGGSGDAVPSGNEVSENMEEEAENQAESRAAVEGTVEAGATVESTAC

SEQ ID NO: 816473 - protein, 230 aa, Homo sapiens; identical to SEQ ID NO: 816454

SEQ ID NO: 816474 - protein, 249 aa, Homo sapiens; identical to SEQ ID NO: 816472

SEQ ID NO: 816475 - protein, 249 aa, Homo sapiens; identical to SEQ ID NO: 816472

SEQ ID NO: 816476 - protein, 249 aa, Homo sapiens; identical to SEQ ID NO: 816472

SEQ ID NO: 816477 - protein, 249 aa, Homo sapiens; identical to SEQ ID NO: 816472

SEQ ID NO: 816478 - protein, 494 aa, Homo sapiens
MAMESTATAAVAAELVSADKIEDVPAPSTSADKVESLDVDSEAKKLLGLGQKHLVMGDIPAAVNAFQEAASLLGKKYGETANECGEAFFFYGKSLLELARMENGVLGNALEGVHVEEEEGEKTEDESLVENNDNIDEEAREELREQVYDAMGEKEEAKKTEDKSLAKPETDKEQDSEMEKGGREDMDISKSAEEPQEKVDLTLDWLTETSEEAKGGAAPEGPNEAEVTSGKPEQEVPDAEEEKSVSGTDVQEECREKGGQEKQGEVIVSIEEKPKEVSEEQPVVTLEKQGTAVEVEAESLDPTVKPVDVGGDEPEEKVVTSENEAGKAVLEQLVGQEVPPAEESPEVTTEAAEASAVEAGSEVSEKPGQEAPVLPKDGAVNGPSVVGDQTPIEPQTSIERLTETKDGSGLEEKVRAKLVPSQEETKLSVEESEAAGDGVDTKVAQGATEKSPEDKVQIAANEETQEREEQMKEGEGNRDMQELQWVEYILDLTH

SEQ ID NO: 816479 - protein, 494 aa, Homo sapiens; identical to SEQ ID NO: 816478

SEQ ID NO: 816480 - protein, 513 aa, Homo sapiens
MAMESTATAAVAAELVSADKIEDVPAPSTSADKVESLDVDSEAKKLLGLGQKHLVMGDIPAAVNAFQEAASLLGKKYGETANECGEAFFFYGKSLLELARMENGVLGNALEGVHVEEEEGEKTEDESLVENNDNIDEEAREELREQVYDAMGEKEEAKKTEDKSLAKPETDKEQDSEMEKGGREDMDISKSAEEPQEKVDLTLDWLTETSEEAKGGAAPEGPNEAEVTSGKPEQEVPDAEEEKSVSGTDVQEECREKGGQEKQGEVIVSIEEKPKEVSEEQPVVTLEKQGTAVEVEAESLDPTVKPVDVGGDEPEEKVVTSENEAGKAVLEQLVGQEVPPAEESPEVTTEAAEASAVEAGSEVSEKPGQEAPVLPKDGAVNGPSVVGDQTPIEPQTSIERLTETKDGSGLEEKVRAKLVPSQEETKLSVEESEAAGDGVDTKVAQGATEKSPEDKVQIAANEETQEREEQMKEGEETEGSEEDDKENDKTEEMPNDSVLENKSLQEMRRRDWT

SEQ ID NO: 816481 - protein, 249 aa, Homo sapiens; identical to SEQ ID NO: 816472

SEQ ID NO: 816482 - protein, 249 aa, Homo sapiens; identical to SEQ ID NO: 816472

SEQ ID NO: 816483 - protein, 233 aa, Homo sapiens
MLPRHILNSEKLVLNLKTMCKLWEEFQSCLNLQEQYLEAHDRLLAETHYQLGLAYGYNSQYDEAVAQFSKSIEVIENRMAVLNEQVKEAEGSSAEYKKEIEELKELLPEIREKIEDAKESQRSGNVAELALKATLVESSTSGFTPGGGGSSVSMIASRKPTDGASSSNCVTDISHLVRKKRKPEEESPRKDDAKKAKQEPEVNGGSGDAVPSGNEVSENMEEEAGATVESTAC

SEQ ID NO: 816484 - protein, 166 aa, Homo sapiens
MAMESTATAAVAAELVSADKIEDVPAPSTSADKVESLDVDSEAKKLLGLGQKHLVMGDIPAAVNAFQEAASLLGKKYGETANECGEAFFFYGKSLLELARMENGVLGNALEGVHVEEEEGEKTEDESLVENNDNIDGYVELHVTFKRCDVVYFLYTVVETGLYLSW

SEQ ID NO: 816485 - protein, 147 aa, Homo sapiens
MAMESTATAAVAAELVSADKIEDVPAPSTSADKVESLDVDSEAKKLLGLGQKHLVMGDIPAAVNAFQEAASLLGKKYGETANECGEAFFFYGKSLLELARMENGVLGNALEGVHVEEEEGEKTEDESLVENNDNIDGKPATRVPSSI

SEQ ID NO: 816486 - protein, 71 aa, Homo sapiens
PGALNPPGALNPPGALNPPGALNPPGALNPPGALNPPGALNPPEPLPLRKCFAVVFLKTLSTFVKPSQLYL

SEQ ID NO: 816487 - protein, 403 aa, Homo sapiens
MATGGGAEEERKRGRPQLLPPARPAARGEEADGGREKMGWAQVVKNLAEKKGEFREPRPPRREEESGGGGGSAGLGGPAGLAAPDLGDFPPAGRGDPKGRRRDPAGEAVDPRKKKGAAEAGRRKKAEAAAAAMATPARPGEAEDAAERPLQDEPAAAAGPGKGRFLVRICFQGDEGACPTRDFVVGALILRSIGMDPSDIYAVIQIPGSREFDVSFRSAEKLALFLRVYEEKREQEDCWENFVVLGRSKSSLKTLFILFRNETVDVEDIVTWLKRHCDVLAVPVKVTDRFGIWTGEYKCEIELRQGEGGVRHLPGAFFLGAERGYSWYKGQPKTCFKCGSRTHMSGSCTQDRCFRCGEEGHLSPYCRKGIVCNLCGKRGHAFAQCPKAVHNSVAAQLTGVAGH

SEQ ID NO: 816488 - protein, 403 aa, Homo sapiens; identical to SEQ ID NO: 816487

SEQ ID NO: 816489 - protein, 403 aa, Homo sapiens; identical to SEQ ID NO: 816487

SEQ ID NO: 816490 - protein, 403 aa, Homo sapiens; identical to SEQ ID NO: 816487

SEQ ID NO: 816491 - protein, 403 aa, Homo sapiens; identical to SEQ ID NO: 816487

SEQ ID NO: 816492 - protein, 403 aa, Homo sapiens; identical to SEQ ID NO: 816487

SEQ ID NO: 816493 - protein, 1372 aa, Homo sapiens
PAPAPTPPGPAPAPARAPALVPVPARVGSVPCGQVPPLCRRRPGPPARPLATMELEDGVVYQEEPGGSGAVMSERVSGLAGSIYREFERLIGRYDEEVVKELMPLVVAVLENLDSVFAQDQEHQVELELLRDDNEQLITQYEREKALRKHAEEKFIEFEDSQEQEKKDLQTRVESLESQTRQLELKAKNYADQISRLEEREAELKKEYNALHQRHTEMIHNYMEHLERTKLHQLSGSDQLESTAHSRIRKERPISLGIFPLPAGDGLLTPDAQKGGETPGSEQWKFQELSQPRSHTSLKDELSDVSQGGSKATTPASTANSDVATIPTDTPLKEENEGFVKVTDAPNKSEISKHIEVQVAQETRNVSTGSAENEEKSEVQAIIESTPELDMDKDLSGYKGSSTPTKGIENKAFDRNTESLFEELSSAGSGLIGDVDEGADLLGMGREVENLILENTQLLETKNALNIVKNDLIAKVDELTCEKDVLQGELEAVKQAKLKLEEKNRELEEELRKARAEAEDARQKAKDDDDSDIPTAQRKRFTRVEMARVLMERNQYKERLMELQEAVRWTEMIRASRENPAMQEKKRSSIWQFFSRLFSSSSNTTKKPEPPVNLKYNAPTSHVTPSVKKRSSTLSQLPGDKSKAFDFLSEETEASLASRREQKREQYRQVKAHVQKEDGRVQAFGWSLPQKYKQVTNGQGENKMKNLPVPVYLRPLDEKDTSMKLWCAVGVNLSGGKTRDGGSVVGASVFYKDVAGLDTEGSKQRSASQSSLDKLDQELKEQQKELKNQEELSSLVWICTSTHSATKVLIIDAVQPGNILDSFTVCNSHVLCIASVPGARETDYPAGEDLSESGQVDKASLCGSMTSNSSAETDSLLGGITVVGCSAEGVTGAATSPSTNGASPVMDKPPEMEAENSEVDENVPTAEEATEATEGNAGSAEDTVDISQTGVYTEHVFTDPLGVQIPEDLSPVYQSSNDSDAYKDQISVLPNEQDLVREEAQKMSSLLPTMWLGAQNGCLYVHSSVAQWRKCLHSIKLKDSILSIVHVKGIVLVALADGTLAIFHRGVDGQWDLSNYHLLDLGRPHHSIRCMTVVHDKVWCGYRNKIYVVQPKAMKIEKSFDAHPRKESQVRQLAWVGDGVWVSIRLDSTLRLYHAHTYQHLQDVDIEPYVSKMLGTGKLGFSFVRITALMVSCNRLWVGTGNGVIISIPLTETVILHQGRLLGLRANKTSGVPGNRPGSVIRVYGDENSDKVTPGTFIPYCSMAHAQLCFHGHRDAVKFFVAVPGQVISPQSSSSGTDLTGDKAGPSAQEPGSQTPLKSMLVISGGEGYIDFRMGDEGGESELLGEDLPLEPSVTKAERSHLIVWQVMYGNE

SEQ ID NO: 816494 - protein, 1372 aa, Homo sapiens; identical to SEQ ID NO: 816493

SEQ ID NO: 816495 - protein, 1177 aa, Homo sapiens
MSPGCMLLFVFGFVGGAVVINSAILVSLSVLLLVHFSISTGVPALTQNLPRILRKERPISLGIFPLPAGDGLLTPDAQKGGETPGSEQWKFQELSQPRSHTSLKDELSDVSQGGSKATTPASTANSDVATIPTDTPLKEENEGFVKVTDAPNKSEISKHIEVQVAQETRNVSTGSAENEEKSEVQAIIESTPELDMDKDLSGYKGSSTPTKGIENKAFDRNTESLFEELSSAGSGLIGDVDEGADLLGMGREVENLILENTQLLETKNALNIVKNDLIAKVDELTCEKDVLQGELEAVKQAKLKLEEKNRELEEELRKARAEAEDARQKAKDDDDSDIPTAQRKRFTRVEMARVLMERNQYKERLMELQEAVRWTEMIRASRENPAMQEKKRSSIWQFFSRLFSSSSNTTKKPEPPVNLKYNAPTSHVTPSVKKRSSTLSQLPGDKSKAFDFLSEETEASLASRREQKREQYRQVKAHVQKEDGRVQAFGWSLPQKYKQVTNGQGENKMKNLPVPVYLRPLDEKDTSMKLWCAVGVNLSGGKTRDGGSVVGASVFYKDVAGLDTEGSKQRSASQSSLDKLDQELKEQQKELKNQEELSSLVWICTSTHSATKVLIIDAVQPGNILDSFTVCNSHVLCIASVPGARETDYPAGEDLSESGQVDKASLCGSMTSNSSAETDSLLGGITVVGCSAEGVTGAATSPSTNGASPVMDKPPEMEAENSEVDENVPTAEEATEATEGNAGSAEDTVDISQTGVYTEHVFTDPLGVQIPEDLSPVYQSSNDSDAYKDQISVLPNEQDLVREEAQKMSSLLPTMWLGAQNGCLYVHSSVAQWRKCLHSIKLKDSILSIVHVKGIVLVALADGTLAIFHRGVDGQWDLSNYHLLDLGRPHHSIRCMTVVHDKVWCGYRNKIYVVQPKAMKIEKSFDAHPRKESQVRQLAWVGDGVWVSIRLDSTLRLYHAHTYQHLQDVDIEPYVSKMLGTGKLGFSFVRITALMVSCNRLWVGTGNGVIISIPLTETVILHQGRLLGLRANKTSGVPGNRPGSVIRVYGDENSDKVTPGTFIPYCSMAHAQLCFHGHRDAVKFFVAVPGQVISPQSSSSGTDLTGDKAGPSAQEPGSQTPLKSMLVISGGEGYIDFRMGDEGGESELLGEDLPLEPSVTKAERSHLIVWQVMYGNE

SEQ ID NO: 816496 - protein, 1019 aa, Homo sapiens
FLPLNDIQETRNVSTGSAENEEKSEVQAIIESTPELDMDKDLSGYKGSSTPTKGIENKAFDRNTESLFEELSSAGSGLIGDVDEGADLLGMGREVENLILENTQLLETKNALNIVKNDLIAKVDELTCEKDVLQGELEAVKQAKLKLEEKNRELEEELRKARAEAEDARQKAKDDDDSDIPTAQRKRFTRVEMARVLMERNQYKERLMELQEAVRWTEMIRASRENPAMQEKKRSSIWQFFSRLFSSSSNTTKKPEPPVNLKYNAPTSHVTPSVKKRSSTLSQLPGDKSKAFDFLSEETEASLASRREQKREQYRQVKAHVQKEDGRVQAFGWSLPQKYKQVTNGQGENKMKNLPVPVYLRPLDEKDTSMKLWCAVGVNLSGGKTRDGGSVVGASVFYKDVAGLDTEGSKQRSASQSSLDKLDQELKEQQKELKNQEELSSLVWICTSTHSATKVLIIDAVQPGNILDSFTVCNSHVLCIASVPGARETDYPAGEDLSESGQVDKASLCGSMTSNSSAETDSLLGGITVVGCSAEGVTGAATSPSTNGASPVMDKPPEMEAENSEVDENVPTAEEATEATEGNAGSAEDTVDISQTGVYTEHVFTDPLGVQIPEDLSPVYQSSNDSDAYKDQISVLPNEQDLVREEAQKMSSLLPTMWLGAQNGCLYVHSSVAQWRKCLHSIKLKDSILSIVHVKGIVLVALADGTLAIFHRGVDGQWDLSNYHLLDLGRPHHSIRCMTVVHDKVWCGYRNKIYVVQPKAMKIEKSFDAHPRKESQVRQLAWVGDGVWVSIRLDSTLRLYHAHTYQHLQDVDIEPYVSKMLGTGKLGFSFVRITALMVSCNRLWVGTGNGVIISIPLTETVILHQGRLLGLRANKTSGVPGNRPGSVIRVYGDENSDKVTPGTFIPYCSMAHAQLCFHGHRDAVKFFVAVPGQVISPQSSSSGTDLTGDKAGPSAQEPGSQTPLKSMLVISGGEGYIDFRMGDEGGESELLGEDLPLEPSVTKAERSHLIVWQVMYGNE

SEQ ID NO: 816497 - protein, 1372 aa, Homo sapiens; identical to SEQ ID NO: 816493

SEQ ID NO: 816498 - protein, 1372 aa, Homo sapiens; identical to SEQ ID NO: 816493

SEQ ID NO: 816499 - protein, 1372 aa, Homo sapiens; identical to SEQ ID NO: 816493

SEQ ID NO: 816500 - protein, 1372 aa, Homo sapiens; identical to SEQ ID NO: 816493

SEQ ID NO: 816501 - protein, 1372 aa, Homo sapiens; identical to SEQ ID NO: 816493

SEQ ID NO: 816502 - protein, 1328 aa, Homo sapiens
PAPAPTPPGPAPAPARAPALVPVPARVGSVPCGQVPPLCRRRPGPPARPLATMELEDGVVYQEEPGGSGAVMSERVSGLAGSIYREFERLIGRYDEEVVKELMPLVVAVLENLDSVFAQDQEHQVELELLRDDNEQLITQYEREKALRKHAEEKFIEFEDSQEQEKKDLQTRVESLESQTRQLELKAKNYADQISRLEEREAELKKEYNALHQRHTEMIHNYMEHLERTKLHQLSGSDQLESTAHSRIRKERPISLGIFPLPAGDGLLTPDAQKGGETPGSEQWKFQELSQPRSHTSLKDELSDVSQGGSKATTPASTANSDVATIPTDTPLKEENEGFVKVTDAPNKSEISKHIEVQVAQETRNVSTGSAENEEKSEVQAIIESTPELDMDKDLSGYKGSSTPTKGIENKAFDRNTESLFEELSSAGSGLIGDVDEGADLLGMGREVENLILENTQLLETKNALNIVKNDLIAKVDELTCEKDVLQGELEAVKQAKLKLEEKNRELEEELRKARAEAEDARQKAKDDDDSDIPTAQRKRFTRVEMARVLMERNQYKERLMELQEAVRWTEMIRASRENPAMQEKKRSSIWQFFSRLFSSSSNTTKKPEPPVNLKYNAPTSHVTPSVKKRSSTLSQLPGDKSKAFDFLSEETEASLASRREQKREQYRQVKAHVQKEDGRVQAFGWSLPQKYKQVTNGQGENKMKNLPVPVYLRPLDEKDTSMKLWCAVGVNLSGGKTRDGGSVVGASVFYKDVAGLDTEGSKQRSASQSSLDKLDQELKEQQKELKNQEELSSLVWICTSTHSATKVLIIDAVQPGNILDSFTVCNSHVLCIASVPGARETDYPAGEDLSESGQVDKASLCGSMTSNSSAETDSLLGGITVVGCSAEGVTGAATSPSTNGASPVMDKPPEMEAENSEVDENVPTAEEATEATEGNAGSAEDTVDISQTGVYTEHVFTDPLGVQIPEDLSPVYQSSNDSDAYKDQISVLPNEQDLVREEAQKMSSLLPTMWLGAQNGCLYVHSSVAQWRKCLHSIKLKDSILSIVHVKGIVLKVWCGYRNKIYVVQPKAMKIEKSFDAHPRKESQVRQLAWVGDGVWVSIRLDSTLRLYHAHTYQHLQDVDIEPYVSKMLGTGKLGFSFVRITALMVSCNRLWVGTGNGVIISIPLTETVILHQGRLLGLRANKTSGVPGNRPGSVIRVYGDENSDKVTPGTFIPYCSMAHAQLCFHGHRDAVKFFVAVPGQVISPQSSSSGTDLTGDKAGPSAQEPGSQTPLKSMLVISGGEGYIDFRMGDEGGESELLGEDLPLEPSVTKAERSHLIVWQVMYGNE

SEQ ID NO: 816503 - protein, 1359 aa, Homo sapiens
PAPAPTPPGPAPAPARAPALVPVPARVGSVPCGQVPPLCRRRPGPPARPLATMELEDGVVYQEEPGGSGAVMSERVSGLAGSIYREFERLIGRYDEEVVKELMPLVVAVLENLDSVFAQDQEHQVELELLRDDNEQLITQYEREKALRKHAEEKFIEFEDSQEQEKKDLQTRVESLESQTRQLELKAKNYADQISRLEEREAELKKEYNALHQRHTEMIHNYMEHLERTKLHQLSGSDQLESTAHSRIRKERPISLGIFPLPAGDGLLTPDAQKGGETPGSEQWKFQELSQPRSHTSLKDELSDVSQGGSKATTPASTANSDVATIPTDTPLKEENEGFVKVTDAPNKSEISKHIEVQVAQETRNVSTGSAENEEKSEVQAIIESTPELDMDKDLSGYKGSSTPTKGIENKAFDRNTESLFEELSSAGSGLIGDVDEGADLLGMGREVENLILENTQLLETKNALNIVKNDLIAKVDELTCEKDVLQGELEAVKQAKLKLEEKNRELEEELRKARAEAEDARQKAKDDDDSDIPTAQRKRFTRVEMARVLMERNQYKERLMELQEAVRWTEMIRASRENPAMQEKKRSSIWQFFSRLFSSSSNTTKKPEPPVNLKYNAPTSHVTPSVKKRSSTLSQLPGDKSKAFDFLSEETEASLASRREQKREQYRQVKAHVQKEDGRVQAFGWSLPQKYKQVTNGQGENKMKNLPVPVYLRPLDEKDTSMKLWCAVGVNLSGGKTRDGGSVVGASVFYKDVAGLDTEGSKQRSASQSSLDKLDQELKEQQKELKNQEELSSLVWICTSTHSATKVLIIDAVQPGNILDSFTVCNSHVLCIASVPGARETDYPAGEDLSESGQVDKASLCGSMTSNSSAETDSLLGGITVVGCSAEGVTGAATSPSTNGASPVMDKPPEMEAENSEVDENVPTAEEATEATEGNAGSAEDTVDISQTGVYTEHVFTDPLGVQIPEDLSPVYQSSNDSDAYKDQISVLPNEQDLVREEAQKMSSLLPTMWLGAQNGCLYVHSSVAQWRKCLHSIKLKDSILSIVHVKGIVLVALADGTLAIFHRGVDGQWDLSNYHLLDLGRPHHSIRCMTVVHDKVWCGYRNKIYVVQPKAMKIEKSFDAHPRKESQVRQLAWVGDGVWVSIRLDSTLRLYHAHTYQHLQDVDIEPYVSKMLGTGKLGFSFVRITALMVSCNRLWVGTGNGVIISIPLTETNKTSGVPGNRPGSVIRVYGDENSDKVTPGTFIPYCSMAHAQLCFHGHRDAVKFFVAVPGQVISPQSSSSGTDLTGDKAGPSAQEPGSQTPLKSMLVISGGEGYIDFRMGDEGGESELLGEDLPLEPSVTKAERSHLIVWQVMYGNE

SEQ ID NO: 816504 - protein, 282 aa, Homo sapiens
MTVVHDKVWCGYRNKIYVVQPKAMKIEKSFDAHPRKESQVRQLAWVGDGVWVSIRLDSTLRLYHAHTYQHLQDVDIEPYVSKMLGTGKLGFSFVRITALMVSCNRLWVGTGNGVIISIPLTETVILHQGRLLGLRANKTSGVPGNRPGSVIRVYGDENSDKVTPGTFIPYCSMAHAQLCFHGHRDAVKFFVAVPGQVISPQSSSSGTDLTGDKAGPSAQEPGSQTPLKSMLVISGGEGYIDFRMGDEGGESELLGEDLPLEPSVTKAERSHLIVWQVMYGNE

SEQ ID NO: 816505 - protein, 1017 aa, Homo sapiens
PAPAPTPPGPAPAPARAPALVPVPARVGSVPCGQVPPLCRRRPGPPARPLATMELEDGVVYQEEPGGSGAVMSERVSGLAGSIYREFERLIGRYDEEVVKELMPLVVAVLENLDSVFAQDQEHQVELELLRDDNEQLITQYEREKALRKHAEEKFIEFEDSQEQEKKDLQTRVESLESQTRQLELKAKNYADQISRLEEREAELKKEYNALHQRHTEMIHNYMEHLERTKLHQLSGSDQLESTAHSRIRKERPISLGIFPLPAGDGLLTPDAQKGGETPGSEQWKFQELSQPRSHTSLKDELSDVSQGGSKATTPASTANSDVATIPTDTPLKEENEGFVKVTDAPNKSEISKHIEVQVAQETRNVSTGSAENEEKSEVQAIIESTPELDMDKDLSGYKGSSTPTKGIENKAFDRNTESLFEELSSAGSGLIGDVDEGADLLGMGREVENLILENTQLLETKNALNIVKNDLIAKVDELTCEKDVLQGELEAVKQAKLKLEEKNRELEEELRKARAEAEDARQKAKDDDDSDIPTAQRKRFTRVEMARVLMERNQYKERLMELQEAVRWTEMIRASRENPAMQEKKRSSIWQFFSRLFSSSSNTTKKPEPPVNLKYNAPTSHVTPSVKKRSSTLSQLPGDKSKAFDFLSEETEASLASRREQKREQYRQVKAHVQKEDGRVQAFGWSLPQKYKQVTNGQGENKMKNLPVPVYLRPLDEKDTSMKLWCAVGVNLSGGKTRDGGSVVGASVFYKDVAGLDTEGSKQRSASQSSLDKLDQELKEQQKELKNQEELSSLVWICTSTHSATKVLIIDAVQPGNILDSFTVCNSHVLCIASVPGARETDYPAGEDLSESGQVDKASLCGSMTSNSSAETDSLLGGITVVGCSAEGVTGAATSPSTNGASPVMDKPPEMEAENSEVDENVPTAEEATEATEGNAGSAEDTVDISQTGVYTEHVFTDPLGVQIPEDLSPVYQSSNDSDAYKDQISVLPNEQDLVREEAQKMSSLLPTMWLGAQNG

SEQ ID NO: 816506 - protein, 1372 aa, Homo sapiens; identical to SEQ ID NO: 816493

SEQ ID NO: 816507 - protein, 484 aa, Homo sapiens
MDCLSPGVQDQPGQHGETLSLPKKKNKINEPGVVAHACSPSYLGGSGGRMTWAQEVEVAVSLDSTMHSSLGDGARPCLKTDKQAKNEIKVWISLIFLLNKFFKTTMLQFFPSQASGKCVIYPFLSITLGKAKYDFFFVFLRRSLALLPRLECSGAISAHCNLHLSGSSSSPASASQVAGITGVCHPAQLIFVFLVETGFRHVGQAGLKLLTSDDLPALASLKCLNYRREPPPPVRSKAKCNFMYCFNSINLWDKGPQSSEGLLKRKESKRRCQIVQTFLSTTDFFFLDYYYKDVCKKYTSGFYAYTRLGYIVKYMGFHEPEEAFGSIGPHVTISTLCTQYNCSHSCIKTVFGKSCIKRIIFCLSYLVTFLQGTKMRLLFHSLFAMFLFHLKSEPFLAISFKKSLLNIYWKCCKIHKKETPKCLGILIPRSKHPRVRSHLLLFSHVCMTECNLGNQELEMKNTNMSNGCNCFFELTGFNLSNIGV

SEQ ID NO: 816508 - protein, 326 aa, Homo sapiens
PAPAPTPPGPAPAPARAPALVPVPARVGSVPCGQVPPLCRRRPGPPARPLATMELEDGVVYQEEPGGSGAVMSERVSGLAGSIYREFERLIGRYDEEVVKELMPLVVAVLENLDSVFAQDQEHQVELELLRDDNEQLITQYEREKALRKHAEEKFIEFEDSQEQEKKDLQTRVESLESQTRQLELKAKNYADQISRLEEREAELKKEYNALHQRHTEMIHNYMEHLERTKLHQLSGSDQLESTAHSRIRKERPISLGIFPLPAGDGLLTPDAQKGGETPGSEQWKFQELSQPRSHTSLKVSNSPEPQKAVEQEVRMVLLNILQKVY

SEQ ID NO: 816509 - protein, 728 aa, Homo sapiens
MSPGCMLLFVFGFVGGAVVINSAILVSLSVLLLVHFSISTGVPALTQNLPRILRKERPISLGIFPLPAGDGLLTPDAQKGGETPGSEQWKFQELSQPRSHTSLKDELSDVSQGGSKATTPASTANSDVATIPTDTPLKEENEGFVKVTDAPNKSEISKHIEVQVAQETRNVSTGSAENEEKSEVQAIIESTPELDMDKDLSGYKGSSTPTKGIENKAFDRNTESLFEEKQHLISAPGDKSKAFDFLSEETEASLASRREQKREQYRQVKAHVQKEDGRVQAFGWSLPQKYKQVTNGQGENKMKNLPVPVYLRPLDEKDTSMKLWCAVGVNLSGGKTRDGGSVVGASVFYKDVAGLDTEGSKQRSASQSSLDKLDQELKEQQKELKNQEELSSLVWICTSTHSATKVLIIDAVQPGNILDSFTVCNSHVLCIASVPGARETDYPAGEDLSESGQVDKASLCGSMTSNSSAETDSLLGGITVVGCSAEGVTGAATSPSTNGASPVMDKPPEMEAENSEVDENVPTAEEATEATEGNAGSAEDTVDISQTGVYTEHVFTDPLGVQIPEDLSPVYQSSNDSDAYKDQISVLPNEQDLVREEAQKMSSLLPTMWLGAQNGCLYVHSSVAQWRKCLHSIKLKDSILSIVHVKGIVLVALADGTLAIFHRGVDGQWDLSNYHLLDLGRPHHSIRCMTVVHDKVWCGYRNKIYVCTPAWVTEQDPVSKQTNKQKID

SEQ ID NO: 816510 - protein, 1046 aa, Homo sapiens
PAPAPTPPGPAPAPARAPALVPVPARVGSVPCGQVPPLCRRRPGPPARPLATMELEDGVVYQEEPGGSGAVMSERVSGLAGSIYREFERLIGRYDEEVVKELMPLVVAVLENLDSVFAQDQEHQVELELLRDDNEQLITQYEREKALRKHAEEKFIEFEDSQEQEKKDLQTRVESLESQTRQLELKAKNYADQISRLEEREAELKKEYNALHQRHTEMIHNYMEHLERTKLHQLSGSDQLESTAHSRIRKERPISLGIFPLPAGDGLLTPDAQKGGETPGSEQWKFQELSQPRSHTSLKDELSDVSQGGSKATTPASTANSDVATIPTDTPLKEENEGFVKVTDAPNKSEISKHIEVQVAQETRNVSTGSAENEEKSEVQAIIESTPELDMDKDLSGYKGSSTPTKGIENKAFDRNTESLFEELSSAGSGLIGDVDEGADLLGMGREVENLILENTQLLETKNALNIVKNDLIAKVDELTCEKDVLQGELEAVKQAKLKLEEKNRELEEELRKARAEAEDARQKAKDDDDSDIPTAQRKRFTRVEMARVLMERNQYKERLMELQEAVRWTEMIRASRENPAMQEKKRSSIWQFFSRLFSSSSNTTKKPEPPVNLKYNAPTSHVTPSVKKRSSTLSQLPGDKSKAFDFLSEETEASLASRREQKREQYRQVKAHVQKEDGRVQAFGWSLPQKYKQVTNGQGENKMKNLPVPVYLRPLDEKDTSMKLWCAVGVNLSGGKTRDGGSVVGASVFYKDVAGLDTEGSKQRSASQSSLDKLDQELKEQQKELKNQEELSSLVWICTSTHSATKVLIIDAVQPGNILDSFTVCNSHVLCIASVPGARETDYPAGEDLSESGQVDKASLCGSMTSNSSAETDSLLGGITVVGCSAEGVTGAATSPSTNGASPVMDKPPEMEAENSEVDENVPTAEEATEATEGNAGSAEDTVDISQTGVYTEHVFTDPLGVQIPEDLSPVYQSSNDSDAYKDQISVLPNEQDLVREEAQKMSSLLPTMWLGAQNGCLYVHSSVAQWRKCLHSIKLKDSILSIVV

SEQ ID NO: 816511 - protein, 1372 aa, Homo sapiens; identical to SEQ ID NO: 816493

SEQ ID NO: 816512 - protein, 983 aa, Homo sapiens
PAPAPTPPGPAPAPARAPALVPVPARVGSVPCGQVPPLCRRRPGPPARPLATMELEDGVVYQEEPGGSGAVMSERVSGLAGSIYREFERLIGRYDEEVVKELMPLVVAVLENLDSVFAQDQEHQVELELLRDDNEQLITQYEREKALRKHAEEKFIEFEDSQEQEKKDLQTRVESLESQTRQLELKAKNYADQISRLEEREAELKKEYNALHQRHTEMIHNYMEHLERTKLHQLSGSDQLESTAHSRIRKERPISLGIFPLPAGDGLLTPDAQKGGETPGSEQWKFQELSQPRSHTSLKDELSDVSQGGSKATTPASTANSDVATIPTDTPLKEENEGFVKVTDAPNKSEISKHIEVQVAQETRNVSTGSAENEEKSEVQAIIESTPELDMDKDLSGYKGSSTPTKGIENKAFDRNTESLFEELSSAGSGLIGDVDEGADLLGMGREVENLILENTQLLETKNALNIVKNDLIAKVDELTCEKDVLQGELEAVKQAKLKLEEKNRELEEELRKARAEAEDARQKAKDDDDSDIPTAQRKRFTRVEMARVLMERNQYKERLMELQEAVRWTEMIRASRENPAMQEKKRSSIWQFFSRLFSSSSNTTKKPEPPVNLKYNAPTSHVTPSVKKRSSTLSQLPGDKSKAFDFLSEETEASLASRREQKREQYRQVKAHVQKEDGRVQAFGWSLPQKYKQVTNGQGENKMKNLPVPVYLRPLDEKDTSMKLWCAVGVNLSGGKTRDGGSVVGASVFYKDVAGLDTEGSKQRSASQSSLDKLDQELKEQQKELKNQEELSSLVWICTSTHSATKVLIIDAVQPGNILDSFTVCNSHVLCIASVPGARETDYPAGEDLSESGQVDKASLCGSMTSNSSAETDSLLGGITVVGCSAEGVTGAATSPSTNGASPVMDKPPEMEAENSEVDENVPTAEEATEATEGNAGSAEDTVDISQTGVYTEHVFTDPLGVQIPEDLSPVYQSRYNNGSST

SEQ ID NO: 816513 - protein, 1372 aa, Homo sapiens; identical to SEQ ID NO: 816493

SEQ ID NO: 816514 - protein, 1218 aa, Homo sapiens
PAPAPTPPGPAPAPARAPALVPVPARVGSVPCGQVPPLCRRRPGPPARPLATMELEDGVVYQEEPGGSGAVMSERVSGLAGSIYREFERLIGRYDEEVVKELMPLVVAVLENLDSVFAQDQEHQVELELLRDDNEQLITQYEREKALRKHAEEKFIEFEDSQEQEKKDLQTRVESLESQTRQLELKAKNYADQISRLEEREAELKKEYNALHQRHTEMIHNYMEHLERTKLHQLSGSDQLESTAHSRIRKERPISLGIFPLPAGDGLLTPDAQKGGETPGSEQWKFQELSQPRSHTSLKDELSDVSQGGSKATTPASTANSDVATIPTDTPLKEENEGFVKVTDAPNKSEISKHIEVQVAQETRNVSTGSAENEEKSEVQAIIESTPELDMDKDLSGYKGSSTPTKGIENKAFDRNTESLFEELSSAGSGLIGDVDEGADLLGMGREVENLILENTQLLETKNALNIVKNDLIAKVDELTCEKDVLQGELEAVKQAKLKLEEKNRELEEELRKARAEAEDARQKAKDDDDSDIPTAQRKRFTRVEMARVLMERNQYKERLMELQEAVRWTEMIRASRENPAMQEKKRSSIWQFFSRLFSSSSNTTKKPEPPVNLKYNAPTSHVTPSVKKRSSTLSQLPGDKSKAFDFLSEETEASLASRREQKREQYRQVKAHVQKEDGRVQAFGWSLPQKYKQVTNGQGENKMKNLPVPVYLRPLDEKDTSMKLWCAVGVNLSGGKTRDGGSVVGASVFYKDVAGLDTEGSKQRSASQSSLDKLDQELKEQQKELKNQEELSSLVWICTSTHSATKVLIIDAVQPGNILDSFTVCNSHVLCIASVPGARETDYPAGEDLSESGQVDKASLCGSMTSNSSAETDSLLGGITVVGCSAEGVTGAATSPSTNGASPVMDKPPEMEAENSEVDENVPTAEEATEATEGNAGSAEDTVDISQTGVYTEHVFTDPLGVQIPEDLSPVYQSSNDSDAYKDQISVLPNEQDLVREEAQKMSSLLPTMWLGAQNGCLYVHSSVAQWRKCLHSIKLKDSILSIVHVKGIVLVALADGTLAIFHRGVDGQWDLSNYHLLDLGRPHHSIRCMTVVHDKVWCGYRNKIYVVQPKAMKIEKSFDAHPRKESQVRQLAWVGDGVWVSIRLDSTLRLYHAHTYQHLQDVDIEPYVSKMLGTGKLGFSFVRITALMVSCNRLWVGTGNGVIISIPLTESKYIFR

SEQ ID NO: 816515 - protein, 1076 aa, Homo sapiens
PAPAPTPPGPAPAPARAPALVPVPARVGSVPCGQVPPLCRRRPGPPARPLATMELEDGVVYQEEPGGSGAVMSERVSGLAGSIYREFERLIGRYDEEVVKELMPLVVAVLENLDSVFAQDQEHQVELELLRDDNEQLITQYEREKALRKHAEEKFIEFEDSQEQEKKDLQTRVESLESQTRQLELKAKNYADQISRLEEREAELKKEYNALHQRHTEMIHNYMEHLERTKLHQLSGSDQLESTAHSRIRKERPISLGIFPLPAGDGLLTPDAQKGGETPGSEQWKFQELSQPRSHTSLKDELSDVSQGGSKATTPASTANSDVATIPTDTPLKEENEGFVKVTDAPNKSEISKHIEVQVAQETRNVSTGSAENEEKSEVQAIIESTPELDMDKDLSGYKGSSTPTKGIENKAFDRNTESLFEELSSAGSGLIGDVDEGADLLGMGREVENLILENTQLLETKNALNIVKNDLIAKVDELTCEKDVLQGELEAVKQAKLKLEEKNRELEEELRKARAEAEDARQKAKDDDDSDIPTAQRKRFTRVEMARVLMERNQYKERLMELQEAVRWTEMIRASRENPAMQEKKRSSIWQFFSRLFSSSSNTTKKPEPPVNLKYNAPTSHVTPSVKKRSSTLSQLPGDKSKAFDFLSEETEASLASRREQKREQYRQVKAHVQKEDGRVQAFGWSLPQKYKQVTNGQGENKMKNLPVPVYLRPLDEKDTSMKLWCAVGVNLSGGKTRDGGSVVGASVFYKDVAGLDTEGSKQRSASQSSLDKLDQELKEQQKELKNQEELSSLVWICTSTHSATKVLIIDAVQPGNILDSFTVCNSHVLCIASVPGARETDYPAGEDLSESGQVDKASLCGSMTSNSSAETDSLLGGITVVGCSAEGVTGAATSPSTNGASPVMDKPPEMEAENSEVDENVPTAEEATEATEGNAGSAEDTVDISQTGVYTEHVFTDPLGVQIPEDLSPVYQSSNDSDAYKDQISVLPNEQDLVREEAQKMSSLLPTMWLGAQNGCLYVHSSVAQWRKCLHSIKLKDSILSIVHVKGIVLVALADGTLAIFHRGVDGGDWQYYS

SEQ ID NO: 816516 - protein, 983 aa, Homo sapiens; identical to SEQ ID NO: 816512

SEQ ID NO: 816517 - protein, 362 aa, Homo sapiens
MENQVLTPHVYWAQRHRELYLRVELSDVQNPAISITENVLHFKAQGHGAKGDNVYEFHLEFLDLVKPEPVYKLTQRQVNITVQKKVSQWWERLTKQEKRPLFLAPDFDRWLDESDAEMELRAKEEERLNKLRLESEGSPETLTNLRKGYLFMYNLVQFLGFSWIFVNLTVRFCILGKESFYDTFHTVADMMYFCQMLAVVETINAAIGVTTSPVLPSLIQLLGRNFILFIIFGTMEEMQNKAVVFFVFYLWSAIEIFRYSFYMLTCIDMDWKVLTWLRYTLWIPLYPLGCLAEAVSVIQSIPIFNETGRFSFTLPYPVKIKVRFSFFLQIYLIMIFLGLYINFRHLYKQRRRRYGQKKKKIH

SEQ ID NO: 816518 - protein, 362 aa, Homo sapiens; identical to SEQ ID NO: 816517

SEQ ID NO: 816519 - protein, 362 aa, Homo sapiens; identical to SEQ ID NO: 816517

SEQ ID NO: 816520 - protein, 362 aa, Homo sapiens; identical to SEQ ID NO: 816517

SEQ ID NO: 816521 - protein, 362 aa, Homo sapiens; identical to SEQ ID NO: 816517

SEQ ID NO: 816522 - protein, 362 aa, Homo sapiens; identical to SEQ ID NO: 816517

SEQ ID NO: 816523 - protein, 362 aa, Homo sapiens; identical to SEQ ID NO: 816517

SEQ ID NO: 816524 - protein, 352 aa, Homo sapiens
SAEVGRSQGQEIKTILANMNPAISITENVLHFKAQGHGAKGDNVYEFHLEFLDLVKPEPVYKLTQRQVNITVQKKVSQWWERLTKQEKRPLFLAPDFDRWLDESDAEMELRAKEEERLNKLRLESEGSPETLTNLRKGYLFMYNLVQFLGFSWIFVNLTVRFCILGKESFYDTFHTVADMMYFCQMLAVVETINAAIGVTTSPVLPSLIQLLGRNFILFIIFGTMEEMQNKAVVFFVFYLWSAIEIFRYSFYMLTCIDMDWKVLTWLRYTLWIPLYPLGCLAEAVSVIQSIPIFNETGRFSFTLPYPVKIKVRFSFFLQIYLIMIFLGLYINFRHLYKQRRRRYGQKKKKIH

SEQ ID NO: 816525 - protein, 245 aa, Homo sapiens
MELRAKEEERLNKLRLESEGSPETLTNLRKGYLFMYNLVQFLGFSWIFVNLTVRFCILGKESFYDTFHTVADMMYFCQMLAVVETINAAIGVTTSPVLPSLIQLLGRNFILFIIFGTMEEMQNKAVVFFVFYLWSAIEIFRYSFYMLTCIDMDWKVLTWLRYTLWIPLYPLGCLAEAVSVIQSIPIFNETGRFSFTLPYPVKIKVRFSFFLQIYLIMIFLGLYINFRHLYKQRRRRYGQKKKKIH

SEQ ID NO: 816526 - protein, 325 aa, Homo sapiens
MENQVLTPHVYWAQRHRELYLRVELSDVQNPAISITENVLHFKAQGHGAKGDNVYEFHLEFLDLVKPEPVYKLTQRQVNITVQKKVSQWWERLTKQEKRPLFLAPDFDRWLDESDAEMELRAKEEERLNKLRLESEGSPEKSFYDTFHTVADMMYFCQMLAVVETINAAIGVTTSPVLPSLIQLLGRNFILFIIFGTMEEMQNKAVVFFVFYLWSAIEIFRYSFYMLTCIDMDWKVLTWLRYTLWIPLYPLGCLAEAVSVIQSIPIFNETGRFSFTLPYPVKIKVRFSFFLQIYLIMIFLGLYINFRHLYKQRRRRYGQKKKKIH

SEQ ID NO: 816527 - protein, 362 aa, Homo sapiens; identical to SEQ ID NO: 816517

SEQ ID NO: 816528 - protein, 362 aa, Homo sapiens; identical to SEQ ID NO: 816517

SEQ ID NO: 816529 - protein, 370 aa, Homo sapiens [sequence omitted]

SEQ ID NO: 816530 - protein, 130 aa, Homo sapiens
MENQVLTPHVYWAQRHRELYLRVELSDVQNPAISITENVLHFKAQGHGAKGDNVYEFHLEFLDLVKPEPVYKLTQRQVNITVQKKVSQWWERLTKQEKRPLFLAPDFDRWLDESDAEMELRAKVSKDPRI

SEQ ID NO: 816531 - protein, 83 aa, Homo sapiens
RVTAQARPGSVGYLEVPGCRRSGALGFEACFLLAPAEHYLRQRGAASLASPRPGQCGHGESGVDAACLLGSATPRAISARGAE

SEQ ID NO: 816532 - protein, 297 aa, Homo sapiens
ACLAELPLPALQALSLWRLGFGREKEGPSAGRAGARWAAAMALSCTLNRYLLLMAQEHLEFRLPEIKSLLLLFGGQFASSQETYGKSPFWILSIPSEDIARNLMKRTVCAKSIFELWGHGQSPEELYSSLKNYPVEKMVPFLHSDSTYKIKIHTFNKTLTQEEKIKRIDALEFLPFEGKVNLKKPQHVFSVLEDYGLDPNCIPENPHNIYFGRWIADGQRELIESYSVKKRHFIGNTSMDAGLSFIMANHGKVKENDIVFDPFVGTGGLLIACAHFGAYVYGTDIDYNTVHGLACST

SEQ ID NO: 816533 - protein, 503 aa, Homo sapiens
ACLAELPLPALQALSLWRLGFGREKEGPSAGRAGARWAAAMALSCTLNRYLLLMAQEHLEFRLPEIKSLLLLFGGQFASSQETYGKSPFWILSIPSEDIARNLMKRTVCAKSIFELWGHGQSPEELYSSLKNYPVEKMVPFLHSDSTYKIKIHTFNKTLTQEEKIKRIDALEFLPFEGKVNLKKPQHVFSVLEDYGLDPNCIPENPHNIYFGRWIADGQRELIESYSVKKRHFIGNTSMDAGLSFIMANHGKVKENDIVFDPFVGTGGLLIACAHFGAYVYGTDIDYNTVHGLGKATRKNQKWRGPDENIRANLRQYGLEKYYLDVLVSDASKPSWRKGTYFDAIITDPPYGIRESTRRTGSQKEIPKGIEKWEKCPESHVPVSLSYHLSDMFLDLLNFAAETLVLGGRLVYWLPVYTPEYTEEMVPWHPCLELVSNCEQKLSSHTSRRLITMEKVKKFENRDQYSHLLSDHFLPYQGHNSFREKYFSGVTKRIAKEEKSTQE

SEQ ID NO: 816534 - protein, 270 aa, Homo sapiens
ACLAELPLPALQALSLWRLGFGREKEGPSAGRAGARWAAAMALSCTLNRYLLLMAQEHLEFRLPEIKSLLLLFGGQFASSQETYGKSPFWILSIPSEDIARNLMKRTVCAKSIFELWGHGQSPEELYSSLKNYPVEKMVPFLHSDSTYKIKIHTFNKTLTQEEKIKRIDALEFLPFEGKVNLKKPQHVFSVLEDYGLDPNCIPENPHNIYFGRWIADGQRELIESYSVKKRHFIGNTSMDAGLSFIMANHGKVKENDIVFDPFVGTAVYL

SEQ ID NO: 816535 - protein, 270 aa, Homo sapiens; identical to SEQ ID NO: 816534

SEQ ID NO: 816536 - protein, 270 aa, Homo sapiens; identical to SEQ ID NO: 816534

SEQ ID NO: 816537 - protein, 400 aa, Homo sapiens
MKRTVCAKSIFELWGHGQSPEELYSSLKNYPVEKMVPFLHSDSTYKIKIHTFNKTLTQEEKIKRIDALEFLPFEGKVNLKKPQHVFSVLEDYGLDPNCIPENPHNIYFGRWIADGQRELIESYSVKKRHFIGNTSMDAGLSFIMANHGKVKENDIVFDPFVGTGGLLIACAHFGAYVYGTDIDYNTVHGLGKATRKNQKWRGPDENIRANLRQYGLEKYYLDVLVSDASKPSWRKGTYFDAIITDPPYGIRESTRRTGSQKEIPKGIEKWEKCPESHVPVSLSYHLSDMFLDLLNFAAETLVLGGRLVYWLPVYTPEYTEEMVPWHPCLELVSNCEQKLSSHTSRRLITMEKVKKFENRDQYSHLLSDHFLPYQGHNSFREKYFSGVTKRIAKEEKSTQE

SEQ ID NO: 816538 - protein, 400 aa, Homo sapiens; identical to SEQ ID NO: 816537

SEQ ID NO: 816539 - protein, 400 aa, Homo sapiens; identical to SEQ ID NO: 816537

SEQ ID NO: 816540 - protein, 244 aa, Homo sapiens
ACLAELPLPALQALSLWRLGFGREKEGPSAGRAGARWAAAMALSCTLNRYLLLMAQEHLEFRLPEIKSLLLLFGGQFASSQETYGKSPFWILSIPSEDIARNLMKRTVCAKSIFELWGHGQSPEELYSSLKNYPVEKMVPFLHSDSTYKIKIHTFNKTLTQEEKIKRIDALEFLPFEGKVNLKKPQHVFSVLEDYGLDPNCIPENPHNIYFGRWIADGQRELIESYSVKKRHFIGNTSMDAEIF

SEQ ID NO: 816541 - protein, 1819 aa, Homo sapiens
MASITQLFDDLCEALLPAAKTHLGQRSVNRKRAKRSLKKVAYNALFTNLFQDETQQLQPDMSKLPARNKILMLSFDLRVGGLGPKADRLEELVEELEAAPCCPLLEVGSVLDLLVQLAGSGPPQVLPRKRDYFLNNKHVGRNVPYSGYDCDDLSVFEMDVQSLISREECLCHSMIQETLQVMEAAPGTGLPTVGLFSFGDPCGDRFERDTRVSLFGALVHSRTYDMDVRLGLPPVPDNADLSGLAIKVPPSVDQWEDEGFQSASNLTPDSQSEPSVTPDVDLWEAALTYEASKRRCWERVGCPPGHREEPYLTEAGRDAFDKFCRLHQGELQLLAGGVLQAPQPVLVKECELVKDVLNVLIGVVSATFSLCQPAQAFVVKRGVHVSGASPESISSLLSEVAEYGTCYTRLSHFSLQPVLDSLYSKGLVFQAFTSGLRRYLQYYRACVLSTPPTLSLLTIGFLFKKLGRQLRYLAELCGVGAVLPGTCGGGPRAAFPTGVKLLSYLYQEALHNCSNEHYPVLLSLLKTSCEPYTRFIHDWVYSGVFRDAYGEFMIQVNHEYLSFRDKSYWTHGYVLISKEVEDCVPVFLKHIAHDIYVCGKTINLLKLCCPRHYLCWSDVPVPRISVIFSLEELKEIEKDCAVYVGRMERVARHSSVSKEEKELRMEIAKQELIAHAREAASRVLSALSDRQMSERMALDARKREQFQRLKEQFVKDQERRQAARQEELDDDFSYARELRDRERRLKSLEEELERKARQALVDHYSKLSAEAARREQKALWRIQRHRLESARLRFLLEDEKHIQEMLKAVSEAHQPQEPPDVLLSVHPQVTSPGPEHPEGGQGCDSGSAEQHSPAWDGWNRPGLLTPQPLKPLAVGAGGRGLQQAEGARPFSDSLSIGDFLPVGPGAEPSVQTGMVPLLEVALQTINLDLPPSAPGEAPAAASTQPSRPQEYDFSTVLRPAVATSPAPGPLQAAECSLGSSGLQLWEDSCGKMDACGSASRETLLPSHPPRRAALEEGSSQPTERLFGQVSGGGLPTGDYASEIAPTRPRWNTHGHVSDASIRVGENVSDVAPTQPRWNTHGHVSNASISLGESVSDVAPTRPRWNIHGHVSNASIRVGENVSDVAPTRPRWNTHGHVSNASIRVGENVSDVAPTRPRWNTHGHVSDASISLGESVSDMAPARPRWNTHGHVSDASISLGESVSDMAPTRPRWNTHGHVSDTSIRVGENVSDVAPIRSRCNTHGHVSDASISLGEPVSDVVSTRPRWNTHVPIPPPHMVLGALSPEAEPNTPRPQQSPPGHTSQSALSLGAQSTVLDCGPRLPVEVGPSLSSPSSGCGEGSISVGENVSDVAPTQPWWPNTPGDSVSEELGPGRSGDAEDLSPNWPLNSQEDTAAQSSPGRGEEAEASAAEAQGGEQAYLAGLAGQYHLERYPDSYESMSEPPIAHLLRPVLPRAFAFPVDPQVQSAADETAVQLSELLTLPVLMKRSITAPLAAHISLVNKAAVDYFFVELHLEAHYEALRHFLLMEDGEFAQSLSDLLFEKLGAGQTPGELLNPLVLNSVLSKALQCSLHGDTPHASNLSLALKYLPEVFAPNAPDVLSCLELRYKVDWPLNIVITEGCLSKYSGVFSFLLQLKLMMWALKDVCFHLKRTALLSHMAGSVQFRQLQLFKHEMQHFVKVIQGYIANQILHVTWCEFRARLATVGDLEEIQRAHAEYLHKAVFRGLLTEKAAPVMNVIHSIFSLVLKFRSQLISQAWGPPGGPRGAEHPNFALMQQSYNTFKYYSHFLFKVVTKLVNRGYQPHLEDFLLRINFNNYYQDA

SEQ ID NO: 816542 - protein, 1801 aa, Homo sapiens
MASITQLFDDLCEALLPAAKTHLGQRSVNRKRAKRSLKKVAYNALFTNLFQDETQQLQPDMSKLPARNKILMLSFDLRVGGLGPKADRLEELVEELEAAPCCPLLEVGSVLDLLVQLAGSGPPQVLPRKRDYFLNNKHVGRNVPYSGYDCDDLSVFEMDVQSLISREECLCHSMIQETLQVMEAAPGTGLPTVGLFSFGDPCGDRFERDTRVSLFGALVHSRTYDMDVRLGLPPVPDNADLSGLAIKVPPSVDQWEDEGFQSASNLTPDSQSEPSVTPDVDLWEAALTYEASKRRCWERVGCPPGHREEPYLTEAGRDAFDKFCRLHQGELQLLAGGVLQAPQPVLVKECELVKDVLNVLIGVVSATFSLCQPAQAFVVKRGVHVSGASPESISSLLSEVAEYGTCYTRLSHFSLQPVLDSLYSKGLVFQAFTSGLRRYLQYYRACVLSTPPTLSLLTIGFLFKKLGRQLRYLAELCGVGAVLPGTCGGGPRAAFPTGVKLLSYLYQEALHNCSNEHYPVLLSLLKTSCEPYTRFIHDWVYSGVFRDAYGEFMIQVNHEYLSFRDKSYWTHGYVLISKEVEDCVPVFLKHIAHDIYVCGKTINLLKLCCPRHYLCWSDVPVPRISVIFSLEELKEIEKDCAVYVGRMERVARHSSVSKEEKELRMEIAKQELIAHAREAASRVLSALSDRQMSERMALDARKREQFQRLKEQFVKDQERRQAARQEELDDDFSYARELRDRERRLKSLEEELERKARQALVDHYSKLSAEAARREQKALWRIQRHRLESARLRFLLEDEKHIQEMLKAVSEAHQPQEPPDVLLSVHPQVTSPGPEHPEGGQGCDSGSAEQHSPAWDGWNRPGLLTPQPLKPLAVGAGGRGLQQAEGARPFSDSLSIGDFLPVGPGAEPSVQTGMVPLLEVALQTINLDLPPSAPGEAPAAASTQPSRPQEYDFSTVLRPAVATSPAPGPLQAAECSLGSSGLQLWEDSCGKMDACGSASRETLLPSHPPRRAALEEGSSQPTERLFGQVSGGGLPTGDYASEIAPTRPRWNTHGHVSDASIRVGENVSDVAPTQPRWNTHGHVSNASISLGESVSDVAPTRPRWNIHGHVSNASIRVGENVSDVAPTRPRWNTHGHVSNASIRVGENVSDVAPTRPRWNTHGHVSDASISLGESVSDMAPARPRWNTHGHVSDASISLGESVSDMAPTRPRWNTHGHVSDTSIRVGENVSDVAPIRSRCNTHGHVSDASISLGEPVSDVVSTRPRWNTHVPIPPPHMVLGALSPEAEPNTPRPQQSPPGHTSQSALSLGAQSTVLDCGPRLPVEVGPSLSSPSSGCGEGSISVGENVSDVAPTQPWWPNTPGDSVSEELGQSRVAGGQEWDCGTHRAWEVGGQWGWWHVKFPSGLLVSQDLGCCGGHGRGCLSQGRLGSYPPQALGPDALVSTCVHTGPGRSGDAEDLSPNWPLNSQEDTAAQSSPGRGEEAEASAAEAQGGEQAYLAGLAGQYHLERYPDSYESMSEPPIAHLLRPVLPRAFAFPVDPQVQSAADETAVQLSELLTLPVLMKRSITAPLAAHISLVNKAAVDYFFVELHLEAHYEALRHFLLMEDGEFAQSLSDLLFEKLGAGQTPGELLNPLVLNSVLSKALQCSLHGDTPHASNLSLALKYLPEVFAPNAPDVLSCLELRYKVDWPLNIVITEGCLSKYSGVFSFLLQLKLMMWALKDVCFHLKRTALLSHMAGSVQFRQLQLFKHEMQHFVKVIQGYIANQILHVTWCEFRARLATVGDLEEIQRAHAEYLHKAVFR

SEQ ID NO: 816543 - protein, 1341 aa, Homo sapiens
HRGVHPTLDKSYWTHGYVLISKEVEDCVPVFLKHIAHDIYVCGKTINLLKLCCPRHYLCWSDVPVPRISVIFSLEELKEIEKDCAVYVGRMERVARHSSVSKEEKELRMEIAKQELIAHAREAASRVLSALSDRQMSERMALDARKREQFQRLKEQFVKDQERRQAARQEELDDDFSYARELRDRERRLKSLEEELERKARQALVDHYSKLSAEAARREQKALWRIQRHRLESARLRFLLEDEKHIQEMLKAVSEAHQPQEPPDVLLSVHPQVTSPGPEHPEGGQGCDSGSAEQHSPAWDGWNRPGLLTPQPLKPLAVGAGGRGLQQAEGARPFSDSLSIGDFLPVGPGAEPSVQTGMVPLLEVALQTINLDLPPSAPGEAPAAASTQPSRPQEYDFSTVLRPAVATSPAPGPLQAAECSLGSSGLQLWEDSCGKMDACGSASRETLLPSHPPRRAALEEGSSQPTERLFGQVSGGGLPTGDYASEIAPTRPRWNTHGHVSDASIRVGENVSDVAPTQPRWNTHGHVSNASISLGESVSDVAPTRPRWNIHGHVSNASIRVGENVSDVAPTRPRWNTHGHVSNASIRVGENVSDVAPTRPRWNTHGHVSDASISLGESVSDMAPARPRWNTHGHVSDASISLGESVSDMAPTRPRWNTHGHVSDTSIRVGENVSDVAPIRSRCNTHGHVSDASISLGEPVSDVVSTRPRWNTHVPIPPPHMVLGALSPEAEPNTPRPQQSPPGHTSQSALSLGAQSTVLDCGPRLPVEVGPSLSSPSSGCGEGSISVGENVSDVAPTQPWWPNTPGDSVSEELGQSRVAGGQEWDCGTHRAWEVGGQWGWWHVKFPSGLLVSQDLGCCGGHGRGCLSQGRLGSVPATGTRPDALVSTCVHTGPGRSGDAEDLSPNWPLNSQEDTAAQSSPGRGEEAEASAAEAQGGEQAYLAGLAGQYHLERYPDSYESMSEPPIAHLLRPVLPRAFAFPVDPQVQSAADETAVQLSELLTLPVLMKRSITAPLAAHISLVNKAAVDYFFVELHLEAHYEALRHFLLMEDGEFAQSLSDLLFEKLGAGQTPGELLNPLVLNSVLSKALQCSLHGDTPHASNLSLALKYLPEVFAPNAPDVLSCLELRYKVDWPLNIVITEGCLSKYSGVFSFLLQLKLMMWALKDVCFHLKRTALLSHMAGSVQFRQLQLFKHEMQHFVKVIQGYIANQILHVTWCEFRARLATVGDLEEIQRAHAEYLHKAVFRGLLTEKAAPVMNVIHSIFSLVLKFRSQLISQAWGPPGGPRGAEHPNFALMQQSYNTFKYYSHFLFKVVTKLVNRGYQPHLEDFLLRINFNNYYQDA

SEQ ID NO: 816544 - protein, 1913 aa, Homo sapiens
MASITQLFDDLCEALLPAAKTHLGQRSVNRKRAKRSLKKVAYNALFTNLFQDETQQLQPDMSKLPARNKILMLSFDLRVGGLGPKADRLEELVEELEAAPCCPLLEVGSVLDLLVQLAGSGPPQVLPRKRDYFLNNKHVGRNVPYSGYDCDDLSVFEMDVQSLISREECLCHSMIQETLQVMEAAPGTGLPTVGLFSFGDPCGDRFERDTRVSLFGALVHSRTYDMDVRLGLPPVPDNADLSGLAIKVPPSVDQWEDEGFQSASNLTPDSQSEPSVTPDVDLWEAALTYEASKRSPPGHREEPYLTEAGRDAFDKFCRLHQGELQLLAGGVLQAPQPVLVKECELVKDVLNVLIGVVSATFSLCQPAQAFVVKRGVHVSGASPESISSLLSEVAEYGTCYTRLSHFSLQPVLDSLYSKGLVFQAFTSGLRRYLQYYRACVLSTPPTLSLLTIGFLFKKLGRQLRYLAELCGVGAVLPGTCGGGPRAAFPTGVKLLSYLYQEALHNCSNEHYPVLLSLLKTSCEPYTRFIHDWVYSGVFRDAYGEFMIQVNHEYLSFRDKSYWTHGYVLISKEVEDCVPVFLKHIAHDIYVCGKTINLLKLCCPRHYLCWSDVPVPRISVIFSLEELKEIEKDCAVYVGRMERVARHSSVSKEEKELRMEIAKQELIAHAREAASRVLSALSDRQMSERMALDARKREQFQRLKEQFVKDQERRQAARQEELDDDFSYARELRDRERRLKSLEEELERKARQALVDHYSKLSAEAARREQKALWRIQRHRLESARLRFLLEDEKHIQEMLKAVSEAHQPQEPPDVLLSVHPQVTSPGPEHPEGGQGCDSGSAEQHSPAWDGWNRPGLLTPQPLKPLAVGAGGRGLQQAEGARPFSDSLSIGDFLPVGPGAEPSVQTGMVPLLEVALQTINLDLPPSAPGEAPAAASTQPSRPQEYDFSTVLRPAVATSPAPGPLQAAECSLGSSGLQLWEDSCGKMDACGSASRETLLPSHPPRRAALEEGSSQPTERLFGQVSGGGLPTGDYASEIAPTRPRWNTHGHVSDASIRVGENVSDVAPTQPRWNTHGHVSNASISLGESVSDVAPTRPRWNIHGHVSNASIRVGENVSDVAPTRPRWNTHGHVSNASIRVGENVSDVAPTRPRWNTHGHVSDASISLGESVSDMAPARPRWNTHGHVSDASISLGESVSDMAPTRPRWNTHGHVSDTSIRVGENVSDVAPIRSRCNTHGHVSDASISLGEPVSDVVSTRPRWNTHVPIPPPHMVLGALSPEAEPNTPRPQQSPPGHTSQSALSLGAQSTVLDCGPRLPVEVGPSLSSPSSGCGEGSISVGENVSDVAPTQPWWPNTPGDSVSEELGQSRVAGGQEWDCGTHRAWEVGGQWGWWHVKFPSGLLVSQDLGCCGGHGRGCLSQGRLGSYPPQALGPDALVSTCVHTGPGRSGDAEDLSPNWPLNSQEDTAAQSSPGRGEEAEASAAEAQGGEQAYLAGLAGQYHLERYPDSYESMSEPPIAHLLRPVLPRAFAFPVDPQVQSAADETAVQLSELLTLPVLMKRSITAPLAAHISLVNKAAVDYFFVELHLEAHYEALRHFLLMEDGEFAQSLSDLLFEKLGAGQTPGELLNPLVLNSVLSKALQCSLHGDTPHASNLSLALKYLPEVFAPNAPDVLSCLELRYKVDWPLNIVITEGCLSKYSGVFSFLLQLKLMMWALKDVCFHLKRTALLSHMAGSVQFRQLQLFKHEMQHFVKVIQGYIANQILHVTWCEFRARLATVGDLEEIQRAHAEYLHKAVFSEAWAAAASLWSRLSPPSSTASPQGLLTEKAAPVMNVIHSIFSLVLKFRSQLISQAWGPPGGPRGAEHPNFALMQQSYNTFKYYSHFLFKVVTKLVNRGYQPHLEDFLLRINFNNYYQDA

SEQ ID NO: 816545 - protein, 1916 aa, Homo sapiens
MASITQLFDDLCEALLPAAKTHLGQRSVNRKRAKRSLKKVAYNALFTNLFQDETQQLQPDMSKLPARNKILMLSFDLRVGGLGPKADRLEELVEELEAAPCCPLLEVGSVLDLLVQLAGSGPPQVLPRKRDYFLNNKHVGRNVPYSGYDCDDLSVFEMDVQSLISREECLCHSMIQETLQVMEAAPGTGLPTVGLFSFGDPCGDRFERDTRVSLFGALVHSRTYDMDVRLGLPPVPDNADLSGLAIKVPPSVDQWEDEGFQSASNLTPDSQSEPSVTPDVDLWEAALTYEASKRSPPGHREEPYLTEAGRDAFDKFCRLHQGELQLLAGGVLQAPQPVLVKECELVKDVLNVLIGVVSATFSLCQPAQAFVVKRGVHVSGASPESISSLLSEVAEYGTCYTRLSHFSLQPVLDSLYSKGLVFQAFTSGLRRYLQYYRACVLSTPPTLSLLTIGFLFKKLGRQLRYLAELCGVGAVLPGTCGGGPRAAFPTGVKLLSYLYQEALHNCSNEHYPVLLSLLKTSCEPYTRFIHDWVYSGVFRDAYGEFMIQVNHEYLSFRDKSYWTHGYVLISKEVEDCVPVFLKHIAHDIYVCGKTINLLKLCCPRHYLCWSDVPVPRISVIFSLEELKEIEKDCAVYVGRMERVARHSSVSKEEKELRMEIAKQELIAHAREAASRVLSALSDRQMSERMALDARKREQFQRLKEQFVKDQERRQAARQEELDDDFSYARELRDRERRLKSLEEELERKARQALVDHYSKLSAEAARREQKALWRIQRHRLESARLRFLLEDEKHIQEMLKAVSEAHQPQEPPDVLLSVHPQVTSPGPEHPEGGQGCDSGSAEQHSPAWDGWNRPGLLTPQPLKPLAVGAGGRGLQQAEGARPFSDSLSIGDFLPVGPGAEPSVQTGMVPLLEVALQTINLDLPPSAPGEAPAAASTQPSRPQEYDFSTVLRPAVATSPAPGPLQAAECSLGSSGLQLWEDSCGKMDACGSASRETLLPSHPPRRAALEEGSSQPTERLFGQVSGGGLPTGDYASEIAPTRPRWNTHGHVSDASIRVGENVSDVAPTQPRWNTHGHVSNASISLGESVSDVAPTRPRWNIHGHVSNASIRVGENVSDVAPTRPRWNTHGHVSNASIRVGENVSDVAPTRPRWNTHGHVSDASISLGESVSDMAPARPRWNTHGHVSDASISLGESVSDMAPTRPRWNTHGHVSDTSIRVGENVSDVAPIRSRCNTHGHVSDASISLGEPVSDVVSTRPRWNTHVPIPPPHMVLGALSPEAEPNTPRPQQSPPGHTSQSALSLGAQSTVLDCGPRLPVEVGPSLSSPSSGCGEGSISVGENVSDVAPTQPWWPNTPGDSVSEELGQSRVAGGQEWDCGTHRAWEVGGQWGWWHVKFPSGLLVSQDLGCCGGHGRGCLSQGRLGSYPPQALGPDALVSTCVHTGPGRSGDAEDLSPNWPLNSQEDTAAQSSPGRGEEAEASAAEAQGGEQAYLAGLAGQYHLERYPDSYESMSEPPIAHLLRPVLPRAFAFPVDPQVQSAADETAVQLSELLTLPVLMKRSITAPLAAQECPCPCASLPTQPVLARPDSSSLLLSISLVNKAAVDYFFVELHLEAHYEALRHFLLMEDGEFAQSLSDLLFEKLGAGQTPGELLNPLVLNSVLSKALQCSLHGDTPHASNLSLALKYLPEVFAPNAPDVLSCLELRYKVDWPLNIVITEGCLSKYSGVFSFLLQLKLMMWALKDVCFHLKRTALLSHMAGSVQFRQLQLFKHEMQHFVKVIQGYIANQILHVTWCEFRARLATVGDLEEIQRAHAEYLHKAVFRGLLTEKAAPVMNVIHSIFSLVLKFRSQLISQAWGPPGGPRGAEHPNFALMQQSYNTFKYYSHFLFKVVTKLVNRGYQPHLEDFLLRINFNNYYQDA

SEQ ID NO: 816546 - protein, 750 aa, Homo sapiens
MASITQLFDDLCEALLPAAKTHLGQRSVNRKRAKRSLKKVAYNALFTNLFQDETQQLQPDMSKLPARNKILMLSFDLRVGGLGPKADRLEELVEELEAAPCCPLLEVGSVLDLLVQLAGSGPPQVLPRKRDYFLNNKHVGRNVPYSGYDCDDLSVFEMDVQSLISREECLCHSMIQETLQVMEAAPGTGLPTVGLFSFGDPCGDRFERDTRVSLFGALVHSRTYDMDVRLGLPPVPDNADLSGLAIKVPPSVDQWEDEGFQSASNLTPDSQSEPSVTPDVDLWEAALTYEASKRSPPGHREEPYLTEAGRDAFDKFCRLHQGELQLLAGGVLQAPQPVLVKECELVKDVLNVLIGVVSATFSLCQPAQAFVVKRGVHVSGASPESISSLLSEVAEYGTCYTRLSHFSLQPVLDSLYSKGLVFQAFTSGLRRYLQYYRACVLSTPPTLSLLTIGFLFKKLGRQLRYLAELCGVGAVLPGTCGGGPRAAFPTGVKLLSYLYQEALHNCSNEHYPVLLSLLKTSCEPYTRFIHDWVYSGVFRDAYGEFMIQVNHEYLSFRDKSYWTHGYVLISKEVEDCVPVFLKHIAHDIYVCGKTINLLKLCCPRHYLCWSDVPVPRISVIFSLEELKEIEKDCAVYVGRMERVARHSSVSKEEKELRMEIAKQELIAHAREAASRVLSALSDRQMSERMALDARKREQFQRLKEQFVKDQERRQAARQEELDDDFSYARELRDRERRLKSLEEELERKAR

SEQ ID NO: 816547 - protein, 750 aa, Homo sapiens; identical to SEQ ID NO: 816546

SEQ ID NO: 816548 - protein, 438 aa, Homo sapiens
MGGCAGSRRRFSDSEGEETVPEPRLPLLDHQGAHWKNAVGFWLLGLCNNFSYVVMLSAAHDILSHKRTSGNQSHVDPGPTPIPHNSSSRFDCNSVSTAAVLLADILPTLVIKLLAPLGLHLLPYSPRVLVSGICAAGSFVLVAFSHSVGTSLCGVVFASISSGLGEVTFLSLTAFYPRAVISWWSSGTGGAGLLGALSYLGLTQAGLSPQQTLLSMLGIPALLLASYFLLLTSPEAQDPGGEEEAESAARQPLIRTEAPESKPGSSSSLSLRERWTVFKGLLWYIVPLVVVYFAEYFINQGLFELLFFWNTSLSHAQQYRWYQMLYQAGVFASRSSLRCCRIRFTWALALLQCLNLVFLLADVWFGFLPSIYLVFLIILYEGLLGGAAYVNTFHNIALETSDEHREFAMAATCISDTLGISLSGLLALPLHDFLCQLS

SEQ ID NO: 816549 - protein, 438 aa, Homo sapiens; identical to SEQ ID NO: 816548

SEQ ID NO: 816550 - protein, 438 aa, Homo sapiens; identical to SEQ ID NO: 816548

SEQ ID NO: 816551 - protein, 438 aa, Homo sapiens; identical to SEQ ID NO: 816548

SEQ ID NO: 816552 - protein, 384 aa, Homo sapiens
MLSAAHDILSHKRTSGNQSHVDPGPTPIPHNSSSRFDCNSVSTAAVLLADILPTLVIKLLAPLGLHLLPYSPRVLVSGICAAGSFVLVAFSHSVGTSLCGVVFASISSGLGEVTFLSLTAFYPRAVISWWSSGTGGAGLLGALSYLGLTQAGLSPQQTLLSMLGIPALLLASYFLLLTSPEAQDPGGEEEAESAARQPLIRTEAPESKPGSSSSLSLRERWTVFKGLLWYIVPLVVVYFAEYFINQGLFELLFFWNTSLSHAQQYRWYQMLYQAGVFASRSSLRCCRIRFTWALALLQCLNLVFLLADVWFGFLPSIYLVFLIILYEGLLGGAAYVNTFHNIALETSDEHREFAMAATCISDTLGISLSGLLALPLHDFLCQLS

SEQ ID NO: 816553 - protein, 481 aa, Homo sapiens
MGGCAGSRRRFSDSEGEETVPEPRLPLLDHQGAHWKNAVGFWLLGLCNNFSYVVMLSAAHDILSHKRTSGNQSHVDPGPTPIPHNSSSRFDCNSVSTAAVLLADILPTLVIKLLAPLGLHLLPYSPRVLVSGICAAGSFVLVAFSHSVGTSLCGVVFASISSGLGEVTFLSLTAFYPRAVISWWSSGTGGAGLLGALSYLGLTQAGLSPQQTLLSMLGIPALLLASYFLLLTSPEAQDPGGEEEAESAARQPLIRTEAPESKPGSSSSLSLRERWTVFKGLLWYIVPLVVVYFAEYFINQGLFELLFFWNTSLSHAQQYRWYRGARAVGWEGAVVMQLPCPVGTGGSGMVPGGASSPPPNPNLRYQMLYQAGVFASRSSLRCCRIRFTWALALLQCLNLVFLLADVWFGFLPSIYLVFLIILYEGLLGGAAYVNTFHNIALETSDEHREFAMAATCISDTLGISLSGLLALPLHDFLCQLS

SEQ ID NO: 816554 - protein, 415 aa, Homo sapiens [sequence omitted]

SEQ ID NO: 816555 - protein, 469 aa, Homo sapiens
MGGCAGSRRRFSDSEGEETVPEPRLPLLDHQGAHWKNAVGFWLLGLCNNFSYVVMLSAAHDILSHKRTSGNQSHVDPGPTPIPHNSSSRFDCNSVSTAAVLLADILPTLVIKLLAPLGLHLLPYSPRVLVSGICAAGSFVLVAFSHSVGTSLCGVVFASISSGLGEVTFLSLTAFYPRAVISWWSSGTGGAGLLGALSYLGLTQAGLSPQQTLLSMLGIPALLLASYFLLLTSPEAQDPGGEEEAESAARQPLIRTEAPESKPGSSSSLSLRERWTVFKGLLWYIVPLVVVYFAEYFINQGLVSEGSRRGVEVAIGAGTHTAPSISPVWYLLQFELLFFWNTSLSHAQQYRWYQMLYQAGVFASRSSLRCCRIRFTWALALLQCLNLVFLLADVWFGFLPSIYLVFLIILYEGLLGGAAYVNTFHNIALETSDEHREFAMAATCISDTLGISLSGLLALPLHDFLCQLS

SEQ ID NO: 816556 - protein, 489 aa, Homo sapiens
MGGCAGSRRRFSDSEGEYSRPPSWNDHLWLAAHLRGMRADSAPGGHARSGRAPESRWGSCPLLALPGEETVPEPRLPLLDHQGAHWKNAVGFWLLGLCNNFSYVVMLSAAHDILSHKRTSGNQSHVDPGPTPIPHNSSSRFDCNSVSTAAVLLADILPTLVIKLLAPLGLHLLPYSPRVLVSGICAAGSFVLVAFSHSVGTSLCGVVFASISSGLGEVTFLSLTAFYPRAVISWWSSGTGGAGLLGALSYLGLTQAGLSPQQTLLSMLGIPALLLASYFLLLTSPEAQDPGGEEEAESAARQPLIRTEAPESKPGSSSSLSLRERWTVFKGLLWYIVPLVVVYFAEYFINQGLFELLFFWNTSLSHAQQYRWYQMLYQAGVFASRSSLRCCRIRFTWALALLQCLNLVFLLADVWFGFLPSIYLVFLIILYEGLLGGAAYVNTFHNIALETSDEHREFAMAATCISDTLGISLSGLLALPLHDFLCQLS

SEQ ID NO: 816557 - protein, 390 aa, Homo sapiens
MGGCAGSRRRFSDSEGEETVPEPRLPLLDHQGAHWKNAVGFWLLGLCNNFSYVVMLSAAHDILSHKRTSGNQSHVDPGPTPIPHNSSSRFDCNSVSTAAVLLADILPTLVIKLLAPLGLHLLPYSPRVLVSGICAAGSFVLVAFSHSVGTSLCGVVFASISSGLGEVTFLSLTAFYPSYFLLLTSPEAQDPGGEEEAESAARQPLIRTEAPESKPGSSSSLSLRERWTVFKGLLWYIVPLVVVYFAEYFINQGLFELLFFWNTSLSHAQQYRWYQMLYQAGVFASRSSLRCCRIRFTWALALLQCLNLVFLLADVWFGFLPSIYLVFLIILYEGLLGGAAYVNTFHNIALETSDEHREFAMAATCISDTLGISLSGLLALPLHDFLCQLS

SEQ ID NO: 816558 - protein, 223 aa, Homo sapiens
MLGIPALLLASYFLLLTSPEAQDPGGEEEAESAARQPLIRTEAPESKPGSSSSLSLRERWTVFKGLLWYIVPLVVVYFAEYFINQGLFELLFFWNTSLSHAQQYRWYQMLYQAGVFASRSSLRCCRIRFTWALALLQCLNLVFLLADVWFGFLPSIYLVFLIILYEGLLGGAAYVNTFHNIALETSDEHREFAMAATCISDTLGISLSGLLALPLHDFLCQLS

SEQ ID NO: 816559 - protein, 115 aa, Homo sapiens
MLYQAGVFASRSSLRCCRIRFTWALALLQCLNLVFLLADVWFGFLPSIYLVFLIILYEGLLGGAAYVNTFHNIALETSDEHREFAMAATCISDTLGISLSGLLALPLHDFLCQLS

SEQ ID NO: 816560 - protein, 339 aa, Homo sapiens
MGGCAGSRRRFSDSEGEETVPEPRLPLLDHQGAHWKNAVGFWLLGLCNNFSYVVMLSAAHDILSHKRTSGNQSHVDPGPTPIPHNSSSRFDCNSVSTAPPGSRQWDLCCWKLRPGCLFSFCGDQPVCYFLLLTSPEAQDPGGEEEAESAARQPLIRTEAPESKPGSSSSLSLRERWTVFKGLLWYIVPLVVVYFAEYFINQGLFELLFFWNTSLSHAQQYRWYQMLYQAGVFASRSSLRCCRIRFTWALALLQCLNLVFLLADVWFGFLPSIYLVFLIILYEGLLGGAAYVNTFHNIALETSDEHREFAMAATCISDTLGISLSGLLALPLHDFLCQLS

SEQ ID NO: 816561 - protein, 223 aa, Homo sapiens; identical to SEQ ID NO: 816558

SEQ ID NO: 816562 - protein, 315 aa, Homo sapiens
MGGCAGSRRRFSDSEGEETVPEPRLPLLDHQGAHWKNAVGFWLLGLCNNFSYVVMLSAAHDILSHKRTSGNQSHPPGSRQWDLCCWKLRPGCLFSFCGDQPVCYFLLLTSPEAQDPGGEEEAESAARQPLIRTEAPESKPGSSSSLSLRERWTVFKGLLWYIVPLVVVYFAEYFINQGLFELLFFWNTSLSHAQQYRWYQMLYQAGVFASRSSLRCCRIRFTWALALLQCLNLVFLLADVWFGFLPSIYLVFLIILYEGLLGGAAYVNTFHNIALETSDEHREFAMAATCISDTLGISLSGLLALPLHDFLCQLS

SEQ ID NO: 816563 - protein, 282 aa, Homo sapiens
MRWEAVQARGGAFRIPRVDPGPTPIPHNSSSRFDCNSVSTAPPGSRQWDLCCWKLRPGCLFSFCGDQPVCYFLLLTSPEAQDPGGEEEAESAARQPLIRTEAPESKPGSSSSLSLRERWTVFKGLLWYIVPLVVVYFAEYFINQGLFELLFFWNTSLSHAQQYRWYQMLYQAGVFASRSSLRCCRIRFTWALALLQCLNLVFLLADVWFGFLPSIYLVFLIILYEGLLGGAAYVNTFHNIALETSDEHREFAMAATCISDTLGISLSGLLALPLHDFLCQLS

SEQ ID NO: 816564 - protein, 381 aa, Homo sapiens
MWTQAQRRSPTTAHHDLTATLSLRLPRVLVSGICAAGSFVLVAFSHSVGTSLCGVVFASISSGLGEVTFLSLTAFYPRAVISWWSSGTGGAGLLGALSYLGLTQAGLSPQQTLLSMLGIPALLLASYFLLLTSPEAQDPGGEEEAESAARQPLIRTEAPESKPGSSSSLSLRERWTVFKGLLWYIVPLVVVYFAEYFINQGLFELLFFWNTSLSHAQQYRWYRGARAVGWEGAVVMQLPCPVGTGGSGMVPGGASSPPPNPNLRYQMLYQAGVFASRSSLRCCRIRFTWALALLQCLNLVFLLADVWFGFLPSIYLVFLIILYEGLLGGAAYVNTFHNIALETSDEHREFAMAATCISDTLGISLSGLLALPLHDFLCQLS

SEQ ID NO: 816565 - protein, 253 aa, Homo sapiens
MGGCAGSRRRFSDSEGEETVPEPRLPLLDHQGAHWKNAVGFWLLGLCNNFSYVVMLSAAHDILSHKRTSGNQSHVDPGPTPIPHNSSSRFDCNSVSTAAVLLADILPTLVIKLLAPLGLHLLPYSPRVLVSGICAAGSFVLVAFSHSVGTSLCGSSSSLSLRERWTVFKGLLWYIVPLVVVYFAEYFINQGLFELLFFWNTSLSHAQQYRWYQMLYQAGVFASRSSLRCCRIRFTWALALLQMESRSVAQAGM

SEQ ID NO: 816566 - protein, 110 aa, Homo sapiens
MLSAAHDILSHKRTSGNQSHVDPGPTPIPHNSSSRFDCNSVSTAAVLLADILPTLVIKLLAPAPASPFGKGGQCSSLPALLILGILRTQVTFTCGQRDRSDTQAHPRDPP

SEQ ID NO: 816567 - protein, 338 aa, Homo sapiens
MWTQAQRRSPTTAHHDLTATLSLRLPRVLVSGICAAGSFVLVAFSHSVGTSLCGVVFASISSGLGEVTFLSLTAFYPRAVISWWSSGTGGAGLLGALSYLGLTQAGLSPQQTLLSMLGIPALLLASYFLLLTSPEAQDPGGEEEAESAARQPLIRTEAPESKPGSSSSLSLRERWTVFKGLLWYIVPLVVVYFAEYFINQGLFELLFFWNTSLSHAQQYRWYQMLYQAGVFASRSSLRCCRIRFTWALALLQCLNLVFLLADVWFGFLPSIYLVFLIILYEGLLGGAAYVNTFHNIALETSDEHREFAMAATCISDTLGISLSGLLALPLHDFLCQLS

SEQ ID NO: 816568 - protein, 495 aa, Homo sapiens
MGGCAGSRRRFSDSEGEETVPEPRLPLLDHQGAHWKNAVGFWLLGLCNNFSYVVMLSAAHDILSHKRTSGNQSHVDPGPTPIPHNSSSRFDCNSVSTAAVLLADILPTLVIKLLAPLGLHLLPYSPRVLVSGICAAGSFVLVAFSHSVGTSLCGVVFASISSGLGEVTFLSLTAFYPRAVISWWSSGTGGAGLLGALSYLGLTQAGLSPQQTLLSMLGIPALLLASYFLLLTSPEAQDPGGEEEAESAARQPLIRTEAPESKPGSSSSLSLRERWTVFKLDDGWGMSLWGLLTSRPPAYIFCLFQGLLWYIVPLVVVYFAEYFINQGLVSEGSRRGVEVAIGAGTHTAPSISPVWYLLQFELLFFWNTSLSHAQQYRWYQMLYQAGVFASRSSLRCCRIRFTWALALLQCLNLVFLLADVWFGFLPSIYLVFLIILYEGLLGGAAYVNTFHNIALETSDEHREFAMAATCISDTLGISLSGLLALPLHDFLCQLS

SEQ ID NO: 816569 - protein, 311 aa, Homo sapiens
MRWEAVQARGGAFRIPRGRRPSRSPGSLCWTIRARIGRTRWASGCAPGGHPPHTRHQIVGSSWPSPAALQPPGSRQWDLCCWKLRPGCLFSFCGDQPVCYFLLLTSPEAQDPGGEEEAESAARQPLIRTEAPESKPGSSSSLSLRERWTVFKGLLWYIVPLVVVYFAEYFINQGLFELLFFWNTSLSHAQQYRWYQMLYQAGVFASRSSLRCCRIRFTWALALLQCLNLVFLLADVWFGFLPSIYLVFLIILYEGLLGGAAYVNTFHNIALETSDEHREFAMAATCISDTLGISLSGLLALPLHDFLCQLS

SEQ ID NO: 816570 - protein, 146 aa, Homo sapiens
MQLPCPVGTGGSGMVPGGASSPPPNPNLRYQMLYQAGVFASRSSLRCCRIRFTWALALLQCLNLVFLLADVWFGFLPSIYLVFLIILYEGLLGGAAYVNTFHNIALETSDEHREFAMAATCISDTLGISLSGLLALPLHDFLCQLS

SEQ ID NO: 816571 - protein, 285 aa, Homo sapiens
MLSAAHDILSHKRTSGNQSHVDPGPTPIPHNSSSRFDCNSVSTAPPGSRQWDLCCWKLRPGCLFSFCGDQPVCYFLLLTSPEAQDPGGEEEAESAARQPLIRTEAPESKPGSSSSLSLRERWTVFKGLLWYIVPLVVVYFAEYFINQGLFELLFFWNTSLSHAQQYRWYQMLYQAGVFASRSSLRCCRIRFTWALALLQCLNLVFLLADVWFGFLPSIYLVFLIILYEGLLGGAAYVNTFHNIALETSDEHREFAMAATCISDTLGISLSGLLALPLHDFLCQLS

SEQ ID NO: 816572 - protein, 115 aa, Homo sapiens; identical to SEQ ID NO: 816559

SEQ ID NO: 816573 - protein, 181 aa, Homo sapiens
MGGCAGSRRRFSDSEGEETVPEPRLPLLDHQGAHWKNAVGFWLLGLCNNFSYVVMLSAAHDILSHKRTSGNQSHVDPGPTPIPHNSSSRFDCNSVSTAAVLLADILPTLVIKLLAPLGLHLLPYSPRVLVSGICAAGSFVLVAFSHSVGTSLCAISCCSHLLRPRTLEGKKKQRAQPGSPS

SEQ ID NO: 816574 - protein, 327 aa, Homo sapiens
MGGCAGSRRRFSDSEGEETVPEPRLPLLDHQGAHWKNAVGFWLLGLCNNFSYVVMLSAAHDILSHKRTSGNQSHVDPGPTPIPHNSSSRFDCNSVSTAAVLLADILPTLVIKLLAPLGLHLLPYSPRVLVSGICAAGSFVLVAFSHSVGTSLCGVVFASISSGLGEVTFLSLTAFYPRAVISWWSSGTGGAGLLGALSYLGLTQAGLSPQQTLLSMLGIPALLLASYFLLLTSPEAQDPGGEEEAESAARQPLIRTEAPESKPAPAQLSFGKGAGQGCGVHVPAEVLAENHTRAWNPLLESRRAERGQAPGVAPNRGHHRGRGAPVG

SEQ ID NO: 816575 - protein, 89 aa, Homo sapiens
ARHSPKSRDSRKRGVEAAHSPGEMTGLSMDGGGSPKGDVDPFYYDYETVRNGGLIFAGLAFIVGLLILLSRRFRCGGNKKRRQINEDEP

SEQ ID NO: 816576 - protein, 84 aa, Homo sapiens
PGKQHLPALLHSWTQPAAPAMDRWYLGGSPKGDVDPFYYDYETVRNGGLIFAGLAFIVGLLILLSRRFRCGGNKKRRQINEDEP

SEQ ID NO: 816577 - protein, 84 aa, Homo sapiens; identical to SEQ ID NO: 816576

SEQ ID NO: 816578 - protein, 102 aa, Homo sapiens
MDRWYLGGSPKGDVDPFYYDYETVRNGGLIFAGLAFIVGLLILLILPSEQKDFRLVVGPLRKAAEANSMEGLKPRLTSRASRRGCTPTCDIVVAQLVGKPRD

SEQ ID NO: 816579 - protein, 89 aa, Homo sapiens; identical to SEQ ID NO: 816575

SEQ ID NO: 816580 - protein, 89 aa, Homo sapiens; identical to SEQ ID NO: 816575

SEQ ID NO: 816581 - protein, 67 aa, Homo sapiens
AAERDSCWERPPIPLLLPSLSGDYETVRNGGLIFAGLAFIVGLLILLSRRFRCGGNKKRRQINEDEP

SEQ ID NO: 816582 - protein, 101 aa, Homo sapiens
GKQQPFAVLNLHFTCDTNRVSILPDEEVVCTVRAAVPNGEYVSISDYYFMTTDDAFLEMGEPCYSIRRRYMAFIVGLLILLSRRFRCGGNKKRRQINEDEP

SEQ ID NO: 816583 - protein, 89 aa, Homo sapiens; identical to SEQ ID NO: 816575

SEQ ID NO: 816584 - protein, 795 aa, Homo sapiens [sequence omitted]

SEQ ID NO: 816585 - protein, 795 aa, Homo sapiens [sequence omitted]

SEQ ID NO: 816586 - protein, 777 aa, Homo sapiens
MLSQVYRCGFQPFNQHLLPWVKCTTVFRSHCIQPSVIRHVRSWSNIPFITVPLSRTHGKSFAHRSELKHAKRIVVKLGSAVVTRGDECGLALGRLASIVEQVSVLQNQGREMMLVTSGAVAFGKQRLRHEILLSQSVRQALHSGQNQLKEMAIPVLEARACAAAGQSGLMALYEAMFTQYSICAAQILVTNLDFHDEQKRRNLNGTLHELLRMNIVPIVNTNDAVVPPAEPNSDLQGVNVISVKDNDSLAARLAVEMKTDLLIVLSDVEGLFDSPPGSDDAKLIDIFYPGDQQSVTFGTKSRVGMGGMEAKVKAALWALQGGTSVVIANGTHPKVSGHVITDIVEGKKVGTFFSEVKPAGPTVEQQGEMARSGGRMLATLEPEQRAEIIHHLADLLTDQRDEILLANKKDLEEAEGRLAAPLLKRLSLSTSKLNSLAIGLRQIAASSQDSVGRVLRRTRIAIESRPDCLPQVAALAIASGNGLLLKGGKEAAHSNRILHLLTQEALSIHGVKEAVQLVNTREEVEDLCRLDKMIDLIIPRGSSQLVRDIQKAAKGIPVMGHSEGICHMYVDSEASVDKVTRLVRDSKCEYPAACNALETLLIHRDLLRTPLFDQIIDMLRVEQVKIHAGPKFASYLTFSPSEVKSLRTEYGDLELCIEVVDNVQDAIDHIHKYGSSHTDVIVTEDENTAEFFLQHVDSACVFWNASTRFSDGYRFGLGAEVGISTSRIHARGPVGLEGLLTTKWLLRGKDHVVSDFSEHGSLKYLHENLPIPQRNTN

SEQ ID NO: 816587 - protein, 795 aa, Homo sapiens [sequence omitted]

SEQ ID NO: 816588 - protein, 795 aa, Homo sapiens [sequence omitted]

SEQ ID NO: 816589 - protein, 795 aa, Homo sapiens [sequence omitted]

SEQ ID NO: 816590 - protein, 761 aa, Homo sapiens
NFESPGQGLPVYYLVPLDFSNIYGKSFAHRSELKHAKRIVVKLGSAVVTRGDECGLALGRLASIVEQVSVLQNQGREMMLVTSGAVAFGKQRLRHEILLSQSVRQALHSGQNQLKEMAIPVLEARACAAAGQSGLMALYEAMFTQYSICAAQILVTNLDFHDEQKRRNLNGTLHELLRMNIVPIVNTNDAVVPPAEPNSDLQGVNVISVKDNDSLAARLAVEMKTDLLIVLSDVEGLFDSPPGSDDAKLIDIFYPGDQQSVTFGTKSRVGMGGMEAKVKAALWALQGGTSVVIANGTHPKVSGHVITDIVEGKKVGTFFSEVKPAGPTVEQQGEMARSGGRMLATLEPEQRAEIIHHLADLLTDQRDEILLANKKDLEEAEGRLAAPLLKRLSLSTSKLNSLAIGLRQIAASSQDSVGRVLRRTRIAKNLELEQVTVPIGVLLVIFESRPDCLPQVAALAIASGNGLLLKGGKEAAHSNRILHLLTQEALSIHGVKEAVQLVNTREEVEDLCRLDKMIDLIIPRGSSQLVRDIQKAAKGIPVMGHSEGICHMYVDSEASVDKVTRLVRDSKCEYPAACNALETLLIHRDLLRTPLFDQIIDMLRVEQVKIHAGPKFASYLTFSPSEVKSLRTEYGDLELCIEVVDNVQDAIDHIHKYGSSHTDVIVTEDENTAEFFLQHVDSACVFWNASTRFSDGYRFGLGAEVGISTSRIHARGPVGLEGLLTTKWLLRGKDHVVSDFSEHGSLKYLHENLPIPQRNTN

SEQ ID NO: 816591 - protein, 617 aa, Homo sapiens
KTWQDKRGYFGRRLIHAYADPCLELNGTLHELLRMNIVPIVNTNDAVVPPAEPNSDLQGVNVISVKDNDSLAARLAVEMKTDLLIVLSDVEGLFDSPPGSDDAKLIDIFYPGDQQSVTFGTKSRVGMGGMEAKVKAALWALQGGTSVVIANGTHPKVSGHVITDIVEGKKVGTFFSEVKPAGPTVEQQGEMARSGGRMLATLEPEQRAEIIHHLADLLTDQRDEILLANKKDLEEAEGRLAAPLLKRLSLSTSKLNSLAIGLRQIAASSQDSVGRVLRRTRIAKNLELEQVTVPIGVLLVIFESRPDCLPQVAALAIASGNGLLLKGGKEAAHSNRILHLLTQEALSIHGVKEAVQLVNTREEVEDLCRLDKMIDLIIPRGSSQLVRDIQKAAKGIPVMGHSEGICHMYVDSEASVDKVTRLVRDSKCEYPAACNALETLLIHRDLLRTPLFDQIIDMLRVEQVKIHAGPKFASYLTFSPSEVKSLRTEYGDLELCIEVVDNVQDAIDHIHKYGSSHTDVIVTEDENTAEFFLQHVDSACVFWNASTRFSDGYRFGLGAEVGISTSRIHARGPVGLEGLLTTKWLLRGKDHVVSDFSEHGSLKYLHENLPIPQRNTN

SEQ ID NO: 816592 - protein, 539 aa, Homo sapiens [sequence omitted]

SEQ ID NO: 816593 - protein, 491 aa, Homo sapiens [sequence omitted]

SEQ ID NO: 816594 - protein, 795 aa, Homo sapiens [sequence omitted]

SEQ ID NO: 816595 - protein, 400 aa, Homo sapiens
MMDQRDEILLANKKDLEEAEGRLAAPLLKRLSLSTSKLNSLAIGLRQIAASSQDSVGRVLRRTRIAKNLELEQVTVPIGVLLVIFESRPDCLPQVAALAIASGNGLLLKGGKEAAHSNRILHLLTQEALSIHGVKEAVQLVNTREEVEDLCRLDKMIDLIIPRGSSQLVRDIQKAAKGIPVMGHSEGICHMYVDSEASVDKVTRLVRDSKCEYPAACNALETLLIHRDLLRTPLFDQIIDMLRVEQVKIHAGPKFASYLTFSPSEVKSLRTEYGDLELCIEVVDNVQDAIDHIHKYGSSHTDVIVTEDENTAEFFLQHVDSACVFWNASTRFSDGYRFGLGAEVGISTSRIHARGPVGLEGLLTTKWLLRGKDHVVSDFSEHGSLKYLHENLPIPQRNTN

SEQ ID NO: 816596 - protein, 245 aa, Homo sapiens
MIDLIIPRGSSQLVRDIQKAAKGIPVMGHSEGICHMYVDSEASVDKVTRLVRDSKCEYPAACNALETLLIHRDLLRTPLFDQIIDMLRVEQVKIHAGPKFASYLTFSPSEVKSLRTEYGDLELCIEVVDNVQDAIDHIHKYGSSHTDVIVTEDENTAEFFLQHVDSACVFWNASTRFSDGYRFGLGAEVGISTSRIHARGPVGLEGLLTTKWLLRGKDHVVSDFSEHGSLKYLHENLPIPQRNTN

SEQ ID NO: 816597 - protein, 54 aa, Homo sapiens
EGICHMYVDSEASVDKVTRLGELDGVFSFTTEKYYILCSSGSCQWKQFFAHLLS

SEQ ID NO: 816598 - protein, 165 aa, Homo sapiens
MAGTALKRLMAEYKQLTLNPPEGIVAGPMNEENFFEWEALIMGPEDTCFEFGVFPAILSFPLDYPLSPPKMRFTCEMFHPNIYPDGRVCISILHAPGDDPMGYESSAERWSPVQSVEKILLSVVSMLAEPNDESGANVDASKMWRDDREQFYKIAKQIVQKSLGL

SEQ ID NO: 816599 - protein, 165 aa, Homo sapiens; identical to SEQ ID NO: 816598

SEQ ID NO: 816600 - protein, 165 aa, Homo sapiens; identical to SEQ ID NO: 816598

SEQ ID NO: 816601 - protein, 165 aa, Homo sapiens; identical to SEQ ID NO: 816598

SEQ ID NO: 816602 - protein, 137 aa, Homo sapiens
MNEENFFEWEALIMGPEDTCFEFGVFPAILSFPLDYPLSPPKMRFTCEMFHPNIYPDGRVCISILHAPGDDPMGYESSAERWSPVQSVEKILLSVVSMLAEPNDESGANVDASKMWRDDREQFYKIAKQIVQKSLGL

SEQ ID NO: 816603 - protein, 164 aa, Homo sapiens
RKQSPVSGQEARARLRRGRSAQLLRGHGGDRAQEADGRVQTGPEDTCFEFGVFPAILSFPLDYPLSPPKMRFTCEMFHPNIYPDGRVCISILHAPGDDPMGYESSAERWSPVQSVEKILLSVVSMLAEPNDESGANVDASKMWRDDREQFYKIAKQIVQKSLGL

SEQ ID NO: 816604 - protein, 128 aa, Homo sapiens
MPQLCKQLGCCVCSLCSHYLWSLPKRGDASGTIPGLTWLPLTLAVYPDGRVCISILHAPGDDPMGYESSAERWSPVQSVEKILLSVVSMLAEPNDESGANVDASKMWRDDREQFYKIAKQIVQKSLGL

SEQ ID NO: 816605 - protein, 198 aa, Homo sapiens
MAGTALKRLMAEYKQLTLNPPEGIVAGPMNEENFFEWEALIMGPEDTCFEFGVFPAILSFPLDYPLSPPKMRFTCEMFHPNMSPYGTNSWRRQHRSGKLPDFVDGILGGQPDVQVYPDGRVCISILHAPGDDPMGYESSAERWSPVQSVEKILLSVVSMLAEPNDESGANVDASKMWRDDREQFYKIAKQIVQKSLGL

SEQ ID NO: 816606 - protein, 165 aa, Homo sapiens; identical to SEQ ID NO: 816598

SEQ ID NO: 816607 - protein, 111 aa, Homo sapiens
MAGTALKRLMAEYKQLTLNPPEGIVAGPMNEENFFEWEALIMGPEDTCFEFGVFPAILSFPLDYPLSPPKMRFTCEMFHPNMSPYGTNSWRRQHRSGKLPDFVDVDLRWTA

SEQ ID NO: 816608 - protein, 92 aa, Homo sapiens
MNKDAQMRAAINQKLIETGERERLKELLRAKLIECGWKDQLKAHCKEVIKEKGLEHVTVRYQALPFGVISATKSSTVTVELAANLVVVVVGG

SEQ ID NO: 816609 - protein, 106 aa, Homo sapiens
MVVSKMNKDAQMRAAINQKLIETGERERLKELLRAKLIECGWKDQLKAHCKEVIKEKGLEHVTVDDLVAEITPKGREHSLLSMPAFKIELDCVVVVLFLKVKLAIN

SEQ ID NO: 816610 - protein, 134 aa, Homo sapiens
  misc_feature (58)..(58): Xaa can be any naturally occurring amino acid
MSGGGATQLLNGPMAKRSQTQLSGPPADICRSPPIRGVRNHIRIRPRFTLAIKNSREXPGKPPGQHERQAAPRHPPCTTTRNARTNDSDIHDPNHTHQHRTTHSTTPPTTTPQHAQPPHDAAHHPPHAHLNTIR

SEQ ID NO: 816611 - protein, 134 aa, Homo sapiens; identical to SEQ ID NO: 816610
  misc_feature (58)..(58): Xaa can be any naturally occurring amino acid

SEQ ID NO: 816612 - protein, 272 aa, Homo sapiens
AAPWSRSLQAASLRRWRWAWRCRRLGADAGGGVPGFRGVRPGAGLPGPGDCRSCGSRGSVGDASRDGAGGTGERSAACSLFPLSGGRVGHHLRAGLPAGPPLRQRPAPCGLSDQAGQSRSRRCPRPWGRKRPGLAGPGLWCLRPGLGSPPPPASPGRAELPSRAHCEVTSCRRALAPGPRRPERLLQPVAAPSPAAPLRPSREGCEACSWGPSSGAAPRKGLIFHLATSATGRQDRIQFRLLLGKGPRGKGEAGRKQLGPPSLRGLQDIRRG

SEQ ID NO: 816613 - protein, 445 aa, Homo sapiens [sequence omitted]

SEQ ID NO: 816614 - protein, 445 aa, Homo sapiens [sequence omitted]

SEQ ID NO: 816615 - protein, 488 aa, Homo sapiens
MRFHWLPTLSEPFDRNQELETCIRPLWTPSGSACETEHNKSMDMGNQHPSISRLQEIQKEVKSVEQQVIGFSGLSDDKNYKKLERILTKQLFEIDSVDTEGKGDIQQARKRAAQETERLLKELEQNANHPHRIEIQNIFEEAQSLVREKIVPFYNGGNCVTDEFEEGIQDIILRLTHVKTGGKISLRKARYHTLTKICAVQEIIEDCMKKQPSLPLSEDAHPSVAKINFVMCEVNKARGVLIALLMGVNNNETCRHLSCVLSGLIADLDALDVCGRTEIRNYRREVVEDINKLLKYLDLEEEADTTKAFDLRQNHSILKIEKVLKRMREIKNELLQAQNPSELYLSSKTELQGLIGQLDEVSLEKNPCIREARRRAVIEVQTLITYIDLKEALEKRKLFACEEHPSHKAVWNVLGNLSEIQGEVLSFDGNRTDKNYIRLEELLTKQLLALDAVDPQGEEKCKAARKQAVRLAQNILSYLDLKSDEWEY

SEQ ID NO: 816616 - protein, 482 aa, Homo sapiens
IADSRGYTLVPPNNRRRIWRWPGRDSACETEHNKSMDMGNQHPSISRLQEIQKEVKSVEQQVIGFSGLSDDKNYKKLERILTKQLFEIDSVDTEGKGDIQQARKRAAQETERLLKELEQNANHPHRIEIQNIFEEAQSLVREKIVPFYNGGNCVTDEFEEGIQDIILRLTHVKTGGKISLRKARYHTLTKICAVQEIIEDCMKKQPSLPLSEDAHPSVAKINFVMCEVNKARGVLIALLMGVNNNETCRHLSCVLSGLIADLDALDVCGRTEIRNYRREVVEDINKLLKYLDLEEEADTTKAFDLRQNHSILKIEKVLKRMREIKNELLQAQNPSELYLSSKTELQGLIGQLDEVSLEKNPCIREARRRAVIEVQTLITYIDLKEALEKRKLFACEEHPSHKAVWNVLGNLSEIQGEVLSFDGNRTDKNYIRLEELLTKQLLALDAVDPQGEEKCKAARKQAVRLAQNILSYLDLKSDEWEY

SEQ ID NO: 816617 - protein, 445 aa, Homo sapiens [sequence omitted]

SEQ ID NO: 816618 - protein, 100 aa, Homo sapiens
AAPWSRSLQAASLRRWRWAWRCRRLGADAGGGVPGFRGVRPGAGLPGPGDCRSCGSRGSVGDASRDGAGGTVLVKLNTTKVWIWETNILLLVGFRKSKRK

SEQ ID NO: 816619 - protein, 445 aa, Homo sapiens [sequence omitted]

SEQ ID NO: 816620 - protein, 445 aa, Homo sapiens [sequence omitted]

SEQ ID NO: 816621 - protein, 100 aa, Homo sapiens; identical to SEQ ID NO: 816618

SEQ ID NO: 816622 - protein, 302 aa, Homo sapiens
LPALLTLASAGSCPCARGSLRMPGPRRLRSPGGSGCSSRGSGPRLSTRRWRPCCYCGGSGVWLLRTPPSPSAWPARRCPRHRFEFCEPAFVVGNCLQIASDSHQYDRIYCGAGVQKDHENYMKILLKVGGILVMPIEDQLTQIMRTGQNTWESKNILAVSFAPLVQPSKNDNGKPDSVGLPPCAVRNLQDLARIYIRRTLRNFINDEMQAKGIPQRAPPKRKRKRVKQRINTYVFVGNQLIPQPLDSEEDEKMEEDNKEEEEKDHNEAMKPEEPPQNLLREKIMKLPLPESLKAYLTYFRDK

SEQ ID NO: 816623 - protein, 267 aa, Homo sapiens
MGGAVSAGEDNDDLIDNLKEAQYIRTERVEQAFRAIDRGDYYLEGYRDNAYKDLAWKHGNIHLSAPCIYSEVMEALKLQPGLSFLNLGSGTGYLSTMVGLILGPFGINHGIELHSDVVEYAKEKLESFIKNSDSFDKRRSRALGAVRPLGQRRCLPTRSSELRRRPAGKMSGSSARSSHLSQPVVKSVLVYRNGDPFYAGRRVVIHEKKVSSFEVFLKEVTGGVQAPFGAVRNIYTPRTGHRIRKLDQIQSGGNYVAGGQEAFKKLK

SEQ ID NO: 816624 - protein, 108 aa, Homo sapiens
MGGAVSAGEDNDDLIDNLKEAQYIRTERVEQAFRAIDRGDYYLEGYRDNAYKDLAWKHGNIHLSAPCIYSEVMEALKLQPGLSFLNLGSGTGYLSTMVGLILGTRTQC

SEQ ID NO: 816625 - protein, 137 aa, Homo sapiens
MGGAVSAGEDNDDLIDNLKEAQYIRTERVEQAFRAIDRGDYYLEGYRDNAYKDLAWKHGNIHLSAPCIYSEVMEALKLQPGLSFLNLGSGTGYLSTMVGLILGPFGINHGIELHSDVVEYAKEKLESFIKNSDSFDK

SEQ ID NO: 816626 - protein, 138 aa, Homo sapiens
MGGAVSAGEDNDDLIDNLKEAQYIRTERVEQAFRAIDRGDYYLEGYRDNAYKDLAWKHGNIHLSAPCIYSEVMEALKLQPGLSFLNLGSGTGYLSTMVGLILGPFGINHGIELHSDVVEYAKEKLESFIKNSDSFDNY

SEQ ID NO: 816627 - protein, 357 aa, Homo sapiens
MGGAVSAGEDNDDLIDNLKEAQYIRTERVEQAFRAIDRGDYYLEGYRDNAYKDLAWKHGNIHLSAPCIYSEVMEALKLQPGLSFLNLGSGTGYLSTMVGLILGPFGINHGIELHSDVVEYAKEKLESFIKNSDSFDKFEFCEPAFVVGNCLQIASDSHQYDRIYCGAGVQKDHENYMKILLKVGGILVMPIEDQLTQIMRTGQNTWESKNILAVSFAPLVQPSKNDNGKPDSVGLPPCAVRNLQDLARIYIRRTLRNFINDEMQAKGIPQRAPPKRKRKRVKQRINTYVFVGNQLIPQPLDSEEDEKMEEDNKEEEEKDHNEAMKPEEPPQNLLREKIMKLPLPESLKAYLTYFRDK

SEQ ID NO: 816628 - protein, 169 aa, Homo sapiens [sequence omitted]

SEQ ID NO: 816629 - protein, 357 aa, Homo sapiens; identical to SEQ ID NO: 816627

SEQ ID NO: 816630 - protein, 357 aa, Homo sapiens; identical to SEQ ID NO: 816627

SEQ ID NO: 816631 - protein, 357 aa, Homo sapiens; identical to SEQ ID NO: 816627

SEQ ID NO: 816632 - protein, 357 aa, Homo sapiens; identical to SEQ ID NO: 816627

SEQ ID NO: 816633 - protein, 357 aa, Homo sapiens; identical to SEQ ID NO: 816627

SEQ ID NO: 816634 - protein, 238 aa, Homo sapiens
MGGAVSAGEDNDDLIDNLKEAQYIRTERVEQAFRAIDRGDYYLEGYRDNAYKDLAWKHGNIHLSAPCIYSEVMEALKLQPGLSFLNLGSGTGYLSTMVGLILGPFGINHGIELHSDVVEYAKEKLESFIKNSDSFDKFEFCEPAFVVGNCLQIASDSHQYDRIYCGAGVQKDHENYMKILLKVGGILVMPIEDQLTQIMRTGQNTWESKNILAVSFAPLVQPSKNDNGKPDSVGLHLG

SEQ ID NO: 816635 - protein, 111 aa, Homo sapiens
MGGAVSAGEDNDDLIDNLKEAQYIRTERVEQAFRAIDRGDYYLEGYRDNAYKDLAWKHGNIHLSAPCIYSEVMEALKLQPGLSFLNLGSGTGYLSTMVGLILGYFDLRVLN

SEQ ID NO: 816636 - protein, 807 aa, Homo sapiens
RSRKGWIKDKDRPTKSSMRSAAKPWNPAIRAGGHGPDRVRPLPAASSGMKSSKSSTSLAFESRLSRLKRASSEDTLNKPGSTAASGVVRLKKTATAGAISELTESRLRSGTGAFTTTKRTGIPAPREFSVTVSRERSVPRGPSNPRKSVSSPTSSNTPTPTKHLRTPSTKPKQENEGGEKAALESQVRELLAEAKAKDSEINRLRSELKKYKEKRTLNAEGTDALGPNVDGTSVSPGDTEPMIRALEEKNKNFQKELSDLEEENRVLKEKLIYLEHSPNSEGAASHTGDSSCPTSITQESSFGSPTGNQLSSDIDEYKKNIHGNALRTSGSSSSDVTKASLSPDASDFEHITAETPSRPLSSTSNPFKSSKCSTAGSSPNSVSELSLASLTEKIQKMEENHHSTAEELQATLQELSDQQQMVQELTAENEKLVDEKTILETSFHQHRERAEQLSQENEKLMNLLQERVKNEEPTTQEGKIIELEQKCTGILEQGRFEREKLLNIQQQLTCSLRKVEEENQGALEMIKRLKEENEKLNEFLELERHNNNMMAKTLEECRVTLEGLKMENGSLKSHLQGEKQKATEASAVEQTAESCEVQEMLKVARAEKDLLELSCNELRQELLKANGEIKHVSSLLAKVEKDYSYLKEICDHQAEQLSRTSLKLQEKASESDAEIKDMKETIFELEDQVEQHRAVKLHNNQLISELESSVIKLEEQKSDLERQLKTLTKQMKEETEEWRRFQADLQTAVVVANDIKCEAQQELRTVKRKLLEEEEKNARLQKELGDVQGHGRVVTSRAAPPSLGSVS

SEQ ID NO: 816637 - protein, 987 aa, Homo sapiens [sequence omitted]

SEQ ID NO: 816638 - protein, 981 aa, Homo sapiens
MGNHSGRPEDPEPGAFTTTKRTGIPAPREFSVTVSRERSVPRGPSNPRKSVSSPTSSNTPTPTKHLRTPSTKPKQENEGGEKAALESQVRELLAEAKAKDSEINRLRSELKKYKEKRTLNAEGTDALGPNVDGTSVSPGDTEPMIRALEEKNKNFQKELSDLEEENRVLKEKLIYLEHSPNSEGAASHTGDSSCPTSITQESSFGSPTGNQLSSDIDEYKKNIHGNALRTSGSSSSDVTKASLSPDASDFEHITAETPSRPLSSTSNPFKSSKCSTAGSSPNSVSELSLASLTEKIQKMEENHHSTAEELQATLQELSDQQQMVQELTAENEKLVDEKTILETSFHQHRERAEQLSQENEKLMNLLQERVKNEEPTTQEGKIIELEQKCTGILEQGRFEREKLLNIQQQLTCSLRKVEEENQGALEMIKRLKEENEKLNEFLELERHNNNMMAKTLEECRVTLEGLKMENGSLKSHLQGEKQKATEASAVEQTAESCEVQEMLKVARAEKDLLELSCNELRQELLKANGEIKHVSSLLAKVEKDYSYLKEICDHQAEQLSRTSLKLQEKASESDAEIKDMKETIFELEDQVEQHRAVKLHNNQLISELESSVIKLEEQKSDLERQLKTLTKQMKEETEEWRRFQADLQTAVVVANDIKCEAQQELRTVKRKLLEEEEKNARLQKELGDVQGHGRVVTSRAAPPPVDEEPESSEVDAAGRWPGVCVSRTSPTPPESATTVKSLIKSFDLGRPGGAGQNISVHKTPRSPLSGIPVRTAPAAAVSPMQRHSTYSSVRPASRGVTQRLDLPDLPLSDILKGRTETLKPDPHLRKSPSLESLSRPPSLGFGDTRLLSASTRAWKPQSKLSVERKDPLAALAREYGGSKRNALLKWCQKKTQGYANIDITNFSSSWSDGLAFCALLHTYLPAHIPYQELNSQEKKRNLLLAFEAAESVGIKPSLELSEMLYTDRRRRGREFSSKTGN

SEQ ID NO: 816639 - protein, 948 aa, Homo sapiens
MGNHSGRPEDPEPGAFTTTKRTGIPAPREFSVTVSRERSVPRGPSNPRKSVSSPTSSNTPTPTKHLRTPSTKPKQENEGGEKAALESQVRELLAEAKAKDSEINRLRSELKKYKEKRTLNAEGTDALGPNVDGTSVSPGDTEPMIRALEEKNKNFQKELSDLEEENRVLKEKLIYLEHSPNSEGAASHTGDSSCPTSITQESSFGSPTGNQLSSDIDEYKKNIHGNALRTSGSSSSDVTKASLSPDASDFEHITAETPSRPLSSTSNPFKSSKCSTAGSSPNSVSELSLASLTEKIQKMEENHHSTAEELQATLQELSDQQQMVQELTAENEKLVDEKTILETSFHQHRERAEQLSQENEKLMNLLQERVKNEEPTTQEGKIIELEQKCTGILEQGRFEREKLLNIQQQLTCSLRKVEEENQGALEMIKRLKEENEKLNEFLELERHNNNMMAKTLEECRVTLEGLKMENGSLKSHLQGEKQKATEASAVEQTAESCEVQEMLKVARAEKDLLELSCNELRQELLKANGEIKHVSSLLAKVEKDYSYLKEICDHQAEQLSRTSLKLQEKASESDAEIKDMKETIFELEDQVEQHRAVKLHNNQLISELESSVIKLEEQKSDLERQLKTLTKQMKEETEEWRRFQADLQTAVVVANDIKCEAQQELRTVKRKLLEEEEKNARLQKELGDVQGHGRVVTSRAAPPPVDEEPESSEVDAAGRWPGVCVSRTSPTPPESATTVKSLIKSFDLGRPGGAGQNISVHKTPRSPLSGIPVRTAPAAAVSPMQRHSTYSSVRPASRGVTQRLDLPDLPLSDILKGRTETLKPDPHLRKSPSLESLSRPPSLGFGDTRLLSASTRAWKPQSKLSVERKDPLAALAREYGGSKRNALLKWCQKKTQGYAKRNLLLAFEAAESVGIKPSLELSEMLYTDRPDWQSVMQYVAQIYKYFET

SEQ ID NO: 816640 - protein, 1068 aa, Homo sapiens [sequence omitted]

SEQ ID NO: 816641 - protein, 999 aa, Homo sapiens
MACSEDKNYYKANGEIKHVSSLLAKGAFTTTKRTGIPAPREFSVTVSRERSVPRGPSNPRKSVSSPTSSNTPTPTKHLRTPSTKPKQENEGGEKAALESQVRELLAEAKAKDSEINRLRSELKKYKEKRTLNAEGTDALGPNVDGTSVSPGDTEPMIRALEEKNKNFQKELSDLEEENRVLKEKLIYLEHSPNSEGAASHTGDSSCPTSITQESSFGSPTGNQLSSDIDEYKKNIHGNALRTSGSSSSDVTKASLSPDASDFEHITAETPSRPLSSTSNPFKSSKCSTAGSSPNSVSELSLASLTEKIQKMEENHHSTAEELQATLQELSDQQQMVQELTAENEKLVDEKTILETSFHQHRERAEQLSQENEKLMNLLQERVKNEEPTTQEGKIIELEQKCTGILEQGRFEREKLLNIQQQLTCSLRKVEEENQGALEMIKRLKEENEKLNEFLELERHNNNMMAKTLEECRVTLEGLKMENGSLKSHLQGEKQKATEASAVEQTAESCEVQEMLKVARAEKDLLELSCNELRQELLKANGEIKHVSSLLAKVEKDYSYLKEICDHQAEQLSRTSLKLQEKASESDAEIKDMKETIFELEDQVEQHRAVKLHNNQLISELESSVIKLEEQKSDLERQLKTLTKQMKEETEEWRRFQADLQTAVVVANDIKCEAQQELRTVKRKLLEEEEKNARLQKELGDVQGHGRVVTSRAAPPPVDEEPESSEVDAAGRWPGVCVSRTSPTPPESATTVKSLIKSFDLGRPGGAGQNISVHKTPRSPLSGIPVRTAPAAAVSPMQRHSTYSSVRPASRGVTQRLDLPDLPLSDILKGRTETLKPDPHLRKSPSLESLSRPPSLGFGDTRLLSASTRAWKPQSKLSVERKDPLAALAREYGGSKRNALLKWCQKKTQGYANIDITNFSSSWSDGLAFCALLHTYLPAHIPYQELNSQEKKRNLLLAFEAAESVGIKPSLELSEMLYTDRPDWQSVMQYVAQIYKYFET

SEQ ID NO: 816642 - protein, 709 aa, Homo sapiens [sequence omitted]

SEQ ID NO: 816643 - protein, 732 aa, Homo sapiens
LGVVKLHNNQLISELERGVINAGSSPNSVSELSLASLTEKIQKMEENHHSTAEELQATLQELSDQQQMVQELTAENEKLVDEKTILETSFHQHRERAEQLSQENEKLMNLLQERVKNEEPTTQEGKIIELEQKCTGILEQGRFEREKLLNIQQQLTCSLRKVEEENQGALEMIKRLKEENEKLNEFLELERHNNNMMAKTLEECRVTLEGLKMENGSLKSHLQGEKQKATEASAVEQTAESCEVQEMLKVARAEKDLLELSCNELRQELLKANGEIKHVSSLLAKVEKDYSYLKEICDHQAEQLSRTSLKLQEKASESDAEIKDMKETIFELEDQVEQHRAVKLHNNQLISELESSVIKLEEQKSDLERQLKTLTKQMKEETEEWRRFQADLQTAVVVANDIKCEAQQELRTVKRKLLEEEEKNARLQKELGDVQGHGRVVTSRAAPPPVDEEPESSEVDAAGRWPGVCVSRTSPTPPESATTVKSLIKSFDLGRPGGAGQNISVHKTPRSPLSGIPVRTAPAAAVSPMQRHSTYSSVRPASRGVTQRLDLPDLPLSDILKGRTETLKPDPHLRKSPSLESLSRPPSLGFGDTRLLSASTRAWKPQSKLSVERKDPLAALAREYGGSKRNALLKWCQKKTQGYANIDITNFSSSWSDGLAFCALLHTYLPAHIPYQELNSQEKKRNLLLAFEAAESVGIKPSLELSEMLYTDRPDWQSVMQYVAQIYKYFET

SEQ ID NO: 816644 - protein, 508 aa, Homo sapiens
NCKAPGPFFDWSGPAGRNRLASRSQRELGTVDTRSEAGKPAGARVGQAWATTQDGPRIRNQVEKDYSYLKEICDHQAEQLSRTSLKLQEKASESDAEIKDMKETIFELEDQVEQHRAVKLHNNQLISELESSVIKLEEQKSDLERQLKTLTKQMKEETEEWRRFQADLQTAVVVANDIKCEAQQELRTVKRKLLEEEEKNARLQKELGDVQGHGRVVTSRAAPPPVDEEPESSEVDAAGRWPGVCVSRTSPTPPESATTVKSLIKSFDLGRPGGAGQNISVHKTPRSPLSGIPVRTAPAAAVSPMQRHSTYSSVRPASRGVTQRLDLPDLPLSDILKGRTETLKPDPHLRKSPSLESLSRPPSLGFGDTRLLSASTRAWKPQSKLSVERKDPLAALAREYGGSKRNALLKWCQKKTQGYANIDITNFSSSWSDGLAFCALLHTYLPAHIPYQELNSQEKKRNLLLAFEAAESVGIKPSLELSEMLYTDRPDWQSVMQYVAQIYKYFET

SEQ ID NO: 816645 - protein, 130 aa, Homo sapiens
MKETIFELEDQVEQHRAVKLHNNQLISELESSVIKLEEQKSDLERQLKTLTKQMKEETEEWRRFQADLQTAVVVANDIKCEAQQELRTVKRKLLEEEEKNARLQKELGDVQGHGRVVTSRAAPPSLGSVS

SEQ ID NO: 816646 - protein, 271 aa, Homo sapiens
MTRWARVSTTYNKRPLPATSWEDMKKGSFEGTSQNLPKRKQLEANRLSLKNDAPQAKHKKNKKKKEYLNEDVNGFMEYLRQNSQMVHNGQIIATDSEEVREEIAVALKKDSRREGRRLKRQAAKKNAMVCFHCRKPGHGIADCPAALENQDMGTGICYRCGSTEHEITKCKAKVDPALGEFPFAKCFVCGEMGHLSRSCPDNPKGLYADGGGCKLCGSVEHLKKDCPESQNSERMVTVGRWAKGMSADYEEILDVPKPQKPKTKIPKVVNF

SEQ ID NO: 816647 - protein, 271 aa, Homo sapiens; identical to SEQ ID NO: 816646

SEQ ID NO: 816648 - protein, 308 aa, Homo sapiens
ALGHYVLPVSNTAGGRSSPARQLGCSGGFVRGTTDEIMTRWARVSTTYNKRPLPATSWEDMKKGSFEGTSQNLPKRKQLEANRLSLKNDAPQAKHKKNKKKKEYLNEDVNGFMEYLRQNSQMVHNGQIIATDSEEVREEIAVALKKDSRREGRRLKRQAAKKNAMVCFHCRKPGHGIADCPAALENQDMGTGICYRCGSTEHEITKCKAKVDPALGEFPFAKCFVCGEMGHLSRSCPDNPKGLYADGGGCKLCGSVEHLKKDCPESQNSERMVTVGRWAKGMSADYEEILDVPKPQKPKTKIPKVVNF

SEQ ID NO: 816649 - protein, 271 aa, Homo sapiens; identical to SEQ ID NO: 816646

SEQ ID NO: 816650 - protein, 195 aa, Homo sapiens
MTRWARVSTTYNKRPLPATSWEDMKKGSFEGTSQNLPKRKQLEANRLSLKNDAPQAKHKKNKKKKEYLNEDVNGFMEYLRQNSQMVHNGQIIATDSEEVREEIAVALKKDSRREGRRLKRQAAKKNAMVCFHCRKPGHGIADCPAALENQDMGTGICYRCGSTEHEITKCKAKVDPALGMCFFQFFVLFMGKANK

SEQ ID NO: 816651 - protein, 120 aa, Homo sapiens
MGTGICYRCGSTEHEITKCKAKVDPALGEFPFAKCFVCGEMGHLSRSCPDNPKGLYADGGGCKLCGSVEHLKKDCPESQNSERMVTVGRWAKGMSADYEEILDVPKPQKPKTKIPKVVNF

SEQ ID NO: 816652 - protein, 175 aa, Homo sapiens
ALSGTMCFRSPIPQEGGLPRLANSAALGDSCAVCFHCRKPGHGIADCPAALENQDMGTGICYRCGSTEHEITKCKAKVDPALGEFPFAKCFVCGEMGHLSRSCPDNPKGLYADGGGCKLCGSVEHLKKDCPESQNSERMVTVGRWAKGMSADYEEILDVPKPQKPKTKIPKVVNF

SEQ ID NO: 816653 - protein, 153 aa, Homo sapiens
ALGHYVLPVSNTAGGRSSPARQLGCSGGFVRGKKLRGSAVRCGSTEHEITKCKAKVDPALGEFPFAKCFVCGEMGHLSRSCPDNPKGLYADGGGCKLCGSVEHLKKDCPESQNSERMVTVGRWAKGMSADYEEILDVPKPQKPKTKIPKVVNF

SEQ ID NO: 816654 - protein, 172 aa, Homo sapiens [sequence omitted]

SEQ ID NO: 816655 - protein, 172 aa, Homo sapiens [sequence omitted]

SEQ ID NO: 816656 - protein, 79 aa, Homo sapiens
ALGHYVLPVSNTAGGRSSPARQLGCSGGFVRGKKLRGSAVRCVSIVENLVMELQIAPPPLKIKTWALGYVTGVGPQSTK

SEQ ID NO: 816657 - protein, 295 aa, Homo sapiens
MIEVLTTTDSQKLLHQLNALLEQESRCQPKVCGLRLIESAHDNGLRMTARLRDFEVKDLLSLTQFFGFDTETFSLAVNLLDRFLSKMKVQPKHLGCVGLSCFYLAVKSIEEERNVPLATDLIRISQYRFTVSDLMRMEKIVLEKVCWKVKATTAFQFLQLYYSLLQENLPLERRNSINFERLEAQLKACHCRIIFSKAKPSVLALSIIALEIQAQKCVELTEGIECLQKHSKINGRDLTFWQELVSKCLTEYSSNKCSKPNVQKLKWIVSGRTARQLKHSYYRITHLPTIPEMVP

SEQ ID NO: 816658 - protein, 295 aa, Homo sapiens; identical to SEQ ID NO: 816657

SEQ ID NO: 816659 - protein, 295 aa, Homo sapiens; identical to SEQ ID NO: 816657

SEQ ID NO: 816660 - protein, 280 aa, Homo sapiens
MIEVLTTTDSQKLLHQLNALLEQESRCQPKVCGLRLIESAHDNGLRMTARLRDFEVKDLLSLTQFFGFDTETFSLAVNLLDRFLSKMKVQPKHLGCVGLSCFYLAVKSIEEERNVPLATDLIRISQYRFTVSDLMRMEKIVLEKVCWKVKATTAFQFLQLYYSLLQENLPLERRNSINFERLEAQLKACHCRIIFSKAKPSVLALSIIALEIQAQKCVELTEGIECLQKHSKINGRDLTFWQELVSKCLTEYSSNKCSKPNVQKLKWIVSGRTARQLKHS

SEQ ID NO: 816661 - protein, 295 aa, Homo sapiens; identical to SEQ ID NO: 816657

SEQ ID NO: 816662 - protein, 295 aa, Homo sapiens; identical to SEQ ID NO: 816657

SEQ ID NO: 816663 - protein, 295 aa, Homo sapiens; identical to SEQ ID NO: 816657

SEQ ID NO: 816664 - protein, 295 aa, Homo sapiens; identical to SEQ ID NO: 816657

SEQ ID NO: 816665 - protein, 295 aa, Homo sapiens; identical to SEQ ID NO: 816657

SEQ ID NO: 816666 - protein, 241 aa, Homo sapiens
MIEVLTTTDSQKLLHQLNALLEQESRCQPKVCGLRLIESAHDNGLRMTARLRDFEVKDLLSLTQFFGFDTETFSLAVNLLDRFLSKMKVQPKHLGCVGLSCFYLAVKSIEEERNVPLATDLIRISQYRFTVSDLMRMEKIVLEKVCWKVKATTAFQFLQLYYSLLQENLPLERRNSINFERLEAQLKACHCRIIFSKAKPSVLALSIIALEIQAQKCVELTEGIECLQKHSKDYYSTKKLL

SEQ ID NO: 816667 - protein, 295 aa, Homo sapiens; identical to SEQ ID NO: 816657

SEQ ID NO: 816668 - protein, 277 aa, Homo sapiens
MIEVLTTTDSQKLLHQLNALLEQESRCQPKVCGLRLIESAHDNGLRMTARLRDFEVKDLLSLTQFFGFDTETFSLAVNLLDRFLSKMKVQPKHLGCVGLSCFYLAVKSIEEERNVPLATDLIRISQYRFTVSDLMRMEFLQLYYSLLQENLPLERRNSINFERLEAQLKACHCRIIFSKAKPSVLALSIIALEIQAQKCVELTEGIECLQKHSKINGRDLTFWQELVSKCLTEYSSNKCSKPNVQKLKWIVSGRTARQLKHSYYRITHLPTIPEMVP

SEQ ID NO: 816669 - protein, 295 aa, Homo sapiens; identical to SEQ ID NO: 816657

SEQ ID NO: 816670 - protein, 1207 aa, Homo sapiens
CQGDGSFPELLVLPIGDVEPLLVEGLSGRRDPLGDPTMFFYLSKKISIPNNVKLQCVSWNKEQGFIACGGEDGLLKVLKLETQTDDAKLRGLAAPSNLSMNQTLEGHSGSVQVVTWNEQYQKLTTSDENGLIIVWMLYKGSWIEEMINNRNKSVVRSMSWNADGQKICIVYEDGAVIVGSVDGNRIWGKDLKGIQLSHVTWSADSKVLLFGMANGEIHIYDNQGNFMIKMKLSCLVNVTGAISIAGIHWYHGTEGYVEPDCPCLAVCFDNGRCQIMRHENDQNPVLIDTGMYVVGIQWNHMGSVLAVAGFQKAAMQDKDVNIVQFYTPFGEHLGTLKVPGKEISALSWEGGGLKIALAVDSFIYFANIRPNYKWGYCSNTVVYAYTRPDRPEYCVVFWDTKNNEKYVKYVKGLISITTCGDFCILATKADENHPQFVLVLCNSIGTPLDPKYIDIVPLFVAMTKTHVIAASKEAFYTWQYRVAKKLTALEINQITRSRKEGRERIYHVDDTPSGSMDGVLDYSKTIQGTRDPICAITASDKILIVGRESGTIQRYSLPNVGLIQKYSLNCRAYQLSLNCNSSRLAIIDISGVLTFFDLDARVTDSTGQQVVGELLKLERRDVWDMKWAKDNPDLFAMMEKTRMYVFRNLDPEEPIQTSGYICNFEDLEIKSVLLDEILKDPEHPNKDYLINFEIRSLRDSRALIEKVGIKDASQFIEDNPHPRLWRLLAEAALQKLDLYTAEQAFVRCKDYQGIKFVKRLGKLLSESMKQAEVVGYFGRFEEAERTYLEMDRRDLAIGLRLKLGDWFRVLQLLKTGSGDADDSLLEQANNAIGDYFADRQKWLNAVQYYVQGRNQERLAECYYMLEDYEGLENLAISLPENHKLLPEIAQMFVRVGMCEQAVTAFLKCSQPKAAVDTCVHLNQWNKAVELAKNHSMKEIGSLLARYASHLLEKNKTLDAIELYRKANYFFDAAKLMFKIADEEAKKGSKPLRVKKLYVLSALLIEQYHEQMKNAQRGKVKGKSSEATSALAGLLEEEVLSTTDRFTDNAWRGAEAYHFFILAQRQLYEGCVDTALKTALHLKDYEDIIPPVEIYSLLALCACASRAFGTCSKAFIKLKSLETLSSEQKQQYEDLALEIFTKHTSKDNRKPELDSLMEGGEGKLPTCVATGSPITEYQFWMCSVCKHGVLAQEISHYSFCPLCHSPVG

SEQ ID NO: 816671 - protein, 1187 aa, Homo sapiens
CQGDGSFPELLVLPIGDVEPLLVEGLSGRRDPLGDPTMFFYLSKKISIPNNVKLQCVSWNKEQGFIACGGEDGLLKVLKLETQTDDAKLRGLAAPSNLSMNQTLEGHSGSVQVVTWNEQYQKLTTSDENGLIIVWMLYKGSWIEEMINNRNKSVVRSMSWNADGQKICIVYEDGAVIVGSVDGNRIWGKDLKGIQLSHVTWSADSKVLLFGMANGEIHIYDNQGNFMIKMKLSCLVNVTGAISIAGIHWYHGTEGYVEPDCPCLAVCFDNGRCQIMRHENDQNPVLIDTGMYVVGIQWNHMGSVLAVAGFQKAAMQDKDVNIVQFYTPFGEHLGTLKVPGKEISALSWEGGGLKIALAVDSFIYFANIRPNYKWGYCSNTVVYAYTRPDRPEYCVVFWDTKNNEKYVKYVKGLISITTCGDFCILATKADENHPQYHVFVAMTKTHVIAASKEAFYTWQYRVAKKLTALEINQITRSRKEGRERIYHVDDTPSGSMDGVLDYSKTIQGTRDPICAITASDKILIVGRESGTIQRYSLPNVGLIQKYSLNCRAYQLSLNCNSSRLAIIDISGVLTFFDLDARVTDSTGQQVVGELLKLERRDVWDMKWAKDNPDLFAMMEKTRMYVFRNLDPEEPIQTSGYICNFEDLEIKSVLLDEILKDPEHPNKDYLINFEIRSLRDSRALIEKVGIKDASQFIEDNPHPRLWRLLAEAALQKLDLYTAEQAFVRCKDYQGIKFVKRLGKLLSESMKQAEVVGYFGRFEEAERTYLEMDRRDLAIGLRLKLGDWFRVLQLLKTGSGDADDSLLEQANNAIGDYFADRQKWLNAVQYYVQGRNQERLAECYYMLEDYEGLENLAISLPENHKLLPEIAQMFVRVGMCEQAVTAFLKCSQPKAAVDTCVHLNQWNKAVELAKNHSMKEIGSLLARYASHLLEKNKTLDAIELYRKANYFFDAAKLMFKIADEEAKKGSKPLRVKKLYVLSALLIEQYHEQMKNAQRGKVKGKSSEATSALAGLLEEEVLSTTDRFTDNAWRGAEAYHFFILAQRQLYEGCVDTALKTALHLKDYEDIIPPVEIYSLLALCACASRAFGTCSKAFIKLKSLETLSSEQKQQYEDLALEIFTKHTSKDNRKPELDSLMEGGEGKLPTCVATGSPITEYQFWMCSVCKHGVLAQEISHYSFCPLCHSPVG

SEQ ID NO: 816672 - protein, 550 aa, Homo sapiens
  misc_feature (13)..(13): Xaa can be any naturally occurring amino acid
  misc_feature (19)..(19): Xaa can be any naturally occurring amino acid
LIDVFVLTSPPRXMFKGLXGFWDPEHPNKDYLINFEIRSLRDSRALIEKVGIKDASQFIEDNPHPRLWRLLAEAALQKLDLYTAEQAFVRCKDYQGIKFVKRLGKLLSESMKQAEVVGYFGRFEEAERTYLEMDRRDLAIGLRLKLGDWFRVLQLLKTGSGDADDSLLEQANNAIGDYFADRQKWLNAVQYYVQGRNQERLAECYYMLEDYEGLENLAISLPENHKLLPEIAQMFVRVGMCEQAVTAFLKCSQPKAAVDTCVHLNQWNKAVELAKNHSMKEIGSLLARYASHLLEKNKTLDAIELYRKANYFFDAAKLMFKIADEEAKKGSKPLRVKKLYVLSALLIEQYHEQMKNAQRGKVKGKSSEATSALAGLLEEEVLSTTDRFTDNAWRGAEAYHFFILAQRQLYEGCVDTALKTALHLKDYEDIIPPVEIYSLLALCACASRAFGTCSKAFIKLKSLETLSSEQKQQYEDLALEIFTKHTSKDNRKPELDSLMEGGEGKLPTCVATGSPITEYQFWMCSVCKHGVLAQEISHYSFCPLCHSPVG

SEQ ID NO: 816673 - protein, 439 aa, Homo sapiens
CQGDGSFPELLVLPIGDVEPLLVEGLSGRRDPLGDPTMFFYLSKKISIPNNVKLQCVSWNKEQGFIACGGEDGLLKVLKLETQTDDAKLRGLAAPSNLSMNQTLEGHSGSVQVVTWNEQYQKLTTSDENGLIIVWMLYKGSWIEEMINNRNKSVVRSMSWNADGQKICIVYEDGAVIVGSVDGNRIWGKDLKGIQLSHVTWSADSKVLLFGMANGEIHIYDNQGNFMIKMKLSCLVNVTGAISIAGIHWYHGTEGYVEPDCPCLAVCFDNGRCQIMRHENDQNPVLIDTGMYVVGIQWNHMGSVLAVAGFQKAAMQDKDVNIVQFYTPFGEHLGTLKVPGKEISALSWEGGGLKIALAVDSFIYFANIRPNYKWGYCSNTVVYAYTRPDRPEYCVVFWDTKNNEKYVKYVKGLISITTCGDFCILATKADENHPQVGVS

SEQ ID NO: 816674 - protein, 639 aa, Homo sapiens
CQGDGSFPELLVLPIGDVEPLLVEGLSGRRDPLGDPTMFFYLSKKISIPNNVKLQCVSWNKEQGFIACGGEDGLLKVLKLETQTDDAKLRGLAAPSNLSMNQTLEGHSGSVQVVTWNEQYQKLTTSDENGLIIVWMLYKGSWIEEMINNRNKSVVRSMSWNADGQKICIVYEDGAVIVGSVDGNRIWGKDLKGIQLSHVTWSADSKVLLFGMANGEIHIYDNQGNFMIKMKLSCLVNVTGAISIAGIHWYHGTEGYVEPDCPCLAVCFDNGRCQIMRHENDQNPVLIDTGMYVVGIQWNHMGSVLAVAGFQKAAMQDKDVNIVQFYTPFGEHLGTLKVPGKEISALSWEGGGLKIALAVDSFIYFANIRPNYKWGYCSNTVVYAYTRPDRPEYCVVFWDTKNNEKYVKYVKGLISITTCGDFCILATKADENHPQYHVFVAMTKTHVIAASKEAFYTWQYRVAKKLTALEINQITRSRKEGRERIYHVDDTPSGSMDGVLDYSKTIQGTRDPICAITASDKILIVGRESGTIQRYSLPNVGLIQKYSLNCRAYQLSLNCNSSRLAIIDISGVLTFFDLDARVTDSTGQQVVGELLKLERRDVWDMKWAKDNPDLFAMMEKTRMYVFRNLDPEVKTRNEC

SEQ ID NO: 816675 - protein, 200 aa, Homo sapiens
MAASMHGQPSPSLEDAKLRRPMVIEIIEKNFDYLRKEMTQNIYQMATFGTTAGFSGIFSNFLFRRCFKVKHDALKTYASLATLPFLSTVVTDKLFVIDALYSDNISKENCVFRSSLIGIVCGVFYPSSLAFTKNGRLATKYHTVPLPPKGRVLIHWMTLCQTQMKLMAIPLVFQIMFGILNGLYHYAVFEETLEKTIHEE

SEQ ID NO: 816676 - protein, 200 aa, Homo sapiens; identical to SEQ ID NO: 816675

SEQ ID NO: 816677 - protein, 200 aa, Homo sapiens; identical to SEQ ID NO: 816675

SEQ ID NO: 816678 - protein, 200 aa, Homo sapiens; identical to SEQ ID NO: 816675

SEQ ID NO: 816679 - protein, 230 aa, Homo sapiens
MVVFGYEAGTKPRDSGVVPVGTEEAPKVFKMAASMHGQPSPSLEDAKLRRPMVIEIIEKNFDYLRKEMTQNIYQMATFGTTAGFSGIFSNFLFRRCFKVKHDALKTYASLATLPFLSTVVTDKLFVIDALYSDNISKENCVFRSSLIGIVCGVFYPSSLAFTKNGRLATKYHTVPLPPKGRVLIHWMTLCQTQMKLMAIPLVFQIMFGILNGLYHYAVFEETLEKTIHEE

SEQ ID NO: 816680 - protein, 230 aa, Homo sapiens; identical to SEQ ID NO: 816679

SEQ ID NO: 816681 - protein, 200 aa, Homo sapiens; identical to SEQ ID NO: 816675

SEQ ID NO: 816682 - protein, 200 aa, Homo sapiens; identical to SEQ ID NO: 816675

SEQ ID NO: 816683 - protein, 210 aa, Homo sapiens
MLNKILKVFKMAASMHGQPSPSLEDAKLRRPMVIEIIEKNFDYLRKEMTQNIYQMATFGTTAGFSGIFSNFLFRRCFKVKHDALKTYASLATLPFLSTVVTDKLFVIDALYSDNISKENCVFRSSLIGIVCGVFYPSSLAFTKNGRLATKYHTVPLPPKGRVLIHWMTLCQTQMKLMAIPLVFQIMFGILNGLYHYAVFEETLEKTIHEE

SEQ ID NO: 816684 - protein, 200 aa, Homo sapiens; identical to SEQ ID NO: 816675

SEQ ID NO: 816685 - protein, 200 aa, Homo sapiens; identical to SEQ ID NO: 816675

SEQ ID NO: 816686 - protein, 203 aa, Homo sapiens
VSTQSGYYGRGRPKWWCSGMRLGLSQGIQVWCRWELRKRPRTQNIYQMATFGTTAGFSGIFSNFLFRRCFKVKHDALKTYASLATLPFLSTVVTDKLFVIDALYSDNISKENCVFRSSLIGIVCGVFYPSSLAFTKNGRLATKYHTVPLPPKGRVLIHWMTLCQTQMKLMAIPLVFQIMFGILNGLYHYAVFEETLEKTIHEE

SEQ ID NO: 816687 - protein, 185 aa, Homo sapiens
FRGSPFGVLLALMKKFDYLRKEMTQNIYQMATFGTTAGFSGIFSNFLFRRCFKVKHDALKTYASLATLPFLSTVVTDKLFVIDALYSDNISKENCVFRSSLIGIVCGVFYPSSLAFTKNGRLATKYHTVPLPPKGRVLIHWMTLCQTQMKLMAIPLVFQIMFGILNGLYHYAVFEETLEKTIHEE

SEQ ID NO: 816688 - protein, 164 aa, Homo sapiens
MAASMHGQPSPSLEDAKLRRPMVIEIIEKNFDYLRKEMTQNIYQMATFGTTAGFSGIFSNFLFRRCYNISKENCVFRSSLIGIVCGVFYPSSLAFTKNGRLATKYHTVPLPPKGRVLIHWMTLCQTQMKLMAIPLVFQIMFGILNGLYHYAVFEETLEKTIHEE

SEQ ID NO: 816689 - protein, 202 aa, Homo sapiens
INAEWLLRPGETKMVVFGYEAGTKPRDSGVVPVGTEEAPKVFKMAASMHGQPSPSLEDAKLRRPMVIEIIEKNFDYLRKEMTQNIYQMATFGTTAGFSGIFSNFLFRRCFKVKHDALKTYASLATLPFLSTVVTDKLFVIDALYSDNISKENCVFRSSLIGIVCGVFYPSSLAFTKNGRLATKSSSFSFFFLFFSFLFFFFF

SEQ ID NO: 816690 - protein, 69 aa, Homo sapiens
INAEWLLRPGETKMVVFGYEAGTKPRDSGVVPVGTEEAPKDTKYISNGDIWNNSWFLWNILKLPVQTLL

SEQ ID NO: 816691 - protein, 110 aa, Homo sapiens
MAASMHGQPSPSLEDAKLRRPMVIEIIEKNFDYLRKEMTQNIYQMATFGTTAGFSGIFSNFLFRRCFKVKHDALKTYASLATLPFLSTVVTDKLFVIDALYSGEFKFTNV

SEQ ID NO: 816692 - protein, 71 aa, Homo sapiens
INAEWLLRPGETKMVVFGYEAGTKPRDSGVVPVGTEEAPKDTKYISNGDIWNNSWFLWNILKLPVQTLLQG

SEQ ID NO: 816693 - protein, 120 aa, Homo sapiens
MLNKILKVFKMAASMHGQPSPSLEDAKLRRPMVIEIIEKNFDYLRKEMTQNIYQMATFGTTAGFSGIFSNFLFRRCFKVKHDALKTYASLATLPFLSTVVTDKLFVIDALYSGEFKFTNV

SEQ ID NO: 816694 - protein, 153 aa, Homo sapiens
INAEWLLRPGETKMVVFGYEAGTKPRDSGVVPVGTEEAPKVFKMAASMHGQPSPSLEDAKLRRPMVIEIIEKNFDYLRKEMTQNIYQMATFGTTAGFSGIFSNFLFRRCFKVKHDALKTYASLATLPFLSTVVTDKLFVIDALYSGEFKFTNV

SEQ ID NO: 816695 - protein, 147 aa, Homo sapiens
MALKRIQKELSDLQRDPPAHCSAGPVGDDLFHWQATIMGPPDSAYQGGVFFLTVHFPTDYPFKPPKIAFTTKIYHPNINSNGSICLDILRSQWSPALTVSKVLLSICSLLCDPNPDDPLVPDIAQIYKSDKEKYNRHAREWTQKYAM

SEQ ID NO: 816696 - protein, 147 aa, Homo sapiens; identical to SEQ ID NO: 816695

SEQ ID NO: 816697 - protein, 133 aa, Homo sapiens
MALKRIQKELSDLQRDPPAHCSAGPVGDDLFHWQATIMGPPDSAYQGGVFFLTVHFPTDYPFKPPKIAFTTKIYHPNINSNGSICLDILRSQWSPALTVSKVLLSICSLLCDPNPDDPLVPDIAQIYKSDKEK

SEQ ID NO: 816698 - protein, 519 aa, Homo sapiens
AALRGGGRSRRGSSKMAAQRRSLLQSEQQPSWTDDLPLCHLSGVGSASNRSYSADGKGTESHPPEDSWLKFRSENNCFLYGVFNGYDGNRVTNFVAQRLSAELLLGQLNAEHAEADVRRVLLQAFDVVERSFLESIDDALAEKASLQSQLPEGVPQHQLPPQYQKILERLKTLEREISGGAMAVVAVLLNNKLYVANVGTNRALLCKSTVDGLQVTQLNVDHTTENEDELFRLSQLGLDAGKIKQVGIICGQESTRRIGDYKVKYGYTDIDLLSAAKSKPIIAEPEIHGAQPLDGVTGFLVLMSEGLYKALEAAHGPGQANQEIAAMIDTEFAKQTSLDAVAQAVVDRVKRIHSDTFASGGERARFCPRHEDMTLLVRNFGYPLGEMSQPTPSPAPAAGGRVYPVSVPYSSAQSTSKTSVTLSLVMPSQGQMVNGAHSASTLDEATPTLTNQSPTLTLQSTNTHTQSSSSSSDGGLFRSRPAHSLPPGEDGRVEPYVDFAEFYRLWSVDHGEQSVVTAP

SEQ ID NO: 816699 - protein, 519 aa, Homo sapiens; identical to SEQ ID NO: 816698

SEQ ID NO: 816700 - protein, 504 aa, Homo sapiens
MGSQRRSLLQSEQQPSWTDDLPLCHLSGVGSASNRSYSADGKGTESHPPEDSWLKFRSENNCFLYGVFNGYDGNRVTNFVAQRLSAELLLGQLNAEHAEADVRRVLLQAFDVVERSFLESIDDALAEKASLQSQLPEGVPQHQLPPQYQKILERLKTLEREISGGAMAVVAVLLNNKLYVANVGTNRALLCKSTVDGLQVTQLNVDHTTENEDELFRLSQLGLDAGKIKQVGIICGQESTRRIGDYKVKYGYTDIDLLSAAKSKPIIAEPEIHGAQPLDGVTGFLVLMSEGLYKALEAAHGPGQANQEIAAMIDTEFAKQTSLDAVAQAVVDRVKRIHSDTFASGGERARFCPRHEDMTLLVRNFGYPLGEMSQPTPSPAPAAGGRVYPVSVPYSSAQSTSKTSVTLSLVMPSQGQMVNGAHSASTLDEATPTLTNQSPTLTLQSTNTHTQSSSSSSDGGLFRSRPAHSLPPGEDGRVEPYVDFAEFYRLWSVDHGEQSVVTAP

SEQ ID NO: 816701 - protein, 325 aa, Homo sapiens
MSATGTNRALLCKSTVDGLQVTQLNVDHTTENEDELFRLSQLGLDAGKIKQVGIICGQESTRRIGDYKVKYGYTDIDLLSAAKSKPIIAEPEIHGAQPLDGVTGFLVLMSEGLYKALEAAHGPGQANQEIAAMIDTEFAKQTSLDAVAQAVVDRVKRIHSDTFASGGERARFCPRHEDMTLLVRNFGYPLGEMSQPTPSPAPAAGGRVYPVSVPYSSAQSTSKTSVTLSLVMPSQGQMVNGAHSASTLDEATPTLTNQSPTLTLQSTNTHTQSSSSSSDGGLFRSRPAHSLPPGEDGRVEPYVDFAEFYRLWSVDHGEQSVVTAP

SEQ ID NO: 816702 - protein, 519 aa, Homo sapiens; identical to SEQ ID NO: 816698

SEQ ID NO: 816703 - protein, 425 aa, Homo sapiens
AALRGGGRSRRGSSKMAAQRRSLLQSEQQPSWTDDLPLCHLSGVGSASNRSYSADGKGTESHPPEDSWLKFRSENNCFLYGVFNGYDGNRVTNFVAQRLSAELLLGQLNAEHAEADVRRVLLQAFDVVERSFLESIDDALAEKASLQSQLPEGVPQHQLPPQYQKILERLKTLEREISGGAMAVVAVLLNNKLYVANVGTNRALLCKSTVDGLQVTQLNVDHTTENEDELFRLSQLGLDAGKIKQVGIICGQESTRRIGDYKVKYGYTDIDLLSAAKSKPIIAEPEIHGAQPLDGVTGFLVLMSEGLYKALEAAHGPGQANQEIAAMIDTEFAKQTSLDAVAQAVVDRVKRIHSDTFASGGERARFCPRHEDMTLLVRNFGYPWAALTGSSTVGSHSRNGRKTGLSPGSSLTPSLPTLKPSLFCR

SEQ ID NO: 816704 - protein, 120 aa, Homo sapiens
GESSEAGEKEAAAEEDRLRVPGTAGPGRVGAAPRSLPGSSYPLPQEIAAMIDTEFAKQTSLDAVAQAVVDRVKRIHSDTFTHPGWRDTALRDGLMVARTSSLLRGWAGAEDGNWLVSTEI

SEQ ID NO: 816705 - protein, 560 aa, Homo sapiens
AALRGGGRSRRGSSKMAAQRRSLLQSEQQPSWTDDLPLCHLSGVGSASNRSYSADGKGTESHPPEDSWLKFRSENNCFLYGVFNGYDGNRVTNFVAQRLSAELLLGQLNAEHAEADVRRVLLQAFDVVERSFLESIDDALAEKASLQSQLPEGVPQHQLPPQYQKILERLKTLEREISGGAMAVVAVLLNNKLYVANVGTNRALLCKSTVDGLQVTQLNVDHTTENEDELFRLSQLGLDAGKIKQVGIICGQESTRRIGDYKVKYGYTDIDLLSAAKSKPIIAEPEIHGAQPLDGVTGFLVLMSEGLYKALEAAHGPGQANQMESCSVGQAGVQWCQSRLTVTSTSRVQVILLPQPPEWLGLQEIAAMIDTEFAKQTSLDAVAQAVVDRVKRIHSDTFASGGERARFCPRHEDMTLLVRNFGYPLGEMSQPTPSPAPAAGGRVYPVSVPYSSAQSTSKTSVTLSLVMPSQGQMVNGAHSASTLDEATPTLTNQSPTLTLQSTNTHTQSSSSSSDGGLFRSRPAHSLPPGEDGRVEPYVDFAEFYRLWSVDHGEQSVVTAP

SEQ ID NO: 816706 - protein, 338 aa, Homo sapiens
MAVVAVLLNNKLYVANVGTNRALLCKSTVDGLQVTQLNVDHTTENEDELFRLSQLGLDAGKIKQVGIICGQESTRRIGDYKVKYGYTDIDLLSAAKSKPIIAEPEIHGAQPLDGVTGFLVLMSEGLYKALEAAHGPGQANQEIAAMIDTEFAKQTSLDAVAQAVVDRVKRIHSDTFASGGERARFCPRHEDMTLLVRNFGYPLGEMSQPTPSPAPAAGGRVYPVSVPYSSAQSTSKTSVTLSLVMPSQGQMVNGAHSASTLDEATPTLTNQSPTLTLQSTNTHTQSSSSSSDGGLFRSRPAHSLPPGEDGRVEPYVDFAEFYRLWSVDHGEQSVVTAP

SEQ ID NO: 816707 - protein, 519 aa, Homo sapiens; identical to SEQ ID NO: 816698

SEQ ID NO: 816708 - protein, 111 aa, Homo sapiens
  misc_feature (11)..(13): Xaa can be any naturally occurring amino acid
RHRPRHADGEXXXPEMDCYMSQTWKSMIELNKHLPLEKSGDLSFCNLTAMFAIETFGLIPSPSVYLVASFLFVLMLLFFTILVLSYFRYMRIYRRYIYEPLHKPQRKRKKN

SEQ ID NO: 816709 - protein, 190 aa, Homo sapiens
FQPVVQLFDDNGYVKDVEANFIVWEIHGRDDYSFNNTMAQSGCLHEAQTWKSMIELNKHLPLEEVWGPENYKHCFSYAIGKPGDLNQPYEIINSSNGNHIFWPMGHSGMYVFRVKILDPNYSFCNLTAMFAIETFGLIPSPSVYLVASFLFVLMLLFFTILVLSYFRYMRIYRRYIYEPLHKPQRKRKKN

SEQ ID NO: 816710 - protein, 111 aa, Homo sapiens; identical to SEQ ID NO: 816708
  misc_feature (11)..(13): Xaa can be any naturally occurring amino acid

SEQ ID NO: 816711 - protein, 94 aa, Homo sapiens
  misc_feature (11)..(13): Xaa can be any naturally occurring amino acid
RHRPRHADGEXXXPEMDCYMSQTWKSMIELNKHLPLEEVWGPESPSVYLVASFLFVLMLLFFTILVLSYFRYMRIYRRYIYEPLHKPQRKRKKN

SEQ ID NO: 816712 - protein, 69 aa, Homo sapiens
MNHFTNLKENCRQSRMEDHKQDEIPRALIKAAVHKELLMSPKSRIGQRYLLVIAVLKVLTSQEKNKINS

SEQ ID NO: 816713 - protein, 31 aa, Homo sapiens
MSPKSRIGQRYLLVIAVLKVLTSQEKNKINS

SEQ ID NO: 816714 - protein, 428 aa, Homo sapiens
MDPSVTLWQFLLQLLREQGNGHIISWTSRDGGEFKLVDAEEVARLWGLRKNKTNMNYDKLSRALRYYYDKNIIRKVSGQKFVYKFVSYPEVAGCSTEDCPPQPEVSVTSTMPNVAPAAIHAAPGDTVSGKPGTPKGAGMAGPGGLARSSRNEYMRSGLYSTFTIQSLQPQPPPHPRPAVVLPSAAPAGAAAPPSGSRSTSPSPLEACLEAEEAGLPLQVILTPPEAPNLKSEELNVEPGLGRALPPEVKVEGPKEELEVAGERGFVPETTKAEPEVPPQEGVPARLPAVVMDTAGQAGGHAASSPEISQPQKGRKPRDLELPLSPSLLGGPGPERTPGSGSGSGLQAPGPALTPSLLPTHTLTPVLLTPSSLPPSIHFWSTLSPIAPRSPAKLSFQFPSSGSAQVHIPSISVDGLSTPVVLSPGPQKP

SEQ ID NO: 816715 - protein, 428 aa, Homo sapiens; identical to SEQ ID NO: 816714

SEQ ID NO: 816716 - protein, 428 aa, Homo sapiens; identical to SEQ ID NO: 816714

SEQ ID NO: 816717 - protein, 428 aa, Homo sapiens; identical to SEQ ID NO: 816714

SEQ ID NO: 816718 - protein, 108 aa, Homo sapiens
TLGSSSSGPRPSCRETQGRLLGAAAATATTTSTAASEPRPGGRWGRVWSPRPPELPTLPTPPPRYTQPQLSGDPSVALFIPPFLYIVANQSVAPHSSASLFNSTPGMA

SEQ ID NO: 816719 - protein, 428 aa, Homo sapiens; identical to SEQ ID NO: 816714

SEQ ID NO: 816720 - protein, 388 aa, Homo sapiens
MDPSVTLWQFLLQLLREQGNGHIISWTSRDGGEFKLVDAEEVARLWGLRKNKTNMNYDKLSRALRYYYDKNIIRKVSGQKFVYKFVSYPEVAGCSTEDCPPQPEVSVTSTMPNVAPAAIHAAPGDTVSGKPGTPKGAGMAGPGGLARSSRNEYMRSGLYSTFTIQSLQPQPPPHPRPAVVLPSAAPAGAAAPPSGSRSTSPSPLEACLEAEEAGLPLQVILTPPEAPNLKSEELNVEPGLGRALPPEVKVEGPKEELEVAGERGFVPETTKAEPEVPPQEGVPARLPAVVMDTAGQAGGHAASSPEISQPQKGRKPRDLELPLSPSLLDKTIEVWLENDLSFFISQPALGEMREPCLRFWMFPPSQPPNFLKSPREWGIVPVNIYFSK

SEQ ID NO: 816721 - protein, 603 aa, Homo sapiens
SGPQSAYNGAAVSRTFCRRRRRRRPSSFFSRQIFVVWEGSRDGLELADPLLEQPRSEKAPQPRGGAAAAAPEAPPPAASVGPRPARPVAPRLPAESPRGSRCVWGQPTAGTMVKFPALTHYWPLIRFLVPLGITNIAIDFGEQALNRGIAAVKEDAVEMLASYGLAYSLMKFFTGPMSDFKNVGLVFVNSKRDRTKAVLCMVVAGAIAAVFHTLIAYSDLGYYIINKLHHVDESVGSKTRRAFLYLAAFPFMDAMAWTHAGILLKHKYSFLVGCASISDVIAQVVFVAILLHSHLECREPLLIPILSLYMGALVRCTTLCLGYYKNIHDIIPDRSGPELGGDATIRKMLSFWWPLALILATQRISRPIVNLFVSRDLGGSSAATEAVAILTATYPVGHMPYGWLTEIRAVYPAFDKNNPSNKLVSTSNTVTAAHIKKFTFVCMALSLTLCFVMFWTPNVSEKILIDIIGVDFAFAELCVVPLRIFSFFPVPVTVRAHLTGWLMTLKKTFVLAPSSVLRIIVLIASLVVLPYLGVHGATLGVGSLLAGFVGESTMVAIAACYVYRKQKKKMENESATEGEDSAMTDMPPTEEVTDIVEMREENE

SEQ ID NO: 816722 - protein, 603 aa, Homo sapiens; identical to SEQ ID NO: 816721

SEQ ID NO: 816723 - protein, 190 aa, Homo sapiens
RVGAQSQMSIAQVVFVAILLHSHLECREPLLIPILSLYMGALVRCTTLCLGYYKNIHDIIPDRSGPELGGDATIRKMLSFWWPLALILATQRISRPIVNLFVSRDLGGSSAATEAVAILTATYPVGHMPYGWLTEIRAVYPAFDKNNPSNKLVSTSNTVTAAHIKKFTFVCMALSLTALSPCGIPGPSVC

SEQ ID NO: 816724 - protein, 146 aa, Homo sapiens
RTWSLRSGSSQRPGEGGKGCGIHVLWEGGGPAPSSWFPSHIRLLAAALTKPADGERRWSQPSRGYTYFPGFWHRRLCLDLALTDKLPLCSHLQGARCDPGRGLPPGGLCGRIHHGRHRCVLCLPEAGETAAPGASSRVHPPGCRRT

SEQ ID NO: 816725 - protein, 603 aa, Homo sapiens; identical to SEQ ID NO: 816721

SEQ ID NO: 816726 - protein, 507 aa, Homo sapiens
MTLRIGDCFSVWPELEPKATKAQHLAYCCISPQPLGITNIAIDFGEQALNRGIAAVKEDAVEMLASYGLAYSLMKFFTGPMSDFKNVGLVFVNSKRDRTKAVLCMVVAGAIAAVFHTLIAYSDLGYYIINKLHHVDESVGSKTRRAFLYLAAFPFMDAMAWTHAGILLKHKYSFLVGCASISDVIAQVVFVAILLHSHLECREPLLIPILSLYMGALVRCTTLCLGYYKNIHDIIPDRSGPELGGDATIRKMLSFWWPLALILATQRISRPIVNLFVSRDLGGSSAATEAVAILTATYPVGHMPYGWLTEIRAVYPAFDKNNPSNKLVSTSNTVTAAHIKKFTFVCMALSLTLCFVMFWTPNVSEKILIDIIGVDFAFAELCVVPLRIFSFFPVPVTVRAHLTGWLMTLKKTFVLAPSSVLRIIVLIASLVVLPYLGVHGATLGVGSLLAGFVGESTMVAIAACYVYRKQKKKMENESATEGEDSAMTDMPPTEEVTDIVEMREENE

SEQ ID NO: 816727 - protein, 445 aa, Homo sapiens
MLASYGLAYSLMKFFTGPMSDFKNVGLVFVNSKRDRTKAVLCMVVAGAIAAVFHTLIAYSDLGYYIINKLHHVDESVGSKTRRAFLYLAAFPFMDAMAWTHAGILLKHKYSFLVGCASISDVIAQVVFVAILLHSHLECREPLLIPILSLYMGALVRCTTLCLGYYKNIHDIIPDRSGPELGGDATIRKMLSFWWPLALILATQRISRPIVNLFVSRDLGGSSAATEAVAILTATYPVGHMPYGWLTEIRAVYPAFDKNNPSNKLVSTSNTVTAAHIKKFTFVCMALSLTLCFVMFWTPNVSEKILIDIIGVDFAFAELCVVPLRIFSFFPVPVTVRAHLTGWLMTLKKTFVLAPSSVLRIIVLIASLVVLPYLGVHGATLGVGSLLAGFVGESTMVAIAACYVYRKQKKKMENESATEGEDSAMTDMPPTEEVTDIVEMREENE

SEQ ID NO: 816728 - protein, 332 aa, Homo sapiens
RVGAQSQMSIAQVVFVAILLHSHLECREPLLIPILSLYMGALVRCTTLCLGYYKNIHDIIPDRSGPELGGDATIRKMLSFWWPLALILATQRISRPIVNLFVSRDLGGSSAATEAVAILTATYPVGHMPYGWLTEIRAVYPAFDKNNPSNKLVSTSNTVTAAHIKKFTFVCMALSLTLCFVMFWTPNVSEKILIDIIGVDFAFAELCVVPLRIFSFFPVPVTVRAHLTGWLMTLKKTFVLAPSSVLRIIVLIASLVVLPYLGVHGATLGVGSLLAGFVGESTMVAIAACYVYRKQKKKMENESATEGEDSAMTDMPPTEEVTDIVEMREENE

SEQ ID NO: 816729 - protein, 603 aa, Homo sapiens; identical to SEQ ID NO: 816721

SEQ ID NO: 816730 - protein, 582 aa, Homo sapiens
SGPQSAYNGAAVSRTFCRRRRRRRPSSFFSRQIFVVWEGSRDGLELADPLLEQPRSEKAPQPRGGAAAAAPEAPPPAASVGPRPARPVAPRLPAESPRGSRCVWGQPTAGTMVKFPALTHYWPLIRFLVPLGITNIAIDFGEQALNRGIAAVKEDAVEMLASYGLAYSLMKFFTGPMSDFKNVGLVFVNSKRDRTKAVLCMVVAGAIAAVFHTLIAYSDLGYYIINKLHHVDESVGSKTRRAFLYLAAFPFMDAMAWTHAGILLKHKYSFLVGCASISDVIAQVVFVAILLHSHLECREPLLIPILSLYMGALVRCTTLCLGYYKNIHDIIPDRSGPELGGDATIRKMLSFWWPLALILATQRISRPIVNLFVSRDLGGSSAATEAVAILTATYPVGHMPYGWLTEIRAVYPAFDKNNPSNKLVSTSNTVTAAHIKKFTFVCMALSLTLCFVMFWTPNVSEKILIDIIGVDFAFAELCVVPLRIFSFFPVPVTVRAHLTGWLMTLKKTFVLAPSSVLRIIVLIASLVVLPYLGVHGATLGVGSLLAGFVGESTMVAIAACYVYRKQKKMMDNDLSTGGENFA

SEQ ID NO: 816731 - protein, 222 aa, Homo sapiens
SGPQSAYNGAAVSRTFCRRRRRRRPSSFFSRQIFVVWEGSRDGLELADPLLEQPRSEKAPQPRGGAAAAAPEAPPPAASVGPRPARPVAPRLPAESPRGSRCVWGQPTAGTMVKFPALTHYWPLIRFLVPLGITNIAIDFGEQALNRGIAAVKEDAVEMLASYGLAYSLMKFFTGPMSDFKNVGLVFVNSKRDRTKAVLCMVVAGAIAAVFHTLIGEAADRH

SEQ ID NO: 816732 - protein, 461 aa, Homo sapiens
SGPQSAYNGAAVSRTFCRRRRRRRPSSFFSRQIFVVWEGSRDGLELADPLLEQPRSEKAPQPRGGAAAAAPEAPPPAASVGPRPARPVAPRLPAESPRGSRCVWGQPTAGTMVKFPALTHYWPLIRFLVPLGITNIAIDFGEQALNRGIAAVKEDAVEMLASYGLAYSLMKFFTGPMSDFKNVGLVFVNSKRDRTKAVLCMVVAGAIAAVFHTLIAYSDLGYYIINKLHHVDESVGSKTRRAFLYLAAFPFMDAMAWTHAGILLKHKYSFLVGCASISDVIAQVVFVAILLHSHLECREPLLIPILSLYMGALVRCTTLCLGYYKNIHDIIPDRSGPELGGDATIRKMLSFWWPLALILATQRISRPIVNLFVSRDLGGSSAATEAVAILTATYPVGHMPYGWLTEIRAVYPAFDKNNPSNKLVSTSNTVTAAHIKKFTFVCMALSLTALSPCGIPGPSVC

SEQ ID NO: 816733 - protein, 480 aa, Homo sapiens
SGPQSAYNGAAVSRTFCRRRRRRRPSSFFSRQIFVVWEGSRDGLELADPLLEQPRSEKAPQPRGGAAAAAPEAPPPAASVGPRPARPVAPRLPAESPRGSRCVWGQPTAGTMVKFPALTHYWPLIRFLVPLGITNIAIDFGEQALNRGIAAVKEDAVEMLASYGLAYSLMKFFTGPMSDFKNVGLVFVNSKRDRTKAVLCMVVAGAIAAVFHTLIAYSDLGYYIINKLHHVDESVGSKTRRAFLYLAAFPFMDAMAWTHAGILLKHKYSFLVGCASISDVIAQVVFVAILLHSHLECREPLLIPILSLYMGALVRCTTLCLGYYKNIHDIIPDRSGPELGGDATIRKMLSFWWPLALILATQRISRPIVNLFVSRDLGGSSAATEAVAILTATYPVGHMPYGWLTEIRAVYPAFDKNNPSNKLVSTSNTVTAAHIKKFTFVCMALSLTVRTEALSASSLCLVFVKGQVAILKGEILFSTM

SEQ ID NO: 816734 - protein, 271 aa, Homo sapiens
SGPQSAYNGAAVSRTFCRRRRRRRPSSFFSRQIFVVWEGSRDGLELADPLLEQPRSEKAPQPRGGAAAAAPEAPPPAASVGPRPARPVAPRLPAESPRGSRCVWGQPTAGTMVKFPALTHYWPLIRFLVPLGITNIAIDFGEQALNRGIAAVKEDAVEMLASYGLAYSLMKFFTGPMSDFKNVGLVFVNSKRDRTKAVLCMVVAGAIAAVFHTLIAYSDLGYYIINKLHHVDESVGSKTRRAFLYLAAFPFMDAMVSREDRWLSFFFFNWW

SEQ ID NO: 816735 - protein, 293 aa, Homo sapiens
LPGATGRLHTRCARRRPHARPMSSAPRSPTPRPRRMKKDESFLGKLGGTLARKRRAREVSDLQEEGKNAINSPMSPALADVHPEDTQLEENEERTMIDPTSKEDPKFKELVKVLLDWINDVLVEERIIVKQLEEDLYDGQVLQKLLEKLAGCKLNVAEVTQSEIGQKQKLQTVLEAVHDLLRPRGWALRWSVDSIHGKNLVAILHLLVSLAMHFRAPIRLPEHVTVQVVVVRKREGLLHSSHISEELTTTTEMMMGRWWSAFSSPQIQMLISFGNTLTDTPRNHALHPSIQSS

SEQ ID NO: 816736 - protein, 385 aa, Homo sapiens
LPGATGRLHTRCARRRPHARPMSSAPRSPTPRPRRMKKDESFLGKLGGTLARKRRAREVSDLQEEGKNAINSPMSPALADVHPEDTQLEENEERTMIDPTSKEDPKFKELVKVLLDWINDVLVEERIIVKQLEEDLYDGQVLQKLLEKLAGCKLNVAEVTQSEIGQKQKLQTVLEAVHDLLRPRGWALRWSVDSIHGKNLVAILHLLVSLAMHFRAPIRLPEHVTVQVVVVRKREGLLHSSHISEELTTTTEMMMGRFERDAFDTLFDHAPDKLSVVKKSLITFVNKHLNKLNLEVTELETQFADGVYLVLLMGLLEDYFVPLHHFYLTPESFDQKVHNVSFAFELMLDGGLKKPKARPEDVVNLDLKSTLRVLYNLFTKYKNVE

SEQ ID NO: 816737 - protein, 270 aa, Homo sapiens
MPRLKCSGAVIAHCSLELLASSDPSASASQGARTTVSDLQEEGKNAINSPMSPALADVHPEDTQLEENEERTMIDPTSKEDPKFKELVKVLLDWINDVLVEERIIVKQLEEDLYDGQVLQKLLEKLAGCKLNVAEVTQSEIGQKQKLQTVLEAVHDLLRPRGWALRWSVDSIHGKNLVAILHLLVSLAMHFRAPIRLPEHVTVQVVVVRKREGLLHSSHISEELTTTTEMMMGRWWSAFSSPQIQMLISFGNTLTDTPRNHALHPSIQSS

SEQ ID NO: 816738 - protein, 185 aa, Homo sapiens
LPGATGRLHTRCARRRPHARPMSSAPRSPTPRPRRMKKDESFLGKLGGTLARKRRAREVSDLQEEGKNAINSPMSPALADVHPEDTQLEENEERTMIDPTSKEDPKFKELVKVRSSVLVGIFLLGRGLGFGVQGSHGQRELNPGLLKGMLVLHEKVGRHVGRGGRQRGSSPKCQAPPMCPARLGL

SEQ ID NO: 816739 - protein, 397 aa, Homo sapiens
MHHVFKDHQRGEKRGFLSPENKNCRRLELRRGCSCSWGLCSQALMASLAGSLLPGSDRSGVETSEYAQGGVSDLQEEGKNAINSPMSPALADVHPEDTQLEENEERTMIDPTSKEDPKFKELVKVLLDWINDVLVEERIIVKQLEEDLYDGQVLQKLLEKLAGCKLNVAEVTQSEIGQKQKLQTVLEAVHDLLRPRGWALRWSVDSIHGKNLVAILHLLVSLAMHFRAPIRLPEHVTVQVVVVRKREGLLHSSHISEELTTTTEMMMGRFERDAFDTLFDHAPDKLSVVKKSLITFVNKHLNKLNLEVTELETQFADGVYLVLLMGLLEDYFVPLHHFYLTPESFDQKVHNVSFAFELMLDGGLKKPKARPEDVVNLDLKSTLRVLYNLFTKYKNVE

SEQ ID NO: 816740 - protein, 477 aa, Homo sapiens
LPGATGRLHTRCARRRPHARPMSSAPRSPTPRPRRMKKDESFLGKLGGTLARKRRAREVSDLQEEGKNAINSPMSPALADVHPEDTQLEENEERTMIDPTSKEDPKFKELVKVLLDWINDVLVEERIIVKQLEEDLYDGQVLQKLLEKLAGCKLNVAEVTQSEIGQKQKLQTVLEAVHDLLRPRGWALRWSVDSIHGKNLVAILHLLVSLAMHFRAPIRLPEHVTVQVVVVRKREGLLHSSHISEELTTTTEMMMGRFERDAFDTLFDHAPDKLSVVKKSLITFVNKHLNKLNLEVTELETQFADGVYLVLLMGLLEDYFVPLHHFYLTPESFDQKVHNVSFAFELMLDGGLKKPKARPEGLKHRVIPWLLLDHRESGLQGPRAVTWSRPILQMKALSPKSRKSLRGHRASEMNKVSDSQEGSCPHKESGPRLPGPQRELSGPLSVTGVFGPDVVNLDLKSTLRVLYNLFTKYKNVE

SEQ ID NO: 816741 - protein, 385 aa, Homo sapiens; identical to SEQ ID NO: 816736

SEQ ID NO: 816742 - protein, 370 aa, Homo sapiens
LPGATGRLHTRCARRRPHARPMSSAPRSPTPRPRRMKKDESFLGKLGGTLARKRRAREVSDLQEEGKNAINSPMSPALADVHPEDTQLEENEERTMIDPTSKEDPKFKELVKVLLDWINDVLVEERIIVKQLEEDLYDGQVLQKLLEKLAGCKLNVAEVTQSEIGQKQKLQTVLEAVHDLLRPRGWALRWSVDSIHGKNLVAILHLLVSLAMHFRAPIRLPEHVTVQVVVVRKREGLLHSSHISEELTTTTEMMMGRFERDAFDTLFDHAPDKLSVVKKSLITFVNKHLNKLNLEVTELETQFADGVYLVLLMGLLEDYFVPLHHFYLTPESFDQKFADGVYLVLLMGLLEDYFVPLHHFYLSPESFDQK

SEQ ID NO: 816743 - protein, 109 aa, Homo sapiens
MAAFGSQGVRTPRASSVTWSRPILQMKALSPKSRKSLRGHRASEMNKVSDSQEGSCPHKESGPRLPGPQRELSGPLSVTGVFGPDVVNLDLKSTLRVLYNLFTKYKNVE

SEQ ID NO: 816744 - protein, 257 aa, Homo sapiens
LPGATGRLHTRCARRRPHARPMSSAPRSPTPRPRRMKKDESFLGKLGGTLARKRRAREVSDLQEEGKNAINSPMSPALADVHPEDTQLEENEERTMIDPTSKEDPKFKELVKVLLDWINDVLVEERIIVKQLEEDLYDGQVLQKLLEKLAGCKLNVAEVTQSEIGQKQKLQTVLEAVHDLLRPRGWALRWSVDSIHGKNLVAILHLLVSLAMHFRAPIRLPEHVTVQVVVVRKREGLLHSSHISEELTTTTEMMMGR

SEQ ID NO: 816745 - protein, 117 aa, Homo sapiens
MHHVFKDHQRGEKRGFLSPENKNCRRLELRRGCSCSWGLCSQALMASLAGSLLPGSDRSGVETSEYAQGGGKFWGKNCQKVDEGWVQWLMPVTLALWEAEEGGLLLEPRNLRLLCTT

SEQ ID NO: 816746 - protein, 141 aa, Homo sapiens
MGELAAPVNCFPPCKLAVGGMHRGVSQRRCESELQTQNLFPLHPSALHNGSLPALPQLCAPVHYQYTQELDRQTERKTQSASCRGLMGDSSLCLGMSVTGRREKNMAPSKASASGHSGQFPLYVEGNWPVRWQGWPWWAQC

SEQ ID NO: 816747 - protein, 1011 aa, Homo sapiens
MAQSNMFTVADVLSQDELRKKLYQTFKDRGILDTLKTQLRNQLIHELMHPVLSGELQPRSISVEGSSLLIGASNSLVADHLQRCGYEYSLSVFFPESGLAKEKVFTMQDLLQLIKINPTSSLYKSLVSGSDKENQKGFLMHFLKELAEYHQAKESCNMETQTSSTFNRDSLAEKLQLIDDQFADAYPQRIKFESLEIKLNEYKREIEEQLRAEMCQKLKFFKDTEIAKIKMEAKKKYEKELTMFQNDFEKACQAKSEALVLREKSTLERIHKHQEIETKEIYAQRQLLLKDMDLLRGREAELKQRVEAFELNQKLQEEKHKSITEALRRQEQNIKSFEETYDRKLKNELLKYQLELKDDYIIRTNRLIEDERKNKEKAVHLQEELIAINSKKEELNQSVNRVKELELELESVKAQSLAITKQNHMLNEKVKEMSDYSLLKEEKLELLAQNKLLKQQLEESRNENLRLLNRLAQPAPELAVFQKELRKAEKAIVVEHEEFESCRQALHKQLQDEIEHSAQLKAQILGYKASVKSLTTQVADLKLQLKQTQTALENEVYCNPKQSVIDRSVNGLINGNVVPCNGEISGDFLNNPFKQENVLARMVASRITNYPTAWVEGSSPDSDLEFVANTKARVKELQQEAERLEKAFRSYHRRVIKNSAKSPLAAKSPPSLHLLEAFKNITSSSPERHIFGEDRVVSEQPQVGTLEERNDVVEALTGSAASRLRGGTSSRRLSSTPLPKAKRSLESEMYLEGLGRSHIASPSPCPDRMPLPSPTESRHSLSIPPVSSPPEQKVGLYRRQTELQDKSEFSDVDKLAFKDNEEFESSFESAGNMPRQLEMGGLSPAGDMSHVDAAAAAVPLSYQHPSVDQKQIEEQKEEEKIREQQVKERRQREERRQSNLQEVLERERRELEKLYQERKMIEESLKIKIKKELEMENELEMSNQEIKDKSAHSENPLEKYMKIIQQEQDQESADKSSKKMVQEGSLVDTLQSSDKVESLTGFSHEELDDSW

SEQ ID NO: 816748 - protein, 366 aa, Homo sapiens
MAQSNMFTVADVLSQDELRKKLYQTFKDRGILDTLKTQLRNQLIHELMHPVLSGELQPRSISVEGSSLLIGASNSLVADHLQRCGYEYSLSVFFPESGLAKEKVFTMQDLLQLIKINPTSSLYKSLVSGSDKENQKGFLMHFLKELAEYHQAKESCNMETQTSSTFNRDSLAEKLQLIDDQFADAYPQRIKFESLEIKLNEYKREIEEQLRAEMCQKLKFFKDTEIAKIKMEAKKKYEKELTMFQNDFEKACQAKSEALVLREKSTLERIHKHQEIETKEIYAQRQLLLKDMDLLRGREAELKQRVEAFELNQKLQEEKHKSITEALRRQEQNIKSFEETYDRKLKNELLNFHRLHGVCLALGILI

SEQ ID NO: 816749 - protein, 156 aa, Homo sapiens
LSLATPRSTAKLLSVLAPVFTELAPKGFCLPQERRQREERRQSNLQEVLERERRELEKLYQERKMIEESLKIKIKKELEMENELEMSNQEIKDKSAHSENPLEKYMKIIQQEQDQESADKSSKKMVQEGSLVDTLQSSDKVESLTGFSHEELDDSW

SEQ ID NO: 816750 - protein, 203 aa, Homo sapiens
NQKSNNCHYAIKAWELMERRFGGACIAQLGKGIGCKAFKLVPQGFPVTPCNAGSEWYPLTIGEWGTGPPFEKIREQQVKERRQREERRQSNLQEVLERERRELEKLYQERKMIEESLKIKIKKELEMENELEMSNQEIKDKSAHSENPLEKYMKIIQQEQDQESADKSSKKMVQEGSLVDTLQSSDKVESLTGFSHEELDDSW

SEQ ID NO: 816751 - protein, 366 aa, Homo sapiens; identical to SEQ ID NO: 816748

SEQ ID NO: 816752 - protein, 366 aa, Homo sapiens; identical to SEQ ID NO: 816748

SEQ ID NO: 816753 - protein, 587 aa, Homo sapiens
MLNEKVKEMSDYSLLKEEKLELLAQNKLLKQQLEESRNENLRLLNRLAQPAPELAVFQKELRKAEKAIVVEHEEFESCRQALHKQLQDEIEHSAQLKAQILGYKASVKSLTTQVADLKLQLKQTQTALENEVYCNPKQSVIDRSVNGLINGNVVPCNGEISGDFLNNPFKQENVLARMVASRITNYPTAWVEGSSPDSDLEFVANTKARVKELQQEAERLEKAFRSYHRRVIKNSAKSPLAAKSPPSLHLLEAFKNITSSSPERHIFGEDRVVSEQPQVGTLEERNDVVEALTGSAASRLRGGTSSRRLSSTPLPKAKRSLESEMYLEGLGRSHIASPSPCPDRMPLPSPTESRHSLSIPPVSSPPEQKVGLYRRQTELQDKSEFSDVDKLAFKDNEEFESSFESAGNMPRQLEMGGLSPAGDMSHVDAAAAAVPLSYQHPSVDQKQIEEQKEEEKIREQQVKERRQREERRQSNLQEVLERERRELEKLYQERKMIEESLKIKIKKELEMENELEMSNQEIKDKSAHSENPLEKYMKIIQQEQDQESADKSSKKMVQEGSLVDTLQSSDKVESLTGFSHEELDDSW

SEQ ID NO: 816754 - protein, 587 aa, Homo sapiens; identical to SEQ ID NO: 816753

SEQ ID NO: 816755 - protein, 366 aa, Homo sapiens; identical to SEQ ID NO: 816748

SEQ ID NO: 816756 - protein, 366 aa, Homo sapiens; identical to SEQ ID NO: 816748

SEQ ID NO: 816757 - protein, 366 aa, Homo sapiens; identical to SEQ ID NO: 816748

SEQ ID NO: 816758 - protein, 366 aa, Homo sapiens; identical to SEQ ID NO: 816748

SEQ ID NO: 816759 - protein, 366 aa, Homo sapiens; identical to SEQ ID NO: 816748

SEQ ID NO: 816760 - protein, 587 aa, Homo sapiens; identical to SEQ ID NO: 816753

SEQ ID NO: 816761 - protein, 587 aa, Homo sapiens; identical to SEQ ID NO: 816753

SEQ ID NO: 816762 - protein, 348 aa, Homo sapiens
LEDPQKPSLHLLEAFKNITSSSPERHIFGEDRVVSEQPQVGTLEERNDVVEALTGSAASRLRGGTSSRRLSSTPLPKAKRSLESEMYLEGLGRSHIASPSPCPDRMPLPSPTESRHSLSIPPVSSPPEQKVGLYRRQTELQDKSEFSDVDKLAFKDNEEFESSFESAGNMPRQLEMGGLSPAGDMSHVDAAAAAVPLSYQHPSVDQKQIEEQKEEEKIREQQVKERRQREERRQSNLQEVLERERRELEKLYQERKMIEESLKIKIKKELEMENELEMSNQEIKDKSAHSENPLEKYMKIIQQEQDQESADKSSKKMVQEGSLVDTLQSSDKVESLTGFSHEELDDSW

SEQ ID NO: 816763 - protein, 179 aa, Homo sapiens [sequence omitted]

SEQ ID NO: 816764 - protein, 293 aa, Homo sapiens
MAQNLRDAGPVPCSSKGLDHPLLQGCVSLDKLLPFSGPLFPASTGCAVLEELMLRLNFVVLASAPPYLSSPPEQKVGLYRRQTELQDKSEFSDVDKLAFKDNEEFESSFESAGNMPRQLEMGGLSPAGDMSHVDAAAAAVPLSYQHPSVDQKQIEEQKEEEKIREQQVKERRQREERRQSNLQEVLERERRELEKLYQERKMIEESLKIKIKKELEMENELEMSNQEIKDKSAHSENPLEKYMKIIQQEQDQESADKSSKKMVQEGSLVDTLQSSDKVESLTGFSHEELDDSW

SEQ ID NO: 816765 - protein, 366 aa, Homo sapiens; identical to SEQ ID NO: 816748

SEQ ID NO: 816766 - protein, 203 aa, Homo sapiens; identical to SEQ ID NO: 816750

SEQ ID NO: 816767 - protein, 284 aa, Homo sapiens
MAQSNMFTVADVLSQDELRKKLYQTFKDRGILDTLKTQLRNQLIHELMHPVLSGELQPRSISVEGSSLLIGASNSLVADHLQRCGYEYSLSVFFPESGLAKEKVFTMQDLLQLIKINPTSSLYKSLVSGSDKENQKGFLMHFLKELAEYHQAKESCNMETQTSSTFNRDSLAEKLQLIDDQFADAYPQRIKFESLEIKLNEYKREIEEQLRAEMCQKLKFFKDTEIAKIKMEAKQNLKLSFFGKRVPLKEFTSTKRWYLQIFYGWLFPAAISRLARDPATGWYS

SEQ ID NO: 816768 - protein, 155 aa, Homo sapiens
MAQSNMFTVADVLSQDELRKKLYQTFKDRGILDTLKTQLRNQLIHELMHPVLSGELQPRSISVEGSSLLIGASNSLVADHLQRCGYEYSLSVFFPESGLAKEKVFTMQDLLQLIKINPTSSLYKSLVSGSDKENQKGRSRHLCREQQQFSMYFFL

SEQ ID NO: 816769 - protein, 142 aa, Homo sapiens
MAQSNMFTVADVLSQDELRKKLYQTFKDRGILDTLKTQLRNQLIHELMHPVLSGELQPRSISVEGSSLLIGASNSLVADHLQRCGYEYSLSVFFPESGLAKEKVFTMQDLLQLIKINPTSSLYKSLVRWLSFCNLLWFVNYN

SEQ ID NO: 816770 - protein, 219 aa, Homo sapiens
PLPPCLSLSPSPSSSRLAAAPWRSPSLSGRLTERCELWETATPPPARDLPLGPAPCPTLPSARGSAKAPRTHRRLKSGDAHALAAPPNSLPPHPAPPPPPPPPPPPPPPPPPPPAAAAAGPTLPPTPPSVGSGCGSSLDYYFIYFGSCTSLSACSPRLLGPRAPPPLAPEPQTPATLDSTTPDPCQLPRVSAAGILLAAVFLEGSGFPTFLFPAQERIS

SEQ ID NO: 816771 - protein, 219 aa, Homo sapiens; identical to SEQ ID NO: 816770

SEQ ID NO: 816772 - protein, 354 aa, Homo sapiens
MGCTLSAEERAALERSKAIEKNLKEDGISAAKDVKLLLLGAGESGKSTIVKQMKIIHEDGFSGEDVKQYKPVVYSNTIQSLAAIVRAMDTLGIEYGDKERKADAKMVCDVVSRMEDTEPFSAELLSAMMRLWGDSGIQECFNRSREYQLNDSAKYYLDSLDRIGAADYQPTEQDILRTRVKTTGIVETHFTFKNLHFRLFDVGGQRSERKKWIHCFEDVTAIIFCVALSGYDQVLHEDETTNRMHESLMLFDSICNNKFFIDTSIILFLNKKDLFGEKIKKSPLTICFPEYTGPNTYEDAAAYIQAQFESKNRSPNKEIYCHMTCATDTNNIQVVFDAVTDIIIANNLRGCGLY

SEQ ID NO: 816773 - protein, 354 aa, Homo sapiens; identical to SEQ ID NO: 816772

SEQ ID NO: 816774 - protein, 271 aa, Homo sapiens
MGCTLSAEERAALERSKAIEKNLKEDGISAAKDVKLLLLGAGESGKSTIVKQMKIIHEDGFSGEDVKQYKPVVYSNTIQSLAAIVRAMDTLGIEYGDKERKADAKMVCDVVSRMEDTEPFSAELLSAMMRLWGDSGIQECFNRSREYQLNDSAKYYLDSLDRIGAADYQPTEQDILRTRVKTTGIVETHFTFKNLHFRLFDVGGQRSERKKWIHCFEDVTAIIFCVALSGYDQVLHEDETTAPIPMKTQPPTSKHNLKAKTAHPTKKYIVT

SEQ ID NO: 816775 - protein, 354 aa, Homo sapiens; identical to SEQ ID NO: 816772

SEQ ID NO: 816776 - protein, 354 aa, Homo sapiens; identical to SEQ ID NO: 816772

SEQ ID NO: 816777 - protein, 250 aa, Homo sapiens
MGCTLSAEERAALERSKAIEKNLKEDGISAAKDVKLLLLGAGESGKSTIVKQMKIIHEDGFSGEDVKQYKPVVYSNTIQSLAAIVRAMDTLGIEYGDKERKADAKMVCDVVSRMEDTEPFSAELLSAMMRLWGDSGIQECFNRSREYQLNDSAKYYLDSLDRIGAADYQPTEQDILRTRVKTTGIVETHFTFKNLHFRLFDVGGQRSERKKWIHCFEDVTAIIFCVALSGYDQVLHEDETTDTTCTGTNP

SEQ ID NO: 816778 - protein, 104 aa, Homo sapiens
MGCTLSAEERAALERSKAIEKNLKEDGISAAKDVKLLLLGAGESGKSTIVKQMKIIHEDGFSGEDVKQYKPVVYSNTIQSLAAIVRAMDTLGIEYGDKERKVGP

SEQ ID NO: 816779 - protein, 90 aa, Homo sapiens
FFLLLKPLLLVLFVLHLFLLLPWIHPEIDNPEYSPDPSIYAYDNFGVLGLDLWQVKSGTIFDNFLITNDEAYAEEFGNETWGVTKQQRNK

SEQ ID NO: 816780 - protein, 116 aa, Homo sapiens
MIAQIISVRTVTNQRRSRFNPGPPVIQNPEYKGEWKPRQIDNPDYKGTWIHPEIDNPEYSPDPSIYAYDNFGVLGLDLWQVKSGTIFDNFLITNDEAYAEEFGNETWGVTKQQRNK

SEQ ID NO: 816781 - protein, 206 aa, Homo sapiens
MLQNRKTGMSGPRSMIPQTPSLRTGTSPSISLYPDAKKPEDWDEEMDGEWEPPVIQNPEYKGEWKPRQIDNPDYKGTWIHPEIDNPEYSPDPSIYAYDNFGVLGLDLWQVKSGTIFDNFLITNDEAYAEEFGNETWGVTKAAEKQMKDKQDEEQRLKEEEEDKKRKEEEEAEDKEDDEDKDEDEEDEEDKEEDEEEDVPGQAKDEL

SEQ ID NO: 816782 - protein, 206 aa, Homo sapiens; identical to SEQ ID NO: 816781

SEQ ID NO: 816783 - protein, 206 aa, Homo sapiens; identical to SEQ ID NO: 816781

SEQ ID NO: 816784 - protein, 247 aa, Homo sapiens
MYPFLIREDYLRILWLAVAEPAVYFKEQFLDGDGWTSRWIESKHKSDFGKFVLSSGKFYGDEEKDKGLQTSQDARFYALSASFEPFSNKGQTLVVQFTVKHEQNIDCGGGYVKLFPNSLDQTDMHGDSEYNIMFGPDICGPGTKKVHVIFNYKGKNVLINKDIRCKDDEFTHLYTLIVRPDNTYEVKIDNSQVESGSLEDDWDFLPPKKIKDPDASKPEDWDERAKIDDPTDSKPEDWDKPEHIPVP

SEQ ID NO: 816785 - protein, 206 aa, Homo sapiens; identical to SEQ ID NO: 816781

SEQ ID NO: 816786 - protein, 206 aa, Homo sapiens; identical to SEQ ID NO: 816781

SEQ ID NO: 816787 - protein, 206 aa, Homo sapiens; identical to SEQ ID NO: 816781

SEQ ID NO: 816788 - protein, 206 aa, Homo sapiens; identical to SEQ ID NO: 816781

SEQ ID NO: 816789 - protein, 206 aa, Homo sapiens; identical to SEQ ID NO: 816781

SEQ ID NO: 816790 - protein, 247 aa, Homo sapiens; identical to SEQ ID NO: 816784

SEQ ID NO: 816791 - protein, 206 aa, Homo sapiens; identical to SEQ ID NO: 816781

SEQ ID NO: 816792 - protein, 206 aa, Homo sapiens; identical to SEQ ID NO: 816781

SEQ ID NO: 816793 - protein, 247 aa, Homo sapiens; identical to SEQ ID NO: 816784

SEQ ID NO: 816794 - protein, 206 aa, Homo sapiens; identical to SEQ ID NO: 816781

SEQ ID NO: 816795 - protein, 206 aa, Homo sapiens; identical to SEQ ID NO: 816781

SEQ ID NO: 816796 - protein, 206 aa, Homo sapiens; identical to SEQ ID NO: 816781

SEQ ID NO: 816797 - protein, 206 aa, Homo sapiens; identical to SEQ ID NO: 816781

SEQ ID NO: 816798 - protein, 206 aa, Homo sapiens; identical to SEQ ID NO: 816781

SEQ ID NO: 816799 - protein, 206 aa, Homo sapiens; identical to SEQ ID NO: 816781

SEQ ID NO: 816800 - protein, 206 aa, Homo sapiens; identical to SEQ ID NO: 816781

SEQ ID NO: 816801 - protein, 206 aa, Homo sapiens; identical to SEQ ID NO: 816781

SEQ ID NO: 816802 - protein, 247 aa, Homo sapiens; identical to SEQ ID NO: 816784

SEQ ID NO: 816803 - protein, 206 aa, Homo sapiens; identical to SEQ ID NO: 816781

SEQ ID NO: 816804 - protein, 247 aa, Homo sapiens; identical to SEQ ID NO: 816784

SEQ ID NO: 816805 - protein, 237 aa, Homo sapiens
MLQNRKTGMSGPRSMIPQTPSLRTGTSPSISLYPDAKKPEDWDEEMDGEWEPPVIQNPEYKGEWKPRQIDNPDYKGTWIHPEIDNPEYSPDPSIYAYDNFGVLGLDLWQVKSGTIFDNFLITNDEAYAEEFGNETWGVTKAAEKQMKDKQDEEQRLKEEEEDKKRKEEEEAEDKEDDEDKDEDEEDEEDKAAEGGGVSNPPSTEEERGSSHFTPPFLPCPQDWATSGWGSGSQIGSH

SEQ ID NO: 816806 - protein, 206 aa, Homo sapiens; identical to SEQ ID NO: 816781

SEQ ID NO: 816807 - protein, 247 aa, Homo sapiens; identical to SEQ ID NO: 816784

SEQ ID NO: 816808 - protein, 247 aa, Homo sapiens; identical to SEQ ID NO: 816784

SEQ ID NO: 816809 - protein, 206 aa, Homo sapiens; identical to SEQ ID NO: 816781

SEQ ID NO: 816810 - protein, 247 aa, Homo sapiens; identical to SEQ ID NO: 816784

SEQ ID NO: 816811 - protein, 247 aa, Homo sapiens; identical to SEQ ID NO: 816784

SEQ ID NO: 816812 - protein, 247 aa, Homo sapiens; identical to SEQ ID NO: 816784

SEQ ID NO: 816813 - protein, 247 aa, Homo sapiens; identical to SEQ ID NO: 816784

SEQ ID NO: 816814 - protein, 247 aa, Homo sapiens; identical to SEQ ID NO: 816784

SEQ ID NO: 816815 - protein, 247 aa, Homo sapiens; identical to SEQ ID NO: 816784

SEQ ID NO: 816816 - protein, 247 aa, Homo sapiens; identical to SEQ ID NO: 816784

SEQ ID NO: 816817 - protein, 247 aa, Homo sapiens; identical to SEQ ID NO: 816784

SEQ ID NO: 816818 - protein, 144 aa, Homo sapiens
MTSLRILWLAVAEPAVYFKEQFLDGDGWTSRWIESKHKSDFGKFVLSSGKFYGDEEKDKGLQTSQDARFYALSASFEPFSNKGQTLVVQFTVKHEQNIDCGGGYVKLFPNSLDQTDMHGDSEYNIMFDPLPALFFFFFKLVFYL

SEQ ID NO: 816819 - protein, 557 aa, Homo sapiens
MYPFLIREDYLRILWLAVAEPAVYFKEQFLDGDGWTSRWIESKHKSDFGKFVLSSGKFYGDEEKDKGLQTSQDARFYALSASFEPFSNKGQTLVVQFTVKHEQNIDCGGGYVKLFPNSLDQTDMHGDSEYNIMFGPDICGPGTKKVHVIFNYKGKNVLINKDIRCKDDEFTHLYTLIVRPDNTYEVKIDNSQVESGSLEDDWDFLPPKKIKDPDASNGDGYGQIVPKSLVGASSLRETAVNGGPGLMRPDDTATAPLFRAPFGSSLAQRTTRREHAKSKNDKRTTNKEDETRVTRNEDKHRRETQHRAREKQQEAEDEDEEGREQADKNRGKKLNKNRQKEEDDKQGKNENTETKTSEQNEENNDKETQDKRKKKEKRKAKQENTRETKQTETDRSRAKRSEKRVSMTEEKQRREEQSEEKEEKYEKAEAREQTKSREERSEMAQRRRQQERGRSDDRKRKTEEEGGNNRKKQNRDKEEREEQDNTRTKNREKKIAENKREKERKERPRKKKKEEKEGKERKKERKKERQQQQEKQQKKKRRRKREKEKNRNKKTNG

SEQ ID NO: 816820 - protein, 201 aa, Homo sapiens
MYPFLIREDYLRILWLAVAEPAVYFKEQFLDGDGWTSRWIESKHKSDFGKFVLSSGKFYGDEEKDKGLQTSQDARFYALSASFEPFSNKGQTLVVQFTVKHEQNIDCGGGYVKLFPNSLDQTDMHGDSEYNIMFGPDICGPGTKKVHVIFNYKGKNVLINKDIRCKDDEFTHLYTLIVRPDNTYEVKIDNSQVESGSLEDD

SEQ ID NO: 816821 - protein, 207 aa, Homo sapiens
MYPFLIREDYLRILWLAVAEPAVYFKEQFLDGDGWTSRWIESKHKSDFGKFVLSSGKFYGDEEKDKGLQTSQDARFYALSASFEPFSNKGQTLVVQFTVKHEQNIDCGGGYVKLFPNSLDQTDMHGDSEYNIMFGPDICGPGTKKVHVIFNYKGKNVLINKDIRCKVCLGVVANGCHGEIQRSASLGGGPRSPSSFFRMMSLHTCTH

SEQ ID NO: 816822 - protein, 87 aa, Homo sapiens
LKRILGSVILGSFEPFSNKGQTLVVQFTVKHEQNIDCGGGYVKLFPNSLDQTDMLYSESPCMSVWSKLLGNSFMHGDSEYNIMFVIS

SEQ ID NO: 816823 - protein, 139 aa, Homo sapiens
MASQSQGIQQLLQAEKRAAEKVSEARKRKNRRLKQAKEEAQAEIEQYRLQREKEFKAKEAAALGSRGSCSTEVEKETQEKMTILQTYFRQNRDEVLDNLLAFVCDIRPEIHENYRINGYEERSTCAVEWHFRCPHEYEA

SEQ ID NO: 816824 - protein, 139 aa, Homo sapiens; identical to SEQ ID NO: 816823

SEQ ID NO: 816825 - protein, 139 aa, Homo sapiens; identical to SEQ ID NO: 816823

SEQ ID NO: 816826 - protein, 139 aa, Homo sapiens; identical to SEQ ID NO: 816823

SEQ ID NO: 816827 - protein, 139 aa, Homo sapiens; identical to SEQ ID NO: 816823

SEQ ID NO: 816828 - protein, 139 aa, Homo sapiens; identical to SEQ ID NO: 816823

SEQ ID NO: 816829 - protein, 139 aa, Homo sapiens; identical to SEQ ID NO: 816823

SEQ ID NO: 816830 - protein, 139 aa, Homo sapiens; identical to SEQ ID NO: 816823

SEQ ID NO: 816831 - protein, 115 aa, Homo sapiens
MLDGKNRRLKQAKEEAQAEIEQYRLQREKEFKAKEAAALGSRGSCSTEVEKETQEKMTILQTYFRQNRDEVLDNLLAFVCDIRPEIHENYRINGYEERSTCAVEWHFRCPHEYEA

SEQ ID NO: 816832 - protein, 139 aa, Homo sapiens; identical to SEQ ID NO: 816823

SEQ ID NO: 816833 - protein, 123 aa, Homo sapiens
MASQSQGIQQLLQAEKRAAEKVSEARKRKNRRLKQAKEEAQAEIEQYRLQREKEFKAKEAAALGSRGSCSTEVEKETQEKMTILQTYFRQNRDEVLDNLLAFVCDIRPEIHEWHFRCPHEYEA

SEQ ID NO: 816834 - protein, 139 aa, Homo sapiens; identical to SEQ ID NO: 816823

SEQ ID NO: 816835 - protein, 145 aa, Homo sapiens
MASQSQGIQQLLQAEKRAAEKVSEARKRKNRRLKQAKEEAQAEIEQYRLQREKEFKAKEAAALGSRGSCSTEVEKETQEKMTILQTYFRHRLRPLRRPQGLEGICLPTPSPVGLGLCPLRGRQAGLGRGPLGLLLHGQQGVRTAL

SEQ ID NO: 816836 - protein, 98 aa, Homo sapiens
MASQSQGIQQLLQAEKRAAEKVSEARKRKNRRLKQAKEEAQAEIEQYRLQREKEFKAKEAAHWDPVAVREQHESEQIELTHHVRTTDTLGPDIFFGRR

SEQ ID NO: 816837 - protein, 132 aa, Homo sapiens
MSTVSYVSFRFSETEERCLTSSSSASSPASHLLCAPRQSAQSHVHPRSALSLTCLLLVHLSIAHLHHARINALLCNHTHPASRSIHPRASNITRIHQDHETTRSSGSSYSQDSIIFPSAVVGGCIFPNLCLA

SEQ ID NO: 816838 - protein, 748 aa, Homo sapiens
MVLLRVLILLLSWAAGMGGQYGNPLNKYIRHYEGLSYNVDSLHQKHQRAKRAVSHEDQFLRLDFHAHGRHFNLRMKRDTSLFSDEFKVETSNKVLDYDTSHIYTGHIYGEEGSFSHGSVIDGRFEGFIQTRGGTFYVEPAERYIKDRTLPFHSVIYHEDDINYPHKYGPQGGCADHSVFERMRKYQMTGVEEVTQIPQEEHAANGPELLRKKRTTSAEKNTCQLYIQTDHLFFKYYGTREAVIAQISSHVKAIDTIYQTTDFSGIRNISFMVKRIRINTTADEKDPTNPFRFPNIGVEKFLELNSEQNHDDYCLAYVFTDRDFDDGVLGLAWVGAPSGSSGGICEKSKLYSDGKKKSLNTGIITVQNYGSHVPPKVSHITFAHEVGHNFGSPHDSGTECTPGESKNLGQKENGNYIMYARATSGDKLNNNKFSLCSIRNISQVLEKKRNNCFVESGQPICGNGMVEQGEECDCGYSDQCKDECCFDANQPEGRKCKLKPGKQCSPSQGPCCTAQCAFKSKSEKCRDDSDCAREGICNGFTALCPASDPKPNFTDCNRHTQVCINGQCAGSICEKYGLEECTCASSDGKDDKELCHVCCMKKMDPSTCASTGSVQWSRHFSGRTITLQPGSPCNDFRGYCDVFMRCRLVDADGPLARLKKAIFSPELYENIAEWIVAHWWAVLLMGIALIMLMAGFIKICSVHTPSSNPKLPPPKPLPGTLKRRRPPQPIQQPQRQRPRESYQMGHMRR

SEQ ID NO: 816839 - protein, 306 aa, Homo sapiens
MKCTPRGPDSELEMLCLLRVSAKASGPQRKTPILVLLGKKKKDNFKLWDEMSTKQVGEFPVNLRPQGRVPSAPFSFPQIAKGSYCPEGRKCKLKPGKQCSPSQGPCCTAQCAFKSKSEKCRDDSDCAREGICNGFTALCPASDPKPNFTDCNRHTQVCINGQCAGSICEKYGLEECTCASSDGKDDKELCHVCCMKKMDPSTCASTGSVQWSRHFSGRTITLQPGSPCNDFRGYCDVFMRCRLVDADGPLARLKKAIFSPELYENIAEWIVVSMFFIYKENLKWFDLNFTWPEVIKVTRKQLNYLY

SEQ ID NO: 816840 - protein, 799 aa, Homo sapiens
MVLLRVLILLLSWAAGMGGQYGNPLNKYIRHYEGLSYNVDSLHQKHQRAKRAVSHEDQFLRLDFHAHGRHFNLRMKRDTSLFSDEFKVETSNKVLDYDTSHIYTGHIYGEEGSFSHGSVIDGRFEGFIQTRGGTFYVEPAERYIKDRTLPFHSVIYHEDDISERLKLRLRKLMSLELWTSCSLPCALLLHSWKKAVNSHCLYFKDFWGFSEIYYPHKYGPQGGCADHSVFERMRKYQMTGVEEVTQIPQEEHAANGPELLRKKRTTSAEKNTCQLYIQTDHLFFKYYGTREAVIAQISSHVKAIDTIYQTTDFSGIRNISFMVKRIRINTTADEKDPTNPFRFPNIGVEKFLELNSEQNHDDYCLAYVFTDRDFDDGVLGLAWVGAPSGSSGGICEKSKLYSDGKKKSLNTGIITVQNYGSHVPPKVSHITFAHEVGHNFGSPHDSGTECTPGESKNLGQKENGNYIMYARATSGDKLNNNKFSLCSIRNISQVLEKKRNNCFVESGQPICGNGMVEQGEECDCGYSDQCKDECCFDANQPEGRKCKLKPGKQCSPSQGPCCTAQCAFKSKSEKCRDDSDCAREGICNGFTALCPASDPKPNFTDCNRHTQVCINGQCAGSICEKYGLEECTCASSDGKDDKELCHVCCMKKMDPSTCASTGSVQWSRHFSGRTITLQPGSPCNDFRGYCDVFMRCRLVDADGPLARLKKAIFSPELYENIAEWIVAHWWAVLLMGIALIMLMAGFIKICSVHTPSSNPKLPPPKPLPGTLKRRRPPQPIQQPQRQRPRESYQMGHMRR

SEQ ID NO: 816841 - protein, 799 aa, Homo sapiens; identical to SEQ ID NO: 816840

SEQ ID NO: 816842 - protein, 568 aa, Homo sapiens
MVLLRVLILLLSWAAGMGGQYGNPLNKYIRHYEGLSYNVDSLHQKHQRAKRAVSHEDQFLRLDFHAHGRHFNLRMKRDTSLFSDEFKVETSNKVLDYDTSHIYTGHIYGEEGSFSHGSVIDGRFEGFIQTRGGTFYVEPAERYIKDRTLPFHSVIYHEDDINYPHKYGPQGGCADHSVFERMRKYQMTGVEEVTQIPQEEHAANGPELLRKKRTTSAEKNTCQLYIQTDHLFFKYYGTREAVIAQISSHVKAIDTIYQTTDFSGIRNISFMVKRIRINTTADEKDPTNPFRFPNIGVEKFLELNSEQNHDDYCLAYVFTDRDFDDGVLGLAWVGAPSGSSGGICEKSKLYSDGKKKSLNTGIITVQNYGSHVPPKVSHITFAHEVGHNFGSPHDSGTECTPGESKNLGQKENGNYIMYARATSGDKLNNNKFSLCSIRNISQVLEKKRNNCFVESGQPICGNGMVEQGEECDCGYSDQCKDECCFDANQPEGRKCKLKPGKQCSPSQGPCCTAQCAFKSKSEKCRDDSDCAREGICNGFTALCPASDPKPNFTDCNRHTQVCINGVSI

SEQ ID NO: 816843 - protein, 799 aa, Homo sapiens; identical to SEQ ID NO: 816840

SEQ ID NO: 816844 - protein, 152 aa, Homo sapiens
MYARATSGDKLNNNKFSLCSIRNISQVLEKKRNNCFVESGQPICGNGMVEQGEECDCGYSDQCKDECCFDANQPEGRKCKLKPGKQCSPSQGPCCTAQCAFKSKSEKCRDDSDCAREGICNGFTALCPASDPKPNFTDCNRHTQVCINGVSI

SEQ ID NO: 816845 - protein, 677 aa, Homo sapiens
MVLLRVLILLLSWAAGMGGQYGNPLNKYIRHYEGLSYNVDSLHQKHQRAKRAVSHEDQFLRLDFHAHGRHFNLRMKRDTSLFSDEFKVETSNKVLDYDTSHIYTGHIYGEEGSFSHGSVIDGRFEGFIQTRGGTFYVEPAERYIKDRTLPFHSVIYHEDDINYPHKYGPQGGCADHSVFERMRKYQMTGVEEVTQIPQEEHAANGPELLRKKRTTSAEKNTCQLYIQTDHLFFKYYGTREAVIAQISSHVKAIDTIYQTTDFSGIRNISFMVKRIRINTTADEKDPTNPFRFPNIGVEKFLELNSEQNHDDYCLAYVFTDRDFDDGVLGLAWVGAPSGSSGGICEKSKLYSDGKKKSLNTGIITVQNYGSHVPPKVSHITFAHEVGHNFGSPHDSGTECTPGESKNLGQKENGNYIMYARATSGDKLNNNKFSLCSIRNISQVLEKKRNNCFVESGQPICGNGMVEQGEECDCGYSDQCKDECCFDANQPEGRKCKLKPGKQCSPSQGPCCTAQCAFKSKSEKCRDDSDCAREGICNGFTALCPASDPKPNFTDCNRHTQVCINGQCAGSICEKYGLEECTCASSDGKDDKELCHVCCMKKMDPSTCASTGSVQWSRHFSGRTITLQPGSPCNDFRGYCDVFMRCRLVDADGPLARLKKAIFSPELYENIAEWIVAL

SEQ ID NO: 816846 - protein, 218 aa, Homo sapiens
MVLLRVLILLLSWAAGMGGQYGNPLNKYIRHYEGLSYNVDSLHQKHQRAKRAVSHEDQFLRLDFHAHGRHFNLRMKRDTSLFSDEFKVETSNKVLDYDTSHIYTGHIYGEEGSFSHGSVIDGRFEGFIQTRGGTFYVEPAERYIKDRTLPFHSVIYHEDDINYPHKYGPQGGCADHSVFERMRKYQMTGVEEVTQTLLLAPASSMSCACSPFTFCPCL

SEQ ID NO: 816847 - protein, 342 aa, Homo sapiens
MVLLRVLILLLSWAAGMGGQYGNPLNKYIRHYEGLSYNVDSLHQKHQRAKRAVSHEDQFLRLDFHAHGRHFNLRMKRDTSLFSDEFKVETSNKVLDYDTSHIYTGHIYGEEGSFSHGSVIDGRFEGFIQTRGGTFYVEPAERYIKDRTLPFHSVIYHEDDINYPHKYGPQGGCADHSVFERMRKYQMTGVEEVTQIPQEEHAANGPELLRKKRTTSAEKNTCQLYIQTDHLFFKYYGTREAVIAQISSHVKAIDTIYQTTDFSGIRNISFMVKRIRINTTADEKDPTNPFRFPNIGVEKFLELNSEQNHDDYCLAYVFTDRDFDDGVLGLAWVGAPSGSLSY

SEQ ID NO: 816848 - protein, 493 aa, Homo sapiens
MTTSPILQLLLRLSLCGLLLQRAETGSKGQTAGELYQRWERYRRECQETLAAAEPPSGLACNGSFDMYVCWDYAAPNATARASCPWYLPWHHHVAAGFVLRQCGSDGQWGLWRDHTQCENPEKNEAFLDQRLILERLQVMYTVGYSLSLATLLLALLILSLFRRLHCTRNYIHINLFTSFMLRAAAILSRDRLLPRPGPYLGDQALALWNQALAACRTAQIVTQYCVGANYTWLLVEGVYLHSLLVLVGGSEEGHFRYYLLLGWGAPALFVIPWVIVRYLYENTQCWERNEVKAIWWIIRTPILMTILINFLIFIRILGILLSKLRTRQMRCRDYRLRLARSTLTLVPLLGVHEVVFAPVTEEQARGALRFAKLGFEIFLSSFQGFLVSVLYCFINKEVGRDPAAAPALWRRRGTAPPLSAIVSQVQSEIRRGWHHCRLRRSLGEEQRQLPERAFRALPSGSGPGEVPTSRGLSSGTLPGPGNEASRELESYC

SEQ ID NO: 816849 - protein, 466 aa, Homo sapiens
MTTSPILQLLLRLSLCGLLLQRAETGSKGQTAGELYQRWERYRRECQETLAAAEPPSGLACNGSFDMYVCWDYAAPNATARASCPWYLPWHHHVAAGFVLRQCGSDGQWGLWRDHTQCENPEKNEAFLDQRLILERLQVMYTVGYSLSLATLLLALLILSLFRRLHCTRNYIHINLFTSFMLRAAAILSRDRLLPRPGPYLGDQALALWNQALAACRTAQIVTQYCVGANYTWLLVEGVYLHSLLVLVGGSEEGHFRYYLLLGWGAPALFVIPWVIVRYLYENTQCWERNEVKAIWWIIRTPILMTILINFLIFIRILGILLSKLRTRQMRCRDYRLRLARSTLTLVPLLGVHEVVFAPVTEEQARGALRFAKLGFEIFLSSFQGFLVSVLYCFINKEVQSEIRRGWHHCRLRRSLGEEQRQLPERAFRALPSGSGPGEVPTSRGLSSGTLPGPGNEASRELESYC

SEQ ID NO: 816850 - protein, 112 aa, Homo sapiens
MKPSSTFIVTIRKTGKDLNLLTKVWNNNENRNPNLNTLLTCKMYLSINLPNWFQACTSGIIFWWNVGFWLVVEHLLFLKTEVRTQTEPPVGSPFLLPRQSRFIKTGIAMEKE

SEQ ID NO: 816851 - protein, 254 aa, Homo sapiens
MFKKPLLGRVRWLMPVKPALWEAEAGGSRGTTVPALLNSTSNQLYLHFQSDISVAAAGFHLEYKTVGLAACQEPALPSNSIKIGDRYMVNDVLSFQCEPGYTLQGRSHISCMPGTVRRWNYPSPLCIATCGGTLSTLGGVILSPGFPGSYPNNLDCTWRISLPIGYGAHIQFLNFSTEANHDFLEIQNGPYHTSPMIGQFSGTDLPAALLSTTHETLIHFYSDHSQNRQGFKLAYQGMEQQREPKPKSKYTSYM

SEQ ID NO: 816852 - protein, 3603 aa, Homo sapiens
PSCPARPALVPGPGPASPGLRARSSSALQWLGTRCYEREASRAPRPSGGVGCAAGLGTGLSLRLALPSGDYLAPLIALPSSEEPSVSRACGVSADMTAWRRFQSLLLLLGLLVLCARLLTAAKGQNCGGLVQGPNGTIESPGFPHGYPNYANCTWIIITGERNRIQLSFHTFALEENFDILSVYDGQPQQGNLKVRLSGFQLPSSIVSTGSILTLWFTTDFAVSAQGFKALYEVLPSHTCGNPGEILKGVLHGTRFNIGDKIRYSCLPGYILEGHAILTCIVSPGNGASWDFPAPFCRAEGACGGTLRGTSSSISSPHFPSEYENNADCTWTILAEPGDTIALVFTDFQLEEGYDFLEISGTEAPSIWLTGMNLPSPVISSKNWLRLHFTSDSNHRRKGFNAQFQVKKAIELKSRGVKMLPSKDGSHKNSVLSQGGVALVSHMCLDPGIPENGRRAGSDFSRVGANVQFSCEDNYVLQGSKSITCQRVTETLAAWSDHRPICRARTCGSNLRGPSGVITSPNYPVQYEDNAHCVWVITTTDPDKVIKLAFEEFELERGYDTLTVGDAGKVGDTRSVLYVLTGSSVPDLIVSMSNQMWLHLQSDDSIGSPGFKAVYQEIEKGGCGDPGIPAYGKRTGSSFLHGDTLTFECPAAFELVGERVITCQQNNQWSGNKPSCVFSCFFNFTASSGIILSPNYPEEYGNNMNCVWLIISEPGSRIHLIFNDFDVEPQFDFLAVKDNGISDITVLGTFSGNEVPSQLASSGHIVRLEFQSDHSTTGRGFNITYTTFGQNECHDPGIPINGRRFGDRFLLGSSVSFHCDDGFVKTQGSESITCILQDGNVVWSSTVPRCEAPCGGHLTASSGVILPPGWPGYYKDSLHCEWIIEAKPGHSIKMTFDRFQTEVNYDTLEVRDGPASSSPLIGEYHGTQAPQFLISTGNFMYLLFTTDNSRSSIGFLIHYESVTLESDSCLDPGIPVNGHRHGGDFGIRSTVTFSCDPGYTLSDDEPLVCERNHQWNHALPSCDALCGGYIQGKSGTVLSPGFPDFYPNSLNCTWTIEVSHGKGVQMIFHTFHLESSHDYLLITEDGSFSEPVARLTGSVLPHTIKAGLFGNFTAQLRFISDFSISYEGFNITFSEYDLEPCDDPGVPAFSRRIGFHFGVGDSLTFSCFLGYRLEGATKLTCLGGGRRVWSAPLPRCVAECGASVKGNEGTLLSPNFPSNYDNTHECIYKIETEAGKGIHLRTRSFQLFEGDTLKVYDGKDSSSRPLGTFTKNELLGLILNSTSNHLWLEFNTNGSDTDQGFQLTYTSFDLVKCEDPGIPNYGYRIRDEGHFTDTVVLYSCNPGYAMHGSNTLTCLSGDRRVWDKPLPSCIAECGGQIHAATSGRILSPGYPAPYDNNLHCTWIIEADPGKTISLHFIVFDTEMAHDILKVWDGPVDSDILLKEWSGSALPEDIHSTFNSLTLQFDSDFFISKSGFSIQFSTSIAATCNDPGMPQNGTRYGDSREAGDTVTFQCDPGYQLQGQAKITCVQLNNRFFWQPDPPTCIAACGGNLTGPAGVILSPNYPQPYPPGKECDWRVKVNPDFVIALIFKSFNMEPSYDFLHIYEGEDSNSPLIGSYQGSQAPERIESSGNSLFLAFRSDASVGLSGFAIEFKEKPREACFDPGNIMNGTRVGTDFKLGSTITYQCDSGYKILDPSSITCVIGADGKPSWDQVLPSCNAPCGGQYTGSEGVVLSPNYPHNYTAGQICLYSITVPKEFVVFGQFAYFQTALNDLAELFDGTHAQARLLSSLSGSHSGETLPLATSNQILLRFSAKSGASARGFHFVYQAVPRTSDTQCSSVPEPRYGRRIGSEFSAGSIVRFECNPGYLLQGSTALHCQSVPNALAQWNDTIPSCVVPCSGNFTQRRGTILSPGYPEPYGNNLNCIWKIIVTEGSGIQDPSDQFCHGAELGLPFEIHDGGDVTAPRLGSFSGTTVPALLNSTSNQLYLHFQSDISVAAAGFHLEYKTVGLAACQEPALPSNSIKIGDRYMVNDVLSFQCEPGYTLQGRSHISCMPGTVRRWNYPSPLCIATCGGTLSTLGGVILSPGFPGSYPNNLDCTWRISLPIGYGAHIQFLNFSTEANHDFLEIQNGPYHTSPMIGQFSGTDLPAALLSTTHETLIHFYSDHSQNRQGFKLAYQAYELQNCPDPPPFQNGYMINSDYSVGQSVSFECYPGYILIGHPVLTCQHGINRNWNYPFPRCDAPCGYNVTSQNGTIYSPGFPDEYPILKDCIWLITVPPGHGVYINFTLLQTEAVNDYIAVWDGPDQNSPQLGVFSGNTALETAYSSTNQVLLKFHSDFSNGGFFVLNFHAFQLKKCQPPPAVPQAEMLTEDDDFEIGDFVKYQCHPGYTLVGTDILTCKLSSQLQFEGSLPTCEAQCPANEVRTGSSGVILSPGYPGNYFNSQTCSWSIKVEPNYNITIFVDTFQSEKQFDALEVFDGSSGQSPLLVVLSGNHTEQSNFTSRSNQLYLRWSTDHATSKKGFKIRYAAPYCSLTHPLKNGGILNRTAGAVGSKVHYFCKPGYRMVGHSNATCRRNPLGMYQWDSLTPLCQAVSCGIPESPGNGSFTGNEFTLDSKVVYECHEGFKLESSQQATAVCQEDGLWSNKGKPPMCKPVACPSIEAQLSEHVIWRLVSGSLNEYGAQVLLSCSPGYYLEGWRLLRCQANGTWNIGDERPSCRAGHCGSPDPIVNGHISGDGFSYRDTVVYQCNPGFRLVGTSVRICLQDHKWSGQTPVCVPITCGHPGNPAHGFTNGSEFNLNDVVNFTCNTGYLLQGVSRAQCRSNGQWSSPLPTCRVVNCSDPGFVENAIRHGQQNFPESFEYGMSILYHCKKGFHLLGSSALTCMANGLWDRSLPKCLAISCGHPGVPANAVLTGELFTYGAVVHYSCRGSESLIGNDTRVCQEDSHWSGALPHCTGNNPGFCGDPGTPAHGSRLGDDFKTKSLLRFSCEMGHQLRGSPERTCLLNGSWSGLQPVCEAVSCGNPGTPTNGMIVSSDGILFSSSVIYACWEGYKTSGLMTRHCTANGTWTGTAPDCTIISCGDPGTLANGIQFGTDFTFNKTVSYQCNPGYVMEAVTSATIRCTKDGRWNPSKPVCKAVLCPQPPPVQNGTVEGSDFRWGSSISYSCMDGYQLSHSAILSCEGRGVWKGEIPQCLPVFCGDPGIPAEGRLSGKSFTYKSEVFFQCKSPFILVGSSRRVCQADGTWSGIQPTCIDPAHNTCPDPGTPHFGIQNSSRGYEVGSTVFFRCRKGYHIQGSTTRTCLANLTWSGIQTECIPHACRQPETPAHADVRAIDLPTFGYTLVYTCHPGFFLAGGSEHRTCKADMKWTGKSPVCKSKGVREVNETVTKTPVPSDVFFVNSLWKGYYEYLGKRQPATLTVDWFNATSSKVNATFSEASPVELKLTGIYKKEEAHLLLKAFQIKGQADIFVSKFENDNWGLDGYVSSGLERGGFTFQGDIHGKDFGKFKLERQDPLNPDQDSSSHYHGTSSGSVAAAILVPFFALILSGFAFYLYKHRTRPKVQYNGYAGHENSNGQASFENPMYDTNLKPTEAKAVRFDTTLNTVCTVV

SEQ ID NO: 816853 - protein, 3484 aa, Homo sapiens
PSCPARPALVPGPGPASPGLRARSSSALQWLGTRCYEREASRAPRPSGGVGCAAGLGTGLSLRLALPSGDYLAPLIALPSSEEPSVSRACGVSADMTAWRRFQSLLLLLGLLVLCARLLTAAKGQNCGGLVQGPNGTIESPGFPHGYPNYANCTWIIITGERNRIQLSFHTFALEENFDILSVYDGQPQQGNLKVRLSGFQLPSSIVSTGSILTLWFTTDFAVSAQGFKALYEVLPSHTCGNPGEILKGVLHGTRFNIGDKIRYSCLPGYILEGHAILTCIVSPGNGASWDFPAPFCRAEGACGGTLRGTSSSISSPHFPSEYENNADCTWTILAEPGDTIALVFTDFQLEEGYDFLEISGTEAPSIWLTGMNLPSPVISSKNWLRLHFTSDSNHRRKGFNAQFQVKKAIELKSRGVKMLPSKDGSHKNSVLSQGGVALVSHMCLDPGIPENGRRAGSDFSRVGANVQFSCEDNYVLQGSKSITCQRVTETLAAWSDHRPICRARTCGSNLRGPSGVITSPNYPVQYEDNAHCVWVITTTDPDKVIKLAFEEFELERGYDTLTVGDAGKVGDTRSVLYVLTGSSVPDLIVSMSNQMWLHLQSDDSIGSPGFKAVYQEIEKGGCGDPGIPAYGKRTGSSFLHGDTLTFECPAAFELVGERVITCQQNNQWSGNKPSCVFSCFFNFTASSGIILSPNYPEEYGNNMNCVWLIISEPGSRIHLIFNDFDVEPQFDFLAVKDNGISDITVLGTFSGNEVPSQLASSGHIVRLEFQSDHSTTGRGFNITYTTFGQNECHDPGIPINGRRFGDRFLLGSSVSFHCDDGFVKTQGSESITCILQDGNVVWSSTVPRCEAPCGGHLTASSGVILPPGWPGYYKDSLHCEWIIEAKPGHSIKMTFDRFQTEVNYDTLEVRDGPASSSPLIGEYHGTQAPQFLISTGNFMYLLFTTDNSRSSIGFLIHYESVTLESDSCLDPGIPVNGHRHGGDFGIRSTVTFSCDPGYTLSDDEPLVCERNHQWNHALPSCDALCGGYIQGKSGTVLSPGFPDFYPNSLNCTWTIEVSHGKGVQMIFHTFHLESSHDYLLITEDGSFSEPVARLTGSVLPHTIKAGLFGNFTAQLRFISDFSISYEGFNITFSEYDLEPCDDPGVPAFSRRIGFHFGVGDSLTFSCFLGYRLEGATKLTCLGGGRRVWSAPLPRCVAECGASVKGNEGTLLSPNFPSNYDNTHECIYKIETEAGKGIHLRTRSFQLFEGDTLKVYDGKDSSSRPLGTFTKNELLGLILNSTSNHLWLEFNTNGSDTDQGFQLTYTSFDLVKCEDPGIPNYGYRIRDEGHFTDTVVLYSCNPGYAMHGSNTLTCLSGDRRVWDKPLPSCIAECGGQIHAATSGRILSPGYPAPYDNNLHCTWIIEADPGKTISLHFIVFDTEMAHDILKVWDGPVDSDILLKEWSGSALPEDIHSTFNSLTLQFDSDFFISKSGFSIQFSTSIAATCNDPGMPQNGTRYGDSREAGDTVTFQCDPGYQLQGQAKITCVQLNNRFFWQPDPPTCIAACGGNLTGPAGVILSPNYPQPYPPGKECDWRVKVNPDFVIALIFKSFNMEPSYDFLHIYEGEDSNSPLIGSYQGSQAPERIESSGNSLFLAFRSDASVGLSGFAIEFKEKPREACFDPGNIMNGTRVGTDFKLGSTITYQCDSGYKILDPSSITCVIGADGKPSWDQVLPSCNAPCGGQYTGSEGVVLSPNYPHNYTAGQICLYSITVPKEFVVFGQFAYFQTALNDLAELFDGTHAQARLLSSLSGSHSGETLPLATSNQILLRFSAKSGASARGFHFVYQAVPRTSDTQCSSVPEPRYGRRIGSEFSAGSIVRFECNPGYLLQGSTALHCQSVPNALAQWNDTIPSCVVPCSGNFTQRRGTILSPGYPEPYGNNLNCIWKIIVTEGSGIQDPSDQFCHGAELGLPFEIHDGGDVTAPRLGSFSGTTVPALLNSTSNQLYLHFQSDISVAAAGFHLEYKTVGLAACQEPALPSNSIKIGDRYMVNDVLSFQCEPGYTLQGRSHISCMPGTVRRWNYPSPLCIATCGGTLSTLGGVILSPGFPGSYPNNLDCTWRISLPIGYGAHIQFLNFSTEANHDFLEIQNGPYHTSPMIGQFSGTDLPAALLSTTHETLIHFYSDHSQNRQGFKLAYQAYELQNCPDPPPFQNGYMINSDYSVGQSVSFECYPGYILIGHPVLTCQHGINRNWNYPFPRCDAPCGYNVTSQNGTIYSPGFPDEYPILKDCIWLITVPPGHGVYINFTLLQTEAVNDYIAVWDGPDQNSPQLGVFSGNTALETAYSSTNQVLLKFHSDFSNGGFFVLNFHAFQLKKCQPPPAVPQAEMLTEDDDFEIGDFVKYQCHPGYTLVGTDILTCKLSSQLQFEGSLPTCEAQCPANEVRTGSSGVILSPGYPGNYFNSQTCSWSIKVEPNYNITIFVDTFQSEKQFDALEVFDGSSGQSPLLVVLSGNHTEQSNFTSRSNQLYLRWSTDHATSKKGFKIRYAAPYCSLTHPLKNGGILNRTAGAVGSKVHYFCKPGYRMVGHSNATCRRNPLGMYQWDSLTPLCQAVSCGIPESPGNGSFTGNEFTLDSKVVYECHEGFKLESSQQATAVCQEDGLWSNKGKPPMCKPVACPSIEAQLSEHVIWRLVSGSLNEYGAQVLLSCSPGYYLEGWRLLRCQANGTWNIGDERPSCRAGHCGSPDPIVNGHISGDGFSYRDTVVYQCNPGFRLVGTSVRICLQDHKWSGQTPVCVPITCGHPGNPAHGFTNGSEFNLNDVVNFTCNTGYLLQGVSRAQCRSNGQWSSPLPTCRVVNCSDPGFVENAIRHGQQNFPESFEYGMSILYHCKKGFHLLGSSALTCMANGLWDRSLPKCLAISCGHPGVPANAVLTGELFTYGAVVHYSCRGSESLIGNDTRVCQEDSHWSGALPHCTGNNPGFCGDPGTPAHGSRLGDDFKTKSLLRFSCEMGHQLRGSPERTCLLNGSWSGLQPVCEAVLCPQPPPVQNGTVEGSDFRWGSSISYSCMDGYQLSHSAILSCEGRGVWKGEIPQCLPVFCGDPGIPAEGRLSGKSFTYKSEVFFQCKSPFILVGSSRRVCQADGTWSGIQPTCIDPAHNTCPDPGTPHFGIQNSSRGYEVGSTVFFRCRKGYHIQGSTTRTCLANLTWSGIQTECIPHACRQPETPAHADVRAIDLPTFGYTLVYTCHPGFFLAGGSEHRTCKADMKWTGKSPVCKSKGVREVNETVTKTPVPSDVFFVNSLWKGYYEYLGKRQPATLTVDWFNATSSKVNATFSEASPVELKLTGIYKKEEAHLLLKAFQIKGQADIFVSKFENDNWGLDGYVSSGLERGGFTFQGDIHGKDFGKFKLERQDPLNPDQDSSSHYHGTSSGSVAAAILVPFFALILSGFAFYLYKHRTRPKVQYNGYAGHENSNGQASFENPMYDTNLKPTEAKAVRFDTTLNTVCTVV

SEQ ID NO: 816854 - protein, 2109 aa, Homo sapiens
PSCPARPALVPGPGPASPGLRARSSSALQWLGTRCYEREASRAPRPSGGVGCAAGLGTGLSLRLALPSGDYLAPLIALPSSEEPSVSRACGVSADMTAWRRFQSLLLLLGLLVLCARLLTAAKGQNCGGLVQGPNGTIESPGFPHGYPNYANCTWIIITGERNRIQLSFHTFALEENFDILSVYDGQPQQGNLKVRLSGFQLPSSIVSTGSILTLWFTTDFAVSAQGFKALYEVLPSHTCGNPGEILKGVLHGTRFNIGDKIRYSCLPGYILEGHAILTCIVSPGNGASWDFPAPFCRAEGACGGTLRGTSSSISSPHFPSEYENNADCTWTILAEPGDTIALVFTDFQLEEGYDFLEISGTEAPSIWLTGMNLPSPVISSKNWLRLHFTSDSNHRRKGFNAQFQVKKAIELKSRGVKMLPSKDGSHKNSVLSQGGVALVSHMCLDPGIPENGRRAGSDFSRVGANVQFSCEDNYVLQGSKSITCQRVTETLAAWSDHRPICRARTCGSNLRGPSGVITSPNYPVQYEDNAHCVWVITTTDPDKVIKLAFEEFELERGYDTLTVGDAGKVGDTRSVLYVLTGSSVPDLIVSMSNQMWLHLQSDDSIGSPGFKAVYQEIEKGGCGDPGIPAYGKRTGSSFLHGDTLTFECPAAFELVGERVITCQQNNQWSGNKPSCVFSCFFNFTASSGIILSPNYPEEYGNNMNCVWLIISEPGSRIHLIFNDFDVEPQFDFLAVKDNGISDITVLGTFSGNEVPSQLASSGHIVRLEFQSDHSTTGRGFNITYTTFGQNECHDPGIPINGRRFGDRFLLGSSVSFHCDDGFVKTQGSESITCILQDGNVVWSSTVPRCEAPCGGHLTASSGVILPPGWPGYYKDSLHCEWIIEAKPGHSIKMTFDRFQTEVNYDTLEVRDGPASSSPLIGEYHGTQAPQFLISTGNFMYLLFTTDNSRSSIGFLIHYESVTLESDSCLDPGIPVNGHRHGGDFGIRSTVTFSCDPGYTLSDDEPLVCERNHQWNHALPSCDALCGGYIQGKSGTVLSPGFPDFYPNSLNCTWTIEVSHGKGVQMIFHTFHLESSHDYLLITEDGSFSEPVARLTGSVLPHTIKAGLFGNFTAQLRFISDFSISYEGFNITFSEYDLEPCDDPGVPAFSRRIGFHFGVGDSLTFSCFLGYRLEGATKLTCLGGGRRVWSAPLPRCVAECGASVKGNEGTLLSPNFPSNYDNTHECIYKIETEAGKGIHLRTRSFQLFEGDTLKVYDGKDSSSRPLGTFTKNELLGLILNSTSNHLWLEFNTNGSDTDQGFQLTYTSFDLVKCEDPGIPNYGYRIRDEGHFTDTVVLYSCNPGYAMHGSNTLTCLSGDRRVWDKPLPSCIAECGGQIHAATSGRILSPGYPAPYDNNLHCTWIIEADPGKTISLHFIVFDTEMAHDILKVWDGPVDSDILLKEWSGSALPEDIHSTFNSLTLQFDSDFFISKSGFSIQFSTSIAATCNDPGMPQNGTRYGDSREAGDTVTFQCDPGYQLQGQAKITCVQLNNRFFWQPDPPTCIAACGGNLTGPAGVILSPNYPQPYPPGKECDWRVKVNPDFVIALIFKSFNMEPSYDFLHIYEGEDSNSPLIGSYQGSQAPERIESSGNSLFLAFRSDASVGLSGFAIEFKEKPREACFDPGNIMNGTRVGTDFKLGSTITYQCDSGYKILDPSSITCVIGADGKPSWDQVLPSCNAPCGGQYTGSEGVVLSPNYPHNYTAGQICLYSITVPKEFVVFGQFAYFQTALNDLAELFDGTHAQARLLSSLSGSHSGETLPLATSNQILLRFSAKSGASARGFHFVYQAVPRTSDTQCSSVPEPRYGRRIGSEFSAGSIVRFECNPGYLLQGSTALHCQSVPNALAQWNDTIPSCVVPCSGNFTQRRGTILSPGYPEPYGNNLNCIWKIIVTEGSGIQDPSDQFCHGAELGLPFEIHDGGDVTAPRLGSFSGTTVPALLNSTSNQLYLHFQSDISVAAAGFHLEYKTVGLAACQEPALPSNSIKIGDRYMVNDVLSFQCEPGYTLQGRSHISCMPGTVRRWNYPSPLCIATCGGTLSTLGGVILSPGFPGSYPNNLDCTWRISLPIGYGK

SEQ ID NO: 816855 - protein, 2195 aa, Homo sapiens
PSCPARPALVPGPGPASPGLRARSSSALQWLGTRCYEREASRAPRPSGGVGCAAGLGTGLSLRLALPSGDYLAPLIALPSSEEPSVSRACGVSADMTAWRRFQSLLLLLGLLVLCARLLTAAKGQNCGGLVQGPNGTIESPGFPHGYPNYANCTWIIITGERNRIQLSFHTFALEENFDILSVYDGQPQQGNLKVRLSGFQLPSSIVSTGSILTLWFTTDFAVSAQGFKALYEVLPSHTCGNPGEILKGVLHGTRFNIGDKIRYSCLPGYILEGHAILTCIVSPGNGASWDFPAPFCRAEGACGGTLRGTSSSISSPHFPSEYENNADCTWTILAEPGDTIALVFTDFQLEEGYDFLEISGTEAPSIWLTGMNLPSPVISSKNWLRLHFTSDSNHRRKGFNAQFQVKKAIELKSRGVKMLPSKDGSHKNSVLSQGGVALVSHMCLDPGIPENGRRAGSDFSRVGANVQFSCEDNYVLQGSKSITCQRVTETLAAWSDHRPICRARTCGSNLRGPSGVITSPNYPVQYEDNAHCVWVITTTDPDKVIKLAFEEFELERGYDTLTVGDAGKVGDTRSVLYVLTGSSVPDLIVSMSNQMWLHLQSDDSIGSPGFKAVYQEIEKGGCGDPGIPAYGKRTGSSFLHGDTLTFECPAAFELVGERVITCQQNNQWSGNKPSCVFSCFFNFTASSGIILSPNYPEEYGNNMNCVWLIISEPGSRIHLIFNDFDVEPQFDFLAVKDNGISDITVLGTFSGNEVPSQLASSGHIVRLEFQSDHSTTGRGFNITYTTFGQNECHDPGIPINGRRFGDRFLLGSSVSFHCDDGFVKTQGSESITCILQDGNVVWSSTVPRCEAPCGGHLTASSGVILPPGWPGYYKDSLHCEWIIEAKPGHSIKMTFDRFQTEVNYDTLEVRDGPASSSPLIGEYHGTQAPQFLISTGNFMYLLFTTDNSRSSIGFLIHYESVTLESDSCLDPGIPVNGHRHGGDFGIRSTVTFSCDPGYTLSDDEPLVCERNHQWNHALPSCDALCGGYIQGKSGTVLSPGFPDFYPNSLNCTWTIEVSHGKGVQMIFHTFHLESSHDYLLITEDGSFSEPVARLTGSVLPHTIKAGLFGNFTAQLRFISDFSISYEGFNITFSEYDLEPCDDPGVPAFSRRIGFHFGVGDSLTFSCFLGYRLEGATKLTCLGGGRRVWSAPLPRCVAECGASVKGNEGTLLSPNFPSNYDNTHECIYKIETEAGKGIHLRTRSFQLFEGDTLKVYDGKDSSSRPLGTFTKNELLGLILNSTSNHLWLEFNTNGSDTDQGFQLTYTSFDLVKCEDPGIPNYGYRIRDEGHFTDTVVLYSCNPGYAMHGSNTLTCLSGDRRVWDKPLPSCIAECGGQIHAATSGRILSPGYPAPYDNNLHCTWIIEADPGKTISLHFIVFDTEMAHDILKVWDGPVDSDILLKEWSGSALPEDIHSTFNSLTLQFDSDFFISKSGFSIQFSTSIAATCNDPGMPQNGTRYGDSREAGDTVTFQCDPGYQLQGQAKITCVQLNNRFFWQPDPPTCIAACGGNLTGPAGVILSPNYPQPYPPGKECDWRVKVNPDFVIALIFKSFNMEPSYDFLHIYEGEDSNSPLIGSYQGSQAPERIESSGNSLFLAFRSDASVGLSGFAIEFKEKPREACFDPGNIMNGTRVGTDFKLGSTITYQCDSGYKILDPSSITCVIGADGKPSWDQVLPSCNAPCGGQYTGSEGVVLSPNYPHNYTAGQICLYSITVPKEFVVFGQFAYFQTALNDLAELFDGTHAQARLLSSLSGSHSGETLPLATSNQILLRFSAKSGASARGFHFVYQAVPRTSDTQCSSVPEPRYGRRIGSEFSAGSIVRFECNPGYLLQGSTALHCQSVPNALAQWNDTIPSCVVPCSGNFTQRRGTILSPGYPEPYGNNLNCIWKIIVTEGSGIQDPSDQFCHGAELGLPFEIHDGGDVTAPRLGSFSGTTVPALLNSTSNQLYLHFQSDISVAAAGFHLEYKTVGLAACQEPALPSNSIKIGDRYMVNDVLSFQCEPGYTLQGRSHISCMPGTVRRWNYPSPLCIATCGGTLSTLGGVILSPGFPGSYPNNLDCTWRISLPIGYGAHIQFLNFSTEANHDFLEIQNGPYHTSPMIGQFSGTDLPAALLSTTHETLIHFYSDHSQNRQGFKLAYQGMEQQREPKPKSKYTSYM

SEQ ID NO: 816856 - protein, 1467 aa, Homo sapiens
MIGQFSGTDLPAALLSTTHETLIHFYSDHSQNRQGFKLAYQAYELQNCPDPPPFQNGYMINSDYSVGQSVSFECYPGYILIGHPVLTCQHGINRNWNYPFPRCDAPCGYNVTSQNGTIYSPGFPDEYPILKDCIWLITVPPGHGVYINFTLLQTEAVNDYIAVWDGPDQNSPQLGVFSGNTALETAYSSTNQVLLKFHSDFSNGGFFVLNFHAFQLKKCQPPPAVPQAEMLTEDDDFEIGDFVKYQCHPGYTLVGTDILTCKLSSQLQFEGSLPTCEAQCPANEVRTGSSGVILSPGYPGNYFNSQTCSWSIKVEPNYNITIFVDTFQSEKQFDALEVFDGSSGQSPLLVVLSGNHTEQSNFTSRSNQLYLRWSTDHATSKKGFKIRYAAPYCSLTHPLKNGGILNRTAGAVGSKVHYFCKPGYRMVGHSNATCRRNPLGMYQWDSLTPLCQAVSCGIPESPGNGSFTGNEFTLDSKVVYECHEGFKLESSQQATAVCQEDGLWSNKGKPPMCKPVACPSIEAQLSEHVIWRLVSGSLNEYGAQVLLSCSPGYYLEGWRLLRCQANGTWNIGDERPSCRAGHCGSPDPIVNGHISGDGFSYRDTVVYQCNPGFRLVGTSVRICLQDHKWSGQTPVCVPITCGHPGNPAHGFTNGSEFNLNDVVNFTCNTGYLLQGVSRAQCRSNGQWSSPLPTCRVVNCSDPGFVENAIRHGQQNFPESFEYGMSILYHCKKGFHLLGSSALTCMANGLWDRSLPKCLAISCGHPGVPANAVLTGELFTYGAVVHYSCRGSESLIGNDTRVCQEDSHWSGALPHCTGNNPGFCGDPGTPAHGSRLGDDFKTKSLLRFSCEMGHQLRGSPERTCLLNGSWSGLQPVCEAVSCGNPGTPTNGMIVSSDGILFSSSVIYACWEGYKTSGLMTRHCTANGTWTGTAPDCTIISCGDPGTLANGIQFGTDFTFNKTVSYQCNPGYVMEAVTSATIRCTKDGRWNPSKPVCKAVLCPQPPPVQNGTVEGSDFRWGSSISYSCMDGYQLSHSAILSCEGRGVWKGEIPQCLPVFCGDPGIPAEGRLSGKSFTYKSEVFFQCKSPFILVGSSRRVCQADGTWSGIQPTCIDPAHNTCPDPGTPHFGIQNSSRGYEVGSTVFFRCRKGYHIQGSTTRTCLANLTWSGIQTECIPHACRQPETPAHADVRAIDLPTFGYTLVYTCHPGFFLAGGSEHRTCKADMKWTGKSPVCKSKGVREVNETVTKTPVPSDVFFVNSLWKGYYEYLGKRQPATLTVDWFNATSSKVNATFSEASPVELKLTGIYKKEEAHLLLKAFQIKGQADIFVSKFENDNWGLDGYVSSGLERGGFTFQGDIHGKDFGKFKLERQDPLNPDQDSSSHYHGTSSGSVAAAILVPFFALILSGFAFYLYKHRTRPKVQYNGYAGHENSNGQASFENPMYDTNLKPTEAKAVRFDTTLNTVCTVV

SEQ ID NO: 816857 - protein, 1662 aa, Homo sapiens
MFKKPLLGRVRWLMPVKPALWEAEAGGSRGTTVPALLNSTSNQLYLHFQSDISVAAAGFHLEYKTVGLAACQEPALPSNSIKIGDRYMVNDVLSFQCEPGYTLQGRSHISCMPGTVRRWNYPSPLCIATCGGTLSTLGGVILSPGFPGSYPNNLDCTWRISLPIGYGAHIQFLNFSTEANHDFLEIQNGPYHTSPMIGQFSGTDLPAALLSTTHETLIHFYSDHSQNRQGFKLAYQAYELQNCPDPPPFQNGYMINSDYSVGQSVSFECYPGYILIGHPVLTCQHGINRNWNYPFPRCDAPCGYNVTSQNGTIYSPGFPDEYPILKDCIWLITVPPGHGVYINFTLLQTEAVNDYIAVWDGPDQNSPQLGVFSGNTALETAYSSTNQVLLKFHSDFSNGGFFVLNFHAFQLKKCQPPPAVPQAEMLTEDDDFEIGDFVKYQCHPGYTLVGTDILTCKLSSQLQFEGSLPTCEAQCPANEVRTGSSGVILSPGYPGNYFNSQTCSWSIKVEPNYNITIFVDTFQSEKQFDALEVFDGSSGQSPLLVVLSGNHTEQSNFTSRSNQLYLRWSTDHATSKKGFKIRYAAPYCSLTHPLKNGGILNRTAGAVGSKVHYFCKPGYRMVGHSNATCRRNPLGMYQWDSLTPLCQAVSCGIPESPGNGSFTGNEFTLDSKVVYECHEGFKLESSQQATAVCQEDGLWSNKGKPPMCKPVACPSIEAQLSEHVIWRLVSGSLNEYGAQVLLSCSPGYYLEGWRLLRCQANGTWNIGDERPSCRAGHCGSPDPIVNGHISGDGFSYRDTVVYQCNPGFRLVGTSVRICLQDHKWSGQTPVCVPITCGHPGNPAHGFTNGSEFNLNDVVNFTCNTGYLLQGVSRAQCRSNGQWSSPLPTCRVVNCSDPGFVENAIRHGQQNFPESFEYGMSILYHCKKGFHLLGSSALTCMANGLWDRSLPKCLAISCGHPGVPANAVLTGELFTYGAVVHYSCRGSESLIGNDTRVCQEDSHWSGALPHCTGNNPGFCGDPGTPAHGSRLGDDFKTKSLLRFSCEMGHQLRGSPERTCLLNGSWSGLQPVCEAVSCGNPGTPTNGMIVSSDGILFSSSVIYACWEGYKTSGLMTRHCTANGTWTGTAPDCTIISCGDPGTLANGIQFGTDFTFNKTVSYQCNPGYVMEAVTSATIRCTKDGRWNPSKPVCKAVLCPQPPPVQNGTVEGSDFRWGSSISYSCMDGYQLSHSAILSCEGRGVWKGEIPQCLPVFCGDPGIPAEGRLSGKSFTYKSEVFFQCKSPFILVGSSRRVCQADGTWSGIQPTCIDPAHNTCPDPGTPHFGIQNSSRGYEVGSTVFFRCRKGYHIQGSTTRTCLANLTWSGIQTECIPHACRQPETPAHADVRAIDLPTFGYTLVYTCHPGFFLAGGSEHRTCKADMKWTGKSPVCKSKGVREVNETVTKTPVPSDVFFVNSLWKGYYEYLGKRQPATLTVDWFNATSSKVNATFSEASPVELKLTGIYKKEEAHLLLKAFQIKGQADIFVSKFENDNWGLDGYVSSGLERGGFTFQGDIHGKDFGKFKLERQDPLNPDQDSSSHYHGTSSGSVAAAILVPFFALILSGFAFYLYKHRTRPKVQYNGYAGHENSNGQASFENPMYDTNLKPTEAKAVRFDTTLNTVCTVV

SEQ ID NO: 816858 - protein, 2480 aa, Homo sapiens
PSCPARPALVPGPGPASPGLRARSSSALQWLGTRCYEREASRAPRPSGGVGCAAGLGTGLSLRLALPSGDYLAPLIALPSSEEPSVSRACGVSADMTAWRRFQSLLLLLGLLVLCARLLTAAKGQNCGGLVQGPNGTIESPGFPHGYPNYANCTWIIITGERNRIQLSFHTFALEENFDILSVYDGQPQQGNLKVRLSGFQLPSSIVSTGSILTLWFTTDFAVSAQGFKALYEVLPSHTCGNPGEILKGVLHGTRFNIGDKIRYSCLPGYILEGHAILTCIVSPGNGASWDFPAPFCRAEGACGGTLRGTSSSISSPHFPSEYENNADCTWTILAEPGDTIALVFTDFQLEEGYDFLEISGTEAPSIWLTGMNLPSPVISSKNWLRLHFTSDSNHRRKGFNAQFQVKKAIELKSRGVKMLPSKDGSHKNSVLSQGGVALVSHMCLDPGIPENGRRAGSDFSRVGANVQFSCEDNYVLQGSKSITCQRVTETLAAWSDHRPICRARTCGSNLRGPSGVITSPNYPVQYEDNAHCVWVITTTDPDKVIKLAFEEFELERGYDTLTVGDAGKVGDTRSVLYVLTGSSVPDLIVSMSNQMWLHLQSDDSIGSPGFKAVYQEIEKGGCGDPGIPAYGKRTGSSFLHGDTLTFECPAAFELVGERVITCQQNNQWSGNKPSCVFSCFFNFTASSGIILSPNYPEEYGNNMNCVWLIISEPGSRIHLIFNDFDVEPQFDFLAVKDNGISDITVLGTFSGNEVPSQLASSGHIVRLEFQSDHSTTGRGFNITYTTFGQNECHDPGIPINGRRFGDRFLLGSSVSFHCDDGFVKTQGSESITCILQDGNVVWSSTVPRCEAPCGGHLTASSGVILPPGWPGYYKDSLHCEWIIEAKPGHSIKMTFDRFQTEVNYDTLEVRDGPASSSPLIGEYHGTQAPQFLISTGNFMYLLFTTDNSRSSIGFLIHYESVTLESDSCLDPGIPVNGHRHGGDFGIRSTVTFSCDPGYTLSDDEPLVCERNHQWNHALPSCDALCGGYIQGKSGTVLSPGFPDFYPNSLNCTWTIEVSHGKGVQMIFHTFHLESSHDYLLITEDGSFSEPVARLTGSVLPHTIKAGLFGNFTAQLRFISDFSISYEGFNITFSEYDLEPCDDPGVPAFSRRIGFHFGVGDSLTFSCFLGYRLEGATKLTCLGGGRRVWSAPLPRCVAECGASVKGNEGTLLSPNFPSNYDNTHECIYKIETEAGKGIHLRTRSFQLFEGDTLKVYDGKDSSSRPLGTFTKNELLGLILNSTSNHLWLEFNTNGSDTDQGFQLTYTSFDLVKCEDPGIPNYGYRIRDEGHFTDTVVLYSCNPGYAMHGSNTLTCLSGDRRVWDKPLPSCIAECGGQIHAATSGRILSPGYPAPYDNNLHCTWIIEADPGKTISLHFIVFDTEMAHDILKVWDGPVDSDILLKEWSGSALPEDIHSTFNSLTLQFDSDFFISKSGFSIQFSTSIAATCNDPGMPQNGTRYGDSREAGDTVTFQCDPGYQLQGQAKITCVQLNNRFFWQPDPPTCIAACGGNLTGPAGVILSPNYPQPYPPGKECDWRVKVNPDFVIALIFKSFNMEPSYDFLHIYEGEDSNSPLIGSYQGSQAPERIESSGNSLFLAFRSDASVGLSGFAIEFKEKPREACFDPGNIMNGTRVGTDFKLGSTITYQCDSGYKILDPSSITCVIGADGKPSWDQVLPSCNAPCGGQYTGSEGVVLSPNYPHNYTAGQICLYSITVPKEFVVFGQFAYFQTALNDLAELFDGTHAQARLLSSLSGSHSGETLPLATSNQILLRFSAKSGASARGFHFVYQAVPRTSDTQCSSVPEPRYGRRIGSEFSAGSIVRFECNPGYLLQGSTALHCQSVPNALAQWNDTIPSCVVPCSGNFTQRRGTILSPGYPEPYGNNLNCIWKIIVTEGSGIQDPSDQFCHGAELGLPFEIHDGGDVTAPRLGSFSGTTVPALLNSTSNQLYLHFQSDISVAAAGFHLEYKTVGLAACQEPALPSNSIKIGDRYMVNDVLSFQCEPGYTLQGRSHISCMPGTVRRWNYPSPLCIATCGGTLSTLGGVILSPGFPGSYPNNLDCTWRISLPIGYGAHIQFLNFSTEANHDFLEIQNGPYHTSPMIGQFSGTDLPAALLSTTHETLIHFYSDHSQNRQGFKLAYQAYELQNCPDPPPFQNGYMINSDYSVGQSVSFECYPGYILIGHPVLTCQHGINRNWNYPFPRCDAPCGYNVTSQNGTIYSPGFPDEYPILKDCIWLITVPPGHGVYINFTLLQTEAVNDYIAVWDGPDQNSPQLGVFSGNTALETAYSSTNQVLLKFHSDFSNGGFFVLNFHAFQLKKCQPPPAVPQAEMLTEDDDFEIGDFVKYQCHPGYTLVGTDILTCKLSSQLQFEGSLPTCEAQCPANEVRTGSSGVILSPGYPGNYFNSQTCSWSIKVEPNYNITIFVDTFQSEKQFDALEVFDGKFL

SEQ ID NO: 816859 - protein, 466 aa, Homo sapiens
PSCPARPALVPGPGPASPGLRARSSSALQWLGTRCYEREASRAPRPSGGVGCAAGLGTGLSLRLALPSGDYLAPLIALPSSEEPSVSRACGVSADMTAWRRFQSLLLLLGLLVLCARLLTAAKGQNCGGLVQGPNGTIESPGFPHGYPNYANCTWIIITGERNRIQLSFHTFALEENFDILSVYDGQPQQGNLKVRLSGFQLPSSIVSTGSILTLWFTTDFAVSAQGFKALYEVLPSHTCGNPGEILKGVLHGTRFNIGDKIRYSCLPGYILEGHAILTCIVSPGNGASWDFPAPFCRAEGACGGTLRGTSSSISSPHFPSEYENNADCTWTILAEPGDTIALVFTDFQLEEGYDFLEISGTEAPSIWLTGMNLPSPVISSKNWLRLHFTSDSNHRRKGFNAQFQVKKAIELKSRGVKMLPSKDGSHKNSVWHQQEFSKCRKKKREIMTRNGRISLTASGNLQFDN

SEQ ID NO: 816860 - protein, 488 aa, Homo sapiens
AGNAVPVRRLSLFTLLTDLAPAFPSSSSKMGKSFANFMCKKDFHPASKSNIKKVWMAEQKISYDKKKQEELMQQYLKEQESYDNRLLMGDERVKNGLNFMYEAPPGAKKENKEKEETEGETEYKFEWQKGAPREKYAKDDMNIRDQPFGIQVRNVRCIKCHKWGHVNTDRECPLFGLSGINASSVPTDGSDAVYKLKVSGPSMHPSELIAEMRNSGFALKRNVLGRNLTANDPSQEYVASEGEEDPEVEFLKSLTTKQKQKLLRKLDRLEKKKKKKDRKKKKFQKSRSKHKKHKSSSSSSSSSSSSSSTETSESSSESESNNKEKKIQRKKRKKNKCSGHNNSDSEEKDKSKKRKLHEELSSSHHNREKAKEKPRFLKHESSREDSKWSHSDSDKKSRTHKHSPEKRGSERKEGSSRSHGREERSRRSRSRSPGSYKQRETRKRAQRNPGEEQSRRNDSRSHGTDLYRGEKMYREHPGGTHTKVTQRE

SEQ ID NO: 816861 - protein, 193 aa, Homo sapiens
AGNAVPVRRLSLFTLLTDLAPAFPSSSSKMGKSFANFMCKKDFHPASKSNIKKVWMAEQKISYDKKKQEELMQQYLKEQESYDNRLLMGDERVKNGLNFMYEAPPGAKKENKEKEETEGETEYKFEWQKGAPREKYAKDDMNIRDQPFGIQVRNVRCIKCHKWGHVNTDRECPLFGLSGINASSVPTDGSGRH

SEQ ID NO: 816862 - protein, 479 aa, Homo sapiens
AGNAVPVRRLSLFTLLTDLAPAFPSSSSKMGKSFANFMCKKDFHPASKSNIKKVWMAEQKISYDKKKQEELMQQYLKEQESYDNRLLMGDERVKNGLNFMYEAPPGAKKENKEKEETEGETEYKFEWQKGAPREKYAKDDMNIRDQPFGIQVRNVRCIKCHKWGHVNTDRECPLFGLSGINASSVPTDGSGPSMHPSELIAEMRNSGFALKRNVLGRNLTANDPSQEYVASEGEEDPEVEFLKSLTTKQKQKLLRKLDRLEKKKKKKDRKKKKFQKSRSKHKKHKSSSSSSSSSSSSSSTETSESSSESESNNKEKKIQRKKRKKNKCSGHNNSDSEEKDKSKKRKLHEELSSSHHNREKAKEKPRFLKHESSREDSKWSHSDSDKKSRTHKHSPEKRGSERKEGSSRSHGREERSRRSRSRSPGSYKQRETRKRAQRNPGEEQSRRNDSRSHGTDLYRGEKMYREHPGGTHTKVTQRE

SEQ ID NO: 816863 - protein, 479 aa, Homo sapiens; identical to SEQ ID NO: 816862

SEQ ID NO: 816864 - protein, 479 aa, Homo sapiens; identical to SEQ ID NO: 816862

SEQ ID NO: 816865 - protein, 447 aa, Homo sapiens
TTTKFAAASTFHPASKSNIKKVWMAEQKISYDKKKQEELMQQYLKEQESYDNRLLMGDERVKNGLNFMYEAPPGAKKENKEKEETEGETEYKFEWQKGAPREKYAKDDMNIRDQPFGIQVRNVRCIKCHKWGHVNTDRECPLFGLSGINASSVPTDGSGPSMHPSELIAEMRNSGFALKRNVLGRNLTANDPSQEYVASEGEEDPEVEFLKSLTTKQKQKLLRKLDRLEKKKKKKDRKKKKFQKSRSKHKKHKSSSSSSSSSSSSSSTETSESSSESESNNKEKKIQRKKRKKNKCSGHNNSDSEEKDKSKKRKLHEELSSSHHNREKAKEKPRFLKHESSREDSKWSHSDSDKKSRTHKHSPEKRGSERKEGSSRSHGREERSRRSRSRSPGSYKQRETRKRAQRNPGEEQSRRNDSRSHGTDLYRGEKMYREHPGGTHTKVTQRE

SEQ ID NO: 816866 - protein, 473 aa, Homo sapiens
  misc_feature (434)..(436): Xaa can be any naturally occurring amino acid
  misc_feature (440)..(440): Xaa can be any naturally occurring amino acid
  misc_feature (442)..(443): Xaa can be any naturally occurring amino acid
  misc_feature (447)..(447): Xaa can be any naturally occurring amino acid
  misc_feature (450)..(450): Xaa can be any naturally occurring amino acid
  misc_feature (453)..(453): Xaa can be any naturally occurring amino acid
  misc_feature (472)..(472): Xaa can be any naturally occurring amino acid
AGNAVPVRRLSLFTLLTDLAPAFPSSSSKMGKSFANFMCKKDFHPASKSNIKKVWMAEQKISYDKKKQEELMQQYLKEQESYDNRLLMGDERVKNGLNFMYEAPPGAKKENKEKEETEGETEYKFEWQKGAPREKYAKDDMNIRDQPFGIQVRNVRCIKCHKWGHVNTDRECPLFGLSGINASSVPTDGSGPSMHPSELIAEMRNSGFALKRNVLGRNLTANDPSQEYVASEGEEDPEVEFLKSLTTKQKQKLLRKLDRLEKKKKKKDRKKKKFQKSRSKHKKHKSSSSSSSSSSSSSSTETSESSSESESNNKEKKIQRKKRKKNKCSGHNNSDSEEKDKSKKRKLHEELSSSHHNREKAKEKPRFLKHESSREDSKWSHSDSDKKSRTHKHSPEKRGSERKEGSSRSHGREERSRRSRSRSPGSYKHPPHKXXXAQRXPXXSLRXRSXRIXPSHYDLFQRMKNMYIEHPXG

SEQ ID NO: 816867 - protein, 451 aa, Homo sapiens
  misc_feature (37)..(37): Xaa can be any naturally occurring amino acid
GEPEGSVKEIKHSPGPTRTVSTGTALSKYRSRSSDGXQNYFEHEELTVSQLLLCLREGNQKVERLEVALKEAQERVSDFEKKTKEKEETEGETEYKFEWQKGAPREKYAKDDMNIRDQPFGIQVRNVRCIKCHKWGHVNTDRECPLFGLSGINASSVPTDGSGPSMHPSELIAEMRNSGFALKRNVLGRNLTANDPSQEYVASEGEEDPEVEFLKSLTTKQKQKLLRKLDRLEKKKKKKDRKKKKFQKSRSKHKKHKSSSSSSSSSSSSSSTETSESSSESESNNKEKKIQRKKRKKNKCSGHNNSDSEEKDKSKKRKLHEELSSSHHNREKAKEKPRFLKHESSREDSKWSHSDSDKKSRTHKHSPEKRGSERKEGSSRSHGREERSRRSRSRSPGSYKQRETRKRAQRNPGEEQSRRNDSRSHGTDLYRGEKMYREHPGGTHTKVTQRE

SEQ ID NO: 816868 - protein, 286 aa, Homo sapiens [sequence omitted]

SEQ ID NO: 816869 - protein, 245 aa, Homo sapiens
AGNAVPVRRLSLFTLLTDLAPAFPSSSSKMGKSFANFMCKKDFHPASKSNIKKVWMAEQKISYDKKKQEELMQQYLKEQESYDNRLLMGDERVKNGLNFMYEAPPGAKKENKEKEETEGETEYKFEWQKGAPREKYAKDDMNIRDQPFGIQVRNVRCIKCHKWGHVNTDRECPLFGLSGINASSVPTDGSGPSMHPSELIAEMRNSGFALKRNVLGRNLTANDPSQEYVAGRDEGRVGMMKGVQS

SEQ ID NO: 816870 - protein, 119 aa, Homo sapiens
RQLGCWSAAPPRRTGAAGGQRVRGWRGREWRPRGPGQGSAELQPSRASPLRVRGWVPPVTRRQPRAHQREGGCGGSGSPSHAVLCDEAGRGADGGGGGGESQRRGLPQPGVQATGNHRS

SEQ ID NO: 816871 - protein, 264 aa, Homo sapiens
MENYGIEWHSVRDSEGQKLLIGVGPEGISICKDDFSPINRIAYPVVQMATQSGKNVYLTVTKESGNSIVLLFKMISTRAASGLYRAITETHAFYRCDTVTSAVMMQYSRDLKGHLASLFLNENINLGKKYVFDIKRTSKEVYDHARRALYNAGVVDLVSRSNQSPSHSPLKSSESSMNCSSCEGLSCQQTRVLQEKLRKLKEAMLCMVCCEEEINSTFCPCGHTVCCESCAAQLQSCPVCRSRVEHVQHVYLPTHTSLLNLTVI

SEQ ID NO: 816872 - protein, 188 aa, Homo sapiens
MLCYVTRPDAVLMEVEVEAKANGEDCLNQVCRRLGIIEVDYFGLQFTGSKGESLWLNLRNRISQQMDGLAPYRLKLRVKFFVEPHLILQEQTRHIFFLHIKEALLAGHLLCSPEQAVELSALLAQTKFGDYNQNTAKYNYEELCAKELSSATLNSIVANIKDWSDHRSLNTVCNGGGTAKDPGKSEVG

SEQ ID NO: 816873 - protein, 445 aa, Homo sapiens [sequence omitted]

SEQ ID NO: 816874 - protein, 445 aa, Homo sapiens [sequence omitted]

SEQ ID NO: 816875 - protein, 445 aa, Homo sapiens [sequence omitted]

SEQ ID NO: 816876 - protein, 245 aa, Homo sapiens
MLCYVTRPDAVLMEVEVEAKANGEDCLNQVCRRLGIIEVDYFGLQFTGSKGESLWLNLRNRISQQMDGLAPYRLKLRVKFFVEPHLILQEQTRHIFFLHIKEALLAGHLLCSPEQAVELSALLAQTKFGDYNQNTAKYNYEELCAKELSSATLNSIVAKHKELEGTSQASAEYQVLQIVSAMENYGIEWHSVRDSEGQKLLIGVGPEGISICKDDFSPINRIAYPVVQMATQSGKNVYLWPHCVL

SEQ ID NO: 816877 - protein, 209 aa, Homo sapiens
SRLLLLNSRPLYIVLLFKMISTRAASGLYRAITETHAFYRCDTVTSAVMMQYSRDLKGHLASLFLNENINLGKKYVFDIKRTSKEVYDHARRALYNAGVVDLVSRSNQSPSHSPLKSSESSMNCSSCEGLSCQQTRVLQEKLRKLKEAMLCMVCCEEEINSTFCPCGHTVCCESCAAQLQSCPVCRSRVEHVQHVYLPTHTSLLNLTVI

SEQ ID NO: 816878 - protein, 1496 aa, Homo sapiens
FSWAALGTWIRWRGSWGASLFCVLVPPSCPSGEGKDKPWAMRLPLLLVFASVIPGAVLLLDTRQFLIYNEDHKRCVDAVSPSAVQTAACNQDAESQKFRWVSESQIMSVAFKLCLGVPSKTDWVAITLYACDSKSEFQKWECKNDTLLGIKGEDLFFNYGNRQEKNIMLYKGSGLWSRWKIYGTTDNLCSRGYEAMYTLLGNANGATCAFPFKFENKWYADCTSAGRSDGWLWCGTTTDYDTDKLFGYCPLKFEGSESLWNKDPLTSVSYQINSKSALTWHQARKSCQQQNAELLSITEIHEQTYLTGLTSSLTSGLWIGLNSLSFNSGWQWSDRSPFRYLNWLPGSPSAEPGKSCVSLNPGKNAKWENLECVQKLGYICKKGNTTLNSFVIPSESDVPTHCPSQWWPYAGHCYKIHRDEKKIQRDALTTCRKEGGDLTSIHTIEELDFIISQLGYEPNDELWIGLNDIKIQMYFEWSDGTPVTFTKWLRGEPSHENNRQEDCVVMKGKDGYWADRGCEWPLGYICKMKSRSQGPEIVEVEKGCRKGWKKHHFYCYMIGHTLSTFAEANQTCNNENAYLTTIEDRYEQAFLTSFVGLRPEKYFWTGLSDIQTKGTFQWTIEEEVRFTHWNSDMPGRKPGCVAMRTGIAGGLWDVLKCDEKAKFVCKHWAEGVTHPPKPTTTPEPKCPEDWGASSRTSLCFKLYAKGKHEKKTWFESRDFCRALGGDLASINNKEEQQTIWRLITASGSYHKLFWLGLTYGSPSEGFTWSDGSPVSYENWAYGEPNNYQNVEYCGELKGDPTMSWNDINCEHLNNWICQIQKGQTPKPEPTPAPQDNPPVTEDGWVIYKDYQYYFSKEKETMDNARAFCKRNFGDLVSIQSESEKKFLWKYVNRNDAQSAYFIGLLISLDKKFAWMDGSKVDYVSWATGEPNFANEDENCVTMYSNSGFWNDINCGYPNAFICQRHNSSINATTVMPTMPSVPSGCKEGWNFYSNKCFKIFGFMEEERKNWQEARKACIGFGGNLVSIQNEKEQAFLTYHMKDSTFSAWTGLNDVNSEHTFLWTDGRGVHYTNWGKGYPGGRRSSLSYEDADCVVIIGGASNEAGKWMDDTCDSKRGYICQTRSDPSLTNPPATIQTDGFVKYGKSSYSLMRQKFQWHEAETYCKLHNSLIASILDPYSNAFAWLQMETSNERVWIALNSNLTDNQYTWTDKWRVRYTNWAADEPKLKSACVYLDLDGYWKTAHCNESFYFLCKRSDEIPATEPPQLPGRCPESDHTAWIPFHGHCYYIESSYTRNWGQASLECLRMGSSLVSIESAAESSFLSYRVEPLKSKTNFWIGLFRNVEGTWLWINNSPVSFVNWNTGDPSGERNDCVALHASSGFWSNIHCSSYKGYICKRPKIIDAKPTHELLTTKADTRKMDPSKPSSNVAGVVIIVILLILTGAGLAAYFFYKKRRVHLPQEGAFENTLYFNSQSSPGTSDMKDLVGNIEQNEHSVI

SEQ ID NO: 816879 - protein, 1247 aa, Homo sapiens
AGVTPEDPGSTSKDPLTSVSYQINSKSALTWHQARKSCQQQNAELLSITEIHEQTYLTGLTSSLTSGLWIGLNSLSFNSGWQWSDRSPFRYLNWLPGSPSAEPGKSCVSLNPGKNAKWENLECVQKLGYICKKGNTTLNSFVIPSESDVPTHCPSQWWPYAGHCYKIHRDEKKIQRDALTTCRKEGGDLTSIHTIEELDFIISQLGYEPNDELWIGLNDIKIQMYFEWSDGTPVTFTKWLRGEPSHENNRQEDCVVMKGKDGYWADRGCEWPLGYICKMKSRSQGPEIVEVEKGCRKGWKKHHFYCYMIGHTLSTFAEANQTCNNENAYLTTIEDRYEQAFLTSFVGLRPEKYFWTGLSDIQTKGTFQWTIEEEVRFTHWNSDMPGRKPGCVAMRTGIAGGLWDVLKCDEKAKFVCKHWAEGVTHPPKPTTTPEPKCPEDWGASSRTSLCFKLYAKGKHEKKTWFESRDFCRALGGDLASINNKEEQQTIWRLITASGSYHKLFWLGLTYGSPSEGFTWSDGSPVSYENWAYGEPNNYQNVEYCGELKGDPTMSWNDINCEHLNNWICQIQKGQTPKPEPTPAPQDNPPVTEDGWVIYKDYQYYFSKEKETMDNARAFCKRNFGDLVSIQSESEKKFLWKYVNRNDAQSAYFIGLLISLDKKFAWMDGSKVDYVSWATGEPNFANEDENCVTMYSNSGFWNDINCGYPNAFICQRHNSSINATTVMPTMPSVPSGCKEGWNFYSNKCFKIFGFMEEERKNWQEARKACIGFGGNLVSIQNEKEQAFLTYHMKDSTFSAWTGLNDVNSEHTFLWTDGRGVHYTNWGKGYPGGRRSSLSYEDADCVVIIGGASNEAGKWMDDTCDSKRGYICQTRSDPSLTNPPATIQTDGFVKYGKSSYSLMRQKFQWHEAETYCKLHNSLIASILDPYSNAFAWLQMETSNERVWIALNSNLTDNQYTWTDKWRVRYTNWAADEPKLKSACVYLDLDGYWKTAHCNESFYFLCKRSDEIPATEPPQLPGRCPESDHTAWIPFHGHCYYIESSYTRNWGQASLECLRMGSSLVSIESAAESSFLSYRVEPLKSKTNFWIGLFRNVEGTWLWINNSPVSFVNWNTGDPSGERNDCVALHASSGFWSNIHCSSYKGYICKRPKIIDAKPTHELLTTKADTRKMDPSKPSSNVAGVVIIVILLILTGAGLAAYFFYKKRRVHLPQEGAFENTLYFNSQSSPGTSDMKDLVGNIEQNEHSVI

SEQ ID NO: 816880 - protein, 391 aa, Homo sapiens
MVADCVVIIGGASNEAGKWMDDTCDSKRGYICQTRSDPSLTNPPATIQTDGFVKYGYCKLHNSLIASILDPYSNAFAWLQMETSNERVWIALNSNLTDNQYTWTDKWRVRYTNWAADEPKLKSACVYLDLDGYWKTAHCNESFYFLCKRSDEIPATEPPQLPGRCPESDHTAWIPFHGHCYYIESSYTRNWGQASLECLRMGSSLVSIESAAESSFLSYRVEPLKSKTNFWIGLFRNVEGTWLWINNSPVSFVNWNTGDPSGERNDCVALHASSGFWSNIHCSSYKGYICKRPKIIDAKPTHELLTTKADTRKMDPSKPSSNVAGVVIIVILLILTGAGLAAYFFYKKRRVHLPQEGAFENTLYFNSQSSPGTSDMKDLVGNIEQNEHSVI

SEQ ID NO: 816881 - protein, 1478 aa, Homo sapiens
FSWAALGTWIRWRGSWGASLFCVLVPPSCPSGEGKDKPWAMRLPLLLVFASVIPGAVLLLDTRQFLIYNEDHKRCVDAVSPSAVQTAACNQDAESQKFRWVSESQIMSVAFKLCLGVPSKTDWVAITLYACDSKSEFQKWECKNDTLLGIKGEDLFFNYGNRQEKNIMLYKGSGLWSRWKIYGTTDNLCSRGYEAMYTLLGNANGATCAFPFKFENKWYADCTSAGRSDGWLWCGTTTDYDTDKLFGYCPLKFEGSESLWNKDPLTSVSYQINSKSALTWHQARKSCQQQNAELLSITEIHEQTYLTGLTSSLTSGLWIGLNSLSFNSGWQWSDRSPFRYLNWLPGSPSAEPGKSCVSLNPGKNAKWENLECVQKLGYICKKGNTTLNSFVIPSESDVPTHCPSQWWPYAGHCYKIHRDEKKIQRDALTTCRKEGGDLTSIHTIEELDFIISQLGYEPNDELWIGLNDIKIQMYFEWSDGTPVTFTKWLRGEPSHENNRQEDCVVMKGKDGYWADRGCEWPLGYICKMKSRSQGPEIVEVEKGCRKGWKKHHFYCYMIGHTLSTFAEANQTCNNENAYLTTIEDRYEQAFLTSFVGLRPEKYFWTGLSDIQTKGTFQWTIEEEVRFTHWNSDMPGRKPGCVAMRTGIAGGLWDVLKCDEKAKFVCKHWAEGVTHPPKPTTTPEPKCPEDWGASSRTSLCFKLYAKGKHEKKTWFESRDFCRALGGDLASINNKEEQQTIWRLITASGSYHKLFWLGLTYGSPSEGFTWSDGSPVSYENWAYGEPNNYQNVEYCGELKGDPTMSWNDINCEHLNNWICQIQKGQTPKPEPTPAPQDNPPVTEDGWVIYKDYQYYFSKEKETMDNARAFCKRNFGDLVSIQSESEKKFLWKYVNRNDAQSAYFIGLLISLDKKFAWMDGSKVDYVSWATGEPNFANEDENCVTMYSNSGFWNDINCGYPNAFICQRHNSSINATTVMPTMPSVPSGCKEGWNFYSNKCFKIFGFMEEERKNWQEARKACIGFGGNLVSIQNEKEQAFLTYHMKDSTFSAWTGLNDVNSEHTFLWTDGRGVHYTNWGKGYPGGRRSSLSYEDADCVVIIGGASNEAGKWMDDTCDSKRGYICQTRSDPSLTNPPATIQTDGFVKYGKSSYSLMRQKFQWHEAETYCKLHNSLIASILDPYSNAFAWLQMETSNERVWIALNSNLTDNQYTWTDKWRVRYTNWAADEPKLKSACVYLDLDGYWKTAHCNESFYFLCKRSDEIPATEPPQLPGRCPESDHTAWIPFHGHCYYIESSYTRNWGQASLECLRMGSSLVSIESAAESSFLSYRVEPLKSKTNFWIGLFRNVEGTWLWINNSPVSFVNWNTGDPSGERNDCVALHASSGFWSNIHCSSYKGYICKRPKIIDAKPTHELLTTKVIIVILLILTGAGLAAYFFYKKRRVHLPQEGAFENTLYFNSQSSPGTSDMKDLVGNIEQNEHSVI

SEQ ID NO: 816882 - protein, 1324 aa, Homo sapiens
FSWAALGTWIRWRGSWGASLFCVLVPPSCPSGEGKDKPWAMRLPLLLVFASVIPGAVLLLDTRQFLIYNEDHKRCVDAVSPSAVQTAACNQDAESQKFRWVSESQIMSVAFKLCLGVPSKTDWVAITLYACDSKSEFQKWECKNDTLLGIKGEDLFFNYGNRQEKNIMLYKGSGLWSRWKIYGTTDNLCSRGYEAMYTLLGNANGATCAFPFKFENKWYADCTSAGRSDGWLWCGTTTDYDTDKLFGYCPLKFEGSESLWNKDPLTSVSYQINSKSALTWHQARKSCQQQNAELLSITEIHEQTYLTGLTSSLTSGLWIGLNSLSFNSGWQWSDRSPFRYLNWLPGSPSAEPGKSCVSLNPGKNAKWENLECVQKLGYICKKGNTTLNSFVIPSESDVPTHCPSQWWPYAGHCYKIHRDEKKIQRDALTTCRKEGGDLTSIHTIEELDFIISQLGYEPNDELWIGLNDIKIQMYFEWSDGTPVTFTKWLRGEPSHENNRQEDCVVMKGKDGYWADRGCEWPLGYICKMKSRSQGPEIVEVEKGCRKGWKKHHFYCYMIGHTLSTFAEANQTCNNENAYLTTIEDRYEQAFLTSFVGLRPEKYFWTGLSDIQTKGTFQWTIEEEVRFTHWNSDMPGRKPGCVAMRTGIAGGLWDVLKCDEKAKFVCKHWAEGVTHPPKPTTTPEPKCPEDWGASSRTSLCFKLYAKGKHEKKTWFESRDFCRALGGDLASINNKEEQQTIWRLITASGSYHKLFWLGLTYGSPSEGFTWSDGSPVSYENWAYGEPNNYQNVEYCGELKGDPTMSWNDINCEHLNNWICQIQKGQTPKPEPTPAPQDNPPVTEDGWVIYKDYQYYFSKEKETMDNARAFCKRNFGDLVSIQSESEKKFLWKYVNRNDAQSAYFIGLLISLDKKFAWMDGSKVDYVSWATGEPNFANEDENCVTMYSNSGFWNDINCGYPNAFICQRHNSSINATTVMPTMPSVPSGCKEGWNFYSNKCFKIFGFMEEERKNWQEARKACIGFGGNLVSIQNEKEQAFLTYHMKDSTFSAWTGLNDVNSEHTFLWTDGRGVHYTNWGKGYPGGRRSSLSYEDADCVVIIGGASNEAGKWMDDTCDSKRGYICQTRSDPSLTNPPATIQTDGFVKYGKSSYSLMRQKFQWHEAETYCKLHNSLIASILDPYSNAFAWLQMETSNERVWIALNSNLTDNQYTWTDKWRVRYTNWAADEPKLKSACVYLDLDGYWKTAHCNESFYFLCKRSDDARSQITQHGFLSMVTVTILSPHIQETGAKLLWNVFEWVPLWFPLKVLQNPVFCHIGLSHLKVKPIFG

SEQ ID NO: 816883 - protein, 130 aa, Homo sapiens; identical to SEQ ID NO: 753405

SEQ ID NO: 816884 - protein, 112 aa, Homo sapiens
MRLFTGIVFCSLVMGVTSESWRSFFKEALQGVGDMGRAYWDIMISNHRPGGVWAAKLISRSRVYLQGLIDYYLFGNSSTVLEDSKSNEKAEEWGRSGKDPDRFRPDGLPKKY

SEQ ID NO: 816885 - protein, 252 aa, Homo sapiens
MSAAVACVDYFAADVLMAISSGAVVHRGRPGPEGAGPAAGLDVRAARREAASPGTPGPPPPPPAASGPGPGAAAAPHLLAASILADLRGGPGAAPGGASPASSSSAASSPSSGRAPGAAPSAAAKSHRCPFPDCAKAYYKSSHLKSHLRTHTGERPFACDWQGCDKKFARSDELARHHRTHTGEKRFSCPLCSKRFTRSDHLAKHARRHPGFHPDLLRRPGARSTSPSDSLPCSLAGSPAPSPAPSPAPAGL

SEQ ID NO: 816886 - protein, 122 aa, Homo sapiens
TRSGGERMAAPAAVAGAPGAQRGERPFACDWQGCDKKFARSDELARHHRTHTGEKRFSCPLCSKRFTRSDHLAKHARRHPGFHPDLLRRPGARSTSPSDSLPCSLAGSPAPSPAPSPAPAGL

SEQ ID NO: 816887 - protein, 252 aa, Homo sapiens; identical to SEQ ID NO: 816885

SEQ ID NO: 816888 - protein, 252 aa, Homo sapiens; identical to SEQ ID NO: 816885

SEQ ID NO: 816889 - protein, 252 aa, Homo sapiens; identical to SEQ ID NO: 816885

SEQ ID NO: 816890 - protein, 252 aa, Homo sapiens; identical to SEQ ID NO: 816885

SEQ ID NO: 816891 - protein, 268 aa, Homo sapiens
MYKETVYSAFNLLMHYPPPSGAGQHPQPQPPLHKANQPPHGVPQLSLYEHFNSPHPTPAPADISQKQVHRPLQTPDLSGFYSLTSGSMGQLPHTVSWFTHPSLMLGSGVPGHPAAIPHPAIVPPSGKQELQPFDRNLKTQAESKAEKEAKKPTIKKPLNAFMLYMKEMRAKVIAECTLKESAAINQILGRRWHALSREEQAKYYELARKERQLHMQLYPGWSARDNYGKKKRRSREKHQESTTDPGSPKKCRARFGLNQQTDWCGPCR

SEQ ID NO: 816892 - protein, 269 aa, Homo sapiens
MYKETVYSAFNLLMHYPPPSGAGQHPQPQPPLHKANQPPHGVPQLSLYEHFNSPHPTPAPADISQKQVHRPLQTPDLSGFYSLTSGSMGQLPHTVSWFTHPSLMLGSGVPGHPAAIPHPAIVPPSGKQELQPFDRNLKTQAESKAEKEAKKPTIKKPLNAFMLYMKEMRAKVIAECTLKESAAINQILGRRWHALSREEQAKYYELARKERQLHMQLYPGWSARDNYGKKKRRSREKHQESTTGGKRNAFGTYPEKAAAPAPFLPMTVL

SEQ ID NO: 816893 - protein, 433 aa, Homo sapiens
AELKSSLVNESEGAAGGAGIPGVPGAGAGARGEAEALGREHAAQRLFPDKLPEPLEDGLKAPECTSGMYKETVYSAFNLLMHYPPPSGAGQHPQPQPPLHKANQPPHGVPQLSLYEHFNSPHPTPAPADISQKQVHRPLQTPDLSGFYSLTSGSMGQLPHTVSWFTHPSLMLGSGVPGHPAAIPHPAIVPPSGKQELQPFDRNLKTQAESKAEKEAKKPTIKKPLNAFMLYMKEMRAKVIAECTLKESAAINQILGRRWHALSREEQAKYYELARKERQLHMQLYPGWSARDNYGKKKRRSREKHQESTTDPGSPKKCRARFGLNQQTDWCGPCRRKKKCIRYLPGEGRCPSPVPSDDSALGCPGSPAPQDSPSYHLLPRFPTELLTSPAEPAPTSPGLSTALSLPTPGPPQAPRSTLQSTQVQQQESQRQVA

SEQ ID NO: 816894 - protein, 323 aa, Homo sapiens
AELKSSLVNESEGAAGGAGIPGVPGAGAGARGEAEALGREHAAQRLFPDKLPEPLEDGLKAPECTSGMYKETVYSAFNLLMHYPPPSGAGQHPQPQPPLHKANQPPHGVPQLSLYEHFNSPHPTPAPADISQKQVHRPLQTPDLSGFYSLTSGSMGQLPHTVSWFTHPSLMLGSGVPGHPAAIPHPAIVPPSGKQELQPFDRNLKTQAESKAEKEAKKPTIKKPLNAFMLYMKEMRAKVIAECTLKESAAINQILGRRWHALSREEQAKYYELARKERQLHMQLYPGWSARDNYGKKKRRSREKHQESTTAQLEDWDGWARKP

SEQ ID NO: 816895 - protein, 321 aa, Homo sapiens
AELKSSLVNESEGAAGGAGIPGVPGAGAGARGEAEALGREHAAQRLFPDKLPEPLEDGLKAPECTSGMYKETVYSAFNLLMHYPPPSGAGQHPQPQPPLHKANQPPHGVPQLSLYEHFNSPHPTPAPADISQKQVHRPLQTPDLSGFYSLTSGSMGQLPHTVSWFTHPSLMLGSGVPGHPAAIPHPAIVPPSGKQELQPFDRNLKTQAESKAEKEAKKPTIKKPLNAFMLYMKEMRAKVIAECTLKESAAINQILGRRWHALSREEQAKYYELARKERQLHMQLYPGWSARDNYGKKKRRSREKHQESTTDGIPACTILSP

SEQ ID NO: 816896 - protein, 317 aa, Homo sapiens
AELKSSLVNESEGAAGGAGIPGVPGAGAGARGEAEALGREHAAQRLFPDKLPEPLEDGLKAPECTSGMYKETVYSAFNLLMHYPPPSGAGQHPQPQPPLHKANQPPHGVPQLSLYEHFNSPHPTPAPADISQKQVHRPLQTPDLSGFYSLTSGSMGQLPHTVSWFTHPSLMLGSGVPGHPAAIPHPAIVPPSGKQELQPFDRNLKTQAESKAEKEAKKPTIKKPLNAFMLYMKEMRAKVIAECTLKESAAINQILGRRWHALSREEQAKYYELARKERQLHMQLYPGWSARDNYGKKKRRSREKHQESTTDNSLHYS

SEQ ID NO: 816897 - protein, 297 aa, Homo sapiens
AELKSSLVNESEGAAGGAGIPGVPGAGAGARGEAEALGREHAAQRLFPDKLPEPLEDGLKAPECTSGMYKETVYSAFNLLMHYPPPSGAGQHPQPQPPLHKANQPPHGVPQLSLYEHFNSPHPTPAPADISQKQVHRPLQTPDLSGFYSLTSGSMGQLPHTVSWFTHPSLMLGSGVPGHPAAIPHPAIVPPSGKQELQPFDRNLKTQAESKAEKEAKKPTIKKPLNAFMLYMKEMRAKVIAECTLKESAAINQILGRRWHALSREEQAKYYELARKERQLHMQLYPGWSARDNYVSA

SEQ ID NO: 816898 - protein, 317 aa, Homo sapiens; identical to SEQ ID NO: 816896

SEQ ID NO: 816899 - protein, 269 aa, Homo sapiens
MYKETVYSAFNLLMHYPPPSGAGQHPQPQPPLHKANQPPHGVPQLSLYEHFNSPHPTPAPADISQKQVHRPLQTPDLSGFYSLTSGSMGQLPHTVSWFTHPSLMLGSGVPGHPAAIPHPAIVPPSGKQELQPFDRNLKTQAESKAEKEAKKPTIKKPLNAFMLYMKEMRAKVIAECTLKESAAINQILGRRWHALSREEQAKYYELARKERQLHMQLYPGWSARDNYGKKKRRSREKHQESTTETNWPRELKDGNGQESLSMSSSSSPA

SEQ ID NO: 816900 - protein, 169 aa, Homo sapiens
MGQLPHTVSWFTHPSLMLGSGVPGHPAAIPHPAIVPPSGKQELQPFDRNLKTQAESKAEKEAKKPTIKKPLNAFMLYMKEMRAKVIAECTLKESAAINQILGRRWHALSREEQAKYYELARKERQLHMQLYPGWSARDNYGKKKRRSREKHQESTTAQLEDWDGWARKP

SEQ ID NO: 816901 - protein, 433 aa, Homo sapiens; identical to SEQ ID NO: 816893

SEQ ID NO: 816902 - protein, 328 aa, Homo sapiens
AELKSSLVNESEGAAGGAGIPGVPGAGAGARGEAEALGREHAAQRLFPDKLPEPLEDGLKAPECTSGMYKETVYSAFNLLMHYPPPSGAGQHPQPQPPLHKANQPPHGVPQLSLYEHFNSPHPTPAPADISQKQVHRPLQTPDLSGFYSLTSGSMGQLPHTVSWPSPPLYPLSPSCGYRQHFPAPTAAPGAPYPRFTHPSLMLGSGVPGHPAAIPHPAIVPPSGKQELQPFDRNLKTQAESKAEKEAKKPTIKKPLNAFMLYMKEMRAKVIAECTLKESAAINQILGRRWHALSREEQAKYYELARKERQLHMQLYPGWSARDNYVSA

SEQ ID NO: 816903 - protein, 147 aa, Homo sapiens
MWRALKNPTQTAHPVWSTGPPRVWGADRSTLRAVMSASVVSVISRFLEEYLSSTPQRLKLLDAYLLYILLTGALQFGYCLLVGTFPFNSFLSGFISCVGSFILAVCLRIQINPQNKADFQGISPERAFADFLFASTILHLVVMNFVG

SEQ ID NO: 816904 - protein, 147 aa, Homo sapiens
TAGEDDRRGQTAHPVWSTGPPRVWGADRSTLRAVMSASVVSVISRFLEEYLSSTPQRLKLLDAYLLYILLTGALQFGYCLLVGTFPFNSFLSGFISCVGSFILAVCLRIQINPQNKADFQGISPERAFADFLFASTILHLVVMNFVG

SEQ ID NO: 816905 - protein, 147 aa, Homo sapiens; identical to SEQ ID NO: 816904

SEQ ID NO: 816906 - protein, 147 aa, Homo sapiens; identical to SEQ ID NO: 816904

SEQ ID NO: 816907 - protein, 113 aa, Homo sapiens
MSASVVSVISRFLEEYLSSTPQRLKLLDAYLLYILLTGALQFGYCLLVGTFPFNSFLSGFISCVGSFILAVCLRIQINPQNKADFQGISPERAFADFLFASTILHLVVMNFVG

SEQ ID NO: 816908 - protein, 147 aa, Homo sapiens; identical to SEQ ID NO: 816904

SEQ ID NO: 816909 - protein, 147 aa, Homo sapiens; identical to SEQ ID NO: 816904

SEQ ID NO: 816910 - protein, 147 aa, Homo sapiens; identical to SEQ ID NO: 816903

SEQ ID NO: 816911 - protein, 147 aa, Homo sapiens; identical to SEQ ID NO: 816903

SEQ ID NO: 816912 - protein, 117 aa, Homo sapiens
TAGEDDRRGQTAHPVWSTGPPRVWGADRSTLRAVMSASVVSVISRFLEEYLSSTPQRLKLLDAYLLYILLTGALQFGYCLLVGTFPFNSFLSGFISCVGSFILAAWTLCCCLKCIPI

SEQ ID NO: 816913 - protein, 99 aa, Homo sapiens
TAGEDDRRGQTAHPVWSTGPPRVWGADRSTLRAVMSASVVSVISRFLEEYLSSTPQRLKLLDAYLLYILLTGALHLPENTDQPTEQSGFPRHLPRASLC

SEQ ID NO: 816914 - protein, 117 aa, Homo sapiens
MAETPPFSVARWQKMSLACRLSLIILFTGAVREYEHGQERETNRRPATAQVVSVKQHRTEDDQHDTTQRQPQPTAPYDATEPLNAHHNDQPDQDRHTKSTAGSQTSTDRPLTGCRAP

SEQ ID NO: 816915 - protein, 99 aa, Homo sapiens; identical to SEQ ID NO: 816913

SEQ ID NO: 816916 - protein, 112 aa, Homo sapiens
TAGEDDRRGQTAHPVWSTGPPRVWGADRSTLRAVMSASVVSVISRFLEEYLSSTPQRLKLLDAYLLYILLTGALQFGYCLLVGTFPFNSFLSGFISCVGSFILAGSLFEFPG

SEQ ID NO: 816917 - protein, 112 aa, Homo sapiens; identical to SEQ ID NO: 816916

SEQ ID NO: 816918 - protein, 128 aa, Homo sapiens
TAGEDDRRGQTAHPVWSTGPPRVWGADRSTLRAVMSASVVSVISRFLEEYLSSTPQRLKLLDAYLLYILLTGALQFGYCLLVGTFPFNSFLSGFISCVGSFILAGNGSISDHNNNVLLWCAAFVFIVL

SEQ ID NO: 816919 - protein, 180 aa, Homo sapiens
SLKPQLLGPGHPVSPYLLFLSSSDCAMGLSDGEWQLVLNVWGKVEADIPGHGQEVLIRLFKGHPETLEKFDKFKHLKSEDEMKASEDLKKHGATVLTALGGILKKKGHHEAEIKPLAQSHATKHKIPVKYLEFISECIIQVLQSKHPGDFGADAQGAMNKALELFRKDMASNYKELGFQG

SEQ ID NO: 816920 - protein, 167 aa, Homo sapiens
ARTAGEKGSCDCAMGLSDGEWQLVLNVWGKVEADIPGHGQEVLIRLFKGHPETLEKFDKFKHLKSEDEMKASEDLKKHGATVLTALGGILKKKGHHEAEIKPLAQSHATKHKIPVKYLEFISECIIQVLQSKHPGDFGADAQGAMNKALELFRKDMASNYKELGFQG

SEQ ID NO: 816921 - protein, 140 aa, Homo sapiens
GGHLEDRYPRVWVGSPHLLFKGHPETLEKFDKFKHLKSEDEMKASEDLKKHGATVLTALGGILKKKGHHEAEIKPLAQSHATKHKIPVKYLEFISECIIQVLQSKHPGDFGADAQGAMNKALELFRKDMASNYKELGFQG

SEQ ID NO: 816922 - protein, 161 aa, Homo sapiens
SLKPQLLGPGHPVSPYLLFLSSSDCAMGLSDGEWQLVLNVWGKVEADIPGHGQEVLIRLFKGHPETLEKFDKFKHLKSEDEMKASEDLKKHGATVLTALGGILKKKGHHEAEIKPLAQSHATKHKIPVKYLEFISECIIQVLQSKHPGDFGADAQGAMNKG

SEQ ID NO: 816923 - protein, 180 aa, Homo sapiens; identical to SEQ ID NO: 816919

SEQ ID NO: 816924 - protein, 109 aa, Homo sapiens
SLKPQLLGPGHPVSPYLLFLSSSDCAMGLSDGEWQLVLNVWGKVEADIPGHGQEVLIRLFKGHPETLEKFDKFKHLKSEDEMKAASLWDVITLGTGSGPWLTVFCMVWI

SEQ ID NO: 816925 - protein, 207 aa, Homo sapiens
SLKPQLLGPGHPVSPYLLFLSSSDCAMGLSDGEWQLVLNVWGKVEADIPGHGQEVLIRLFKGHPETLEKFDKFKHLKSEDEMKASEDLKKHGATVLTALGGILKKKGHHEAEIKPLAQSHATKHKIPVKYLEFISECIIQVLQSKHPGDFGADAQGAMNKALELFRKDMAPTHLGPGFKRERGLISCSHIEFASECLLCLVEVGRRS

SEQ ID NO: 816926 - protein, 154 aa, Homo sapiens
MGLSDGEWQLVLNVWGKVEADIPGHGQEVLIRLFKGHPETLEKFDKFKHLKSEDEMKASEDLKKHGATVLTALGGILKKKGHHEAEIKPLAQSHATKHKIPVKYLEFISECIIQVLQSKHPGDFGADAQGAMNKALELFRKDMASNYKELGFQG

SEQ ID NO: 816927 - protein, 166 aa, Homo sapiens
MELGCQVCKYCAMGLSDGEWQLVLNVWGKVEADIPGHGQEVLIRLFKGHPETLEKFDKFKHLKSEDEMKASEDLKKHGATVLTALGGILKKKGHHEAEIKPLAQSHATKHKIPVKYLEFISECIIQVLQSKHPGDFGADAQGAMNKALELFRKDMASNYKELGFQG

SEQ ID NO: 816928 - protein, 133 aa, Homo sapiens
CEDSWGEGELWLFKGHPETLEKFDKFKHLKSEDEMKASEDLKKHGATVLTALGGILKKKGHHEAEIKPLAQSHATKHKIPVKYLEFISECIIQVLQSKHPGDFGADAQGAMNKALELFRKDMASNYKELGFQG

SEQ ID NO: 816929 - protein, 181 aa, Homo sapiens
MGLSDGEWQLVLNVWGKVEADIPGHGQEVLIRLFKGHPETLEKFDKFKHLKSEDEMKASEDLKKHGATVLTALGGILKKKGHHEAEIKPLAQSHATKHKIPVKYLEFISECIIQVLQSKHPGDFGADAQGAMNKALELFRKDMAPTHLGPGFKRERGLISCSHIEFASECLLCLVEVGRRS

SEQ ID NO: 816930 - protein, 283 aa, Homo sapiens
MWPPGSASQPPPSPAAATGLHPAARPVSLQCRLSMCPARSLLLVATLVLLDHLSLARNLPVATPDPGMFPCLHHSQNLLRAVSNMLQKARQTLEFYPCTSEEIDHEDITKDKTSTVEACLPLELTKNESCLNSRETSFITNGSCLASRKTSFMMVRHTALSSNAMGEMFLAHLNGYFPILSCHQALCLSSIYEDLKMYQVEFKTMNAKLLMDPKRQIFLDQNMLAVIDELMQALNFNSETVPQKSSLEEPDFYKTKIKLCILLHAFRIRAVTIDRVMSYLNAS

SEQ ID NO: 816931 - protein, 253 aa, Homo sapiens
MWPPGSASQPPPSPAAATGLHPAARPVSLQCRLSMCPARSLLLVATLVLLDHLSLARNLPVATPDPGMFPCLHHSQNLLRAVSNMLQKARQTLEFYPCTSEEIDHEDITKDKTSTVEACLPLELTKNESCLNSRETSFITNGSCLASRKTSFMMALCLSSIYEDLKMYQVEFKTMNAKLLMDPKRQIFLDQNMLAVIDELMQALNFNSETVPQKSSLEEPDFYKTKIKLCILLHAFRIRAVTIDRVMSYLNAS

SEQ ID NO: 816932 - protein, 127 aa, Homo sapiens
MWPPGSASQPPPSPAAATGLHPAARPVSLQCRLSMCPARSLLLVATLVLLDHLSLARNLPVATPDPGMFPCLHHSQNLLRAVSNMLQKARQTLEFYPCTSEEIDHEDITKDKTSTVEACLPLELTKV

SEQ ID NO: 816933 - protein, 277 aa, Homo sapiens
MSKSLKKLVEESREKNQPEVDMSDRGISNMLDVNGLFTLSHITQLVLSHNKLTMVPPNIAELKNLEVLNFFNNQIEELPTQISSLQKLKHLNLGMNRLNTLPRGFGSLPALEVLDLTYNNLSENSLPGNFFYLTTLRALYLSDNDFEILPPDIGKLTKLQILSLRDNDLISLPKEIGELTQLKELHIQGNRLTVLPPELGNLDLTGQKQVFKAENNPWVTPIADQFQLGVSHVFEYIRSETYKYLYGRHMQANPEPPKKNNDKSKKISRKPLAAKNR

SEQ ID NO: 816934 - protein, 426 aa, Homo sapiens
AWPWRHVWRAVLLIWVGSGVELAAALCAPARGAETGRVRCSVPVLQGVRAAGVRSAEACGCTPIVLGATFRGECVRCCTWGCFSLRGRSGAEPFPLHPLPAPGPAPGTPSDAHPLQPWGSLRVAAKASCLSASALAVIAHVLCCCSVQTMSKSLKKLVEESREKNQPEVDMSDRGISNMLDVNGLFTLSHITQLVLSHNKLTMVPPNIAELKNLEVLNFFNNQIEELPTQISSLQKLKHLNLGMNRLNTLPRGFGSLPALEVLDLTYNNLSENSLPGNFFYLTTLRALYLSDNDFEILPPDIGKLTKLQILSLRDNDLISLPKEIGELTQLKELHIQGNRLTVLPPELGNLDLTGQKQVFKAENNPWVTPIADQFQLGVSHVFEYIRSETYKYLYGRHMQANPEPPKKNNDKSKKISRKPLAAKNR

SEQ ID NO: 816935 - protein, 277 aa, Homo sapiens; identical to SEQ ID NO: 816933

SEQ ID NO: 816936 - protein, 277 aa, Homo sapiens; identical to SEQ ID NO: 816933

SEQ ID NO: 816937 - protein, 277 aa, Homo sapiens; identical to SEQ ID NO: 816933

SEQ ID NO: 816938 - protein, 426 aa, Homo sapiens; identical to SEQ ID NO: 816934

SEQ ID NO: 816939 - protein, 237 aa, Homo sapiens
MESTGTLIINLLPVVPPNIAELKNLEVLNFFNNQIEELPTQISSLQKLKHLNLGMNRLNTLPRGFGSLPALEVLDLTYNNLSENSLPGNFFYLTTLRALYLSDNDFEILPPDIGKLTKLQILSLRDNDLISLPKEIGELTQLKELHIQGNRLTVLPPELGNLDLTGQKQVFKAENNPWVTPIADQFQLGVSHVFEYIRSETYKYLYGRHMQANPEPPKKNNDKSKKISRKPLAAKNR

SEQ ID NO: 816940 - protein, 225 aa, Homo sapiens
MSKSLKKLVEESREKNQPEVDMSDRGISNMLDVNGLFTLSHITQLVLSHNKLTMVPPNIAELKNLEVLNFFNNQIEELPTQISSLQKLKHLNLGMNRLNTLPRGFGSLPALEVLDLTYNNLSENSLPGNFFYLTTLRALYLSDNDFEILPPDIGKLTKLQILSLRDNDLISLPKEIGELTQLKELHIQGNRLTVLPPELGNLDLTGQKQPLRQTHAGQPRTTEEE

SEQ ID NO: 816941 - protein, 93 aa, Homo sapiens
  misc_feature (20)..(20): Xaa can be any naturally occurring amino acid
RVYPSREAVRRGKESYSYRXPCWPTQNHRRRIMTNRKRSAGNPWQPRTDKEGIGIGWPSSTFSLQHFILSCPVSQINPMLRVRPFLFFFSLSF

SEQ ID NO: 816942 - protein, 205 aa, Homo sapiens
MSKSLKKLVEESREKNQPEVDMSDRGISNMLDVNGLFTLSHITQLVLSHNKLTMVPPNIAELKNLEVLNFFNNQIEELPTQISSLQKLKHLNLGMNRLNTLPRGFGSLPALEVLDLTYNNLSENSLPGNFFYLTTLRALYLSDNDFEILPPDIGKLTKLQILSLRDNDLISLPKEIGELTQLKELHIQGNRLTVLPPELGKVADE

SEQ ID NO: 816943 - protein, 90 aa, Homo sapiens
TMSKSLKKLVEESREKNQPEVDMSDRGISNMLDVNGLCEFSGRTLPWMELEGFLSLPIHCWSCCERLYWFRPQPLLVNLTCQGLRAEGLQ

SEQ ID NO: 816944 - protein, 277 aa, Homo sapiens; identical to SEQ ID NO: 816933

SEQ ID NO: 816945 - protein, 95 aa, Homo sapiens
AWPWRHVWRAVLLIWVGSGVELAAALCAPARGAETGRVRCSVPVLQGVRAAGVRSAEACGCTPIVLGATFRDHVQVSEEVGGGEPGEEPARGGHE

SEQ ID NO: 816946 - protein, 312 aa, Homo sapiens
AWPWRHVWRAVLLIWVGSGVELAAALCAPARGAETGRVRCSVPVLQGVRAAGVRSAEACGCTPIVLGATFRVTLSHITQLVLSHNKLTMVPPNIAELKNLEVLNFFNNQIEELPTQISSLQKLKHLNLGMNRLNTLPRGFGSLPALEVLDLTYNNLSENSLPGNFFYLTTLRALYLSDNDFEILPPDIGKLTKLQILSLRDNDLISLPKEIGELTQLKELHIQGNRLTVLPPELGNLDLTGQKQVFKAENNPWVTPIADQFQLGVSHVFEYIRSETYKYLYGRHMQANPEPPKKNNDKSKKISRKPLAAKNR

SEQ ID NO: 816947 - protein, 243 aa, Homo sapiens
MSKSLKKLVEESREKNQPEVDMSDRGISNMLDVNGLFTLSHITQLVLSHNKLTMVPPNIAELKNLEVLNFFNNQIEELPTQISSLQKLKHLNLGMNRLNTLPRGFGSLPALEVLDLTYNNLSENSLPGNFFYLTTLRALYLSDNDFEILPPDIGKLTKLQILSLRDNDLISLPKEIGELTQLKELHIQGNRLTVLPPELGNLDLTGQKQVFKAENNPWVTPIADQFQLGVSHVFEYIRSETYK

SEQ ID NO: 816948 - protein, 225 aa, Homo sapiens; identical to SEQ ID NO: 816940

SEQ ID NO: 816949 - protein, 205 aa, Homo sapiens; identical to SEQ ID NO: 816942

SEQ ID NO: 816950 - protein, 351 aa, Homo sapiens
ILCVSSDAQPQTFGRVKGAHPPTLPPGSFLPIPVLWWGSIARLQIEKSDEVSRKGNWQVTEMGGGTGERLFTPSCLVGLVPLGLRISLVTCPLQCGIMWQLLLPTALLLLVSAGMRTEDLPKAVVFLEPQWYSVLEKDSVTLKCQGAYSPEDNSTQWFHNESLISSQASSYFIDAATVNDSGEYRCQTNLSTLSDPVQLEVHIGWLLLQAPRWVFKEEDPIHLRCHSWKNTALHKVTYLQNGKDRKYFHHNSDFHIPKATLKDSGSYFCRGLVGSKNVSSETVNITITQGLAVSTISSFFPPGYQVSFCLVMVLLFAVDTGLYFSVKTNIRSSTRDWKDHKFKWRKDPQDK

SEQ ID NO: 816951 - protein, 351 aa, Homo sapiens; identical to SEQ ID NO: 816950

SEQ ID NO: 816952 - protein, 254 aa, Homo sapiens
MWQLLLPTALLLLVSAGMLTEDLPKAVVFLEPQWYSVLEKDSVTLKCQGAYSPEDNSTQWFHNESLISSQASSYFIDAATVNDSGEYRCQTNLSTLSDPVQLEVHIGWLLLQAPRWVFKEEDPIHLRCHSWKNTALHKVTYLQNGKDRKYFHHNSDFHIPKATLKDSGSYFCRGLVGSKNVSSETVNITITQGLAVSTISSFSPPGYQVSFCLVMVLLFAVDTGLYFSVKTNIRSSTRDWKDHKFKWRKDPQDK

SEQ ID NO: 816953 - protein, 136 aa, Homo sapiens
KQWYQRRVPITAGGGIMWQLLLPTALLLLVSAGMRTEDLPKAVVFLEPQWYSVLEKDSVTLKCQGAYSPEDNSTQWFHNESLISSQASSYFIDAATVNDSGEYRCQTNLSTLSDPVQLEVHIGELMKGKRKITNKG

SEQ ID NO: 816954 - protein, 351 aa, Homo sapiens; identical to SEQ ID NO: 816950

SEQ ID NO: 816955 - protein, 351 aa, Homo sapiens; identical to SEQ ID NO: 816950

SEQ ID NO: 816956 - protein, 270 aa, Homo sapiens
KQWYQRRVPITAGGGIMWQLLLPTALLLLVSAGMRTEDLPKAVVFLEPQWYSVLEKDSVTLKCQGAYSPEDNSTQWFHNESLISSQASSYFIDAATVNDSGEYRCQTNLSTLSDPVQLEVHIGWLLLQAPRWVFKEEDPIHLRCHSWKNTALHKVTYLQNGKDRKYFHHNSDFHIPKATLKDSGSYFCRGLVGSKNVSSETVNITITQGLAVSTISSFSPPGYQVSFCLVMVLLFAVDTGLYFSVKTNIRSSTRDWKDHKFKWRKDPQDK

SEQ ID NO: 816957 - protein, 126 aa, Homo sapiens
MWQLLLPTALLLLVSAGMLTEDLPKAVVFLEPQWYSVLEKDSVTLKCQGAYSPEDNSTQWFHNESLISSQASSYFIDAATVNDSGEYRCQTNLSTLSDPVQLEVHIGHFPTMTSCSLFVKSDYLVT

SEQ ID NO: 816958 - protein, 985 aa, Homo sapiens
FIRCTVSMSLPKQLKLTCNEHLQSGRNLGVSAPQMQKESVIKEENSLRIVPKKPQRHSLPATGVLKKAASEELLEKSSYPSSEEKSSEKSLERNHLQHLCAQNRGVSSSFDMPKRASEKPVWKLPHPILPFSGNPEFLKSVTVSSNSEPSTALTKPRAKSLSAMDVEKCTKPCKDSTKKNSFKKLLSMKLSICFMKSDFQKFWSKSSQLGDTTTGHLSSGEQKGIESDWQGLLVGEEKRSKPIKAYSTENYSLESQKKRKKSRGQTSAANGLRAESLDDQMLSRESSSQAPYKSVTSLCAPEYENIRHYEEIPEYENLPFIMAIRKTQELEWQNSSSMEDADANVYEVEEPYEAPDGQLQLGPRHQHSSSGASQEEQNDLGLGDLPSDEEEIINSSDEDDVSSESSKGEPDPLEDKQDEDNGMKSKVHHIAKEIMSSEKVFVDVLKLLHIDFRDAVAHASRQLGKPVIEDRILNQILYYLPQLYELNRDLLKELEERMLHWTEQQRIADIFVKKGPYLKMDSTYIKEFDKNIALLDEQCKKNPGFAAVVREFEMSPRCANLALKHYLLKPVQRIPQYRLLLTDYLKNLIEDAGDYRDTQDALAVVIEVANHANDTMKQGDNFQKLMQIQYSLNGHHEIVQPGRVFLKEGILMKLSRKVMQPRMFFLFNDALLYTTPVQSGMYKLNNMLSLAGMKVRKPTQEAYQNELKIESVERSFILSASSATERDEWLEAISRAIEEYAKKRITFCPSRSLDEADSENKEEVSPLGSKAPIWIPDTRATMCMICTSEFTLTWRRHHCRACGKIVCQACSSNKYGLDYLKNQPARVCEHCFQELQKLDHQHSPRIGSPGNHKSPSSALSSVLHSIPSGRKQKKIPAALKEVSANTEDSSMSGYLYRSKGNKKPWKHFWFVIKNKVLYTYAASEDVAALESQPLLGFTVIQVKDENSESKVFQLLHKNMLFYVFKAEDAHSAQKWIEAFQEGTIL

SEQ ID NO: 816959 - protein, 929 aa, Homo sapiens
FIRCTVSMSLPKQLKLTCNEHLQSGRNLGVSAPQMQKESVIKEENSLRIVPKKPQRHSLPATGVLKKAASEELLEKSSYPSSEEKSSEKSLERNHLQHLCAQNRGVSSSFDMPKRASEKPVWKLPHPILPFSGNPEFLKSVTVSSNSEPSTALTKPRAKSLSAMDVEKCTKPCKDSTKKNSFKKLLSMKLSICFMKSDFQKFWSKSSQLGDTTTGHLSSGEQKGIESDWQGLLVGEEKRSKPIKAYSTENYSLESQKKRKKSRGQTSAANGLRAESLDDQMLSRESSSQAPYKSVTSLCAPEYENIRHYEEIPEYENLPFIMAIRKTQELEWQNSSSMEDADANVYEVEEPYEAPDGQLQLGPRHQHSSSGASQEEQNDLGLGDLPSDEEEIINSSDEDDVSSESSKGEPDPLEDKQDEDNGMKSKVHHIAKEIMSSEKVFVDVLKLLHIDFRDAVAHASRQLGKPVIEDRILNQILYYLPQLYELNRDLLKELEERMLHWTEQQRIADIFVKKGPYLKMDSTYIKEFDKNIALLDEQCKKNPGFAAVVREFEMSPRCANLALKHYLLKPVQRIPQYRLLLTDYLKNLIEDAGDYRDTQDALAVVIEVANHANDTMKQGDNFQKLMQIQYSLNGHHEIVQPGRVFLKEGILMKLSRKVMQPRMFFLFNDALLYTTPVQSGMYKLNNMLSLAGMKVRKPTQEAYQNELKIESVERSFILSASSATERDEWLEAISRAIEEYAKKRITFCPSRSLDEADSENKEEVSPLGSKAPIWIPDTRATMCMICTSEFTLTWRRHHCRACGKIVCQACSSNKYGLDYLKNQPARVCEHCFQELQKLDHQHSPRIGSPGNHKSPSSALSSVLHSIPSGRKQKKIPAALKEVSANTEDSSMSGYLYRSKGNKKPWKHFWFVIKNKVLYTYAASEVRSEI

SEQ ID NO: 816960 - protein, 393 aa, Homo sapiens
FIRCTVSMSLPKQLKLTCNEHLQSGRNLGVSAPQMQKESVIKEENSLRIVPKKPQRHSLPATGVLKKAASEELLEKSSYPSSEEKSSEKSLERNHLQHLCAQNRGVSSSFDMPKRASEKPVWKLPHPILPFSGNPEFLKSVTVSSNSEPSTALTKPRAKSLSAMDVEKCTKPCKDSTKKNSFKKLLSMKLSICFMKSDFQKFWSKSSQLGDTTTGHLSSGEQKGIESDWQGLLVGEEKRSKPIKAYSTENYSLESQKKRKKSRGQTSAANGLRAESLDDQMLSRESSSQAPYKSVTSLCAPEYENIRHYEEIPEYENLPFIMAIRKTQELEWQNSSSMEDADANVYEVEEPYEAPDGQLQLGPRHQHSRSRSVNPGWSAVARSQLTAASTSQT

SEQ ID NO: 816961 - protein, 929 aa, Homo sapiens; identical to SEQ ID NO: 816959

SEQ ID NO: 816962 - protein, 114 aa, Homo sapiens
MSLPSSRAARVPGPSGSLCALLALLLLLTPPGPLASAGPVSAVLTELRCTCLRVTLRVNPKTIGKLQVFPAGPQCSKVEVVASLKNGKQVCLDPEAPFLKKVIQKILDSGNKKN

SEQ ID NO: 816963 - protein, 114 aa, Homo sapiens; identical to SEQ ID NO: 816962

SEQ ID NO: 816964 - protein, 114 aa, Homo sapiens; identical to SEQ ID NO: 816962

SEQ ID NO: 816965 - protein, 127 aa, Homo sapiens [sequence omitted]

SEQ ID NO: 816966 - protein, 233 aa, Homo sapiens
RACVAPVPVAPVPVAPLPPLTMGPGPRLLLPLVLCVGLGALVFSSGAEGFRKRGPSVTAKVFFDVRIGDKDVGRIVIGLFGKVVPKTVENFVALATGEKGYGYKGSKFHRVIKDFMIQGGDITTGDGTGGVSIYGETFPDENFKLKHYGIGWVSMANAGPDTNGSQFFITLTKPTWLDGKHVVFGKVIDGMTVVHSIELQATDGHDRPLTSCSIINSGKIDVKTPFVVEIADW

SEQ ID NO: 816967 - protein, 246 aa, Homo sapiens
GVGESGGRRHSGPGRREPQRETDFKMKVAPDKTCMQFSIRRPKLPSSETHPEESMYKRLGVSAWLNHLNELGQVEEEYKLRKAIFFGGIDVSIRGEVWPFLLRYYSHESTSEEREALRLQKRKEYSEIQQKRLSMTPEEHRAFWRNVQFTVDKDVVRTDRNNQFFRGEDNPNVESMRRILLNYAVYNPAVGYSQGMSDLVAPILAEVLDESDTFWCFVGLMQNTIFVSSPRDEDMEKQLVRLRGMG

SEQ ID NO: 816968 - protein, 463 aa, Homo sapiens
GVGESGGRRHSGPGRREPQRETDFKMKVAPDKTCMQFSIRRPKLPSSETHPEESMYKRLGVSAWLNHLNELGQVEEEYKLRKAIFFGGIDVSIRGEVWPFLLRYYSHESTSEEREALRLQKRKEYSEIQQKRLSMTPEEHRAFWRNVQFTVDKDVVRTDRNNQFFRGEDNPNVESMRRILLNYAVYNPAVGYSQGMSDLVAPILAEVLDESDTFWCFVGLMQNTIFVSSPRDEDMEKQLLYLRELLRLTHVRFYQHLVSLGEDGLQMLFCHRWLLLCFKREFPEAEALRIWEACWAHYQTDYFHLFICVAIVAIYGDDVIEQQLATDQMLLHFGNLAMHMNGELVLRKARSLLYQFRLLPRIPCSLHDLCKLCGSGMWDSGSMPAVECTGHHPGSESCPYGGTVEMPSPKSLREGKKGPKTPQDGSASADRSGPRHRTGVEGTSSEALGTGGGGAGREGDRGR

SEQ ID NO: 816969 - protein, 429 aa, Homo sapiens
MQFSIRRPKLPSSETHPEESMYKRLGVSAWLNHLNELGQVEEEYKLRKAIFFGGIDVSIRGEVWPFLLRYYSHESTSEEREALRLQKRKEYSEIQQKRLSMTPEEHRAFWRNVQFTVDKDVVRTDRNNQFFRGEDNPNVESMRRILLNYAVYNPAVGYSQGMSDLVAPILAEVLDESDTFWCFVGLMQNTIFVSSPRDEDMEKQLLYLRELLRLTHVRFYQHLVSLGEDGLQMLFCHRWLLLCFKREFPEAEALRIWEACWAHYQTDYFHLFICVAIVAIYGDDVIEQQLATDQMLLHFGNLAMHMNGELVLRKARSLLYQFRLLPRIPCSLHDLCKLCGSGMWDSGSMPAVECTGHHPGSESCPYGGTVEMPSPKSLREGKKGPKTPQDGSASADRSGPRHRTGVEGTSSEALGTGGGGAGREGDRGR

SEQ ID NO: 816970 - protein, 453 aa, Homo sapiens
DVFQQWKYCTEMQLKDQVAPDKTCMQFSIRRPKLPSSETHPEESMYKRLGVSAWLNHLNELGQVEEEYKLRKAIFFGGIDVSIRGEVWPFLLRYYSHESTSEEREALRLQKRKEYSEIQQKRLSMTPEEHRAFWRNVQFTVDKDVVRTDRNNQFFRGEDNPNVESMRRILLNYAVYNPAVGYSQGMSDLVAPILAEVLDESDTFWCFVGLMQNTIFVSSPRDEDMEKQLLYLRELLRLTHVRFYQHLVSLGEDGLQMLFCHRWLLLCFKREFPEAEALRIWEACWAHYQTDYFHLFICVAIVAIYGDDVIEQQLATDQMLLHFGNLAMHMNGELVLRKARSLLYQFRLLPRIPCSLHDLCKLCGSGMWDSGSMPAVECTGHHPGSESCPYGGTVEMPSPKSLREGKKGPKTPQDGSASADRSGPRHRTGVEGTSSEALGTGGGGAGREGDRGR

SEQ ID NO: 816971 - protein, 439 aa, Homo sapiens
DVFQQWKYCTEMQLKDQVAPDKTCMQFSIRRPKLPSSETHPEESMYKRLGVSAWLNHLNELGQVEEEYKLRKVWPFLLRYYSHESTSEEREALRLQKRKEYSEIQQKRLSMTPEEHRAFWRNVQFTVDKDVVRTDRNNQFFRGEDNPNVESMRRILLNYAVYNPAVGYSQGMSDLVAPILAEVLDESDTFWCFVGLMQNTIFVSSPRDEDMEKQLLYLRELLRLTHVRFYQHLVSLGEDGLQMLFCHRWLLLCFKREFPEAEALRIWEACWAHYQTDYFHLFICVAIVAIYGDDVIEQQLATDQMLLHFGNLAMHMNGELVLRKARSLLYQFRLLPRIPCSLHDLCKLCGSGMWDSGSMPAVECTGHHPGSESCPYGGTVEMPSPKSLREGKKGPKTPQDGSASADRSGPRHRTGVEGTSSEALGTGGGGAGREGDRGR

SEQ ID NO: 816972 - protein, 303 aa, Homo sapiens
GVGESGGRRHSGPGRREPQRETDFKMKVAPDKTCMQFSIRRPKLPSSETHPEESMYKRLGVSAWLNHLNELGQVEEEYKLRKAIFFGGIDVSIRGEVWPFLLRYYSHESTSEEREALRLQKRKEYSEIQQKRLSMTPEEHRAFWRNVQFTVDKDVVRTDRNNQFFRGEDNPNVESMRRILLNYAVYNPAVGYSQGMSDLVAPILAEVLDESDTFWCFVGLMQNTIFVSSPRDEDMEKQLLYLRELLRLTHVRFYQHLVSLGEDGLQMLFCHRWLLLCFKREFPEAEALRIWEACWAHYQGADV

SEQ ID NO: 816973 - protein, 85 aa, Homo sapiens
STHPGGLDPFAGAGSIHHGSSSSLRQRTLKMEANTHLLEDICVSVSCPHSHRRGLMSDESESEATECRYHTPPLHAVIGSPLARV

SEQ ID NO: 816974 - protein, 463 aa, Homo sapiens; identical to SEQ ID NO: 816968

SEQ ID NO: 816975 - protein, 415 aa, Homo sapiens
MQFSIRRPKLPSSETHPEESMYKRLGVSAWLNHLNELGQVEEEYKLRKVWPFLLRYYSHESTSEEREALRLQKRKEYSEIQQKRLSMTPEEHRAFWRNVQFTVDKDVVRTDRNNQFFRGEDNPNVESMRRILLNYAVYNPAVGYSQGMSDLVAPILAEVLDESDTFWCFVGLMQNTIFVSSPRDEDMEKQLLYLRELLRLTHVRFYQHLVSLGEDGLQMLFCHRWLLLCFKREFPEAEALRIWEACWAHYQTDYFHLFICVAIVAIYGDDVIEQQLATDQMLLHFGNLAMHMNGELVLRKARSLLYQFRLLPRIPCSLHDLCKLCGSGMWDSGSMPAVECTGHHPGSESCPYGGTVEMPSPKSLREGKKGPKTPQDGSASADRSGPRHRTGVEGTSSEALGTGGGGAGREGDRGR

SEQ ID NO: 816976 - protein, 102 aa, Homo sapiens
MLSEEEKEELKAELVQLEDEITTLRQVLSAKERHLVEIKQKLGMNLMNELKQNFSKSWHDMQTTTAYKKTHETLSHAGQKATAAFSNVGTAISKKFGDMRRK

SEQ ID NO: 816977 - protein, 217 aa, Homo sapiens
LVWARWTGRGGGNQKRLVAAACVPNPLRAALATRVPGVGASGGASCVLSLGAAAICSGKHQGVPAALSSKSATMEAQAQGLLETEPLQGTDEDAVASADFSSMLSEEEKEELKAELVQLEDEITTLRQVLSAKERHLVEIKQKLGMNLMNELKQNFSKSWHDMQTTTAYKKTHETLSHAGQKATAAFSNVGTAISKKFGDMSYSIRHSISMPAMRRK

SEQ ID NO: 816978 - protein, 102 aa, Homo sapiens; identical to SEQ ID NO: 816976

SEQ ID NO: 816979 - protein, 204 aa, Homo sapiens
LVWARWTGRGGGNQKRLVAAACVPNPLRAALATRVPGVGASGGASCVLSLGAAAICSGKHQGVPAALSSKSATMEAQAQGLLETEPLQGTDEDAVASADFSSMLSEEEKEELKAELVQLEDEITTLRQVLSAKERHLVEIKQKLGMNLMNELKQNFSKSWHDMQTTTAYKKTHETLSHAGQKATAAFSNVGTAISKKFGDMRRK

SEQ ID NO: 816980 - protein, 175 aa, Homo sapiens
RLVAPKLGSERIARRGGGSAARLRETLPARGPAFRGQVNVTGPLTSSRSTRLLETEPLQGTDEDAVASADFSSMLSEEEKEELKAELVQLEDEITTLRQVLSAKERHLVEIKQKLGMNLMNELKQNFSKSWHDMQTTTAYKKTHETLSHAGQKATAAFSNVGTAISKKFGDMRRK

SEQ ID NO: 816981 - protein, 239 aa, Homo sapiens
LVWARWTGRGGGNQKRLVAAACVPNPLRAALATRVPGVGASGGASCVLSLGAAAICSGKHQGVPAALSSKSATMEAQAQGLLETEPLQGTDEDAVASADFSSMLSEEEKEELKAELVQLEDEITTLRQVLSAKERHLVEIKQKLGMNLMNELKQNFSKSWHDMQTTTAYKKTHETLSHAGQKATAAFSNVGTAISKKFGDMSYSIRHSISMPAMRNSPTFKSFEERVETTVTSLKVQMK

SEQ ID NO: 816982 - protein, 204 aa, Homo sapiens; identical to SEQ ID NO: 816979

SEQ ID NO: 816983 - protein, 277 aa, Homo sapiens
LVWARWTGRGGGNQKRLVAAACVPNPLRAALATRVPGVGASGGASCVLSLGAAAICSGKHQGVPAALSSKSATMEAQAQGLLETEPLQGTDEDAVASADFSSMLSEEEKEELKAELVQLEDEITTLRQVLSAKERHLVEIKQKLGMNLMNELKQNFSKSWHDMQTTTAYKKTHETLSHAGQKATAAFSNVGTAISKKFGDMSYSIRHSISMPAMRNSPTFKSFEERVETTVTSLKTKVGGTNPNGGSFEEVLSSTAHASAQSLAGGSRRTKEEELQC

SEQ ID NO: 816984 - protein, 204 aa, Homo sapiens; identical to SEQ ID NO: 816979

SEQ ID NO: 816985 - protein, 275 aa, Homo sapiens
MNLMNELKQNFSKSWHDMQTTTAYKKTHETLSHAGQKATRRPKHPSDVFFFKKHEHTTYSIPLSISMPDMRNPLTRNTLDDRADPLVSNLRKNSTSHKPIKNGMARRRTQLTLPKQNTQTLGHHAKPQTPYRKGCLNITLLTQPTEAKSIRQLTFPFYDTGPSKLQYSIRPTQRSKLSLRSTAHITYYNHQHVPEPDHETVHDKSIKQASMKSLPTIQRTARYAYINCQQHAWYKQKYPTRTSTRDVGRLLAAADLNKRKKQSQNTLVSLYPGTI

SEQ ID NO: 816986 - protein, 102 aa, Homo sapiens; identical to SEQ ID NO: 816976

SEQ ID NO: 816987 - protein, 204 aa, Homo sapiens; identical to SEQ ID NO: 816979

SEQ ID NO: 816988 - protein, 204 aa, Homo sapiens; identical to SEQ ID NO: 816979

SEQ ID NO: 816989 - protein, 121 aa, Homo sapiens
  misc_feature (26)..(26): Xaa can be any naturally occurring amino acid
HEGSWCCYRRGGGVFFFNPQKGGPPXLFFLKFPPPKGGPQNPKGAPPFLPNRVFVLGPPLLSPLGQKLPNAVPCSAGVYSLSAPGDPRVVSISQRIRQGHSPLRQPGHLSIIKSSDGKITV

SEQ ID NO: 816990 - protein, 205 aa, Homo sapiens
MLRALSRLGAGTPCRPRAPLVLPARGRKTRHDPLAKSKIERVNMPPAVDPAEFFVLMERYQHYRQTVRALRMEFVSEVQRKVHEARAGVLAERKALKDAAEHRELMAWNQAENRRLHELRIARLRQEEREQEQRQALEQARKAEEVQAWAQRKEREVLQLQEEVKNFITRENLEARVEAALDSRKNYNWAITREGLVVRPQRRDS

SEQ ID NO: 816991 - protein, 205 aa, Homo sapiens; identical to SEQ ID NO: 816990

SEQ ID NO: 816992 - protein, 189 aa, Homo sapiens
MLRALSRLGAGTPCRPRAPLVLPARGRKTRHDPLAKSKIERVNMPPAVDPAEFFVLMERYQHYRQTVRALRMEFVSEVQRKVHEARAGVLAERKALKDAAEHRELMAWNQAENRRLHELRCVGREAAEEVQAWAQRKEREVLQLQEEVKNFITRENLEARVEAALDSRKNYNWAITREGLVVRPQRRDS

SEQ ID NO: 816993 - protein, 246 aa, Homo sapiens [sequence omitted]

SEQ ID NO: 816994 - protein, 205 aa, Homo sapiens; identical to SEQ ID NO: 816990

SEQ ID NO: 816995 - protein, 205 aa, Homo sapiens; identical to SEQ ID NO: 816990

SEQ ID NO: 816996 - protein, 210 aa, Homo sapiens
SSSVHLSPTLMLGRGWVLIGRLGHATRAEPPGRGDPVQAPGPSGAASARPQDPPRPAGQIQDRRYQHYRQTVRALRMEFVSEVQRKVHEARAGVLAERKALKDAAEHRELMAWNQAENRRLHELRIARLRQEEREQEQRQALEQARKAEEVQAWAQRKEREVLQLQEEVKNFITRENLEARVEAALDSRKNYNWAITREGLVVRPQRRDS

SEQ ID NO: 816997 - protein, 137 aa, Homo sapiens
QTLNYVVGDEPDASWDEALVKGQRPELRCLHGAVENALILPLGVHQASLQHIQGLAQERGNIQPGIKQLVLLMRKVQPYPAQPSRFALCCHHLVRNFQTQCPVLPVCTASAHQETLEWFPSHRESDRATAPSGSQVI

SEQ ID NO: 816998 - protein, 74 aa, Homo sapiens
GAATCGTCPGVGVWGPLAWSGLVLAGLDPSTISALEPAAGPNSVFPEFSCYDPSLADRILVMRPNRKQSTGKQK

SEQ ID NO: 816999 - protein, 105 aa, Homo sapiens
YAGTTSDVHQEAKHREAEMRNSILAQVLDQSARARLSNLALVKPEKTKAVENYLIQMARYGQLSEKVSEQGLIEILKKVSQQTEKTTTVKFNRRKVMDSDEDDDY

SEQ ID NO: 817000 - protein, 114 aa, Homo sapiens
LAELTFNSTAQDPGDAAQQEAKHREAEMRNSILAQVLDQSARARLSNLALVKPEKTKAVENYLIQMARYGQLSEKVSEQGLIEILKKVSQQTEKTTTVKFNRRKVMDSDEDDDY

SEQ ID NO: 817001 - protein, 131 aa, Homo sapiens
MADEELEALRRQRLAELQAKHGDPGDAAQQEAKHRYGLENVNFLKGGFTKWISFAVVILSRCVTQIFLFCWNGDLAKIIRRVSSLLLNKHVCSSTSDLVLQLLVDVSLLQCEYLKNEPDNRQLWQFPRLWG

SEQ ID NO: 817002 - protein, 125 aa, Homo sapiens
MADEELEALRRQRLAELQAKHGDPGDAAQQEAKHREAEMRNSILAQVLDQSARARLSNLALVKPEKTKAVENYLIQMARYGQLSEKVSEQGLIEILKKVSQQTEKTTTVKFNRRKVMDSDEDDDY

SEQ ID NO: 817003 - protein, 145 aa, Homo sapiens
AAAYYYYYCSEFKLLTMYGAMADEELEALRRQRLAELQAKHGDPGDAAQQEAKHREAEMRNSILAQVLDQSARARLSNLALVKPEKTKAVENYLIQMARYGQLSEKVSEQGLIEILKKVSQQTEKTTTVKFNRRKVMDSDEDDDY

SEQ ID NO: 817004 - protein, 109 aa, Homo sapiens
YAGTTSDVHQEAKHREAEMRNSILAQVLDQSARARLSNLALVKPEKTKAVENYLIQMARYGQLSEKVSLDSLEELYCYLLYQNMASKGQLHLHWITEFLLTLRRNCWRE

SEQ ID NO: 817005 - protein, 129 aa, Homo sapiens
MADEELEALRRQRLAELQAKHGDPGDAAQQEAKHREAEMRNSILAQVLDQSARARLSNLALVKPEKTKAVENYLIQMARYGQLSEKVSLDSLEELYCYLLYQNMASKGQLHLHWITEFLLTLRRNCWRE

SEQ ID NO: 817006 - protein, 125 aa, Homo sapiens; identical to SEQ ID NO: 817002

SEQ ID NO: 817007 - protein, 96 aa, Homo sapiens
STHCFLTRSTPWKDAHKGTWAVARARLSNLALVKPEKTKAVENYLIQMARYGQLSEKVSEQGLIEILKKVSQQTEKTTTVKFNRRKVMDSDEDDDY

SEQ ID NO: 817008 - protein, 125 aa, Homo sapiens; identical to SEQ ID NO: 817002

SEQ ID NO: 817009 - protein, 129 aa, Homo sapiens; identical to SEQ ID NO: 817005

SEQ ID NO: 817010 - protein, 250 aa, Homo sapiens
GHRFNHDWRSAVISERLSACPPSRRVAGACASRSTSLLLSRPRPGGPEREAGTMFRRKLTALDYHNPAGFNCKDETEFRNFIVWLEDQKIRHYKIEDRGNLRNIHSSDWPKFFEKYLRDVNCPFKIQDRQEAIDWLLGLAVRLEYGDNAEKYKDLVPDNSKTADNATKNAEPLINLDVNNPDFKAGVMALANLLQIQRHDDYLVMLKAIRILVQERLTQDAVAKANQTKEGLPVALDKHILGFDTGGCSS

SEQ ID NO: 817011 - protein, 190 aa, Homo sapiens
PLLTVCFTLRYDNPEFTNFIVRLDDQKIRHYSDSSSQEFTNTSTVATGPSSFNRLAYMLTVLSSFKIVIVSNDRGLLVLAVRLDYRDYAEKYKDLVPDNSKTADNATKNAEPLINLDVNNPDFKAGVMALANLLQIQRHDDYLVMLKAIRILVQERLTQDAVAKANQTKEGLPVALDKHILGFDTGGCSS

SEQ ID NO: 817012 - protein, 250 aa, Homo sapiens; identical to SEQ ID NO: 817010

SEQ ID NO: 817013 - protein, 242 aa, Homo sapiens
GFRTKARAGTAGRPFGGVAGACASRSTSLLLSRPRPGGPEREAGTMFRRKLTALDYHNPAGFNCKDETEFRNFIVWLEDQKIRHYKIEDRGNLRNIHSSDWPKFFEKYLRDVNCPFKIQDRQEAIDWLLGLAVRLEYGDNAEKYKDLVPDNSKTADNATKNAEPLINLDVNNPDFKAGVMALANLLQIQRHDDYLVMLKAIRILVQERLTQDAVAKANQTKEGLPVALDKHILGFDTGGCSS

SEQ ID NO: 817014 - protein, 250 aa, Homo sapiens; identical to SEQ ID NO: 817010

SEQ ID NO: 817015 - protein, 250 aa, Homo sapiens; identical to SEQ ID NO: 817010

SEQ ID NO: 817016 - protein, 250 aa, Homo sapiens; identical to SEQ ID NO: 817010

SEQ ID NO: 817017 - protein, 250 aa, Homo sapiens; identical to SEQ ID NO: 817010

SEQ ID NO: 817018 - protein, 170 aa, Homo sapiens
MSHVKPPVLKPKLALQVKQRIKNIPHHRLPQFFEKYLRDVNCPFKIQDRQEAIDWLLGLAVRLEYGDNAEKYKDLVPDNSKTADNATKNAEPLINLDVNNPDFKAGVMALANLLQIQRHDDYLVMLKAIRILVQERLTQDAVAKANQTKEGLPVALDKHILGFDTGGCSS

SEQ ID NO: 817019 - protein, 250 aa, Homo sapiens; identical to SEQ ID NO: 817010

SEQ ID NO: 817020 - protein, 131 aa, Homo sapiens
MGKSEDEHLRTSASTYLVQLGTFTSGGDNAEKYKDLVPDNSKTADNATKNAEPLINLDVNNPDFKAGVMALANLLQIQRHDDYLVMLKAIRILVQERLTQDAVAKANQTKEGLPVALDKHILGFDTGGCSS

SEQ ID NO: 817021 - protein, 109 aa, Homo sapiens
IFLPVFIAEKYKDLVPDNSKTADNATKNAEPLINLDVNNPDFKAGVMALANLLQIQRHDDYLVMLKAIRILVQERLTQDAVAKANQTKEGLPVALDKHILGFDTGGCSS

SEQ ID NO: 817022 - protein, 336 aa, Homo sapiens
GHRFNHDWRSAVISERLSACPPSRRVAGACASRSTSLLLSRPRPGGPEREAGTMFRRKLTALDYHNPAGFNCKDETEFRNFIVWLEDQKIRHYKIEDRGNLRNIHSSDWPKFFEKYLRDVNCPFKIQDRQEAIDWLLGLAVRLEYGDNAEKYKDLVPDNSKTADNATKNAEPLINLDVNNPDFKAGVMALANLLQIQRHDDYLVMLKAIRILVQERLTQDAVAKANQTKEGLPVALDKHILGFDTGASHLRPLRAHPVISQFIRGTRQARQPVAPKGRQDPQAPSSEGWKGWQIASLIHLHRSRFLMLSPDLVSHHARSQGTRPEIVFFLSFLASG

SEQ ID NO: 817023 - protein, 281 aa, Homo sapiens
GHRFNHDWRSAVISERLSACPPSRRVAGACASRSTSLLLSRPRPGGPEREAGTMFRRKLTALDYHNPAGFNCKDETEFRNFIVWLEDQKIRHYKIEDRGNLRNIHSSDWPKFFEKYLRDVNCPFKIQDRQEAIDWLLGLAVRLEYGDNAEKYKDLVPDNSKTADNATKNAEPLINLDVNNPDFKAGVMALANLLQIQRHDDYLVMLKAIRILVQERLTQDAVAKANQTKEDAVLNEAAQILRLLHIEELRELQTKINEAIVAVQAIIADPKTDHRLGKVGR

SEQ ID NO: 817024 - protein, 217 aa, Homo sapiens
GHRFNHDWRSAVISERLSACPPSRRVAGACASRSTSLLLSRPRPGGPEREAGTMFRRKLTALDYHNPAGFNCKDETEFRNFIVWLEDQKIRHYKIEDRGNLRNIHSSDWPKFFEKYLRDVNCPFKIQDRQEAIDWLLGLAVRLEYGDNAEKYKDLVPDNSKTADNATKNAEPLINLDVNNPDFKAGVMALANLLQIQRHDDYLVMLKAIRILVQGSC

SEQ ID NO: 817025 - protein, 473 aa, Homo sapiens
GAAPGSVCLCQCVCPSLLHCLPPLLLLLLLPLLLHESSQPPALRVVATSSDRNFMNKHQKPVLTGQRFKTRKRDEKEKFEPTVFRDTLVQGLNEAGDDLEAVAKFLDSTGSRLDYRRYADTLFDILVAGSMLAPGGTRIDDGDKTKMTNHCVFSANEDHETIRNYAQVFNKLIRRYKYLEKAFEDEMKKLLLFLKAFSETEQTKLAMLSGILLGNGTLPATILTSLFTDSLVKEGIAASFAVKLFKAWMAEKDANSVTSSLRKANLDKRLLELFPVNRQSVDHFAKYFTDAGLKELSDFLRVQQSLGTRKELQKELQERLSQECPIKEVVLYVKEEMKRNDLPETAVIGLLWTCIMNAVEWNKKEELVAEQALKHLKQYAPLLAVFSSQGQSELILLQKVQEYCYDNIHFMKAFQKIVVLFYKADVLSEEAILKWYKEAHVAKGKSVFLDQMKKFVEWLQNAEEESESEGEEN

SEQ ID NO: 817026 - protein, 473 aa, Homo sapiens; identical to SEQ ID NO: 817025

SEQ ID NO: 817027 - protein, 473 aa, Homo sapiens; identical to SEQ ID NO: 817025

SEQ ID NO: 817028 - protein, 224 aa, Homo sapiens
GAAPGSVCLCQCVCPSLLHCLPPLLLLLLLPLLLHESSQPPALRVVATSSDRNFMNKHQKPVLTGQRFKTRKRDEKEKFEPTVFRDTLVQGLNEAGDDLEAVAKFLDSTGSRLDYRRYADTLFDILVAGSMLAPGGTRIDDGDKTKMTNHCVFSANEDHETIRNYAQVFNKLIRRYKYLEKAFEDEMKKPFPKQSRQSWRCCRGFCWAMAPCPPPSSPVSSPTA

SEQ ID NO: 817029 - protein, 267 aa, Homo sapiens
MLSGILLGNGTLPATILTSLFTDSLVKEGIAASFAVKLFKAWMAEKDANSVTSSLRKANLDKRLLELFPVNRQSVDHFAKYFTDAGLKELSDFLRVQQSLGTRKELQKELQERLSQECPIKEVVLYVKEEMKRNDLPETAVIGLLWTCIMNAVEWNKKEELVAEQALKHLKQYAPLLAVFSSQGQSELILLQKVQEYCYDNIHFMKAFQKIVVLFYKADVLSEEAILKWYKEAHVAKGKSVFLDQMKKFVEWLQNAEEESESEGEEN

SEQ ID NO: 817030 - protein, 215 aa, Homo sapiens
GAAPGSVCLCQCVCPSLLHCLPPLLLLLLLPLLLHESSQPPALRVVATSSDRNFMNKHQKPVLTGQRFKTRKRDEKEKFEPTVFRDTLVQGLNEAGDDLEAVAKFLDSTGSRLDYRRYADTLFDILVAGSMLAPGGTRIDDGDKTKMTNHCVFSANEDHETIRNYAQVFNKLIRRYKYLEKAFEDEMKKALRPHLLSSFSKHGWQKKMPTLLPRL

SEQ ID NO: 817031 - protein, 255 aa, Homo sapiens
GAAPGSVCLCQCVCPSLLHCLPPLLLLLLLPLLLHESSQPPALRVVATSSDRNFMNKHQKPVLTGQRFKTRKRDEKEKFEPTVFRDTLVQGLNEAGDDLEAVAKFLDSTGSRLDYRRYADTLFDILVAGSMLAPGGTRIDDGDKTKMTNHCVFSANEDHETIRNYAQVFNKLIRRYKYLEKAFEDEMKKLLLFLKAFSETEQTKLAMLSGILLGNGTLPATILTSLFTDSLVKEGNEAPVFSPVRQQKKNKVTDS

SEQ ID NO: 817032 - protein, 169 aa, Homo sapiens
GAAPGSVCLCQCVCPSLLHCLPPLLLLLLLPLLLHESSQPPALRVVATSSDRNFMNKHQKPVLTGQRFKTRKRDEKEKFEPTVFRDTLVQGLNEAGDDLEAVAKFLDSTGSRLDYRRYADTLFDILVAGSMLAPGGTRIDDGDKTKMTNHCVFSANEDHETIRNYAQLQ

SEQ ID NO: 817033 - protein, 216 aa, Homo sapiens
DRSSHSLVGTTRRNFMNKHQKPVLTGQRFKTRKRDEKEKFEPTVFRDTLVQGLNEAGDDLEAVAKFLDSTGSRLDYRRYADTLFDILVAGSMLAPGGTRIDDGDKTKMTNHCVFSANEDHETIRNYAQVFNKLIRRYKYLEKAFEDEMKKLLLFLKAFSETEQTKLAMLSGILLGNGTLPATILTSLFTDSLVKEGNEAPVFSPVRQQKKNKVTDS

SEQ ID NO: 817034 - protein, 473 aa, Homo sapiens; identical to SEQ ID NO: 817025

SEQ ID NO: 817035 - protein, 473 aa, Homo sapiens; identical to SEQ ID NO: 817025

SEQ ID NO: 817036 - protein, 434 aa, Homo sapiens
DRSSHSLVGTTRRNFMNKHQKPVLTGQRFKTRKRDEKEKFEPTVFRDTLVQGLNEAGDDLEAVAKFLDSTGSRLDYRRYADTLFDILVAGSMLAPGGTRIDDGDKTKMTNHCVFSANEDHETIRNYAQVFNKLIRRYKYLEKAFEDEMKKLLLFLKAFSETEQTKLAMLSGILLGNGTLPATILTSLFTDSLVKEGIAASFAVKLFKAWMAEKDANSVTSSLRKANLDKRLLELFPVNRQSVDHFAKYFTDAGLKELSDFLRVQQSLGTRKELQKELQERLSQECPIKEVVLYVKEEMKRNDLPETAVIGLLWTCIMNAVEWNKKEELVAEQALKHLKQYAPLLAVFSSQGQSELILLQKVQEYCYDNIHFMKAFQKIVVLFYKADVLSEEAILKWYKEAHVAKGKSVFLDQMKKFVEWLQNAEEESESEGEEN

SEQ ID NO: 817037 - protein, 321 aa, Homo sapiens
MQTHSSISWWLAVCLVFNKLIRRYKYLEKAFEDEMKKLLLFLKAFSETEQTKLAMLSGILLGNGTLPATILTSLFTDSLVKEGIAASFAVKLFKAWMAEKDANSVTSSLRKANLDKRLLELFPVNRQSVDHFAKYFTDAGLKELSDFLRVQQSLGTRKELQKELQERLSQECPIKEVVLYVKEEMKRNDLPETAVIGLLWTCIMNAVEWNKKEELVAEQALKHLKQYAPLLAVFSSQGQSELILLQKVQEYCYDNIHFMKAFQKIVVLFYKADVLSEEAILKWYKEAHVAKGKSVFLDQMKKFVEWLQNAEEESESEGEEN

SEQ ID NO: 817038 - protein, 455 aa, Homo sapiens
GAAPGSVCLCQCVCPSLLHCLPPLLLLLLLPLLLHESSQPPALRVVATSSDRNFMNKHQKPVLTGQRFKTRKRDEKEKFEPTVFRDTLVQGLNEAGDDLEAVAKFLDSTGSRLDYRRYADTLFDILVAGSMLAPGGTRIDDGDKTKMTNHCVFSANEDHETIRNYAQVFNKLIRRYKYLEKAFEDEMKKLLLFLKAFSETEQTKLAMLSGILLGNGTLPATILTSLFTDSLVKEGIAASFAVKLFKAWMAEKDANSVTSSLSVDHFAKYFTDAGLKELSDFLRVQQSLGTRKELQKELQERLSQECPIKEVVLYVKEEMKRNDLPETAVIGLLWTCIMNAVEWNKKEELVAEQALKHLKQYAPLLAVFSSQGQSELILLQKVQEYCYDNIHFMKAFQKIVVLFYKADVLSEEAILKWYKEAHVAKGKSVFLDQMKKFVEWLQNAEEESESEGEEN

SEQ ID NO: 817039 - protein, 446 aa, Homo sapiens
  misc_feature (436)..(436): Xaa can be any naturally occurring amino acid
GAAPGSVCLCQCVCPSLLHCLPPLLLLLLLPLLLHESSQPPALRVVATSSDRNFMNKHQKPVLTGQRFKTRKRDEKEKFEPTVFRDTLVQGLNEAGDDLEAVAKFLDSTGSRLDYRRYADTLFDILVAGSMLAPGGTRIDDGDKTKMTNHCVFSANEDHETIRNYAQVFNKLIRRYKYLEKAFEDEMKKLLLFLKAFSETEQTKLAMLSGILLGNGTLPATILTSLFTDSLVKEGIAASFAVKLFKAWMAEKDANSVTSSLRKANLDKRLLELFPVNRQSVDHFAKYFTDAGLKELSDFLRVQQSLGTRKELQKELQERLSQECPIKEVVLYVKEEMKRNDLPETAVIGLLWTCIMNAVEWNKKEELVAEQALKHLKQYAPLLAVFSSQGQSELILLQKVQEYCYDNIHFMKAFQKIVVLFYKVSIASSLRTSALXVPIRHERHEP

SEQ ID NO: 817040 - protein, 257 aa, Homo sapiens
RDRALYDGVALRQYRRRKMAATLLAARGAGPAPAWGPEAFTPDWESREVSTGTTIMAVQFDGGVVLGADSRTTTGSYIANRVTDKLTPIHDRIFCCRSGSAADTQAVADAVTYQLGFHSIELNEPPLVHTAASLFKEMCYRYREDLMAGIIIAGWDPQEGGQVYSVPMGGMMVRQSFAIGGSGSSYIYGYVDATYREGMTKEECLQFTANALALAMERDGSSGGVIRLAAIAESGVERQVLLGDQIPKFAVATLPPA

SEQ ID NO: 817041 - protein, 257 aa, Homo sapiens; identical to SEQ ID NO: 817040

SEQ ID NO: 817042 - protein, 185 aa, Homo sapiens
  misc_feature (4)..(4): Xaa can be any naturally occurring amino acid
  misc_feature (10)..(10): Xaa can be any naturally occurring amino acid
  misc_feature (13)..(13): Xaa can be any naturally occurring amino acid
  misc_feature (17)..(17): Xaa can be any naturally occurring amino acid
  misc_feature (19)..(19): Xaa can be any naturally occurring amino acid
  misc_feature (31)..(31): Xaa can be any naturally occurring amino acid
  misc_feature (34)..(34): Xaa can be any naturally occurring amino acid
  misc_feature (40)..(40): Xaa can be any naturally occurring amino acid
  misc_feature (49)..(49): Xaa can be any naturally occurring amino acid
MRPXWVFYFXSIXTFLXGXQKFFAKFFGQGXFPXKKVFFXKLNNLKPPXPQKKKPKDTAASLFKEMCYRYREDLMAGIIIAGWDPQEGGQVYSVPMGGMMVRQSFAIGGSGSSYIYGYVDATYREGMTKEECLQFTANALALAMERDGSSGGVIRLAAIAESGVERQVLLGDQIPKFAVATLPPA

SEQ ID NO: 817043 - protein, 114 aa, Homo sapiens [sequence omitted]

SEQ ID NO: 817044 - protein, 250 aa, Homo sapiens
IRGRVDTTEGKMAATLLAARGAGPAPAWGPEAFTPDWESREVSTGTTIMAVQFDGGVVLGADSRTTTGSYIANRVTDKLTPIHDRIFCCRSGSAADTQAVADAVTYQLGFHSIELNEPPLVHTAASLFKEMCYRYREDLMAGIIIAGWDPQEGGQVYSVPMGGMMVRQSFAIGGSGSSYIYGYVDATYREGMTKEECLQFTANALALAMERDGSSGGVIRLAAIAESGVERQVLLGDQIPKFAVATLPPA

SEQ ID NO: 817045 - protein, 257 aa, Homo sapiens; identical to SEQ ID NO: 817040

SEQ ID NO: 817046 - protein, 256 aa, Homo sapiens
RDRALYDGVALRQYRRRKMAATLLAARGAGPAPAWGPEAFTPDWESREVSTGTTIMAVQFDGGVVLGADSRTTTGSYIANRVTDKLTPIHDRIFCCRSGSAADTQAVADAVTYQLGFHSIELNEPPLVHTAASLFKEMCYRYREDLMAGIIIAGWDPQEGGQVYSVPMGGMMVRQSFAIGGSGSSYIYGYVDATYREGMTKEECLQFTANALALAMERDGSSGGVIRLAAIAESGVERQVLLGDQIPKFAVATLHR

SEQ ID NO: 817047 - protein, 179 aa, Homo sapiens
IPCHRGLPGSSVNEFLKKCLLWTSGGQAVADAVTYQLGFHSIELNEPPLVHTAASLFKEMCYRYREDLMAGIIIAGWDPQEGGQVYSVPMGGMMVRQSFAIGGSGSSYIYGYVDATYREGMTKEECLQFTANALALAMERDGSSGGVIRLAAIAESGVERQVLLGDQIPKFAVATLPPA

SEQ ID NO: 817048 - protein, 139 aa, Homo sapiens
MLSPTSSVSTDTAASLFKEMCYRYREDLMAGIIIAGWDPQEGGQVYSVPMGGMMVRQSFAIGGSGSSYIYGYVDATYREGMTKEECLQFTANALALAMERDGSSGGVIRLAAIAESGVERQVLLGDQIPKFAVATLPPA

SEQ ID NO: 817049 - protein, 257 aa, Homo sapiens; identical to SEQ ID NO: 817040

SEQ ID NO: 817050 - protein, 256 aa, Homo sapiens
CNECGKTFCQKLHLTQHLRTHSGEKPYECSECGKTFCQKTHLTLHQRNHSGERPYPCNECGKSFSRKSALSDHQRTHTGEKLYKCNECGKSYYRKSTLITHQRTHTGEKPYQCSECGKFFSRVSYLTIHYRSHLEEKPYECNECGKTFNLNSAFIRHRKVHTEEKSHECSECGKFSQLYLTDHHTAHLEEKPYECNECGKTFLVNSAFDGHQPLPKGEKSYECNECGKKFHHRSAFNSHQRIHRRGNMNVLDVENL

SEQ ID NO: 817051 - protein, 396 aa, Homo sapiens
CNECGKTFCQKLHLTQHLRTHSGEKPYECSECGKTFCQKTHLTLHQRNHSGERPYPCNECGKSFSRKSALSDHQRTHTGEKLYKCNECGKSYYRKSTLITHQRTHTGEKPYQCSECGKFFSRVSYLTIHYRSHLEEKPYECNECGKTFNLNSAFIRHRKVHTEEKSHECSECGKFSQLYLTDHHTAHLEEKPYECNECGKTFLVNSAFDGHQPLPKGEKSYECNVCGKLFNELSYYTEHYRSHSEEKPYGCSECGKTFSHNSSLFRHQRVHTGEKPYECYECGKFFSQKSYLTIHHRIHSGEKPYECSKCGKVFSRMSNLTVHYRSHSGEKPYECNECGKVFSQKSYLTVHYRTHSGEKPYECNECGKKFHHRSAFNSHQRIHRRGNMNVLDVENL

SEQ ID NO: 817052 - protein, 128 aa, Homo sapiens
MDKQNSQMNASHPETNLPVGYPPQYPPTAFQGPPGYSGYPGPQVSYPPPPAGHSGPGPAGFPVPNQPVYNQPVYNQPVGAAGVPWMPAPQPPLNCPPGLEYLSQVISKTQNTHKKQNCASSLLNQISK

SEQ ID NO: 817053 - protein, 242 aa, Homo sapiens
MTCFRAWEDWAIYPEPFLIKLQNIFLGLVNIIEEKETEDVPDDLDGAPIEEELDGAPLEDVDGIPIDATPIDDLDGVPIKSLDDDLDGVPLDATEDSKKNEPIFKVAPSKWEAVDESELEAQAVTTSKWELFDQHEESEEEENQNQEEESEDEEDTQSSKSEEHHLYSNPIKEEMTESKFSKYSEMSEEKRAKLREIELKVMKFQDELESGKRPKKPGQSFQEQVEHYRDKLLQRVRNKYTQ

SEQ ID NO: 817054 - protein, 135 aa, Homo sapiens
AGDLEDPIHSTCWLQEIEIQAPPGVPIGYVIQTWHPCLPKFTIQNEKREDVLKISGPCVVCSCCGDVDFEIKSLDEQCVVGKISKHWTGILREAFTDADNFGIQFPLDLDVKMKAVMIGACFLIDFMFFESTAAR

SEQ ID NO: 817055 - protein, 1045 aa, Homo sapiens
RLARAAAAAEGGAKLKMADKTPGGSQKASSKTRSSDVHSSGSSDAHMDASGPSDSDMPSRTRPKSPRKHNYRNESARESLCDSPHQNLSRPLLENKLKAFSIGKMSTAKRTLSKKEQEELKKKEDEKAAAEIYEEFLAAFEGSDGNKVKTFVRGGVVNAAKEEHETDEKRGKIYKPSSRFADQKNPPNQSSNERPPSLLVIETKKPPLKKGEKEKKKSNLELFKEELKQIQEERDERHKTKGRLSRFEPPQSDSDGQRRSMDAPSRRNRSSGVLDDYAPGSHDVGDPSTTNLYLGNINPQMNEEMLCQEFGRFGPLASVKIMWPRTDEERARERNCGFVAFMNRRDAERALKNLNGKMIMSFEMKLGWGKAVPIPPHPIYIPPSMMEHTLPPPPSGLPFNAQPRERLKNPNAPMLPPPKNKEDFEKTLSQAIVKVVIPTERNLLALIHRMIEFVVREGPMFEAMIMNREINNPMFRFLFENQTPAHVYYRWKLYSILQGDSPTKWRTEDFRMFKNGSFWRPPPLNPYLHGMSEEQETEAFVEEPSKKGALKEEQRDKLEEILRGLTPRKNDIGDAMVFCLNNAEAAEEIVDCITESLSILKTPLPKKIARLYLVSDVLYNSSAKVANASYYRKFFETKLCQIFSDLNATYRTIQGHLQSENFKQRVMTCFRAWEDWAIYPEPFLIKLQNIFLGLVNIIEEKETEDVPDDLDGAPIEEELDGAPLEDVDGIPIDATPIDDLDGVPIKSLDDDLDGVPLDATEDSKKNEPIFKVAPSKWEAVDESELEAQAVTTSKWELFDQHEESEEEENQNQEEESEDEEDTQSSKSEEHHLYSNPIKEEMTESKFSKYSEMSEEKRAKLREIELKVMKFQDELESGKRPKKPGQSFQEQVEHYRDKLLQREKEKELERERERDKKDKEKLESRSKDKKEKDECTPTRKERKRRHSTSPSPSRSSSGRRVKSPSPKSERSERSERSHKESSRSRSSHKDSPRDVSKKAKRSPSGSRTPKRSRRSRSRSPKKSGKKSRSQSRSPHRSHKKSKKNKH

SEQ ID NO: 817056 - protein, 1045 aa, Homo sapiens; identical to SEQ ID NO: 817055

SEQ ID NO: 817057 - protein, 1045 aa, Homo sapiens; identical to SEQ ID NO: 817055

SEQ ID NO: 817058 - protein, 298 aa, Homo sapiens
MNASHPETNLPVGYPPQYPPTAFQGPPGYSGYPGPQVSYPPPPAGHSGPGPAGFPVPNQPVYNQPVYNQPVGAAGVPWMPAPQPPLNCPPGLEYLSQIDQILIHQQIELLEVLTGFETNNKYEIKNSFGQRVYFAAEDTDCCTRNCCGPSRPFTLRIIDNMGQEVITLERPLRCSSCCCPCCLQEIEIQAPPGVPIGYVIQTWHPCLPKFTIQNEKREDVLKISGPCVVCSCCGDVDFEIKSLDEQCVVGKISKHWTGILREAFTDADNFGIQFPLDLDVKMKAVMIGACFLIGLHVF

SEQ ID NO: 817059 - protein, 1031 aa, Homo sapiens
LGAGWVAAGGSQKASSKTRSSDVHSSGSSDAHMDASGPSDSDMPSRTRPKSPRKHNYRNESARESLCDSPHQNLSRPLLENKLKAFSIGKMSTAKRTLSKKEQEELKKKEDEKAAAEIYEEFLAAFEGSDGNKVKTFVRGGVVNAAKEEHETDEKRGKIYKPSSRFADQKNPPNQSSNERPPSLLVIETKKPPLKKGEKEKKKSNLELFKEELKQIQEERDERHKTKGRLSRFEPPQSDSDGQRRSMDAPSRRNRSSGVLDDYAPGSHDVGDPSTTNLYLGNINPQMNEEMLCQEFGRFGPLASVKIMWPRTDEERARERNCGFVAFMNRRDAERALKNLNGKMIMSFEMKLGWGKAVPIPPHPIYIPPSMMEHTLPPPPSGLPFNAQPRERLKNPNAPMLPPPKNKEDFEKTLSQAIVKVVIPTERNLLALIHRMIEFVVREGPMFEAMIMNREINNPMFRFLFENQTPAHVYYRWKLYSILQGDSPTKWRTEDFRMFKNGSFWRPPPLNPYLHGMSEEQETEAFVEEPSKKGALKEEQRDKLEEILRGLTPRKNDIGDAMVFCLNNAEAAEEIVDCITESLSILKTPLPKKIARLYLVSDVLYNSSAKVANASYYRKFFETKLCQIFSDLNATYRTIQGHLQSENFKQRVMTCFRAWEDWAIYPEPFLIKLQNIFLGLVNIIEEKETEDVPDDLDGAPIEEELDGAPLEDVDGIPIDATPIDDLDGVPIKSLDDDLDGVPLDATEDSKKNEPIFKVAPSKWEAVDESELEAQAVTTSKWELFDQHEESEEEENQNQEEESEDEEDTQSSKSEEHHLYSNPIKEEMTESKFSKYSEMSEEKRAKLREIELKVMKFQDELESGKRPKKPGQSFQEQVEHYRDKLLQREKEKELERERERDKKDKEKLESRSKDKKEKDECTPTRKERKRRHSTSPSPSRSSSGRRVKSPSPKSERSERSERSHKESSRSRSSHKDSPRDVSKKAKRSPSGSRTPKRSRRSRSRSPKKSGKKSRSQSRSPHRSHKKSKKNKH

SEQ ID NO: 817060 - protein, 1027 aa, Homo sapiens
RLARAAAAAEGGAKLKMADKTPGGSQKASSKTRSSDVHSSGSSDAHMDASGPSDSDMPSRTRPKSPRKHNYRNESARESLCDSPHQNLSRPLLENKLKAFSIGKMSTAKRTLSKKEQEELKKKEDEKAAAEIYEEFLAAFEGSDGNKVKTFVRGGVVNAAKEEHETDEKRGKIYKPSSRFADQKNPPNQSSNERPPSLLVIETKKPPLKKGEKEKKKSNLELFKEELKQIQEERDERHKTKGRLSRFEPPQSDSDGQRRSMDAPSRRNRSSGVLDDYAPGSHDVGDPSTTNLYLGNINPQMNEEMLCQEFGRFGPLASVKIMWPRTDEERARERNCGFVAFMNRRDAERALKNLNGKMIMSFEMKLGWGKAVPIPPHPIYIPPSMMEHTLPPPPSGLPFNAQPRERLKNPNAPMLPPPKNKEDFEKTLSQAIVKVVIPTERNLLALIHRMIEFVVREGPMFEAMIMNREINNPMFRFLFENQTPAHVYYRWKLYSILQGDSPTKWRTEDFRMFKNGSFWRPPPLNPYLHGMSEEQETEAFVEEPSKKGALKEEQRDKLEEILRGLTPRKNDIGDAMVFCLNNAEAAEEIVDCITESLSILKTPLPKKIARLYLVSDVLYNSSAKVANASYYRKFFETKLCQIFSDLNATYRTIQGHLQSENFKQRVMTCFRAWEDWAIYPEPFLIKLQNIFLGLVNIIEELDGAPLEDVDGIPIDATPIDDLDGVPIKSLDDDLDGVPLDATEDSKKNEPIFKVAPSKWEAVDESELEAQAVTTSKWELFDQHEESEEEENQNQEEESEDEEDTQSSKSEEHHLYSNPIKEEMTESKFSKYSEMSEEKRAKLREIELKVMKFQDELESGKRPKKPGQSFQEQVEHYRDKLLQREKEKELERERERDKKDKEKLESRSKDKKEKDECTPTRKERKRRHSTSPSPSRSSSGRRVKSPSPKSERSERSERSHKESSRSRSSHKDSPRDVSKKAKRSPSGSRTPKRSRRSRSRSPKKSGKKSRSQSRSPHRSHKKSKKNKH

SEQ ID NO: 817061 - protein, 1005 aa, Homo sapiens
MFFFSCMDASGPSDSDMPSRTRPKSPRKHNYRNESARESLCDSPHQNLSRPLLENKLKAFSIGKMSTAKRTLSKKEQEELKKKEDEKAAAEIYEEFLAAFEGSDGNKVKTFVRGGVVNAAKEEHETDEKRGKIYKPSSRFADQKNPPNQSSNERPPSLLVIETKKPPLKKGEKEKKKSNLELFKEELKQIQEERDERHKTKGRLSRFEPPQSDSDGQRRSMDAPSRRNRSSGVLDDYAPGSHDVGDPSTTNLYLGNINPQMNEEMLCQEFGRFGPLASVKIMWPRTDEERARERNCGFVAFMNRRDAERALKNLNGKMIMSFEMKLGWGKAVPIPPHPIYIPPSMMEHTLPPPPSGLPFNAQPRERLKNPNAPMLPPPKNKEDFEKTLSQAIVKVVIPTERNLLALIHRMIEFVVREGPMFEAMIMNREINNPMFRFLFENQTPAHVYYRWKLYSILQGDSPTKWRTEDFRMFKNGSFWRPPPLNPYLHGMSEEQETEAFVEEPSKKGALKEEQRDKLEEILRGLTPRKNDIGDAMVFCLNNAEAAEEIVDCITESLSILKTPLPKKIARLYLVSDVLYNSSAKVANASYYRKFFETKLCQIFSDLNATYRTIQGHLQSENFKQRVMTCFRAWEDWAIYPEPFLIKLQNIFLGLVNIIEEKETEDVPDDLDGAPIEEELDGAPLEDVDGIPIDATPIDDLDGVPIKSLDDDLDGVPLDATEDSKKNEPIFKVAPSKWEAVDESELEAQAVTTSKWELFDQHEESEEEENQNQEEESEDEEDTQSSKSEEHHLYSNPIKEEMTESKFSKYSEMSEEKRAKLREIELKVMKFQDELESGKRPKKPGQSFQEQVEHYRDKLLQREKEKELERERERDKKDKEKLESRSKDKKEKDECTPTRKERKRRHSTSPSPSRSSSGRRVKSPSPKSERSERSERSHKESSRSRSSHKDSPRDVSKKAKRSPSGSRTPKRSRRSRSRSPKKSGKKSRSQSRSPHRSHKKSKKNKH

SEQ ID NO: 817062 - protein, 287 aa, Homo sapiens
MDKPPQYPPTAFQGPPGYSGYPGPQVSYPPPPAGHSGPGPAGFPVPNQPVYNQPVYNQPVGAAGVPWMPAPQPPLNCPPGLEYLSQIDQILIHQQIELLEVLTGFETNNKYEIKNSFGQRVYFAAEDTDCCTRNCCGPSRPFTLRIIDNMGQEVITLERPLRCSSCCCPCCLQEIEIQAPPGVPIGYVIQTWHPCLPKFTIQNEKREDVLKISGPCVVCSCCGDVDFEIKSLDEQCVVGKISKHWTGILREAFTDADNFGIQFPLDLDVKMKAVMIGACFLIGLHVF

SEQ ID NO: 817063 - protein, 941 aa, Homo sapiens
MSTAKRTLSKKEQEELKKKEDEKAAAEIYEEFLAAFEGSDGNKVKTFVRGGVVNAAKEEHETDEKRGKIYKPSSRFADQKNPPNQSSNERPPSLLVIETKKPPLKKGEKEKKKSNLELFKEELKQIQEERDERHKTKGRLSRFEPPQSDSDGQRRSMDAPSRRNRSSGVLDDYAPGSHDVGDPSTTNLYLGNINPQMNEEMLCQEFGRFGPLASVKIMWPRTDEERARERNCGFVAFMNRRDAERALKNLNGKMIMSFEMKLGWGKAVPIPPHPIYIPPSMMEHTLPPPPSGLPFNAQPRERLKNPNAPMLPPPKNKEDFEKTLSQAIVKVVIPTERNLLALIHRMIEFVVREGPMFEAMIMNREINNPMFRFLFENQTPAHVYYRWKLYSILQGDSPTKWRTEDFRMFKNGSFWRPPPLNPYLHGMSEEQETEAFVEEPSKKGALKEEQRDKLEEILRGLTPRKNDIGDAMVFCLNNAEAAEEIVDCITESLSILKTPLPKKIARLYLVSDVLYNSSAKVANASYYRKFFETKLCQIFSDLNATYRTIQGHLQSENFKQRVMTCFRAWEDWAIYPEPFLIKLQNIFLGLVNIIEEKETEDVPDDLDGAPIEEELDGAPLEDVDGIPIDATPIDDLDGVPIKSLDDDLDGVPLDATEDSKKNEPIFKVAPSKWEAVDESELEAQAVTTSKWELFDQHEESEEEENQNQEEESEDEEDTQSSKSEEHHLYSNPIKEEMTESKFSKYSEMSEEKRAKLREIELKVMKFQDELESGKRPKKPGQSFQEQVEHYRDKLLQREKEKELERERERDKKDKEKLESRSKDKKEKDECTPTRKERKRRHSTSPSPSRSSSGRRVKSPSPKSERSERSERSHKESSRSRSSHKDSPRDVSKKAKRSPSGSRTPKRSRRSRSRSPKKSGKKSRSQSRSPHRSHKKSKKNKH

SEQ ID NO: 817064 - protein, 785 aa, Homo sapiens
MDAPSRRNRSSGVLDDYAPGSHDVGDPSTTNLYLGNINPQMNEEMLCQEFGRFGPLASVKIMWPRTDEERARERNCGFVAFMNRRDAERALKNLNGKMIMSFEMKLGWGKAVPIPPHPIYIPPSMMEHTLPPPPSGLPFNAQPRERLKNPNAPMLPPPKNKEDFEKTLSQAIVKVVIPTERNLLALIHRMIEFVVREGPMFEAMIMNREINNPMFRFLFENQTPAHVYYRWKLYSILQGDSPTKWRTEDFRMFKNGSFWRPPPLNPYLHGMSEEQETEAFVEEPSKKGALKEEQRDKLEEILRGLTPRKNDIGDAMVFCLNNAEAAEEIVDCITESLSILKTPLPKKIARLYLVSDVLYNSSAKVANASYYRKFFETKLCQIFSDLNATYRTIQGHLQSENFKQRVMTCFRAWEDWAIYPEPFLIKLQNIFLGLVNIIEEKETEDVPDDLDGAPIEEELDGAPLEDVDGIPIDATPIDDLDGVPIKSLDDDLDGVPLDATEDSKKNEPIFKVAPSKWEAVDESELEAQAVTTSKWELFDQHEESEEEENQNQEEESEDEEDTQSSKSEEHHLYSNPIKEEMTESKFSKYSEMSEEKRAKLREIELKVMKFQDELESGKRPKKPGQSFQEQVEHYRDKLLQREKEKELERERERDKKDKEKLESRSKDKKEKDECTPTRKERKRRHSTSPSPSRSSSGRRVKSPSPKSERSERSERSHKESSRSRSSHKDSPRDVSKKAKRSPSGSRTPKRSRRSRSRSPKKSGKKSRSQSRSPHRSHKKSKKNKH

SEQ ID NO: 817065 - protein, 281 aa, Homo sapiens
MDKQNSQMNASHPETNLPVGYPPQYPPTAFQGPPGYSGYPGPQVSYPPPPAGHSGPGPAGFPVPNQPVYNQPVYNQPVGAAGVPWMPAPQPPLNCPPGLEYLSQIDQILIHQQIELLEAEDTDCCTRNCCGPSRPFTLRIIDNMGQEVITLERPLRCSSCCCPCCLQEIEIQAPPGVPIGYVIQTWHPCLPKFTIQNEKREDVLKISGPCVVCSCCGDVDFEIKSLDEQCVVGKISKHWTGILREAFTDADNFGIQFPLDLDVKMKAVMIGACFLIGLHVF

SEQ ID NO: 817066 - protein, 785 aa, Homo sapiens; identical to SEQ ID NO: 817064

SEQ ID NO: 817067 - protein, 596 aa, Homo sapiens
MIEFVVREGPMFEAMIMNREINNPMFRFLFENQTPAHVYYRWKLYSILQGDSPTKWRTEDFRMFKNGSFWRPPPLNPYLHGMSEEQETEAFVEEPSKKGALKEEQRDKLEEILRGLTPRKNDIGDAMVFCLNNAEAAEEIVDCITESLSILKTPLPKKIARLYLVSDVLYNSSAKVANASYYRKFFETKLCQIFSDLNATYRTIQGHLQSENFKQRVMTCFRAWEDWAIYPEPFLIKLQNIFLGLVNIIEEKETEDVPDDLDGAPIEEELDGAPLEDVDGIPIDATPIDDLDGVPIKSLDDDLDGVPLDATEDSKKNEPIFKVAPSKWEAVDESELEAQAVTTSKWELFDQHEESEEEENQNQEEESEDEEDTQSSKSEEHHLYSNPIKEEMTESKFSKYSEMSEEKRAKLREIELKVMKFQDELESGKRPKKPGQSFQEQVEHYRDKLLQREKEKELERERERDKKDKEKLESRSKDKKEKDECTPTRKERKRRHSTSPSPSRSSSGRRVKSPSPKSERSERSERSHKESSRSRSSHKDSPRDVSKKAKRSPSGSRTPKRSRRSRSRSPKKSGKKSRSQSRSPHRSHKKSKKNKH

SEQ ID NO: 817068 - protein, 596 aa, Homo sapiens; identical to SEQ ID NO: 817067

SEQ ID NO: 817069 - protein, 986 aa, Homo sapiens
RLARAAAAAEGGAKLKMADKTPGGSQKASSKTRSSDVHSSGSSDAHMDASGPSDSDMPSRTRPKSPRKHNYRNESARESLCDSPHQNLSRPLLENKLKAFSIGKMSTAKRTLSKKEQEELKKKEDEKAAAEIYEEFLAAFEGSDGNKVKTFVRGGVVNAAKEEHETDEKRGKIYKPSSRFADQKNPPNQSSNERPPSLLVIETKKPPLKKGEKEKKKSNLELFKEELKQIQEERDERHKTKGRLSRFEPPQSDSDGQRRSMDAPSRRNRSSGVLDDYAPGSHDVGDPSTTNLYLGNINPQMNEEMLCQEFGRFGPLASVKIMWPRTDEERARERNCGFVAFMNRRDAERALKNLNGKMIMSFEMKLGWGKAVPIPPHPIYIPPSMMEHTLPPPPSGLPFNAQPRERLKNPNAPMLPPPKNKEDFEKTLSQAIVKVVIPTERNLLALIHRMIEFVVREGPMFEAMIMNREINNPMFRFLFENQTPAHVYYRWKLYSILQGDSPTKWRTEDFRMFKNGSFWRPPPLNPYLHGMSEEQETEAFVEEPSKKGALKEEQRDKLEEILRGLTPRKNDIGDAMVFCLNNAEAAEEIVDCITESLSILKTPLPKKIARLYLVSDVLYNSSAKVANASYYRKFFETKLCQIFSDLNATYRTIQGHLQSENFKQRVMTCFRAWEDWAIYPEPFLIKLQNIFLGLVNIIEEKETEDVPDDLDGAPIEEELDGAPLEDVDGIPIDATPIDDLDGVPIKSLDDDLDGVPLDATEDSKKNEPIFKVAPSKWEAVDESELEAQAVTTSKWELFDQHEESEEEENQNQEEESEDEEDTQSSKSEEHHLYSNPIKEEMTESKFSKYSEMSEEKRAKLREIELKVMKFQDELESGKRPKKPGQSFQEQVEHYRDKLLQREKEKELERERERDKKDKEKLESRSKDKKEKDECTPTRKERSPSGSRTPKRSRRSRSRSPKKSGKKSRSQSRSPHRSHKKSKKNKH

SEQ ID NO: 817070 - protein, 342 aa, Homo sapiens
MDVPDDLDGAPIEEELDGAPLEDVDGIPIDATPIDDLDGVPIKSLDDDLDGVPLDATEDSKKNEPIFKVAPSKWEAVDESELEAQAVTTSKWELFDQHEESEEEENQNQEEESEDEEDTQSSKSEEHHLYSNPIKEEMTESKFSKYSEMSEEKRAKLREIELKVMKFQDELESGKRPKKPGQSFQEQVEHYRDKLLQREKEKELERERERDKKDKEKLESRSKDKKEKDECTPTRKERKRRHSTSPSPSRSSSGRRVKSPSPKSERSERSERSHKESSRSRSSHKDSPRDVSKKAKRSPSGSRTPKRSRRSRSRSPKKSGKKSRSQSRSPHRSHKKSKKNKH

SEQ ID NO: 817071 - protein, 305 aa, Homo sapiens
MDKQNSQMNASHPETNLPVGYPPQYPPTAFQGPPGYSGYPGPQVSYPPPPAGHSGPGPAGFPVPNQPVYNQPVYNQPVGAAGVPWMPAPQPPLNCPPGLEYLSQIDQILIHQQIELLEVLTGFETNNKYEIKNSFGQRVYFAAEDTDCCTRNCCGPSRPFTLRIIDNMGQEVITLERPLRCSSCCCPCCLQEIEIQAPPGVPIGYVIQTWHPCLPKFTIQNEKREDVLKISGPCVVCSCCGDVDFEIKSLDEQCVVGKISKHWTGILREAFTDADNFGIQFPLDLDVKMKAVMIGACFLIGLHVF

SEQ ID NO: 817072 - protein, 1045 aa, Homo sapiens; identical to SEQ ID NO: 817055

SEQ ID NO: 817073 - protein, 301 aa, Homo sapiens
MKEHERREYLKTLNEEEEKEEESEFEEMKKKMKITLKLITQEAQAVTTSKWELFDQHEESEEEENQNQEEESEDEEDTQSSKSEEHHLYSNPIKEEMTESKFSKYSEMSEEKRAKLREIELKVMKFQDELESGKRPKKPGQSFQEQVEHYRDKLLQREKEKELERERERDKKDKEKLESRSKDKKEKDECTPTRKERKRRHSTSPSPSRSSSGRRVKSPSPKSERSERSERSHKESSRSRSSHKDSPRDVSKKAKRSPSGSRTPKRSRRSRSRSPKKSGKKSRSQSRSPHRSHKKSKKNKH

SEQ ID NO: 817074 - protein, 206 aa, Homo sapiens
MVLDIGVEGGGGLAGDDSLNFPPLQLKVMKFQDELESGKRPKKPGQSFQEQVEHYRDKLLQREKEKELERERERDKKDKEKLESRSKDKKEKDECTPTRKERKRRHSTSPSPSRSSSGRRVKSPSPKSERSERSERSHKESSRSRSSHKDSPRDVSKKAKRSPSGSRTPKRSRRSRSRSPKKSGKKSRSQSRSPHRSHKKSKKNKH

SEQ ID NO: 817075 - protein, 1045 aa, Homo sapiens; identical to SEQ ID NO: 817055

SEQ ID NO: 817076 - protein, 126 aa, Homo sapiens
GRYHPSLSCCFREIEIQAPPGVPIGYVIQTWHPCLPKFTIQNEKREDVLKISGPCVVCSCCGDVDFEIKSLDEQCVVGKISKHWTGILREAFTDADNFGIQFPLDLDVKMKAVMIGACFLIGLHVF

SEQ ID NO: 817077 - protein, 986 aa, Homo sapiens; identical to SEQ ID NO: 817069

SEQ ID NO: 817078 - protein, 908 aa, Homo sapiens
RLARAAAAAEGGAKLKMADKTPGGSQKASSKTRSSDVHSSGSSDAHMDASGPSDSDMPSRTRPKSPRKHNYRNESARESLCDSPHQNLSRPLLENKLKAFSIGKMSTAKRTLSKKEQEELKKKEDEKAAAEIYEEFLAAFEGSDGNKVKTFVRGGVVNAAKEEHETDEKRGKIYKPSSRFADQKNPPNQSSNERPPSLLVIETKKPPLKKGEKEKKKSNLELFKEELKQIQEERDERHKTKGRLSRFEPPQSDSDGQRRSMDAPSRRNRSSGVLDDYAPGSHDVGDPSTTNLYLGNINPQMNEEMLCQEFGRFGPLASVKIMWPRTDEERARERNCGFVAFMNRRDAERALKNLNGKMIMSFEMKLGWGKAVPIPPHPIYIPPSMMEHTLPPPPSGLPFNAQPRERLKNPNAPMLPPPKNKEDFEKTLSQAIVKVVIPTERNLLALIHRMIEFVVREGPMFEAMIMNREINNPMFRFLFENQTPAHVYYRWKLYSILQGDSPTKWRTEDFRMFKNGSFWRPPPLNPYLHGMSEEQETEAFVEEPSKKGALKEEQRDKLEEILRGLTPRKNDIGDAMVFCLNNAEAAEEIVDCITESLSILKTPLPKKIARLYLVSDVLYNSSAKVANASYYRKFFETKLCQIFSDLNATYRTIQGHLQSENFKQRVMTCFRAWEDWAIYPEPFLIKLQNIFLGLVNIIEEKETEDVPDDLDGAPIEEELDGAPLEDVDGIPIDATPIDDLDGVPIKSLDDDLDGVPLDATEDSKKNEPIFKVAPSKWEAVDESELEAQAVTTSKWELFDQHEESEEEENQNQEEESEDEEDTQSSKSEEHHLYSNPIKEEMTESKFSKYSEMSEEKRAKLREIELKVMKFQDELESGKRPKKPGQSFQEQVEHYRDKLLQRVRNKYTQ

SEQ ID NO: 817079 - protein, 851 aa, Homo sapiens
  misc_feature (848)..(848): Xaa can be any naturally occurring amino acid
RLARAAAAAEGGAKLKMADKTPGGSQKASSKTRSSDVHSSGSSDAHMDASGPSDSDMPSRTRPKSPRKHNYRNESARESLCDSPHQNLSRPLLENKLKAFSIGKMSTAKRTLSKKEQEELKKKEDEKAAAEIYEEFLAAFEGSDGNKVKTFVRGGVVNAAKEEHETDEKRGKIYKPSSRFADQKNPPNQSSNERPPSLLVIETKKPPLKKGEKEKKKSNLELFKEELKQIQEERDERHKTKGRLSRFEPPQSDSDGQRRSMDAPSRRNRSSGVLDDYAPGSHDVGDPSTTNLYLGNINPQMNEEMLCQEFGRFGPLASVKIMWPRTDEERARERNCGFVAFMNRRDAERALKNLNGKMIMSFEMKLGWGKAVPIPPHPIYIPPSMMEHTLPPPPSGLPFNAQPRERLKNPNAPMLPPPKNKEDFEKTLSQAIVKVVIPTERNLLALIHRMIEFVVREGPMFEAMIMNREINNPMFRFLFENQTPAHVYYRWKLYSILQGDSPTKWRTEDFRMFKNGSFWRPPPLNPYLHGMSEEQETEAFVEEPSKKGALKEEQRDKLEEILRGLTPRKNDIGDAMVFCLNNAEAAEEIVDCITESLSILKTPLPKKIARLYLVSDVLYNSSAKVANASYYRKFFETKLCQIFSDLNATYRTIQGHLQSENFKQRVMTCFRAWEDWAIYPEPFLIKLQNIFLGLVNIIEEKETEDVPDDLDGAPIEEELDGAPLEDVDGIPIDATPIDDLDGVPIKSLDDDLDGVPLDATEDSKKNEPIFKVAPSKWEAVDESELEAQAVTTSKWELFDQHEESEEEENQNQEEESEDEEDTQSSKSEEHHLYSNPIKEEMTEVPPNXRPR

SEQ ID NO: 817080 - protein, 320 aa, Homo sapiens
MDKQNSQMNASHPETNLPVGYPPQYPPTAFQGPPGYSGYPGPQVSYPPPPAGHSGPGPAGFPVPNQPVYNQPVYNQPVGAAGVPWMPAPQPPLNCPPGLEYLSQIDQILIHQQIELLEVLTGFETNNKYEIKNSFGQRVYFAAEDTDCCTRNCCGPSRPFTLRIIDNMGQEVITLERPLRCSSCCCPCCLQEIEIQAPPGVPIGYVIQTWHPCLPKFTIQNEKREDVLKISGPCVVCSCCGDVDFEIKSLDEQCVVGKISKHWTGILREAFTDADNFGIQFPLDLDVKMKAVMIGACFLIVVSLFLLILIIDAFSRFILK

SEQ ID NO: 817081 - protein, 428 aa, Homo sapiens
RLARAAAAAEGGAKLKMADKTPGGSQKASSKTRSSDVHSSGSSDAHMDASGPSDSDMPSRTRPKSPRKHNYRNESARESLCDSPHQNLSRPLLENKLKAFSIGKMSTAKRTLSKKEQEELKKKEDEKAAAEIYEEFLAAFEGSDGNKVKTFVRGGVVNAAKEEHETDEKRGKIYKPSSRFADQKNPPNQSSNERPPSLLVIETKKPPLKKGEKEKKKSNLELFKEELKQIQEERDERHKTKGRLSRFEPPQSDSDGQRRSMDAPSRRNRSSGVLDDYAPGSHDVGDPSTTNLYLGNINPQMNEEMLCQEFGRFGPLASVKIMWPRTDEERARERNCGFVAFMNRRDAERALKNLNGKMIMSFEMKLGWGKAVPIPPHPIYIPPSMMEHTLPPPPSGLPFNAQPRERLKNPNAPMLPPPKNKEDFEKVI

SEQ ID NO: 817082 - protein, 203 aa, Homo sapiens
MDKQNSQMNASHPETNLPVGYPPQYPPTAFQGPPGYSGYPGPQVSYPPPPAGHSGPGPAGFPVPNQPVYNQPVYNQPVGAAGVPWMPAPQPPLNCPPGLEYLSQIDQILIHQQIELLEVLTGFETNNKYEIKNSFGQRVYFAAEDTDCCTRNCCGPSRPFTLRIIDNMGQEVITLERPLRCSSCCCPCCLQEVCDQLPGHFVK

SEQ ID NO: 817083 - protein, 321 aa, Homo sapiens
RLARAAAAAEGGAKLKMADKTPGGSQKASSKTRSSDVHSSGSSDAHMDASGPSDSDMPSRTRPKSPRKHNYRNESARESLCDSPHQNLSRPLLENKLKAFSIGKMSTAKRTLSKKEQEELKKKEDEKAAAEIYEEFLAAFEGSDGNKVKTFVRGGVVNAAKEEHETDEKRGKIYKPSSRFADQKNPPNQSSNERPPSLLVIETKKPPLKKGEKEKKKSNLELFKEELKQIQEERDERHKTKGRLSRFEPPQSDSDGQRRSMDAPSRRNRSSGVLDDYAPGSHDVGDPSTTNLYLGNINPQMNEECCAKNSEIGRYQGEIMG

SEQ ID NO: 817084 - protein, 239 aa, Homo sapiens
MLLTRKQTCQLGILLSIHRQHSKIDQILIHQQIELLEVLTGFETNNKYEIKNSFGQRVYFAAEDTDCCTRNCCGPSRPFTLRIIDNMGQEVITLERPLRCSSCCCPCCLQEIEIQAPPGVPIGYVIQTWHPCLPKFTIQNEKREDVLKISGPCVVCSCCGDVDFEIKSLDEQCVVGKISKHWTGILREAFTDADNFGIQFPLDLDVKMKAVMIGACFLIVVSLFLLILIIDAFSRFILK

SEQ ID NO: 817085 - protein, 210 aa, Homo sapiens
RLARAAAAAEGGAKLKMADKTPGGSQKASSKTRSSDVHSSGSSDAHMDASGPSDSDMPSRTRPKSPRKHNYRNESARESLCDSPHQNLSRPLLENKLKAFSIGKMSTAKRTLSKKEQEELKKKEDEKAAAEIYEEFLAAFEGSDGNKVKTFVRGGVVNAAKEEHETDEKRGKIYKPSSRFADQKNPPNQSSNERPPSLLVIETKKPVSHT

SEQ ID NO: 817086 - protein, 241 aa, Homo sapiens
TRPCCCRRRRRGKAQDGGQNARRISEGQFKDSQMNASHPETNLPVGYPPQYPPTAFQGPPGYSGYPGPQVSYPPPPAGHSGPGPAGFPVPNQPVYNQPVYNQPVGAAGVPWMPAPQPPLNCPPGLEYLSQIDQILIHQQIELLEVLTGFETNNKYEIKNSFGQRVYFAAEDTDCCTRNCCGPSRPFTLRIIDNMGQEVITLERPLRCSSCCCPCCLQEIESSSLVSMDVRLAHLQYINERR

SEQ ID NO: 817087 - protein, 305 aa, Homo sapiens; identical to SEQ ID NO: 817071

SEQ ID NO: 817088 - protein, 128 aa, Homo sapiens; identical to SEQ ID NO: 817052

SEQ ID NO: 817089 - protein, 1045 aa, Homo sapiens; identical to SEQ ID NO: 817055

SEQ ID NO: 817090 - protein, 1045 aa, Homo sapiens; identical to SEQ ID NO: 817055

SEQ ID NO: 817091 - protein, 305 aa, Homo sapiens; identical to SEQ ID NO: 817071

SEQ ID NO: 817092 - protein, 331 aa, Homo sapiens
TRPCCCRRRRRGKAQDGGQNARRISEGQFKDSQMNASHPETNLPVGYPPQYPPTAFQGPPGYSGYPGPQVSYPPPPAGHSGPGPAGFPVPNQPVYNQPVYNQPVGAAGVPWMPAPQPPLNCPPGLEYLSQIDQILIHQQIELLEVLTGFETNNKYEIKNSFGQRVYFAAEDTDCCTRNCCGPSRPFTLRIIDNMGQEVITLERPLRCSSCCCPCCLQEIEIQAPPGVPIGYVIQTWHPCLPKFTIQNEKREDVLKISGPCVVCSCCGDVDFEIKSLDEQCVVGKISKHWTGILREAFTDADNFGIQFPLDLDVKMKAVMIGACFLIGLHVF

SEQ ID NO: 817093 - protein, 1021 aa, Homo sapiens
TTNLYLGNINPQMNEEMLCQEFGRFGPLASVKIMWPRTDEERARERNCGFVAFMNRRDSPHQNLSRPLLENKLKAFSIGKMSTAKRTLSKKEQEELKKKEDEKAAAEIYEEFLAAFEGSDGNKVKTFVRGGVVNAAKEEHETDEKRGKIYKPSSRFADQKNPPNQSSNERPPSLLVIETKKPPLKKGEKEKKKSNLELFKEELKQIQEERDERHKTKGRLSRFEPPQSDSDGQRRSMDAPSRRNRSSGVLDDYAPGSHDVGDPSTTNLYLGNINPQMNEEMLCQEFGRFGPLASVKIMWPRTDEERARERNCGFVAFMNRRDAERALKNLNGKMIMSFEMKLGWGKAVPIPPHPIYIPPSMMEHTLPPPPSGLPFNAQPRERLKNPNAPMLPPPKNKEDFEKTLSQAIVKVVIPTERNLLALIHRMIEFVVREGPMFEAMIMNREINNPMFRFLFENQTPAHVYYRWKLYSILQGDSPTKWRTEDFRMFKNGSFWRPPPLNPYLHGMSEEQETEAFVEEPSKKGALKEEQRDKLEEILRGLTPRKNDIGDAMVFCLNNAEAAEEIVDCITESLSILKTPLPKKIARLYLVSDVLYNSSAKVANASYYRKFFETKLCQIFSDLNATYRTIQGHLQSENFKQRVMTCFRAWEDWAIYPEPFLIKLQNIFLGLVNIIEEKETEDVPDDLDGAPIEEELDGAPLEDVDGIPIDATPIDDLDGVPIKSLDDDLDGVPLDATEDSKKNEPIFKVAPSKWEAVDESELEAQAVTTSKWELFDQHEESEEEENQNQEEESEDEEDTQSSKSEEHHLYSNPIKEEMTESKFSKYSEMSEEKRAKLREIELKVMKFQDELESGKRPKKPGQSFQEQVEHYRDKLLQREKEKELERERERDKKDKEKLESRSKDKKEKDECTPTRKERKRRHSTSPSPSRSSSGRRVKSPSPKSERSERSERSHKESSRSRSSHKDSPRDVSKKAKRSPSGSRTPKRSRRSRSRSPKKSGKKSRSQSRSPHRSHKKSKKNKH

SEQ ID NO: 817094 - protein, 224 aa, Homo sapiens
MLLTRKQTCQLGILLSIHRQHSKIDQILIHQQIELLEVLTGFETNNKYEIKNSFGQRVYFAAEDTDCCTRNCCGPSRPFTLRIIDNMGQEVITLERPLRCSSCCCPCCLQEIEIQAPPGVPIGYVIQTWHPCLPKFTIQNEKREDVLKISGPCVVCSCCGDVDFEIKSLDEQCVVGKISKHWTGILREAFTDADNFGIQFPLDLDVKMKAVMIGACFLIGLHVF

SEQ ID NO: 817095 - protein, 826 aa, Homo sapiens
RLARAAAAAEGGAKLKMADKTPGGSQKASSKTRSSDVHSSGSSDAHMDASGPSDSDMPSRTRPKSPRKHNYRNESARESLCDSPHQNLSRPLLENKLKAFSIGKMSTAKRTLSKKEQEELKKKEDEKAAAEIYEEFLAAFEGSDGNKVKTFVRGGVVNAAKEEHETDEKRGKIYKPSSRFADQKNPPNQSSNERPPSLLVIETKKPPLKKGEKEKKKSNLELFKEELKQIQEERDERHKTKGRLSRFEPPQSDSDGQRRSMDAPSRRNRSSGVLDDYAPGSHDVGDPSTTNLYLGNINPQMNEEMLCQEFGRFGPLASVKIMWPRTDEERARERNCGFVAFMNRRDAERALKNLNGKMIMSFEMKLGWGKAVPIPPHPIYIPPSMMEHTLPPPPSGLPFNAQPRERLKNPNAPMLPPPKNKEDFEKTLSQAIVKVVIPTERNLLALIHRMIEFVVREGPMFEAMIMNREINNPMFRFLFENQTPAHVYYRWKLYSILQGDSPTKWRTEDFRMFKNGSFWRPPPLNPYLHGMSEEQETEAFVEEPSKKGALKEEQRDKLEEILRGLTPRKNDIGDAMVFCLNNAEAAEEIVDCITESLSILKTPLPKKIARLYLVSDVLYNSSAKVANASYYRKFFETKLCQIFSDLNATYRTIQGHLQSENFKQRVMTCFRAWEDWAIYPEPFLIKLQNIFLGLVNIIEEKETEDVPDDLDGAPIEEELDGAPLEDVDGIPIDATPIDDLDGVPIKSLDDDLDGVPLDATEDSKKNEPIFKVAPLLQLLNGNYLTSMKNQKKKKIKIKKKKVKMKKILKVPNLKNIICTLIQSKKK

SEQ ID NO: 817096 - protein, 224 aa, Homo sapiens; identical to SEQ ID NO: 817094

SEQ ID NO: 817097 - protein, 596 aa, Homo sapiens; identical to SEQ ID NO: 817067

SEQ ID NO: 817098 - protein, 941 aa, Homo sapiens
RLARAAAAAEGGAKLKMADKTPGGSQKASSKTRSSDVHSSGSSDAHMDASGPSDSDMPSRTRPKSPRKHNYRNESARESLCDSPHQNLSRPLLENKLKAFSIGKMSTAKRTLSKKEQEELKKKEDEKAAAEIYEEFLAAFEGSDGNKVKTFVRGGVVNAAKEEHETDEKRGKIYKPSSRFADQKNPPNQSSNERPPSLLVIETKKPPLKKGEKEKKKSNLELFKEELKQIQEERDERHKTKGRLSRFEPPQSDSDGQRRSMDAPSRRNRSSGVLDDYAPGSHDVGDPSTTNLYLGNINPQMNEEMLCQEFGRFGPLASVKIMWPRTDEERARERNCGFVAFMNRRDAERALKNLNGKMIMSFEMKLGWGKAVPIPPHPIYIPPSMMEHTLPPPPSGLPFNAQPRERLKNPNAPMLPPPKNKEDFEKTLSQAIVKVVIPTERNLLALIHRMIEFVVREGPMFEAMIMNREINNPMFRFLFENQTPAHVYYRWKLYSILQGDSPTKWRTEDFRMFKNGSFWRPPPLNPYLHGMSEEQETEAFVEEPSKKGALKEEQRDKLEEILRGLTPRKNDIGDAMVFCLNNAEAAEEIVDCITESLSILKTPLPKKIARLYLVSDVLYNSSAKVANASYYRKFFETKLCQIFSDLNATYRTIQGHLQSENFKQRVMTCFRAWEDWAIYPEPFLIKLQNIFLGLVNIIEEKETEDVPDDLDGAPIEEELDGAPLEDVDGIPIDATPIDDLDGVPIKSLDDDLDGVPLDATEDSKKNEPIFKVAPSKWEAVDESELEAQAVTTSKWELFDQHEESEEEENQNQEEESEDEEDTQSSKSEEHHLYSNPIKEEMTESKFSKYSEMSEEKRAKLREIELKVMKFQDELESGKRPKKPGQSFQEQVEHYRDKLLQREKEKELERERERDKKDKEKLESRSKDKKDPAHLAVAVVDE

SEQ ID NO: 817099 - protein, 305 aa, Homo sapiens; identical to SEQ ID NO: 817071

SEQ ID NO: 817100 - protein, 305 aa, Homo sapiens; identical to SEQ ID NO: 817071

SEQ ID NO: 817101 - protein, 1045 aa, Homo sapiens; identical to SEQ ID NO: 817055

SEQ ID NO: 817102 - protein, 283 aa, Homo sapiens
MDVPDDLDGAPIEEELDGAPLEDVDGIPIDATPIDDLDGVPIKSLDDDLDGVPLDATEDSKKNEPIFKVAPSKWEAVDESELEAQAVTTSKWELFDQHEESEEEENQNQEEESEDEEDTQSSKSEEHHLYSNPIKEEMTESKFSKYSEMSEEKRAKLREIELKVMKFQDELESGKRPKKPGQSFQEQVEHYRDKLLQREKEKELERERERDKKDKEKLESRSKDKKEKDECTPTRKERSPSGSRTPKRSRRSRSRSPKKSGKKSRSQSRSPHRSHKKSKKNKH

SEQ ID NO: 817103 - protein, 147 aa, Homo sapiens
MDKQNSQMNASHPETNLPVGYPPQYPPTAFQGPPGYSGYPGPQVSYPPPPAGHSGPGPAGFPVPNQPVYNQPVYNQPVGAAGVPWMPAPQPPLNCPPGLEYLSQIDQILIHQQIELLEDRNPSSSWCTNRLCYSDLAPMSTKVYNSK

SEQ ID NO: 817104 - protein, 134 aa, Homo sapiens
ICNDSLNLHGYKLKVMKFQDELESGKRPKKPGQSFQEQVEHYRDKLLQREKEKELERERERDKKDKEKLESRSKDKKEKDECTPTRKERSPSGSRTPKRSRRSRSRSPKKSGKKSRSQSRSPHRSHKKSKKNKH

SEQ ID NO: 817105 - protein, 311 aa, Homo sapiens
MDKQNSQMNASHPETNLPVGYPPQYPPTAFQGPPGYSGYPGPQVSYPPPPAGHSGPGPAGFPVPNQPVYNQPVYNQPVGAAGVPWMPAPQPPLNCPPGLEYLSQIDQILIHQQIELLEVLTGFETNNKYEIKNSFGQRVYFAAEDTDCCTRNCCGPSRPFTLRIIDNMGQEVITLERPLRCSSCCCPCCLQEIEIQAPPGVPIGYVIQTWHPCLPKFTIQNEKREDVLKISGPCVVCSCCGDVDFEIKSLDEQCVVGKISKHWTGILREAFTDADNFGIQFPLDLDVKMKAVMIGACFLIDFMFFESTAAR

SEQ ID NO: 817106 - protein, 318 aa, Homo sapiens
MDKQNSQMNASHPETNLPVGYPPQYPPTAFQGPPGYSGYPGPQVSYPPPPAGHSGPGPAGFPVPNQPVYNQPVYNQPVGAAGVPWMPAPQPPLNCPPGLEYLSQIDQILIHQQIELLEVLTGFETNNKYEIKNSFGQRVYFAAEDTDCCTRNCCGPSRPFTLRIIDNMGQEVITLERPLRCSSCCCPCCLQEIEIQAPPGVPIGYVIQTWHPCLPKFTIQNEKREDVLKISGPCVVCSCCGDVDFEIKSLDEQCVVGKISKHWTGILREAFTDADNFGIQFPLDLDVKMKAVMIGACFLIDFMLKRKHWQRVEWGTEL

SEQ ID NO: 817107 - protein, 260 aa, Homo sapiens
MDKQNSQMNASHPETNLPVGYPPQYPPTAFQGPPGYSGYPGPQVSYPPPPAGHSGPGPAGFPVPNQPVYNQPVYNQPVGAAGVPWMPAPQPPLNCPPGLEYLSQIDQILIHQQIELLEVLTGFETNNKYEIKNSFGQRVYFAAEDTDCCTRNCCGPSRPFTLRIIDNMGQEVITLERPLRCSSCCCPCCLQEIEIQAPPGVPIGYVIQTWHPCLPKFTIQNEKREDVLKISGPCVVCSCCGDVDFEVRDVIMFIRFAFLI

SEQ ID NO: 817108 - protein, 215 aa, Homo sapiens
MDKQNSQMNASHPETNLPVGYPPQYPPTAFQGPPGYSGYPGPQVSYPPPPAGHSGPGPAGFPVPNQPVYNQPVYNQPVGAAGVPWMPAPQPPLNCPPGLEYLSQIDQILIHQQIELLEVLTGFETNNKYEIKNSFGQRVYFAAEDTDCCTRNCCGPSRPFTLRIIDNMGQEVITLERPLRCSSCCCPCCLQEIESSSLVSMDVRLAHLQYINERR

SEQ ID NO: 817109 - protein, 203 aa, Homo sapiens; identical to SEQ ID NO: 817082

SEQ ID NO: 817110 - protein, 122 aa, Homo sapiens
MLLTRKQTCQLGILLSIHRQHSKIDQILIHQQIELLEVLTGFETNNKYEIKNSFGQRVYFAAEDTDCCTRNCCGPSRPFTLRIIDNMGQEVITLERPLRCSSCCCPCCLQEVCDQLPGHFVK

SEQ ID NO: 817111 - protein, 316 aa, Homo sapiens
MAEVKVKVQPPDADPVEIENRIIELCHQFPHGITDQVIQNEMPHIEAQQRAVAINRLLSMGQLDLLRSNTGLLYRIKDSQNAGKMKGSDNQEKLVYQIIEDAGNKGIWSRDIRYKSNLPLTEINKILKNLESKKLIKAVKSVAASKKKVYMLYNLQPDRSVTGGAWYSDQDFESEFVEVLNQQCFKFLQSKAETARESKQNPMIQRNSSFASSHEVWKYICELGISKVELSMEDIETILNTLIYDGKVEMTIIAAKEGTVGSVDGHMKLYRAVNPIIPPTGLVRAPCGLCPVFDDCHEGGEISPSNCIYMTEWLEF

SEQ ID NO: 817112 - protein, 316 aa, Homo sapiens; identical to SEQ ID NO: 817111

SEQ ID NO: 817113 - protein, 217 aa, Homo sapiens
  misc_feature (184)..(184): Xaa can be any naturally occurring amino acid
MAEVKVKVQPPDADPVEIENRIIELCHQFPHGITDQVIQNEMPHIEAQQRAVAINRLLSMGQLDLLRSNTGLLYRIKDSQNAGKMKGSDNQEKLVYQIIEDAGNKGIWSRDIRYKSNLPLTEINKILKNLESKKLIKAVKSVAPLRLDSDHDFESAFVEGLNHSVEILQPSGTERSNDHVKKAXPPEGHCRAQEVRDRPEPWEGNWQRGTATRGAAA

SEQ ID NO: 817114 - protein, 168 aa, Homo sapiens
MKGSDNQEKLVYQIIEDAGNKGIWSRDIRYKSNLPLTEINKILKNLESKKLIKAVKSVAASKKKVYMLYNLQPDRSVTGGAWYSDQDFESEFVEVLNQQCFKFLQSKAETARESKQNPMIQRNSSFASSHEVWKYICELGISKVFDDCHEGGEISPSNCIYMTEWLEF

SEQ ID NO: 817115 - protein, 265 aa, Homo sapiens
MAEVKVKVQPPDADPVEIENRIIELCHQFPHGITDQVIQNEMPHIEAQQRAVAINRLLSMGQLDLLRSNTGLLYRIKDSQNAGKMKGSDNQEKLVYQIIEDAGNKGIWSRDIRYKSNLPLTEINKILKNLESKKLIKAVKSVAASKKKVYMLYNLQPDRSVTGGAWYSDQDFESEFVEVLNQQCFKFLQSKAETARESKQNPMIQRNSSFASSHEVWKYICELGISKVELSMEDIETILNTLIYDGKVEMTIIAAKEGTVGSVDG

SEQ ID NO: 817116 - protein, 222 aa, Homo sapiens
MAEVKVKVQPPDADPVEIENRIIELCHQFPHGITDQVIQNEMPHIEAQQRAVAINRLLSMGQLDLLRSNTGLLYRIKDSQNAGKMKGSDNQEKLVYQIIEDAGNKGIWSRDIRYKSNLPLTEINKILKNLESKKLIKAVKSVAASKKKVYMLYNLQPDRSVTGGAWYSDQDFESEFVEVLNQQCFKFLQSKRTAEKRTSPIRTPHHGKGLAHGVTGTRGAPG

SEQ ID NO: 817117 - protein, 296 aa, Homo sapiens
MAEVKVKVQPPDADPVEIENRIIELCHQFPHGITDQVIQNEMPHIEAQQRAVAINRLLSMGQLDLLRSNTGLLYRIKDSQNAGKMKGSDNQEKLVYQIIEDAGNKGIWSRDIRYKSNLPLTEINKILKNLESKKLIKAVKSVAGAWYSDQDFESEFVEVLNQQCFKFLQSKAETARESKQNPMIQRNSSFASSHEVWKYICELGISKVELSMEDIETILNTLIYDGKVEMTIIAAKEGTVGSVDGHMKLYRAVNPIIPPTGLVRAPCGLCPVFDDCHEGGEISPSNCIYMTEWLEF

SEQ ID NO: 817118 - protein, 727 aa, Homo sapiens
MNQKLLKLENLLRFHTIYRQLHSLCQRRALRQWRHGFSSAYPVWTAQLCAWPWPTDVLNGAALSQYRLLVTKKEEGPWKSQLSSTKSKKVVEVWIGMTIEELARAMEKNTDYVYEALLNTDIDIDSLEADSHLDEVWIKEVITKAGMKLKWSKLKQDKVRKNKDAVRRPQADPALLTPRSPVVTIMGHVDHGKTTLLDKFRKTQVAAVETGGITQHIGAFLVSLPSGEKITFLDTPGHAAFSAMRARGAQVTDIVVLVVAADDGVMKQTVESIQHAKDAQVPIILAVNKCDKAEADPEKVKKELLAYDVVCEDYGGDVQAVPVSALTGDNLMALAEATVALAEMLELKADPNGPVEGTVIESFTDKGRGLVTTAIIQRGTLRKGSVLVAGKCWAKVRLMFDENGKTIDEAYPSMPVGITGWRDLPSAGEEILEVESEPRAREVVDWRKYEQEQEKGQEDLKIIEEKRKEHKEAHQKAREKYGHLLWKKRSILRFLERKEQIPLKPKEKRERDSNVLSVIIKGDVDGSVEAILNIIDTYDASHECELELVHFGVGDISANDVNLAETFDGVIYGFNVNAGNVIQQSAAKKGVKIKLHKIIYRLVEDLQEELSSRLPCAVEEHPVGEASILATFSVTEGKKKVPVAGCRVQKGQLEKQKKFKLTRNGHVIWKGSLTSLKHHKDDISIVKTGMDCGLSLDEDNMEFQVGDRIVCYEEKQIQAKTSWDPGF

SEQ ID NO: 817119 - protein, 727 aa, Homo sapiens; identical to SEQ ID NO: 817118

SEQ ID NO: 817120 - protein, 441 aa, Homo sapiens
MNQKLLKLENLLRFHTIYRQLHSLCQRRALRQWRHGFSSAYPVWTAQLCAWPWPTDVLNGAALSQYRLLVTKKEEGPWKSQLSSTKSKKVVEVWIGMTIEELARAMEKNTDYVYEALLNTDIDIDSLEADSHLDEVWIKEVITKAGMKLKWSKLKQDKVRKNKDAVRRPQADPALLTPRSPVVTIMGHVDHGKTTLLDKFRKTQVAAVETGGITQHIGAFLVSLPSGEKITFLDTPGHAAFSAMRARGAQVTDIVVLVVAADDGVMKQTVESIQHAKDAQVPIILAVNKCDKAEADPEKVKKELLAYDVVCEDYGGDVQAVPVSALTGDNLMALAEATVALAEMLELKADPNGPVEGTVIESFTDKGRGLVTTAIIQRGTLRKGSVLVAGKCWAKVRLMFDENGKTIDEAYPSMPVGITGWRDLPSAGEEILEVESEVYQA

SEQ ID NO: 817121 - protein, 727 aa, Homo sapiens; identical to SEQ ID NO: 817118

SEQ ID NO: 817122 - protein, 631 aa, Homo sapiens
MTIEELARAMEKNTDYVYEALLNTDIDIDSLEADSHLDEVWIKEVITKAGMKLKWSKLKQDKVRKNKDAVRRPQADPALLTPRSPVVTIMGHVDHGKTTLLDKFRKTQVAAVETGGITQHIGAFLVSLPSGEKITFLDTPGHAAFSAMRARGAQVTDIVVLVVAADDGVMKQTVESIQHAKDAQVPIILAVNKCDKAEADPEKVKKELLAYDVVCEDYGGDVQAVPVSALTGDNLMALAEATVALAEMLELKADPNGPVEGTVIESFTDKGRGLVTTAIIQRGTLRKGSVLVAGKCWAKVRLMFDENGKTIDEAYPSMPVGITGWRDLPSAGEEILEVESEPRAREVVDWRKYEQEQEKGQEDLKIIEEKRKEHKEAHQKAREKYGHLLWKKRSILRFLERKEQIPLKPKEKRERDSNVLSVIIKGDVDGSVEAILNIIDTYDASHECELELVHFGVGDISANDVNLAETFDGVIYGFNVNAGNVIQQSAAKKGVKIKLHKIIYRLVEDLQEELSSRLPCAVEEHPVGEASILATFSVTEGKKKVPVAGCRVQKGQLEKQKKFKLTRNGHVIWKGSLTSLKHHKDDISIVKTGMDCGLSLDEDNMEFQVGDRIVCYEEKQIQAKTSWDPGF

SEQ ID NO: 817123 - protein, 484 aa, Homo sapiens [sequence omitted]

SEQ ID NO: 817124 - protein, 742 aa, Homo sapiens
MNQKLLKLENLLRFHTIYRQLHSLCQRRALRQWRHGFSSAYPVWTAQLCAWPWPTDVLNGAALSQYRLLVTKKEEGPWKSQLSSTKSKKVVEVWIGMTIEELARAMEKNTDYVYEALLNTDIDIDSLEADSHLDEVWIKEVITKAGMKLKWSKLKQDKVRKNKDAVRRPQADPALLTPRSPVVTIMGHVDHGKTTLLDKFRKTQVAAVETGGITQHIGAFLVSLPSGEKITFLDTPGHAAFSAMRARGAQVTDIVVLVVAADDGVMKQTVESIQHAKDAQVPIILAVNKCDKAEADPEKVKKELLAYDVVCEDYGGDVQAVPVSALTGDNLMALAEATVALAEMLELKADPNGPVEGTVIESFTDKGRGLVTTAIIQRGTLRKGSVLVAGKCWAKVRLMFDENGKTIDEAYPSMPVGITGWRDLPSAGEEILEVESEPRAREVVDWRKYEQEQEKGQEDLKIIEEKRKEHKEAHQKAREKYGHLLWKKRSILRFLERKEQIPLKPKEKRERDSNVLSVIIKGDVDGSVEAILNIIDTYDASHECELELVHFGVGDISANDVNLAETFDGVIYGFNVNAGNVIQQSAAKKGVKIKLHKIIYRLVEDLQEELSSRLPCAVEEHPVGEASILATFSVTEGKKKVPVAGCRVQKGQLEKQKKFKLTRNGHVIWKGSLTSLKHHKDDISIVKTGMDCGLSLDEDNMDSGGTEMCVTKAIQQILVRLQSYMFSKKRGANTGALALVKA

SEQ ID NO: 817125 - protein, 492 aa, Homo sapiens
MNQKLLKLENLLRFHTIYRQLHSLCQRRALRQWRHGFSSAYPVWTAQLCAWPWPTDVLNGAALSQYRLLVTKKEEGPWKSQLSSTKSKKVVEVWIGMTIEELARAMEKNTDYVYEALLNTDIDIDSLEADSHLDEVWIKEVITKAGMKLKWSKLKQDKVRKNKDAVRRPQADPALLTPRSPVVTIMGHVDHGKTTLLDKFRKTQVAAVETGGITQHIGAFLVSLPSGEKITFLDTPGHAAFSAMRARGAQVTDIVVLVVAADDGVMKQTVESIQHAKDAQVPIILAVNKCDKAEADPEKVKKELLAYDVVCEDYGGDVQAVPVSALTGDNLMALAEATVALAEMLELKADPNGPVEGTVIESFTDKGRGLVTTAIIQRGTLRKGSVLVAGKCWAKVRLMFDENGKTIDEAYPSMPVGITGWRDLPSAGEEILEVESEPRAREVVDWRKYEQEQEKGQEDLIWRKEGTKSLRSRKVGPTGGEISGRERTSSRK

SEQ ID NO: 817126 - protein, 348 aa, Homo sapiens
MNQKLLKLENLLRFHTIYRQLHSLCQRRALRQWRHGFSSAYPVWTAQLCAWPWPTDVLNGAALSQYRLLVTKKEEGPWKSQLSSTKSKKVVEVWIGMTIEELARAMEKNTDYVYEALLNTDIDIDSLEADSHLDEVWIKEVITKAGMKLKWSKLKQDKVRKNKDAVRRPQADPALLTPRSPVVTIMGHVDHGKTTLLDKFRKTQVAAVETGGITQHIGAFLVSLPSGEKITFLDTPGHAAFSAMRARGAQVTDIVVLVVAADDGVMKQTVESIQHAKDAQVPIILAVNKCDKAEADPEKKKKKKKKKTPFGAPLTPQRKVFKPNAFGRPRRPRGGGDTAGPKPGSQGN

SEQ ID NO: 817127 - protein, 727 aa, Homo sapiens; identical to SEQ ID NO: 817118

SEQ ID NO: 817128 - protein, 727 aa, Homo sapiens; identical to SEQ ID NO: 817118

SEQ ID NO: 817129 - protein, 727 aa, Homo sapiens; identical to SEQ ID NO: 817118

SEQ ID NO: 817130 - protein, 484 aa, Homo sapiens [sequence omitted]

SEQ ID NO: 817131 - protein, 727 aa, Homo sapiens; identical to SEQ ID NO: 817118

SEQ ID NO: 817132 - protein, 727 aa, Homo sapiens; identical to SEQ ID NO: 817118

SEQ ID NO: 817133 - protein, 409 aa, Homo sapiens
MNQKLLKLENLLRFHTIYRQLHSLCQRRALRQWRHGFSSAYPVWTAQLCAWPWPTDVLNGAALSQYRLLVTKKEEGPWKSQLSSTKSKKVVEVWIGMTIEELARAMEKNTDYVYEALLNTDIDIDSLEADSHLDEVWIKEVITKAGMKLKWSKLKQDKVRKNKDAVRRPQADPALLTPRSPVVTIMGHVDHGKTTLLDKFRKTQVAAVETGGITQHIGAFLVSLPSGEKITFLDTPGHAAFSAMRARGAQVTDIVVLVVAADDGVMKQTVESIQHAKDAQVPIILAVNKCDKAEADPEKVKKELLAYDVVCEDYGGDVQAVPVSALTGDNLMALAEATVALAEMLELKADPNGPVEGTVIESFTDKGRGLVTTAIIQRGTLRKGSVLVAGKCWAKVRLMFDVEPSFCRR

SEQ ID NO: 817134 - protein, 529 aa, Homo sapiens
MGCVFCKKLEPVATAKEDAGLEGDFRSYGAADHYGPDPTKARPASSFAHIPNYSNFSSQAINPGFLDSGTIRGVSGIGVTLFIALYDYEARTEDDLTFTKGEKFHILNNTEGDWWEARSLSSGKTGCIPSNYVAPVDSIQAEEWYFGKIGRKDAERQLLSPGNPQGAFLIRESETTKGAYSLSIRDWDQTRGDHVKHYKIRKLDMGGYYITTRVQFNSVQELVQHYMEVNDGLCNLLIAPCTIMKPQTLGLAKDAWEISRSSITLERRLGTGCFGDVWLGTWNGSTKVAVKTLKPGTMSPKAFLEEAQVMKLLRHDKLVQLYAVVSEEPIYIVTEFMCHGSLLDFLKNPEGQDLRLPQLVDMAAQVAEGMAYMERMNYIHRDLRAANILVGERLACKIADFGLARLIKDDEYNPCQGSKFPIKWTAPEAALFGRFTIKSDVWSFGILLTELITKGRIPYPGMNKREVLEQVEQGYHMPCPPGCPASLYEAMEQTWRLDPEERPTFEYLQSFLEDYFTSAEPQYQPGDQT

SEQ ID NO: 817135 - protein, 529 aa, Homo sapiens; identical to SEQ ID NO: 817134

SEQ ID NO: 817136 - protein, 529 aa, Homo sapiens; identical to SEQ ID NO: 817134

SEQ ID NO: 817137 - protein, 529 aa, Homo sapiens; identical to SEQ ID NO: 817134

SEQ ID NO: 817138 - protein, 432 aa, Homo sapiens
MGCVFCKKLEPVATAKEDAGLEGDFRSYGAADHYGPDPTKARPASSFAHIPNYSNFSSQAINPGFLDSGTIRGVSGIGVTLFIALYDYEARTEDDLTFTKGEKFHILNNTEGDWWEARSLSSGKTGCIPSNYVAPVDSIQAEEWYFGKIGRKDAERQLLSPGNPQGAFLIRESETTKGAYSLSIRDWDQTRGDHVKHYKIRKLDMGGYYITTRVQFNSVQELVQHYMEVNDGLCNLLIAPCTIMKPQTLGLAKDAWEISRSSITLERRLGTGCFGDVWLGTWNGSTKVAVKTLKPGTMSPKAFLEEAQVMKLLRHDKLVQLYAVVSEEPIYIVTEFMCHGSLLDFLKNPEGQDLRLPQLVDMAAQVAEGMAYMERMNYIHRDLRAANILVGERLACKIADFGLARLIKDDEYNPCQGSKFPIKWTAPEAVGA

SEQ ID NO: 817139 - protein, 297 aa, Homo sapiens [sequence omitted]

SEQ ID NO: 817140 - protein, 121 aa, Homo sapiens
MGCVFCKKLEPVATAKEDAGLEGDFRSYGAADHYGPDPTKARPASSFAHIPNYSNFSSQAINPGFLDSGTIRGVSGESKGSEAGAAWILGETEGRRRDANLPLGASRRMWQIQPRFQDHMG

SEQ ID NO: 817141 - protein, 554 aa, Homo sapiens
MGCVFCKKLEPVATAKEDAGLEGDFRSYGAADHYGPDPTKARPASSFAHIPNYSNFSSQAINPGFLDSGTIRGVSGIGVTLFIALYDYEARTEDDLTFTKGEKFHILNNTEGDWWEARSLSSGKTGCIPSNYVAPVDSIQAEEWYFGKIGRKDAERQLLSPGNPQGAFLIRESETTKGAYSLSIRDWDQTRGDHVKHYKIRKLDMGGYYITTRVQFNSVQELVQHYMEVNDGLCNLLIAPCTIMKPQTLGLAKDAWEISRSSITLERRLGTGCFGDVWLGTELPGAGTRAWARGRGSCQDSLRAGTWNGSTKVAVKTLKPGTMSPKAFLEEAQVMKLLRHDKLVQLYAVVSEEPIYIVTEFMCHGSLLDFLKNPEGQDLRLPQLVDMAAQVAEGMAYMERMNYIHRDLRAANILVGERLACKIADFGLARLIKDDEYNPCQGSKFPIKWTAPEAALFGRFTIKSDVWSFGILLTELITKGRIPYPGMNKREVLEQVEQGYHMPCPPGCPASLYEAMEQTWRLDPEERPTFEYLQSFLEDYFTSAEPQYQPGDQT

SEQ ID NO: 817142 - protein, 529 aa, Homo sapiens; identical to SEQ ID NO: 817134

SEQ ID NO: 817143 - protein, 898 aa, Homo sapiens
MRKGVLKDPEIADLFYKDDPEELFIGLHEIGHGSFGAVYFATNAHTSEVVAIKKMSYSGKQTHEKWQDILKEVKFLRQLKHPNTIEYKGCYLKEHTAWLVMEYCLGSASDLLEVHKKPLQEVEIAAITHGALHGLAYLHSHALIHRDIKAGNILLTEPGQVKLADFGSASMASPANSFVGTPYWMAPEVILAMDEGQYDGKVDIWSLGITCIELAERKPPLFNMNAMSALYHIAQNDSPTLQSNEWTDSFRRFVDYCLQKIPQERPTSAELLRHDFVRRDRPLRVLIDLIQRTKDAVRELDNLQYRKMKKILFQETRNGPLNESQEDEEDSEHGTSLNREMDSLGSNHSIPSMSVSTGSQSSSVNSMQEVMDESSSELVMMHDDESTINSSSSVVHKKDHVFIRDEAGHGDPRPEPRPTQSVQSQALHYRNRERFATIKSASLVTRQIHEHEQENELREQMSGYKRMRRQHQKQLIALENKLKAEMDEHRLKLQKEVETHANNSSIELEKLAKKQVAIIEKEAKVAAADEKKFQQQILAQQKKDLTTFLESQKKQYKICKEKIKEEMNEDHSTPKKEKQERISKHKENLQHTQAEEEAHLLTQQRLYYDKNCRFFKRKIMIKRHEVEQQNIREELNKKRTQKEMEHAMLIRHDESTRELEYRQLHTLQKLRMDLIRLQHQTELENQLEYNKRRERELHRKHVMELRQQPKNLKAMEMQIKKQFQDTCKVQTKQYKALKNHQLEVTPKNEHKTILKTLKDEQTRKLAILAEQYEQSINEMMASQALRLDEAQEAECQALRLQLQQEMELLNAYQSKIKMQTEAQHERELQKLEQRVSLRRAHLEQKIEEELAALQKERSERIKNLLERQEREIETFDMESLRMGFGNLVTLDFPKEDYR

SEQ ID NO: 817144 - protein, 898 aa, Homo sapiens
MRKGVLKDPEIADLFYKDDPEELFIGLHEIGHGSFGAVYFATNAHTNEVVAIKKMSYSGKQTHEKWQDILKEVKFLRQLKHPNTIEYKGCYLKEHTAWLVMEYCLGSASDLLEVHKKPLQEVEIAAITHGALHGLAYLHSHALIHRDIKAGNILLTEPGQVKLADFGSASMASPANSFVGTPYWMAPEVILAMDEGQYDGKVDIWSLGITCIELAERKPPLFNMNAMSALYHIAQNDSPTLQSNEWTDSFRRFVDYCLQKIPQERPTSAELLRHDFVRRDRPLRVLIDLIQRTKDAVRELDNLQYRKMKKILFQETRNGPLNESQEDEEDSEHGTSLNREMDSLGSNHSIPSMSVSTGSQSSSVNSMQEVMDESSSELVMMHDDESTINSSSSVVHKKDHVFIRDEAGHGDPRPEPRPTQSVQSQALHYRNRERFATIKSASLVTRQIHEHEQENELREQMSGYKRMRRQHQKQLIALENKLKAEMDEHRLKLQKEVETHANNSSIELEKLAKKQVAIIEKEAKVAAADEKKFQQQILAQQKKDLTTFLESQKKQYKICKEKIKEEMNEDHSTPKKEKQERISKHKENLQHTQAEEEAHLLTQQRLYYDKNCRFFKRKIMIKRHEVEQQNIREELNKKRTQKEMEHAMLIRHDESTRELEYRQLHTLQKLRMDLIRLQHQTELENQLEYNKRRERELHRKHVMELRQQPKNLKAMEMQIKKQFQDTCKVQTKQYKALKNHQLEVTPKNEHKTILKTLKDEQTRKLAILAEQYEQSINEMMASQALRLDEAQEAECQALRLQLQQEMELLNAYQSKIKMQTEAQHERELQKLEQRVSLRRAHLEQKIEEELAALQKERSERIKNLLERQEREIETFDMESLRMGFGNLVTLDFPKEDYR

SEQ ID NO: 817145 - protein, 898 aa, Homo sapiens; identical to SEQ ID NO: 817144

SEQ ID NO: 817146 - protein, 898 aa, Homo sapiens; identical to SEQ ID NO: 817144

SEQ ID NO: 817147 - protein, 833 aa, Homo sapiens
MRKGVLKDPEIADLFYKDDPEELFIGLHEIGHGSFGAVYFATNAHTNEVVAIKKMSYSGKQTHEKWQDILKEVKFLRQLKHPNTIEYKGCYLKEHTAWLVMEYCLGSASDLLEVHKKPLQEVEIAAITHGALHGLAYLHSHALIHRDIKAGNILLTEPGQVKLADFGSASMASPANSFVGTPYWMAPEVILAMDEGQYDGKVDIWSLGITCIELAERKPPLFNMNAMSALYHIAQNDSPTLQSNEWTDSFRRFVDYCLQKIPQERPTSAELLRHDFVRRDRPLRVLIDLIQRTKDAVRELDNLQYRKMKKILFQETRNGPLNESQEDEEDSEHGTSLNREMDSLGSNHSIPSMSVSTGSQSSSVNSMQEVMDESSSELVMMHDDESTINSSSSVVHKKDHVFIRDEAGHGDPRPEPRPTQSVQSQALHYRNRERFATIKSASLVTRQIHEHEQENELREQMSGYKRMRRQHQKQLIALENKLKAEMDEHRLKLQKEVETHANNSSIELEKLAKKQVAIIEKEAKVAAADEKKFQQQILAQQKKDLTTFLESQKKQYKICKEKIKEEMNEDHSTPKKEKQERISKHKENLQHTQAEEEAHLLTQQRLYYDKNCRFFKRKIMIKRHEVEQQNIREELNKKRTQKEMEHAMLIRHDESTRELEYRQLHTLQKLRMDLIRLQHQTELENQLEYNKRRERELHRKHVMELRQQPKNLKAMEMQIKKQFQDTCKVQTKQYKALKNHQLEVTPKNEHKTILKTLKDEQTRKLAILAEQYEQSINEMMASQALRLDEAQEAECQALRLQLQQEMELLNAYQSKIKMQTESMSWNFGNSQKT

SEQ ID NO: 817148 - protein, 291 aa, Homo sapiens
MRKGVLKDPEIADLFYKDDPEELFIGLHEIGHGSFGAVYFATNAHTNEVVAIKKMSYSGKQTHEKWQDILKEVKFLRQLKHPNTIEYKGCYLKEHTAWLVMEYCLGSASDLLEVHKKPLQEVEIAAITHGALHGLAYLHSHALIHRDIKAGNILLTEPGQVKLADFGSASMASPANSFVGTPYWMAPEVILAMDEGQYDGKVDIWSLGITCIELAERKPPLFNMNAMSALYHIAQNDSPTLQSNEWTDSFRRFVDYCLQKIPQERGKGKGEKRDTQIPEQCPVLGPIPPVK

SEQ ID NO: 817149 - protein, 146 aa, Homo sapiens [sequence omitted]

SEQ ID NO: 817150 - protein, 898 aa, Homo sapiens; identical to SEQ ID NO: 817143

SEQ ID NO: 817151 - protein, 898 aa, Homo sapiens; identical to SEQ ID NO: 817144

SEQ ID NO: 817152 - protein, 898 aa, Homo sapiens; identical to SEQ ID NO: 817144

SEQ ID NO: 817153 - protein, 898 aa, Homo sapiens; identical to SEQ ID NO: 817143

SEQ ID NO: 817154 - protein, 898 aa, Homo sapiens; identical to SEQ ID NO: 817143

SEQ ID NO: 817155 - protein, 438 aa, Homo sapiens
MSGYKRMRRQHQKQLIALENKLKAEMDEHRLKLQKEVETHANNSSIELEKLAKKQVAIIEKEAKVAAADEKKFQQQILAQQKKDLTTFLESQKKQYKICKEKIKEEMNEDHSTPKKEKQERISKHKENLQHTQAEEEAHLLTQQRLYYDKNCRFFKRKIMIKRHEVEQQNIREELNKKRTQKEMEHAMLIRHDESTRELEYRQLHTLQKLRMDLIRLQHQTELENQLEYNKRRERELHRKHVMELRQQPKNLKAMEMQIKKQFQDTCKVQTKQYKALKNHQLEVTPKNEHKTILKTLKDEQTRKLAILAEQYEQSINEMMASQALRLDEAQEAECQALRLQLQQEMELLNAYQSKIKMQTEAQHERELQKLEQRVSLRRAHLEQKIEEELAALQKERSERIKNLLERQEREIETFDMESLRMGFGNLVTLDFPKEDYR

SEQ ID NO: 817156 - protein, 469 aa, Homo sapiens
MVLTHHTQKSISILVTRQIHEHEQENELREQMSGYKRMRRQHQKQLIALENKLKAEMDEHRLKLQKEVETHANNSSIELEKLAKKQVAIIEKEAKVAAADEKKFQQQILAQQKKDLTTFLESQKKQYKICKEKIKEEMNEDHSTPKKEKQERISKHKENLQHTQAEEEAHLLTQQRLYYDKNCRFFKRKIMIKRHEVEQQNIREELNKKRTQKEMEHAMLIRHDESTRELEYRQLHTLQKLRMDLIRLQHQTELENQLEYNKRRERELHRKHVMELRQQPKNLKAMEMQIKKQFQDTCKVQTKQYKALKNHQLEVTPKNEHKTILKTLKDEQTRKLAILAEQYEQSINEMMASQALRLDEAQEAECQALRLQLQQEMELLNAYQSKIKMQTEAQHERELQKLEQRVSLRRAHLEQKIEEELAALQKERSERIKNLLERQEREIETFDMESLRMGFGNLVTLDFPKEDYR

SEQ ID NO: 817157 - protein, 379 aa, Homo sapiens
MRKGVLKDPEIADLFYKDDPEELFIGLHEIGHGSFGAVYFATNAHTNEVVAIKKMSYSGKQTHEKWQDILKEVKFLRQLKHPNTIEYKGCYLKEHTAWLVMEYCLGSASDLLEVHKKPLQEVEIAAITHGALHGLAYLHSHALIHRDIKAGNILLTEPGQVKLADFGSASMASPANSFVGTPYWMAPEVILAMDEGQYDGKVDIWSLGITCIELAERKPPLFNMNAMSALYHIAQNDSPTLQSNEWTDSFRRFVDYCLQKIPQERPTSAELLRHDFVRRDRPLRVLIDLIQRTKDAVRELDNLQYRKMKKILFQETRNGPLNESQEDEEDSEHGTSLNREMDSLGSNHSIPSMSVSTGSQSSSVNSMQEVMDESSSELS

SEQ ID NO: 817158 - protein, 787 aa, Homo sapiens [sequence omitted]

SEQ ID NO: 817159 - protein, 129 aa, Homo sapiens
CRQGCMTVCVFCVLQLRLDEAQEAECQALRLQLQQEMELLNAYQSKIKMQTEAQHERELQKLEQRVSLRRAHLEQKIEEELAALQKERSERIKNLLERQEREIETFDMESLRMGFGNLVTLDFPKEDYR

SEQ ID NO: 817160 - protein, 704 aa, Homo sapiens
FSVVSSCLELLSWVSLLQEKLREHLAEKEKLNEERLEQEEKLKAKIRQLTEEKAALEEYITQERNRAKETLEEERKRMQELESLLAQQKKALAKSITQEKNRVKEALEEEQTRVQELEERLARQKEISESNIAYEKRKAKEAMEKEKKKVQDLENRLTKQKEELELKEQKEDVLNNKLSDALAMVEETQKTKATESLKAESLALKLNETLAELETTKTKMIMVEERLILQQKMVKALQDEQESQRHGFEEEIMEYKEQIKQHAQTIVSLEEKLQKVTQHHKKIEGEIATLKDNDPAPKEERPQDPLVAPMTESSAKDMAYEHLIDDLLAAQKEILSQQEVIMKLRKDLTEAHSRMSDLRGELNEKQKMELEQNVVLVQQQSKELSVLKEKMAQMSSLVEKKDRELKALEEALRASQEKHRLQLNTEKEQKPRKKTQTCDTSVQIEPVHTEAFSSSQEQQSFSDLGVRCKGSRHEEVIQRQKKALSELRARIKELEKARSPDHKDHQNESFLDLKNLRMENNVQKILLDAKPDLPTLSRIEILAPQNGLCNARFGSAMEKSGKMDVAEALELSEKLYLDMSKTLGSLMNIKNMSGHVSMKYLSRQEREKVNQLRQRDLDLVFDKITQLKNQLGRKEELLRGYEKDVEQLRRSKVSIEMYQSQVAKLEDDIYKEAEEKALLKEALERMEHQLCQEKRINRAIRQQK

SEQ ID NO: 817161 - protein, 129 aa, Homo sapiens
APKGSSTIMGPTIPEPLGYRGVNHRASAAPSTCSGRRCLELKQTCPPRRALFLTGPGLSSLHLCWNLEQRPPRDSARWGTVAPKSCAPFSLRKWIFLNFQMLPVWNAVPGKAQRSKWLASKSGEKSIFL

SEQ ID NO: 817162 - protein, 521 aa, Homo sapiens [sequence omitted]

SEQ ID NO: 817163 - protein, 556 aa, Homo sapiens
MVEETQKTKATESLKAESLALKLNETLAELETTKTKMIMVEERLILQQKMVKALQDEQESQRHGFEEEIMEYKEQIKQHAQTIVSLEEKLQKVTQHHKKIEGEIATLKDNDPAPKEERPQDPLVAPMTESSAKDMAYEHLIDDLLAAQKEILSQQEVIMKLRKDLTEAHSRMSDLRGELNEKQKMELEQNVVLVQQQSKELSVLKEKMAQMSSLVEKKDRELKALEEALRASQEKHRLQLNTEKEQKPRKKTQTCDTSVQIEPVHTEAFSSSQEQQSFSDLGVRCKGSRHEEVIQRQKKALSELRARIKELEKARSPDHKDHQNESFLDLKNLRMENNVQKILLDAKPDLPTLSRIEILAPQNGLCNARFGSAMEKSGKMDVAEALELSEKLYLDMSKTLGSLMNIKNMSGHVSMKYLSRQEREKVNQLRQRDLDLVFDKITQLKNQLGRKEELLRGYEKDVEQLRRSKVSIEMYQSQVAKLEDDIYKEAEEKALLKEALERMEHQLCQEKRINRAIRQQKESVEEHELRNAKESTPCNCAFKEKDRQALPHLPAV

SEQ ID NO: 817164 - protein, 129 aa, Homo sapiens; identical to SEQ ID NO: 817161

SEQ ID NO: 817165 - protein, 139 aa, Homo sapiens
FSVVSSCLELLSWVSLLQEKLREHLAEKEKLNEERLEQEEKLKAKIRQLTEEKAALEEYITQERNRAKETLEEERKRMQELESLLAQQKKALAKSITQEKNRVKEALEEEQTRVQELEERLARQKEVLESSIAHEKRKA

SEQ ID NO: 817166 - protein, 155 aa, Homo sapiens
PRVSNCKPNPREIASFRFWVTMTFKQAPKGSSTIMGPTIPEPLGYRGVNHRASAAPSTCSGRRCLELKQTCPPRRALFLTGPGLSSLHLCWNLEQRPPRDSARWGTVAPKSCAPFSLRKWIFLNFQMLPVWNAVPGKAQRSKWLASKSGEKSIFL

SEQ ID NO: 817167 - protein, 110 aa, Homo sapiens
MSGHVSMKYLSRQEREKVNQLRQRDLDLVFDKITQLKNQLGRKEELLRGYEKDVEQLRYLGTPMSPQKGPGLPSPGYTQASSRPLGLGQEDRDPRVEYLQCQKGTREGTD

SEQ ID NO: 817168 - protein, 105 aa, Homo sapiens
MENNVQKILLDAKPDLPTLSRIEILAVTKENSLCCDWHVERRGLRADTSFVPWHSHTCQWFGAGCCLYSLAGAPTIPVVQGLHRKVAFHLPTVWFRMVLTLGHVN

SEQ ID NO: 817169 - protein, 192 aa, Homo sapiens
MAGLLALLGPAGRVGARVRPRATWLLGATAPCAPPPLALALLPPRLDARLLRTARGDCRGHQDPSQATGTTGSSVSCTEEKKQSKSQQLKKIFQEYGTVGVSLHIGISLISLGIFYMVVSSGVDMPAILLKLGFKESLVQSKMAAGTSTFVVAYAIHKLFAPVRISITLVSVPLIVRYFRKVGFFKPPAAKP

SEQ ID NO: 817170 - protein, 104 aa, Homo sapiens
MAGLLALLGPAGRVGARVRPRATWLLGATAPCAPPPLALALLPPRLDARLLRTARGDCRGHQSDRWHTGLGDPLQSGTFLHTPCRLLMILQGPAQLFLPPGSPL

SEQ ID NO: 817171 - protein, 192 aa, Homo sapiens; identical to SEQ ID NO: 817169

SEQ ID NO: 817172 - protein, 192 aa, Homo sapiens; identical to SEQ ID NO: 817169

SEQ ID NO: 817173 - protein, 192 aa, Homo sapiens; identical to SEQ ID NO: 817169

SEQ ID NO: 817174 - protein, 261 aa, Homo sapiens
MKITNGRHGDSAGAEGTMENFTALFGAQADPPPPPTALGFGPGKPPPPPPPPAGGGPGTAPPPTAATAPPGADKSGAGCGPFYLMRELPGSTELTGSTNLITHYNLEQAYNKFCGKKVKEKLSNFLPDLPGMIDLPGSHDNSSLRSLIEKPPILSSSFNPITGTMLAGFRLHTGPLPEQCRLMHIQPPKKKNKHKHKQSRTQDPVPPETPSDSDHKKKKKKKEEDPERKRKKKEKKKKKNRHSPDHPGMGSSQASSSSSLR

SEQ ID NO: 817175 - protein, 203 aa, Homo sapiens
MKITNGRHGDSAGAEGTMENFTALFGAQADPPPPPTALGFGPGKPPPPPPPPAGGGPGTAPPPTAATAPPGADKSGAGCGPFYLMRELPGSTELTGSTNLITHYNLEQAYNKFCGKKLPEQCRLMHIQPPKKKNKHKHKQSRTQDPVPPETPSDSDHKKKKKKKEEDPERKRKKKEKKKKKNRHSPDHPGMGSSQASSSSSLR

SEQ ID NO: 817176 - protein, 216 aa, Homo sapiens
MKITNGRHGDSAGAEGTMENFTALFGAQADPPPPPTALGFGPGKPPPPPPPPAGGGPGTAPPPTAATAPPGADKSGAGCGPFYLMRELPGSTELTGSTNLITHYNLEQAYNKFCGKKVKEKLSNFLPDLPGMIDLPGSHDNSSLRSLIEKPPILSSSFNPITGTMLAGFRLHTGPLPEQCRLMHIQPPKKKNKHKHKQSRTQDPVPPGKKQFYSKQ

SEQ ID NO: 817177 - protein, 211 aa, Homo sapiens
MKITNGRHGDSAGAEGTMENFTALFGAQADPPPPPTALGFGPGKPPPPPPPPAGGGPGTAPPPTAATAPPGADKSGAGCGPFYLMRELPGSTELTGSTNLITHYNLEQAYNKFCGKKVKEKLSNFLPDLPGMIDLPGSHDNSSLRSLIEKPPILSSSFNPITGTMLAGFRLHTGPLPEQCRLMHIQPPKKKNKHKHKQSRTQDPVPPGKPS

SEQ ID NO: 817178 - protein, 805 aa, Homo sapiens
MAFSPWQILSPVQWAKWTWSAVRGGAAGEDEAGGPEGDPEEEDSQAETKSLSFSSDSEGNFETPEAETPIRSPFKESCDPSLGLAGPGAKSQESQEADEQLVAEVVEKCSSKTCSKPSENEVPQQAIDSHSVKNFREEPEHDFSKISIVRPFSIETKDSTDISAVLGTKAAHGCVTAVSGKALPSSPPDALQDEAMTEGSMGVTLEASAEADLKAGNSCPELVPSRRSKLRKPKPVPLRKKAIGGEFSDTNAAVEGTPLPKASYHFSPEELDENTSPLLGDARFQKSPPDIKETPGTLSSDTNDSGVELGEESRSSPLKLEFDFTEDTGNIEARKALPRKLGRKLGSTLTPKIQKDGISKSAGLEQPTDPVARDGPLSQTSSKPDPSQWESPSFNPFGSHSVLQNSPPLSSEGSYHFDPDNFDESMDPFKPTTTLTSSDFCSPTGNHVNEILESPKKAKSRLITSGCKVKKHETQSLALDACSRDEGAVISQISDISNRDGHATDEEKLASTSCGQKSAGAEVKGEPEEDLEYFECSNVPVSTINHAFSSSEAGIEKETCQKMEEDGSTVLGLLESSAEKAPVSVSCGGESPLDGICLSESDKTAVLTLIREEIITKEIEANEWKKKYEETRQEVLEMRKIVAEYEKTIAQMIEDEQRTSMTSQKSFQQLTMEKEQALADLNSVERSLSDLFRRYENLKGVLEGFKKNEEALKKCAQDYLARVKQEEQRYQALKIHAEEKLDKANEEIAQVRTKAKAESAALHAGLRKEQMKVESLERALQQKNQEIEELTKICDELIAKLGKTD

SEQ ID NO: 817179 - protein, 121 aa, Homo sapiens [sequence omitted]

SEQ ID NO: 817180 - protein, 138 aa, Homo sapiens
RGAMALQLWALTCLGLLGAGASLRPRKLDFFRSEKELNHLAVDEASGVVYLGAVNALYQLDAKLQLEQQVATGPALDNKKCTPPIEASQCHEVCEEPLIWRDECCVDYCYQDCVVWNIHLHKFYMHSNFPFYMSSNYL

SEQ ID NO: 817181 - protein, 817 aa, Homo sapiens
MAFSPWQILSPVQWAKWTWSAVRGGAAGEDEAGGPEGDPEEEDSQAETKSLSFSSDSEGNFETPEAETPIRSPFKESCDPSLGLAGPGAKSQESQEADEQLVAEVVEKCSSKTCSKPSENEVPQQAIDSHSVKNFREEPEHDFSKISIVRPFSIETKDSTDISAVLGTKAAHGCVTAVSGKALPSSPPDALQDEAMTEGSMGVTLEASAEADLKAGNSCPELVPSRRSKLRKPKPVPLRKKAIGGEFSDTNAAVEGTPLPKASYHFSPEELDENTSPLLGDARFQKSPPDIKETPGTLSSDTNDSGVELGEESRSSPLKLEFDFTEDTGNIEARKALPRKLGRKLGSTLTPKIQKDGISKSAGLEQPTDPVARDGPLSQTSSKPDPSQWESPSFNPFGSHSVLQNSPPLSSEGSYHFDPDNFDESMDPFKPTTTLTSSDFCSPTGNHVNEILESPKKAKSRLITTTEQVKFLCFLLSGCKVKKHETQSLALDACSRDEGAVISQISDISNRDGHATDEEKLASTSCGQKSAGAEVKGEPEEDLEYFECSNVPVSTINHAFSSSEAGIEKETCQKMEEDGSTVLGLLESSAEKAPVSVSCGGESPLDGICLSESDKTAVLTLIREEIITKEIEANEWKKKYEETRQEVLEMRKIVAEYEKTIAQMIEDEQRTSMTSQKSFQQLTMEKEQALADLNSVERSLSDLFRRYENLKGVLEGFKKNEEALKKCAQDYLARVKQEEQRYQALKIHAEEKLDKANEEIAQVRTKAKAESAALHAGLRKEQMKVESLERALQQKNQEIEELTKICDELIAKLGKTD

SEQ ID NO: 817182 - protein, 817 aa, Homo sapiens; identical to SEQ ID NO: 817181

SEQ ID NO: 817183 - protein, 791 aa, Homo sapiens
MRNQRQQVAQKGEGSDPGDRLWGPSPKSSDSEGNFETPEAETPIRSPFKESCDPSLGLAGPGAKSQESQEADEQLVAEVVEKCSSKTCSKPSENEVPQQAIDSHSVKNFREEPEHDFSKISIVRPFSIETKDSTDISAVLGTKAAHGCVTAVSGKALPSSPPDALQDEAMTEGSMGVTLEASAEADLKAGNSCPELVPSRRSKLRKPKPVPLRKKAIGGEFSDTNAAVEGTPLPKASYHFSPEELDENTSPLLGDARFQKSPPDIKETPGTLSSDTNDSGVELGEESRSSPLKLEFDFTEDTGNIEARKALPRKLGRKLGSTLTPKIQKDGISKSAGLEQPTDPVARDGPLSQTSSKPDPSQWESPSFNPFGSHSVLQNSPPLSSEGSYHFDPDNFDESMDPFKPTTTLTSSDFCSPTGNHVNEILESPKKAKSRLITTTEQVKFLCFLLSGCKVKKHETQSLALDACSRDEGAVISQISDISNRDGHATDEEKLASTSCGQKSAGAEVKGEPEEDLEYFECSNVPVSTINHAFSSSEAGIEKETCQKMEEDGSTVLGLLESSAEKAPVSVSCGGESPLDGICLSESDKTAVLTLIREEIITKEIEANEWKKKYEETRQEVLEMRKIVAEYEKTIAQMIEDEQRTSMTSQKSFQQLTMEKEQALADLNSVERSLSDLFRRYENLKGVLEGFKKNEEALKKCAQDYLARVKQEEQRYQALKIHAEEKLDKANEEIAQVRTKAKAESAALHAGLRKEQMKVESLERALQQKNQEIEELTKICDELIAKLGKTD

SEQ ID NO: 817184 - protein, 817 aa, Homo sapiens; identical to SEQ ID NO: 817181

SEQ ID NO: 817185 - protein, 776 aa, Homo sapiens
MAFSPWQILSPVQWAKWTWSAVRGGAAGEDEAGGPEGDPEEEDSQAETKSLSFSSDSEGNFETPEAETPIRSPFKESCDPSLGLAGPGAKSQESQEADEQLVAEVVEKCSSKTCSKPSENEVPQQAIDSHSVKNFREEPEHDFSKISIVRPFSIETKDSTDISAVLGTKAAHGCVTAVSGKALPSSPPDALQDEAMTEGSMGVTLEASAEADLKAGNSCPELVPSRRSKLRKPKPVPLRKKAIGGEFSDTNAAVEGTPLPKASYHFSPEELDENTSPLLGDARFQKSPPDIKETPGTLSSDTNDSGVELGEESRSSPLKLEFDFTEDTGNIEARKALPRKLGRKLGSTLTPKIQKDGISKSAGLEQPTDPVARDGPLSQTSSKPDPSQWESPSFNPFGSHSVLQNSPPLSSEGSYHFDPDNFDESMDPFKPTTTLTSSDFCSPTGNHVNEILESPKKAKSRLITSGCKVKKHETQSLALDACSRDEGAVISQISDISNRDGHATDEEKLASTSCGQKSAGAEVKGIEKETCQKMEEDGSTVLGLLESSAEKAPVSVSCGGESPLDGICLSESDKTAVLTLIREEIITKEIEANEWKKKYEETRQEVLEMRKIVAEYEKTIAQMIEDEQRTSMTSQKSFQQLTMEKEQALADLNSVERSLSDLFRRYENLKGVLEGFKKNEEALKKCAQDYLARVKQEEQRYQALKIHAEEKLDKANEEIAQVRTKAKAESAALHAGLRKEQMKVESLERALQQKNQEIEELTKICDELIAKLGKTD

SEQ ID NO: 817186 - protein, 395 aa, Homo sapiens
MAFSPWQILSPVQWAKWTWSAVRGGAAGEDEAGGPEGDPEEEDSQAETKSLSFRSGCKVKKHETQSLALDACSRDEGAVISQISDISNRDGHATDEEKLASTSCGQKSAGAEVKGEPEEDLEYFECSNVPVSTINHAFSSSEAGIEKETCQKMEEDGSTVLGLLESSAEKAPVSVSCGGESPLDGICLSESDKTAVLTLIREEIITKEIEANEWKKKYEETRQEVLEMRKIVAEYEKTIAQMIEDEQRTSMTSQKSFQQLTMEKEQALADLNSVERSLSDLFRRYENLKGVLEGFKKNEEALKKCAQDYLARVKQEEQRYQALKIHAEEKLDKANEEIAQVRTKAKAESAALHAGLRKEQMKVESLERALQQKNQEIEELTKICDELIAKLGKTD

SEQ ID NO: 817187 - protein, 344 aa, Homo sapiens
MEWSGCKVKKHETQSLALDACSRDEGAVISQISDISNRDGHATDEEKLASTSCGQKSAGAEVKGEPEEDLEYFECSNVPVSTINHAFSSSEAGIEKETCQKMEEDGSTVLGLLESSAEKAPVSVSCGGESPLDGICLSESDKTAVLTLIREEIITKEIEANEWKKKYEETRQEVLEMRKIVAEYEKTIAQMIEDEQRTSMTSQKSFQQLTMEKEQALADLNSVERSLSDLFRRYENLKGVLEGFKKNEEALKKCAQDYLARVKQEEQRYQALKIHAEEKLDKANEEIAQVRTKAKAESAALHAGLRKEQMKVESLERALQQKNQEIEELTKICDELIAKLGKTD

SEQ ID NO: 817188 - protein, 154 aa, Homo sapiens
MIEDEQRTSMTSQKSFQQLTMEKEQALADLNSVERSLSDLFRRYENLKGVLEGFKKNEEALKKCAQDYLARVKQEEQRYQALKIHAEEKLDKANEEIAQVRTKAKAESAALHAGLRKEQMKVESLERALQQKNQEIEELTKICDELIAKLGKTD

SEQ ID NO: 817189 - protein, 117 aa, Homo sapiens
MELFRSPIFVFFLSCSQFFEACASQMSVVSILTGFDYVANHVLFVSLLHPNTINRANEEIAQVRTKAKAESAALHAGLRKEQMKVESLERALQQKNQEIEELTKICDELIAKLGKTD

SEQ ID NO: 817190 - protein, 817 aa, Homo sapiens; identical to SEQ ID NO: 817181

SEQ ID NO: 817191 - protein, 817 aa, Homo sapiens; identical to SEQ ID NO: 817181

SEQ ID NO: 817192 - protein, 817 aa, Homo sapiens; identical to SEQ ID NO: 817181

SEQ ID NO: 817193 - protein, 805 aa, Homo sapiens; identical to SEQ ID NO: 817178

SEQ ID NO: 817194 - protein, 805 aa, Homo sapiens; identical to SEQ ID NO: 817178

SEQ ID NO: 817195 - protein, 805 aa, Homo sapiens; identical to SEQ ID NO: 817178

SEQ ID NO: 817196 - protein, 586 aa, Homo sapiens
MAFSPWQILSPVQWAKWTWSAVRGGAAGEDEAGGPEGDPEEEDSQAETKSLSFSSDSEGNFETPEAETPIRSPFKESCDPSLGLAGPGAKSQESQEADEQLVAEVVEKCSSKTCSKPSENEVPQQAIDSHSVKNFREEPEHDFSKISIVRPFSIETKDSTDISAVLGTKAAHGCVTAVSGKALPSSPPDALQDEAMTEGSMGVTLEASAEADLKAGNSCPELVPSRRSKLRKPKPVPLRKKAIGGEFSDTNAAVEGTPLPKASYHFSPEELDENTSPLLGDARFQKSPPDIKETPGTLSSDTNDSGVELGEESRSSPLKLEFDFTEDTGNIEARKALPRKLGRKLGSTLTPKIQKDGISKSAGLEQPTDPVARDGPLSQTSSKPDPSQWESPSFNPFGSHSVLQNSPPLSSEGSYHFDPDNFDESMDPFKPTTTLTSSDFCSPTGNHVNEILESPKKAKSRLITSGCKVKKHETQSLALDACSRDEGAVISQISDISNRDGHATDEEKLASTSCGQKSAGAEVKGIEKETCQKMEEDGSTVLGLLESSAEKAPVSVSCGGESPLDGICLSESDKTAVLTLIREEIH

SEQ ID NO: 817197 - protein, 476 aa, Homo sapiens
MAFSPWQILSPVQWAKWTWSAVRGGAAGEDEAGGPEGDPEEEDSQAETKSLSFSSDSEGNFETPEAETPIRSPFKESCDPSLGLAGPGAKSQESQEADEQLVAEVVEKCSSKTCSKPSENEVPQQAIDSHSVKNFREEPEHDFSKISIVRPFSIETKDSTDISAVLGTKAAHGCVTAVSGKALPSSPPDALQDEAMTEGSMGVTLEASAEADLKAGNSCPELVPSRRSKLRKPKPVPLRKKAIGGEFSDTNAAVEGTPLPKASYHFSPEELDENTSPLLGDARFQKSPPDIKETPGTLSSDTNDSGVELGEESRSSPLKLEFDFTEDTGNIEARKALPRKLGRKLGSTLTPKIQKDGISKSAGLEQPTDPVARDGPLSQTSSKPDPSQWESPSFNPFGSHSVLQNSPPLSSEGSYHFDPDNFDESMDPFKPTTTLTSSDFCSPTGNHVNEILESPKKAKSRLITTTEQVKFLCFLL

SEQ ID NO: 817198 - protein, 464 aa, Homo sapiens
MAFSPWQILSPVQWAKWTWSAVRGGAAGEDEAGGPEGDPEEEDSQAETKSLSFSSDSEGNFETPEAETPIRSPFKESCDPSLGLAGPGAKSQESQEADEQLVAEVVEKCSSKTCSKPSENEVPQQAIDSHSVKNFREEPEHDFSKISIVRPFSIETKDSTDISAVLGTKAAHGCVTAVSGKALPSSPPDALQDEAMTEGSMGVTLEASAEADLKAGNSCPELVPSRRSKLRKPKPVPLRKKAIGGEFSDTNAAVEGTPLPKASYHFSPEELDENTSPLLGDARFQKSPPDIKETPGTLSSDTNDSGVELGEESRSSPLKLEFDFTEDTGNIEARKALPRKLGRKLGSTLTPKIQKDGISKSAGLEQPTDPVARDGPLSQTSSKPDPSQWESPSFNPFGSHSVLQNSPPLSSEGSYHFDPDNFDESMDPFKPTTTLTSSDFCSPTGNHVNEILESPKKAKSRLIT

SEQ ID NO: 817199 - protein, 1187 aa, Homo sapiens
HEARRGLKMAACGRVRRMFRLSAALHLLLLFAAGAEKLPGQGVHSQGQGPGANFVSFVGQAGGGGPAGQQLPQLPQSSQLQQQQQQQQQQQQPQPPQPPFPAGGPPARRGGAGAGGGWKLAEEESCREDVTRVCPKHTWSNNLAVLECLQDVREPENEISSDCNHLLWNYKLNLTTDPKFESVAREVCKSTITEIKECADEPVGKGYMVSCLVDHRGNITEYQCHQYITKMTAIIFSDYRLICGFMDDCKNDINILKCGSIRLGEKDAHSQGEVVSCLEKGLVKEAEEREPKIQVSELCKKAILRVAELSSDDFHLDRHLYFACRDDRERFCENTQAGEGRVYKCLFNHKFEESMSEKCREALTTRQKLIAQDYKVSYSLAKSCKSDLKKYRCNVENLPRSREARLSYLLMCLESAVHRGRQVSSECQGEMLDYRRMLMEDFSLSPEIILSCRGEIEHHCSGLHRKGRTLHCLMKVVRGEKGNLGMNCQQALQTLIQETDPGADYRIDRALNEACESVIQTACKHIRSGDPMILSCLMEHLYTEKMVEDCEHRLLELQYFISRDWKLDPVLYRKCQGDASRLCHTHGWNETSEFMPQGAVFSCLYRHAYRTEEQGRRLSRECRAEVQRILHQRAMDVKLDPALQDKCLIDLGKWCSEKTETGQELECLQDHLDDLVVECRDIVGNLTELESEDIQIEALLMRACEPIIQNFCHDVADNQIDSGDLMECLIQNKHQKDMNEKCAIGVTHFQLVQMKDFRFSYKFKMACKEDVLKLCPNIKKKVDVVICLSTTVRNDTLQEAKEHRVSLKCRRQLRVEELEMTEDIRLEPDLYEACKSDIKNFCSAVQYGNAQIIECLKENKKQLSTRCHQKVFKLQETEMMDPELDYTLMRVCKQMIKRFCPEADSKTMLQCLKQNKNSELMDPKCKQMITKRQITQNTDYRLNPMLRKACKADIPKFCHGILTKAKDDSELEGQVISCLKLRYADQRLSSDCEDQIRIIIQESALDYRLDPQLQLHCSDEISSLCAEEAAAQEQTGQVEECLKVNLLKIKTELCKKEVLNMLKESKADIFVDPVLHTACALDIKHHCAAITPGRGRQMSCLMEALEDKRVRLQPECKKRLNDRIEMWSYAAKVAPADGFSDLAMQVMTSPSKNYILSVISGSICILFLIGLMCGRITKRVTRELKDR

SEQ ID NO: 817200 - protein, 1215 aa, Homo sapiens
MAACGRVRRMFRLSAALHLLLLFAAGAEKLPGQGVHSQGQGPGANFVSFVGQAGGGGPAGQQLPQLPQSSQLQQQQQQQQQQQQPQPPQPPFPAGGPPARRGGAGAGGGWKLAEEESCREDVTRVCPKHTWSNNLAVLECLQDVREPENEISSDCNHLLWNYKLNLTTDPKFESVAREVCKSTITEIKECADEPVGKGYMVSCLVDHRGNITEYQCHQYITKMTAIIFSDYRLICGFMDDCKNDINILKCGSIRLGEKDAHSQGEVVSCLEKGLVKEAEEREPKIQVSELCKKAILRVAELSSDDFHLDRHLYFACRDDRERFCENTQAGEGRVYKCLFNHKFEESMSEKCREALTTRQKLIAQDYKVSYSLAKSCKSDLKKYRCNVENLPRSREARLSYLLMCLESAVHRGRQVSSECQGEMLDYRRMLMEDFSLSPEIILSCRGEIEHHCSGLHRKGRTLHCLMKVVRGEKGNLGMNCQQALQTLIQETDPGADYRIDRALNEACESVIQTACKHIRSGDPMILSCLMEHLYTEKMVEDCEHRLLELQYFISRDWKLDPVLYRKCQGDASRLCHTHGWNETSEFMPQGAVFSCLYRHAYRTEEQGRRLSRECRAEVQRILHQRAMDVKLDPALQDKCLIDLGKWCSEKTETGQELECLQDHLDDLVVECRDIVGNLTELESEAEREYVFKNLPFKVYGGAVLYLFWGYLLQILESFPKDIQIEALLMRACEPIIQNFCHDVADNQIDSGDLMECLIQNKHQKDMNEKCAIGVTHFQLVQMKDFRFSYKFKMACKEDVLKLCPNIKKKVDVVICLSTTVRNDTLQEAKEHRVSLKCRRQLRVEELEMTEDIRLEPDLYEACKSDIKNFCSAVQYGNAQIIECLKENKKQLSTRCHQKVFKLQETEMMDPELDYTLMRVCKQMIKRFCPEADSKTMLQCLKQNKNSELMDPKCKQMITKRQITQNTDYRLNPMLRKACKADIPKFCHGILTKAKDDSELEGQVISCLKLRYADQRLSSDCEDQIRIIIQESALDYRLDPQLQLHCSDEISSLCAEEAAAQEQTGQVEECLKVNLLKIKTELCKKEVLNMLKESKADIFVDPVLHTACALDIKHHCAAITPGRGRQMSCLMEALEDKRVRLQPECKKRLNDRIEMWSYAAKVAPADGFSDLAMQVMTSPSKNYILSVISGSICILFLIGLMCGRITKRVTRELKDR

SEQ ID NO: 817201 - protein, 1211 aa, Homo sapiens
HEARRGLKMAACGRVRRMFRLSAALHLLLLFAAGAEKLPGQGVHSQGQGPGANFVSFVGQAGGGGPAGQQLPQLPQSSQLQQQQQQQQQQQQPQPPQPPFPAGGPPARRGGAGAGGGWKLAEEESCREDVTRVCPKHTWSNNLAVLECLQDVREPENEISSDCNHLLWNYKLNLTTDPKFESVAREVCKSTITEIKECADEPVGKGYMVSCLVDHRGNITEYQCHQYITKMTAIIFSDYRLICGFMDDCKNDINILKCGSIRLGEKDAHSQGEVVSCLEKGLVKEAEEREPKIQVSELCKKAILRVAELSSDDFHLDRHLYFACRDDRERFCENTQAGEGRVYKCLFNHKFEESMSEKCREALTTRQKLIAQDYKVSYSLAKSCKSDLKKYRCNVENLPRSREARLSYLLMCLESAVHRGRQVSSECQGEMLDYRRMLMEDFSLSPEIILSCRGEIEHHCSGLHRKGRTLHCLMKVVRGEKGNLGMNCQQALQTLIQETDPGADYRIDRALNEACESVIQTACKHIRSGDPMILSCLMEHLYTEKMVEDCEHRLLELQYFISRDWKLDPVLYRKCQGDASRLCHTHGWNETSEFMPQGAVFSCLYRHAYRTEEQGRRLSRECRAEVQRILHQRAMDVKLDPALQDKCLIDLGKWCSEKTETGQELECLQDHLDDLVVECRDIVGNLTELESEDIQIEALLMRACEPIIQNFCHDVADNQIDSGDLMECLIQNKHQKDMNEKCAIGVTHFQLVQMKDFRFSYKFKMACKEDVLKLCPNIKKKVDVVICLSTTVRNDTLQEAKEHRVSLKCRRQLRVEELEMTEDIRLEPDLYEACKSDIKNFCSAVQYGNAQIIECLKENKKQLSTRCHQKVFKLQETEMMDPELDYTLMRVCKQMIKRFCPEADSKTMLQCLKQNKNSELMDPKCKQMITKRQITQNTDYRLNPMLRKACKADIPKFCHGILTKAKDDSELEGQVISCLKLRYADQRLSSDCEDQIRIIIQESALDYRLDPQLQLHCSDEISSLCAEEAAAQEQTGQVEECLKVNLLKIKTELCKKEVLNMLKESKADIFVDPVLHTACALDIKHHCAAITPGRGRQMSCLMEALEDKRVRLQPECKKRLNDRIEMWSYAAKVAPADGFSDLAMQVMTSPSKNYILSVISGSICILFLIGLMCGRITKRVTRELKDRLQYRSETMAYKGLVWSQDVTGSPA

SEQ ID NO: 817202 - protein, 650 aa, Homo sapiens
MEHLYTEKMVEDCEHRLLELQYFISRDWKLDPVLYRKCQGDASRLCHTHGWNETSEFMPQGAVFSCLYRHAYRTEEQGRRLSRECRAEVQRILHQRAMDVKLDPALQDKCLIDLGKWCSEKTETGQELECLQDHLDDLVVECRDIVGNLTELESEDIQIEALLMRACEPIIQNFCHDVADNQIDSGDLMECLIQNKHQKDMNEKCAIGVTHFQLVQMKDFRFSYKFKMACKEDVLKLCPNIKKKVDVVICLSTTVRNDTLQEAKEHRVSLKCRRQLRVEELEMTEDIRLEPDLYEACKSDIKNFCSAVQYGNAQIIECLKENKKQLSTRCHQKVFKLQETEMMDPELDYTLMRVCKQMIKRFCPEADSKTMLQCLKQNKNSELMDPKCKQMITKRQITQNTDYRLNPMLRKACKADIPKFCHGILTKAKDDSELEGQVISCLKLRYADQRLSSDCEDQIRIIIQESALDYRLDPQLQLHCSDEISSLCAEEAAAQEQTGQVEECLKVNLLKIKTELCKKEVLNMLKESKADIFVDPVLHTACALDIKHHCAAITPGRGRQMSCLMEALEDKRVRLQPECKKRLNDRIEMWSYAAKVAPADGFSDLAMQVMTSPSKNYILSVISGSICILFLIGLMCGRITKRVTRELKDR

SEQ ID NO: 817203 - protein, 668 aa, Homo sapiens
MTACKHIRSGDPMILSCLMEHLYTEKMVEDCEHRLLELQYFISRDWKLDPVLYRKCQGDASRLCHTHGWNETSEFMPQGAVFSCLYRHAYRTEEQGRRLSRECRAEVQRILHQRAMDVKLDPALQDKCLIDLGKWCSEKTETGQELECLQDHLDDLVVECRDIVGNLTELESEDIQIEALLMRACEPIIQNFCHDVADNQIDSGDLMECLIQNKHQKDMNEKCAIGVTHFQLVQMKDFRFSYKFKMACKEDVLKLCPNIKKKVDVVICLSTTVRNDTLQEAKEHRVSLKCRRQLRVEELEMTEDIRLEPDLYEACKSDIKNFCSAVQYGNAQIIECLKENKKQLSTRCHQKVFKLQETEMMDPELDYTLMRVCKQMIKRFCPEADSKTMLQCLKQNKNSELMDPKCKQMITKRQITQNTDYRLNPMLRKACKADIPKFCHGILTKAKDDSELEGQVISCLKLRYADQRLSSDCEDQIRIIIQESALDYRLDPQLQLHCSDEISSLCAEEAAAQEQTGQVEECLKVNLLKIKTELCKKEVLNMLKESKADIFVDPVLHTACALDIKHHCAAITPGRGRQMSCLMEALEDKRVRLQPECKKRLNDRIEMWSYAAKVAPADGFSDLAMQVMTSPSKNYILSVISGSICILFLIGLMCGRITKRVTRELKDR

SEQ ID NO: 817204 - protein, 1032 aa, Homo sapiens
HEARRGLKMAACGRVRRMFRLSAALHLLLLFAAGAEKLPGQGVHSQGQGPGANFVSFVGQAGGGGPAGQQLPQLPQSSQLQQQQQQQQQQQQPQPPQPPFPAGGPPARRGGAGAGGGWKLAEEESCREDVTRVCPKHTWSNNLAVLECLQDVREPENEISSDCNHLLWNYKLNLTTDPKFESVAREVCKSTITEIKECADEPVGKGYMVSCLVDHRGNITEYQCHQYITKMTAIIFSDYRLICGFMDDCKNDINILKCGSIRLGEKDAHSQGEVVSCLEKGLVKEAEEREPKIQVSELCKKAILRVAELSSDDFHLDRHLYFACRDDRERFCENTQAGEGRVYKCLFNHKFEESMSEKCREALTTRQKLIAQDYKVSYSLAKSCKSDLKKYRCNVENLPRSREARLSYLLMCLESAVHRGRQVSSECQGEMLDYRRMLMEDFSLSPEIILSCRGEIEHHCSGLHRKGRTLHCLMKVVRGEKGNLGMNCQQALQTLIQETDPGADYRIDRALNEACESVIQTACKHIRSGDPMILSCLMEHLYTEKMVEDCEHRLLELQYFISRDWKLDPVLYRKCQGDASRLCHTHGWNETSEFMPQGAVFSCLYRHAYRTEEQGRRLSRECRAEVQRILHQRAMDVKLDPALQDKCLIDLGKWCSEKTETGQELECLQDHLDDLVVECRDIVGNLTELESEDIQIEALLMRACEPIIQNFCHDVADNQIDSGDLMECLIQNKHQKDMNEKCAIGVTHFQLVQMKDFRFSYKFKMACKEDVLKLCPNIKKKVDVVICLSTTVRNDTLQEAKEHRVSLKCRRQLRVEELEMTEDIRLEPDLYEACKSDIKNFCSAVQYGNAQIIECLKENKKQLSTRCHQKVFKLQETEMMDPELDYTLMRVCKQMIKRFCPEADSKTMLQCLKQNKNSELMDPKCKQMITKRQITQNTDYRLNPMLRKACKADIPKFCHGILTKAKDDSELEGQVISCLKLRYADQRLSSDCEDQIRIIIQESALDYRLDPQLQLHCSDELQSGDPLIIAAD

SEQ ID NO: 817205 - protein, 1029 aa, Homo sapiens
HEARRGLKMAACGRVRRMFRLSAALHLLLLFAAGAEKLPGQGVHSQGQGPGANFVSFVGQAGGGGPAGQQLPQLPQSSQLQQQQQQQQQQQQPQPPQPPFPAGGPPARRGGAGAGGGWKLAEEESCREDVTRVCPKHTWSNNLAVLECLQDVREPENEISSDCNHLLWNYKLNLTTDPKFESVAREVCKSTITEIKECADEPVGKGYMVSCLVDHRGNITEYQCHQYITKMTAIIFSDYRLICGFMDDCKNDINILKCGSIRLGEKDAHSQGEVVSCLEKGLVKEAEEREPKIQVSELCKKAILRVAELSSDDFHLDRHLYFACRDDRERFCENTQAGEGRVYKCLFNHKFEESMSEKCREALTTRQKLIAQDYKVSYSLAKSCKSDLKKYRCNVENLPRSREARLSYLLMCLESAVHRGRQVSSECQGEMLDYRRMLMEDFSLSPEIILSCRGEIEHHCSGLHRKGRTLHCLMKVVRGEKGNLGMNCQQALQTLIQETDPGADYRIDRALNEACESVIQTACKHIRSGDPMILSCLMEHLYTEKMVEDCEHRLLELQYFISRDWKLDPVLYRKCQGDASRLCHTHGWNETSEFMPQGAVFSCLYRHAYRTEEQGRRLSRECRAEVQRILHQRAMDVKLDPALQDKCLIDLGKWCSEKTETGQELECLQDHLDDLVVECRDIVGNLTELESEDIQIEALLMRACEPIIQNFCHDVADNQIDSGDLMECLIQNKHQKDMNEKCAIGVTHFQLVQMKDFRFSYKFKMACKEDVLKLCPNIKKKVDVVICLSTTVRNDTLQEAKEHRVSLKCRRQLRVEELEMTEDIRLEPDLYEACKSDIKNFCSAVQYGNAQIIECLKENKKQLSTRCHQKVFKLQETEMMDPELDYTLMRVCKQMIKRFCPEADSKTMLQCLKQNKNSELMDPKCKQMITKRQITQNTDYRLNPMLRKACKADIPKFCHGILTKAKDDSELEGQVISCLKLRYADQRLSSDCEDQIRIIIQESALDYRLDPQLQLHCSDEVGFACKTGY

SEQ ID NO: 817206 - protein, 858 aa, Homo sapiens
HEARRGLKMAACGRVRRMFRLSAALHLLLLFAAGAEKLPGQGVHSQGQGPGANFVSFVGQAGGGGPAGQQLPQLPQSSQLQQQQQQQQQQQQPQPPQPPFPAGGPPARRGGAGAGGGWKLAEEESCREDVTRVCPKHTWSNNLAVLECLQDVREPENEISSDCNHLLWNYKLNLTTDPKFESVAREVCKSTITEIKECADEPVGKGYMVSCLVDHRGNITEYQCHQYITKMTAIIFSDYRLICGFMDDCKNDINILKCGSIRLGEKDAHSQGEVVSCLEKGLVKEAEEREPKIQVSELCKKAILRVAELSSDDFHLDRHLYFACRDDRERFCENTQAGEGRVYKCLFNHKFEESMSEKCREALTTRQKLIAQDYKVSYSLAKSCKSDLKKYRCNVENLPRSREARLSYLLMCLESAVHRGRQVSSECQGEMLDYRRMLMEDFSLSPEIILSCRGEIEHHCSGLHRKGRTLHCLMKVVRGEKGNLGMNCQQALQTLIQETDPGADYRIDRALNEACESVIQTACKHIRSGDPMILSCLMEHLYTEKMVEDCEHRLLELQYFISRDWKLDPVLYRKCQGDASRLCHTHGWNETSEFMPQGAVFSCLYRHAYRTEEQGRRLSRECRAEVQRILHQRAMDVKLDPALQDKCLIDLGKWCSEKTETGQELECLQDHLDDLVVECRDIVGNLTELESEDIQIEALLMRACEPIIQNFCHDVADNQIDSGDLMECLIQNKHQKDMNEKCAIGVTHFQLVQMKDFRFSYKFKMACKEDVLKLCPNIKKKVDVVICLSTTVRNDTLQEAKEHRVSLKCRRQLRVEELEMVMPPSLCSQKPQWARAWKAGERLGQGGGILSTTVMVKT

SEQ ID NO: 817207 - protein, 487 aa, Homo sapiens [sequence omitted]

SEQ ID NO: 817208 - protein, 434 aa, Homo sapiens
MKDFRFSYKFKMACKEDVLKLCPNIKKKVDVVICLSTTVRNDTLQEAKEHRVSLKCRRQLRVEELEMTEDIRLEPDLYEACKSDIKNFCSAVQYGNAQIIECLKENKKQLSTRCHQKVFKLQETEMMDPELDYTLMRVCKQMIKRFCPEADSKTMLQCLKQNKNSELMDPKCKQMITKRQITQNTDYRLNPMLRKACKADIPKFCHGILTKAKDDSELEGQVISCLKLRYADQRLSSDCEDQIRIIIQESALDYRLDPQLQLHCSDEISSLCAEEAAAQEQTGQVEECLKVNLLKIKTELCKKEVLNMLKESKADIFVDPVLHTACALDIKHHCAAITPGRGRQMSCLMEALEDKRVRLQPECKKRLNDRIEMWSYAAKVAPADGFSDLAMQVMTSPSKNYILSVISGSICILFLIGLMCGRITKRVTRELKDR

SEQ ID NO: 817209 - protein, 796 aa, Homo sapiens
HEARRGLKMAACGRVRRMFRLSAALHLLLLFAAGAEKLPGQGVHSQGQGPGANFVSFVGQAGGGGPAGQQLPQLPQSSQLQQQQQQQQQQQQPQPPQPPFPAGGPPARRGGAGAGGGWKLAEEESCREDVTRVCPKHTWSNNLAVLECLQDVREPENEISSDCNHLLWNYKLNLTTDPKFESVAREVCKSTITEIKECADEPVGKGYMVSCLVDHRGNITEYQCHQYITKMTAIIFSDYRLICGFMDDCKNDINILKCGSIRLGEKDAHSQGEVVSCLEKGLVKEAEEREPKIQVSELCKKAILRVAELSSDDFHLDRHLYFACRDDRERFCENTQAGEGRVYKCLFNHKFEESMSEKCREALTTRQKLIAQDYKVSYSLAKSCKSDLKKYRCNVENLPRSREARLSYLLMCLESAVHRGRQVSSECQGEMLDYRRMLMEDFSLSPEIILSCRGEIEHHCSGLHRKGRTLHCLMKVVRGEKGNLGMNCQQALQTLIQETDPGADYRIDRALNEACESVIQTACKHIRSGDPMILSCLMEHLYTEKMVEDCEHRLLELQYFISRDWKLDPVLYRKCQGDASRLCHTHGWNETSEFMPQGAVFSCLYRHAYRTEEQGRRLSRECRAEVQRILHQRAMDVKLDPALQDKCLIDLGKWCSEKTETGQELECLQDHLDDLVVECRDIVGNLTELESEDIQIEALLMRACEPIIQNFCHDVADNQIDSGDLMECLIQNKHQKDMNEKCAIGVTHFQLVQMKDFRFSYKFKMACKEDVLKLCPNIKKKYVACSCFIPLSRSSS

SEQ ID NO: 817210 - protein, 757 aa, Homo sapiens
GTRLAADSRWRRVDVYGGCSACRRRCICCCYSRPGPRNSPARASHSQGQGPGANFVSFVGQAGGGGPAGQQLPQLPQSSQLQQQQQQQQQQQQPQPPQPPFPAGGPPARRGGAGAGGGWKLAEEESCREDVTRVCPKHTWSNNLAVLECLQDVREPENEISSDCNHLLWNYKLNLTTDPKFESVAREVCKSTITEIKECADEPVGKGYMVSCLVDHRGNITEYQCHQYITKMTAIIFSDYRLICGFMDDCKNDINILKCGSIRLGEKDAHSQGEVVSCLEKGLVKEAEEREPKIQVSELCKKAILRVAELSSDDFHLDRHLYFACRDDRERFCENTQAGEGRVYKCLFNHKFEESMSEKCREALTTRQKLIAQDYKVSYSLAKSCKSDLKKYRCNVENLPRSREARLSYLLMCLESAVHRGRQVSSECQGEMLDYRRMLMEDFSLSPEIILSCRGEIEHHCSGLHRKGRTLHCLMKVVRGEKGNLGMNCQQALQTLIQETDPGADYRIDRALNEACESVIQTACKHIRSGDPMILSCLMEHLYTEKMVEDCEHRLLELQYFISRDWKLDPVLYRKCQGDASRLCHTHGWNETSEFMPQGAVFSCLYRHAYRTEEQGRRLSRECRAEVQRILHQRAMDVKLDPALQDKCLIDLGKWCSEKTETGQELECLQDHLDDLVVECRDIVGNLTELESEDIQIEALLMRACEPIIQNFCHDVADNQIDSGDLMECLIQNKLQTNFPDKLLCASTWRGCGKLSQ

SEQ ID NO: 817211 - protein, 708 aa, Homo sapiens
HEARRGLKMAACGRVRRMFRLSAALHLLLLFAAGAEKLPGQGVHSQGQGPGANFVSFVGQAGGGGPAGQQLPQLPQSSQLQQQQQQQQQQQQPQPPQPPFPAGGPPARRGGAGAGGGWKLAEEESCREDVTRVCPKHTWSNNLAVLECLQDVREPENEISSDCNHLLWNYKLNLTTDPKFESVAREVCKSTITEIKECADEPVGKGYMVSCLVDHRGNITEYQCHQYITKMTAIIFSDYRLICGFMDDCKNDINILKCGSIRLGEKDAHSQGEVVSCLEKGLVKEAEEREPKIQVSELCKKAILRVAELSSDDFHLDRHLYFACRDDRERFCENTQAGEGRVYKCLFNHKFEESMSEKCREALTTRQKLIAQDYKVSYSLAKSCKSDLKKYRCNVENLPRSREARLSYLLMCLESAVHRGRQVSSECQGEMLDYRRMLMEDFSLSPEIILSCRGEIEHHCSGLHRKGRTLHCLMKVVRGEKGNLGMNCQQALQTLIQETDPGADYRIDRALNEACESVIQTACKHIRSGDPMILSCLMEHLYTEKMVEDCEHRLLELQYFISRDWKLDPVLYRKCQGDASRLCHTHGWNETSEFMPQGAVFSCLYRHAYRTEEQGRRLSRECRAEVQRILHQRAMDVKLDPALQDKCLIDLGKWCSEKTETGQELECLQDHLDDLVVECRDIVGNLTELESEVSGMQLTHWRRVAASI

SEQ ID NO: 817212 - protein, 396 aa, Homo sapiens
MAACGRVRRMFRLSAALHLLLLFAAGAEKLPGQGVHSQGQGPGANFVSFVGQAGGGGPAGQQLPQLPQSSQLSTRCHQKVFKLQETEMMDPELDYTLMRVCKQMIKRFCPEADSKTMLQCLKQNKNSELMDPKCKQMITKRQITQNTDYRLNPMLRKACKADIPKFCHGILTKAKDDSELEGQVISCLKLRYADQRLSSDCEDQIRIIIQESALDYRLDPQLQLHCSDEISSLCAEEAAAQEQTGQVEECLKVNLLKIKTELCKKEVLNMLKESKADIFVDPVLHTACALDIKHHCAAITPGRGRQMSCLMEALEDKRVRLQPECKKRLNDRIEMWSYAAKVAPADGFSDLAMQVMTSPSKNYILSVISGSICILFLIGLMCGRITKRVTRELKDR

SEQ ID NO: 817213 - protein, 131 aa, Homo sapiens
MDPRLPAWALVLLGPALVFALGPAPTPEMREKLCGHHFVRALVRVCGGPRWSTEARRPAAGGDRELLQWLERRHLLHGLVADSNLTLGPGLQPLPQTSHHHRHHRAAATNPARYCCLSGCTQQDLLTLCPY

SEQ ID NO: 817214 - protein, 138 aa, Homo sapiens
MDPRLPAWALVLLGPALVFALGPAPTPEMREKLCGHHFVRALVRVCGGPRWSTEARRPAAGGDPEFTLSPGELLQWLERRHLLHGLVADSNLTLGPGLQPLPQTSHHHRHHRAAATNPARYCCLSGCTQQDLLTLCPY

SEQ ID NO: 817215 - protein, 107 aa, Homo sapiens
PAPPTTMDPRLPAWALVLLGPALVFALGPAPTPEMREKLCGHHFVRALVRVCGGPRWSTEARRPAAGGDLPQTSHHHRHHRAAATNPARYCCLSGCTQQDLLTLCPY

SEQ ID NO: 817216 - protein, 133 aa, Homo sapiens
RCSLSSRSCFPCFVFSARGRPASVALWPAGIGRSTAKTPGPPGSLEMGPLTFRDVAIEFSLKEWQCLDTAQRNLYRNVMLENYRNLVFLGITVSKPDLITCLEQGKEAWSMKRHEIMVAKPTESYSVTQSGMQ

SEQ ID NO: 817217 - protein, 641 aa, Homo sapiens
RCSLSSRSCFPCFVFSARGRPASVALWPAGIGRSTAKTPGPPGSLEMGPLTFRDVAIEFSLKEWQCLDTAQRNLYRNVMLENYRNLVFLGITVSKPDLITCLEQGKEAWSMKRHEIMVAKPTVMCSHFAQDLWPEQNIKDSFQKVTLKRYGKCRHENLPLRKGCESMDECKMHKGGCNGLNQCLTATQSKIFQCDKYVKVAHKFSNSNRHEIRHTKKKPFKCTKCGKSFGMISCLTEHSRIHTRVNFYKCEECGKAFNWSSTLTKHKRIHTGEKPYKCEECGKAFNQSSNLIKHKKIHTGEKPYKCEECGKTFNRFSTLTTHKIIHTGEKPYKCKECGKAFNRSSTLTTHRKIHTGEKPYKCEECGKAFKQSSNLTTHKIIHTGEKPYKCKKCGKAFNQSAHLTTHEVIHTGEKPYKCEKCGKAFNHFSHLTTHKIIHTGEKPYKCKECGKAFKHSSTLTKHKIIHTGEKPYKCKECEKAFNQSSKLTEHKKIHTGEKPYECEKCGKAFNQSSNLTRHKKSHTEEKPYKCEECGKGFKWPSTLTIHKIIHTGEKPYKCEECGKAFNQSSKLTKHKKIHTGEKPYTCEECGKAFNQSSNLTKHKRIHTGEKPYKCEECDKAFKWSSVLTKHKIIHTGEKLQI

SEQ ID NO: 817218 - protein, 608 aa, Homo sapiens
RCSLSSRSCFPCFVFSARGRPASVALWPAGIGRSTAKTPGPPGSLEMGPLTFRDVAIEFSLKEWQCLDTAQRNLYRNVMLENYRNLVFLVMCSHFAQDLWPEQNIKDSFQKVTLKRYGKCRHENLPLRKGCESMDECKMHKGGCNGLNQCLTATQSKIFQCDKYVKVAHKFSNSNRHEIRHTKKKPFKCTKCGKSFGMISCLTEHSRIHTRVNFYKCEECGKAFNWSSTLTKHKRIHTGEKPYKCEECGKAFNQSSNLIKHKKIHTGEKPYKCEECGKTFNRFSTLTTHKIIHTGEKPYKCKECGKAFNRSSTLTTHRKIHTGEKPYKCEECGKAFKQSSNLTTHKIIHTGEKPYKCKKCGKAFNQSAHLTTHEVIHTGEKPYKCEKCGKAFNHFSHLTTHKIIHTGEKPYKCKECGKAFKHSSTLTKHKIIHTGEKPYKCKECEKAFNQSSKLTEHKKIHTGEKPYECEKCGKAFNQSSNLTRHKKSHTEEKPYKCEECGKGFKWPSTLTIHKIIHTGEKPYKCEECGKAFNQSSKLTKHKKIHTGEKPYTCEECGKAFNQSSNLTKHKRIHTGEKPYKCEECDKAFKWSSVLTKHKIIHTGEKLQI

SEQ ID NO: 817219 - protein, 543 aa, Homo sapiens
MSYELLRKVYILMLLRSVLYASVRIMCSHFAQDLWPEQNIKDSFQKVTLKRYGKCRHENLPLRKGCESMDECKMHKGGCNGLNQCLTATQSKIFQCDKYVKVAHKFSNSNRHEIRHTKKKPFKCTKCGKSFGMISCLTEHSRIHTRVNFYKCEECGKAFNWSSTLTKHKRIHTGEKPYKCEECGKAFNQSSNLIKHKKIHTGEKPYKCEECGKTFNRFSTLTTHKIIHTGEKPYKCKECGKAFNRSSTLTTHRKIHTGEKPYKCEECGKAFKQSSNLTTHKIIHTGEKPYKCKKCGKAFNQSAHLTTHEVIHTGEKPYKCEKCGKAFNHFSHLTTHKIIHTGEKPYKCKECGKAFKHSSTLTKHKIIHTGEKPYKCKECEKAFNQSSKLTEHKKIHTGEKPYECEKCGKAFNQSSNLTRHKKSHTEEKPYKCEECGKGFKWPSTLTIHKIIHTGEKPYKCEECGKAFNQSSKLTKHKKIHTGEKPYTCEECGKAFNQSSNLTKHKRIHTGEKPYKCEECDKAFKWSSVLTKHKIIHTGEKLQI

SEQ ID NO: 817220 - protein, 518 aa, Homo sapiens
MCSHFAQDLWPEQNIKDSFQKVTLKRYGKCRHENLPLRKGCESMDECKMHKGGCNGLNQCLTATQSKIFQCDKYVKVAHKFSNSNRHEIRHTKKKPFKCTKCGKSFGMISCLTEHSRIHTRVNFYKCEECGKAFNWSSTLTKHKRIHTGEKPYKCEECGKAFNQSSNLIKHKKIHTGEKPYKCEECGKTFNRFSTLTTHKIIHTGEKPYKCKECGKAFNRSSTLTTHRKIHTGEKPYKCEECGKAFKQSSNLTTHKIIHTGEKPYKCKKCGKAFNQSAHLTTHEVIHTGEKPYKCEKCGKAFNHFSHLTTHKIIHTGEKPYKCKECGKAFKHSSTLTKHKIIHTGEKPYKCKECEKAFNQSSKLTEHKKIHTGEKPYECEKCGKAFNQSSNLTRHKKSHTEEKPYKCEECGKGFKWPSTLTIHKIIHTGEKPYKCEECGKAFNQSSKLTKHKKIHTGEKPYTCEECGKAFNQSSNLTKHKRIHTGEKPYKCEECDKAFKWSSVLTKHKIIHTGEKLQI

SEQ ID NO: 817221 - protein, 536 aa, Homo sapiens
MSLSAQPSSSFYKPVSEVMCSHFAQDLWPEQNIKDSFQKVTLKRYGKCRHENLPLRKGCESMDECKMHKGGCNGLNQCLTATQSKIFQCDKYVKVAHKFSNSNRHEIRHTKKKPFKCTKCGKSFGMISCLTEHSRIHTRVNFYKCEECGKAFNWSSTLTKHKRIHTGEKPYKCEECGKAFNQSSNLIKHKKIHTGEKPYKCEECGKTFNRFSTLTTHKIIHTGEKPYKCKECGKAFNRSSTLTTHRKIHTGEKPYKCEECGKAFKQSSNLTTHKIIHTGEKPYKCKKCGKAFNQSAHLTTHEVIHTGEKPYKCEKCGKAFNHFSHLTTHKIIHTGEKPYKCKECGKAFKHSSTLTKHKIIHTGEKPYKCKECEKAFNQSSKLTEHKKIHTGEKPYECEKCGKAFNQSSNLTRHKKSHTEEKPYKCEECGKGFKWPSTLTIHKIIHTGEKPYKCEECGKAFNQSSKLTKHKKIHTGEKPYTCEECGKAFNQSSNLTKHKRIHTGEKPYKCEECDKAFKWSSVLTKHKIIHTGEKLQI

SEQ ID NO: 817222 - protein, 671 aa, Homo sapiens
RCSLSSRSCFPCFVFSARGRPASVALWPAGIGRSTAKTPGPPGSLEMGPLTFRDVAIEFSLKEWQCLDTAQRNLYRNVMLENYRNLVFLGITVSKPDLITCLEQGKEAWSMKRHEIMVAKPTGCLSKRMSYELLRKVYILMLLRSVLYASVRIMCSHFAQDLWPEQNIKDSFQKVTLKRYGKCRHENLPLRKGCESMDECKMHKGGCNGLNQCLTATQSKIFQCDKYVKVAHKFSNSNRHEIRHTKKKPFKCTKCGKSFGMISCLTEHSRIHTRVNFYKCEECGKAFNWSSTLTKHKRIHTGEKPYKCEECGKAFNQSSNLIKHKKIHTGEKPYKCEECGKTFNRFSTLTTHKIIHTGEKPYKCKECGKAFNRSSTLTTHRKIHTGEKPYKCEECGKAFKQSSNLTTHKIIHTGEKPYKCKKCGKAFNQSAHLTTHEVIHTGEKPYKCEKCGKAFNHFSHLTTHKIIHTGEKPYKCKECGKAFKHSSTLTKHKIIHTGEKPYKCKECEKAFNQSSKLTEHKKIHTGEKPYECEKCGKAFNQSSNLTRHKKSHTEEKPYKCEECGKGFKWPSTLTIHKIIHTGEKPYKCEECGKAFNQSSKLTKHKKIHTGEKPYTCEECGKAFNQSSNLTKHKRIHTGEKPYKCEECDKAFKWSSVLTKHKIIHTGEKLQI

SEQ ID NO: 817223 - protein, 140 aa, Homo sapiens
LWGPCVVWRFSVLSSRHKKSHTEEKPYKCEECGKGFKWPSTLTIHKIIHTGEKPYKCEECGKAFNQSSKLTKHKKIHTGEKPYTCEECGKAFNQSSNLTKHKRIHTGEKPYKCEECDKAFKWSSVLTKHKIIHTGEKLQI

SEQ ID NO: 817224 - protein, 201 aa, Homo sapiens
QHNLLLSRLGLKALITMRLLILTCLVAVALARPKLPLRYPERLQNPSESSEPIPLESREEYMNGMNRQRNILREKQTDEIKDTRNESTQNCVVAEPEKMESSISSSSEEMSLSKCAEQFCRLNEYNQLQLQAVHAQEQIRRMNENSHVQVPFQQLNQLAAYPYAVWYYPQIMQYVPFPPFSDISNPTAHENYEKNNVMLQW

SEQ ID NO: 817225 - protein, 112 aa, Homo sapiens
QHNLLLSRLGLKALITMRLLILTCLVAVALARPKLPLRYPERLQNPSESSEPIPLESREEYMNGMNRQRNILREKQTDEIKDTRNESTQNCVVAEPEKMESSISSSSEGTVL

SEQ ID NO: 817226 - protein, 173 aa, Homo sapiens
QHNLLLSRLGLKALITMRLLILTCLVAVALARPKLPLRYPERLQNPSESSEPIPLESREEYMNGMNRQRNILREKQTDEIKDTRNESTQNCVVAEPEKMESSISSSSEEQIRRMNENSHVQVPFQQLNQLAAYPYAVWYYPQIMQYVPFPPFSDISNPTAHENYEKNNVMLQW

SEQ ID NO: 817227 - protein, 184 aa, Homo sapiens
AAAASASQDELNQLERVFLRLGHAETDEQLQNIISKFLPPVLLKLSSTQEGVRKKVMELLVHLNKRIKSRPKIQLPVETLLVQYQDPAAVSFVTNFTIIYVKMGYPRLPVEKQCELAPTLLTAMEGKPQPQQDSLMHLLIPTLFHMKYPVESSKSASPFNLAEKPKTVQLLLDFMLDVLLMPYG

SEQ ID NO: 817228 - protein, 1650 aa, Homo sapiens
QNSSSAQGSSSNSGGGSGIPQPPPGMSFYAAKRVIGDNPWTPEQLEQCKLGIVKFIEAEQVPELEAVLHLVIASSDTRHSVATAADLELKSKQSLIDWNNPAIINKMYKVYLGDIPLKTKEGAVLKPELKRDPVSTRVKLKIVPHLLRSRQAAETFPANIQVVYDGLFGTNTNSKLRTLSLQFVHHICITCPEIKIKPLGPMLLNGLTKLINEYKEDPKLLSMAYSAVGKLSSRMPHLFTKDIALVQQLFEALCKEEPETRLAIQEALSMMVGAYSTLEGAQRTLMEALVASYLIKPEVQVRQVAVKFASTVFPSDHIPSRYLLLLAAGDPREEVHGEAQRVLRCLPGRNRKESTSEQMPSFPEMVYYIQEKASHRMKTPVKYMTGTTVLPFNPAAFGEIVLYLRMCLAHSAGVVPTSQSLADMQDHAPAIGRYIRTLMSSGQMAPSSSNKSGETNPVQIYIGLLQQLLAGVGGLPVMYCLLEAVSVYPEKLATKFVDKTEWIKSLMNNSKEEMRELAALFYSVVVSTVSGNELKSMIEQLIKTTKDNHSPEIQHGSLLALGFTVGRYLAKKKMRMSEQQDLERNADTLPDQEELIQSATETIGSFLDSTSPLLAIAACTALGEIGRNGPLPIPSEGSGFTKLHLVESLLSRIPSSKETNKMKERAIQTLGYFPVGDGDFPHQKLLLQGLMDSVEAKQIELQFTIGEAITSAAIGTSSVAARDAWQMTEEEYTPPAGAKVNDVVPWVLDVILNKHIISPNPHVRQAACIWLLSLVRKLSTHKEVKSHLKEIQSAFVSVLSENDELSQDVASKGLGLVYELGNEQDQQELVSTLVETLMTGKRVKHEVSGETVVFQGGALGKTPDGQGLSTYKELCSLASDLSQPDLVYKFMNLANHHAMWNSRKGAAFGFNVIATRAGEQLAPFLPQLVPRLYRYQFDPNLGIRQAMTSIWNALVTDKSMVDKYLKEILQDLVKNLTSNMWRVRESSCLALNDLLRGRPLDDIIDKLPEIWETLFRVQDDIKESVRKAAELALKTLSKVCVKMCDPAKGAAGQRTIAALLPCLLDKGMMSTVTEVRALSINTLVKISKSAGAMLKPHAPKLIPALLESLSVLEPQVLNYLSLRATEQEKAAMDSARLSAAKSSPMMETINMCLQYLDVSVLGELVPRLCELIRSGVGLGTKGGCASVIVSLTTQCPQDLTPYSGKLMSALLSGLTDRNSVIQKSCAFAMGHLVRTSRDSSTEKLLQKLNGWYMEKEEPIYKTSCALTIHAIGRYSPDVLKNHAKEVLPLAFLGMHEIADEEKSEKEECNLWTEVWQENVPGSFGGIRLYLQELITITQKALQSQSWKMKAQGAIAMASIAKQTSSLVPPYLGMILTALLQGLAGRTWAGKEELLKAIACVVTACSAELEKSVPNQPSTNEILQAVLKECSKENVKYKIVAISCAADILKATKEDRFQEFSNIVIPLIKKNSLESSGVRTTKNEEENEKEKELQLEYLLGAFESLGKAWPRNAETQRCYRQELCKLMCERLKLSTWKVQLGVLQSMNAFFQGLMLLEEEHADPEALAEILLETCKSITYSLENKTYSSVRTEALSVIELLLKKLEESKQWECLTSECRVLLIESLATMEPDSRPELQEKAALLKKTLENLE

SEQ ID NO: 817229 - protein, 1642 aa, Homo sapiens
AAAASASQDELNQLERVFLRLGHAETDEQLQNIISKFLPPVLLKLSSTQEGVRKKVMELLVHLNKRIKSRPKIQLPVETLFETFHSLIDWNNPAIINKMYKVYLGDIPLKTKEGAVLKPELKRDPVSTRVKLKIVPHLLRSRQAAETFPANIQVVYDGLFGTNTNSKLRTLSLQFVHHICITCPEIKIKPLGPMLLNGLTKLINEYKEDPKLLSMAYSAVGKLSSRMPHLFTKDIALVQQLFEALCKEEPETRLAIQEALSMMVGAYSTLEGAQRTLMEALVASYLIKPEVQVRQVAVKFASTVFPSDHIPSRYLLLLAAGDPREEVHGEAQRVLRCLPGRNRKESTSEQMPSFPEMVYYIQEKASHRMKTPVKYMTGTTVLPFNPAAFGEIVLYLRMCLAHSAGVVPTSQSLADMQDHAPAIGRYIRTLMSSGQMAPSSSNKSGETNPVQIYIGLLQQLLAGVGGLPVMYCLLEAVSVYPEKLATKFVDKTEWIKSLMNNSKEEMRELAALFYSVVVSTVSGNELKSMIEQLIKTTKDNHSPEIQHGSLLALGFTVGRYLAKKKMRMSEQQDLERNADTLPDQEELIQSATETIGSFLDSTSPLLAIAACTALGEIGRNGPLPIPSEGSGFTKLHLVESLLSRIPSSKETNKMKERAIQTLGYFPVGDGDFPHQKLLLQGLMDSVEAKQIELQFTIGEAITSAAIGTSSVAARDAWQMTEEEYTPPAGAKVNDVVPWVLDVILNKHIISPNPHVRQAACIWLLSLVRKLSTHKEVKSHLKEIQSAFVSVLSENDELSQDVASKGLGLVYELGNEQDQQELVSTLVETLMTGKRVKHEVSGETVVFQGGALGKTPDGQGLSTYKELCSLASDLSQPDLVYKFMNLANHHAMWNSRKGAAFGFNVIATRAGEQLAPFLPQLVPRLYRYQFDPNLGIRQAMTSIWNALVTDKSMVDKYLKEILQDLVKNLTSNMWRVRESSCLALNDLLRGRPLDDIIDKLPEIWETLFRVQDDIKESVRKAAELALKTLSKVCVKMCDPAKGAAGQRTIAALLPCLLDKGMMSTVTEVRALSINTLVKISKSAGAMLKPHAPKLIPALLESLSVLEPQVLNYLSLRATEQEKAAMDSARLSAAKSSPMMETINMCLQYLDVSVLGELVPRLCELIRSGVGLGTKGGCASVIVSLTTQCPQDLTPYSGKLMSALLSGLTDRNSVIQKSCAFAMGHLVRTSRDSSTEKLLQKLNGWYMEKEEPIYKTSCALTIHAIGRYSPDVLKNHAKEVLPLAFLGMHEIADEEKSEKEECNLWTEVWQENVPGSFGGIRLYLQELITITQKALQSQSWKMKAQGAIAMASIAKQTSSLVPPYLGMILTALLQGLAGRTWAGKEELLKAIACVVTACSAELEKSVPNQPSTNEILQAVLKECSKENVKYKIVAISCAADILKATKEDRFQEFSNIVIPLIKKNSLESSGVRTTKNEEENEKEKELQLEYLLGAFESLGKAWPRNAETQRCYRQELCKLMCERLKLSTWKVQLGVLQSMNAFFQGLMLLEEEHADPEALAEILLETCKSITYSLENKTYSSVRTEALSVIELLLKKLEESKQWECLTSECRVLLIESLATMEPDSRPELQEKAALLKKTLENLE

SEQ ID NO: 817230 - protein, 1650 aa, Homo sapiens; identical to SEQ ID NO: 817228

SEQ ID NO: 817231 - protein, 1351 aa, Homo sapiens
  misc_feature (17)..(17): Xaa can be any naturally occurring amino acid
DKSGETNPVQIYIGLLXTCLAGVGGLPVMYCLLEAVSVYPEKLATKFVDKTEVDKDSEQMPSFPEMVYYIQEKASHRMKTPVKYMTGTTVLPFNPAAFGEIVLYLRMCLAHSAGVVPTSQSLADMQDHAPAIGRYIRTLMSSGQMAPSSSNKSGETNPVQIYIGLLQQLLAGVGGLPVMYCLLEAVSVYPEKLATKFVDKTEWIKSLMNNSKEEMRELAALFYSVVVSTVSGNELKSMIEQLIKTTKDNHSPEIQHGSLLALGFTVGRYLAKKKMRMSEQQDLERNADTLPDQEELIQSATETIGSFLDSTSPLLAIAACTALGEIGRNGPLPIPSEGSGFTKLHLVESLLSRIPSSKETNKMKERAIQTLGYFPVGDGDFPHQKLLLQGLMDSVEAKQIELQFTIGEAITSAAIGTSSVAARDAWQMTEEEYTPPAGAKVNDVVPWVLDVILNKHIISPNPHVRQAACIWLLSLVRKLSTHKEVKSHLKEIQSAFVSVLSENDELSQDVASKGLGLVYELGNEQDQQELVSTLVETLMTGKRVKHEVSGETVVFQGGALGKTPDGQGLSTYKELCSLASDLSQPDLVYKFMNLANHHAMWNSRKGAAFGFNVIATRAGEQLAPFLPQLVPRLYRYQFDPNLGIRQAMTSIWNALVTDKSMVDKYLKEILQDLVKNLTSNMWRVRESSCLALNDLLRGRPLDDIIDKLPEIWETLFRVQDDIKESVRKAAELALKTLSKVCVKMCDPAKGAAGQRTIAALLPCLLDKGMMSTVTEVRALSINTLVKISKSAGAMLKPHAPKLIPALLESLSVLEPQVLNYLSLRATEQEKAAMDSARLSAAKSSPMMETINMCLQYLDVSVLGELVPRLCELIRSGVGLGTKGGCASVIVSLTTQCPQDLTPYSGKLMSALLSGLTDRNSVIQKSCAFAMGHLVRTSRDSSTEKLLQKLNGWYMEKEEPIYKTSCALTIHAIGRYSPDVLKNHAKEVLPLAFLGMHEIADEEKSEKEECNLWTEVWQENVPGSFGGIRLYLQELITITQKALQSQSWKMKAQGAIAMASIAKQTSSLVPPYLGMILTALLQGLAGRTWAGKEELLKAIACVVTACSAELEKSVPNQPSTNEILQAVLKECSKENVKYKIVAISCAADILKATKEDRFQEFSNIVIPLIKKNSLESSGVRTTKNEEENEKEKELQLEYLLGAFESLGKAWPRNAETQRCYRQELCKLMCERLKLSTWKVQLGVLQSMNAFFQGLMLLEEEHADPEALAEILLETCKSITYSLENKTYSSVRTEALSVIELLLKKLEESKQWECLTSECRVLLIESLATMEPDSRPELQEKAALLKKTLENLE

SEQ ID NO: 817232 - protein, 974 aa, Homo sapiens
QNSSSAQGSSSNSGGGSGIPQPPPGMSFYAAKRVIGDNPWTPEQLEQCKLGIVKFIEAEQVPELEAVLHLVIASSDTRHSVATAADLELKSKQSLIDWNNPAIINKMYKVYLGDIPLKTKEGAVLKPELKRDPVSTRVKLKIVPHLLRSRQAAETFPANIQVVYDGLFGTNTNSKLRTLSLQFVHHICITCPEIKIKPLGPMLLNGLTKLINEYKEDPKLLSMAYSAVGKLSSRMPHLFTKDIALVQQLFEALCKEEPETRLAIQEALSMMVGAYSTLEGAQRTLMEALVASYLIKPEVQVRQVAVKFASTVFPSDHIPSRYLLLLAAGDPREEVHGEAQRVLRCLPGRNRKESTSEQMPSFPEMVYYIQEKASHRMKTPVKYMTGTTVLPFNPAAFGEIVLYLRMCLAHSAGVVPTSQSLADMQDHAPAIGRYIRTLMSSGQMAPSSSNKSGETNPVQIYIGLLQQLLAGVGGLPVMYCLLEAVSVYPEKLATKFVDKTEWIKSLMNNSKEEMRELAALFYSVVVSTVSGNELKSMIEQLIKTTKDNHSPEIQHGSLLALGFTVGRYLAKKKMRMSEQQDLERNADTLPDQEELIQSATETIGSFLDSTSPLLAIAACTALGEIGRNGPLPIPSEGSGFTKLHLVESLLSRIPSSKETNKMKERAIQTLGYFPVGDGDFPHQKLLLQGLMDSVEAKQIELQFTIGEAITSAAIGTSSVAARDAWQMTEEEYTPPAGAKVNDVVPWVLDVILNKHIISPNPHVRQAACIWLLSLVRKLSTHKEVKSHLKEIQSAFVSVLSENDELSQDVASKGLGLVYELGNEQDQQELVSTLVETLMTGKRVKHEVSGETVVFQGGALGKTPDGQGLSTYKELCSLASDLSQPDLVYKFMNLANHHAMWNSRKGAAFGFNVIATRAGEQLAPFLPQLVPRLYRYQFDPNLGIRQAMTSIWNALVTDKSMVDKYLKEILQDLVK

SEQ ID NO: 817233 - protein, 1615 aa, Homo sapiens
QNSSSAQGSSSNSGGGSGIPQPPPGMSFYAAKRVIGDNPWTPEQLEQCKLGIVKFIEAEQVPELEAVLHLVIASSDTRHSVATAADLELKSKQSLIDWNNPAIINKMYKVYLGDIPLKTKEGAVLKPELKRDPVSTRVKLKIVPHLLRSRQAAETFPANIQVVYDGLFGTNTNSKLRTLSLQFVHHICITCPEIKIKPLGPMLLNGLTKLINEYKEDPKLLSMAYSAVGKLSSRMPHLFTKDIALVQQLFEALCKEEPETRLAIQEALSMMVGAYSTLEGAQRTLMEALVASYLIKPEVQVRQVAVKFASTVFPSDHIPSRYLLLLAAGDPREEVHGEAQRVLRCLPGRNRKESTSEQMPSFPEMVYYIQEKASHRMKTPVKYMTGTTVLPFNPAAFGEIVLYLRMCLAHSAGVVPTSQSLADMQDHAPAIGRYIRTLMSSGQMAPSSSNKSGETNPVQIYIGLLQQLLAGVGGLPVMYCLLEAVSVYPEKLATKFVDKTEWIKSLMNNSKEEMRELAALFYSVVVSTVSGNELKSMIEQLIKTTKDNHSPEIQHGSLLALGFTVGRYLAKKKMRMSEQQDLERNADTLPDQEELIQSATETIGSFLDSTSPLLAIAACTALGEIGRNGPLPIPSEGSGFTKLHLVESLLSRIPSSKETNKMKERAIQTLGYFPVGDGDFPHQKLLLQGLMDSVEAKQIELQFTIGEAITSAAIGTSSVAARDAWQMTEEEYTPPAGAKVNDVVPWVLDVILNKHIISPNPHVRQAACIWLLSLVRKLSTHKEVKSHLKEIQSAFVSVLSENDELSQDVASKGLGLVYELGNEQDQQELVSTLVETLMTGKRVKHEVSGETVVFQGGALGKTPDGQGLSTYKELCSLASDLSQPDLVYKFMNLANHHAMWNSRKGAAFGFNVIATRAGEQLAPFLPQLVPRLYRYQFDPNLGIRQAMTSIWNALVTDKSMVDKYLKEILQDLVKNLTSNMWRVRESSCLALNDLLRGRPLDDIIDKLPEIWETLFRVQDDIKESVRKAAELALKTLSKVCVKMCDPAKGAAGQRTIAALLPCLLDKGMMSTVTEVRALSINTLVKISKSAGAMLKPHAPKLIPALLESLSVLEPQVLNYLSLRATEQEKAAMDSARLSAAKSSPMMETINMCLQYLDVSVLGELVPRLCELIRSGVGLGTKGGCASVIVSLTTQCPQDLTPYSGKLMSALLSGLTDRNSVIQKSCAFAMGHLVRTSRDSSTEKLLQKLNGWYMEKEEPIYKTSCALTIHAIGRYSPDVLKNHAKEVLPLAFLGMHEIADEEKSEKEECNLWTEVWQENVPGSFGGIRLYLQELITITQKALQSQSWKMKAQGAIAMASIAKQTSSLVPPYLGMILTALLQGLAGRTWAGKEELLKAIACVVTACSAELEKSVPNQPSTNEILQAVLKECSKENVKYKIVAISCAADILKATKEDRFQEFSNIVIPLIKKNSLESSGVRTTKNEEENEKEKELQLEYLLGAFESLGKAWPRNAETQRCYRQELCKLMCERLKLSTWKVQLGVLQSMNAFFQGLMLLEEEHADPEALAEILLETCKSITYSLENKTYSSVRTEALSVIELLLKKLEGKLLLVLTGGP

SEQ ID NO: 817234 - protein, 752 aa, Homo sapiens
MWNSRKGAAFGFNVIATRAGEQLAPFLPQLVPRLYRYQFDPNLGIRQAMTSIWNALVTDKSMVDKYLKEILQDLVKNLTSNMWRVRESSCLALNDLLRGRPLDDIIDKLPEIWETLFRVQDDIKESVRKAAELALKTLSKVCVKMCDPAKGAAGQRTIAALLPCLLDKGMMSTVTEVRALSINTLVKISKSAGAMLKPHAPKLIPALLESLSVLEPQVLNYLSLRATEQEKAAMDSARLSAAKSSPMMETINMCLQYLDVSVLGELVPRLCELIRSGVGLGTKGGCASVIVSLTTQCPQDLTPYSGKLMSALLSGLTDRNSVIQKSCAFAMGHLVRTSRDSSTEKLLQKLNGWYMEKEEPIYKTSCALTIHAIGRYSPDVLKNHAKEVLPLAFLGMHEIADEEKSEKEECNLWTEVWQENVPGSFGGIRLYLQELITITQKALQSQSWKMKAQGAIAMASIAKQTSSLVPPYLGMILTALLQGLAGRTWAGKEELLKAIACVVTACSAELEKSVPNQPSTNEILQAVLKECSKENVKYKIVAISCAADILKATKEDRFQEFSNIVIPLIKKNSLESSGVRTTKNEEENEKEKELQLEYLLGAFESLGKAWPRNAETQRCYRQELCKLMCERLKLSTWKVQLGVLQSMNAFFQGLMLLEEEHADPEALAEILLETCKSITYSLENKTYSSVRTEALSVIELLLKKLEESKQWECLTSECRVLLIESLATMEPDSRPELQEKAALLKKTLENLE

SEQ ID NO: 817235 - protein, 632 aa, Homo sapiens
MNSLLDARSLSLTSMLFVCEVCVKMCDPAKGAAGQRTIAALLPCLLDKGMMSTVTEVRALSINTLVKISKSAGAMLKPHAPKLIPALLESLSVLEPQVLNYLSLRATEQEKAAMDSARLSAAKSSPMMETINMCLQYLDVSVLGELVPRLCELIRSGVGLGTKGGCASVIVSLTTQCPQDLTPYSGKLMSALLSGLTDRNSVIQKSCAFAMGHLVRTSRDSSTEKLLQKLNGWYMEKEEPIYKTSCALTIHAIGRYSPDVLKNHAKEVLPLAFLGMHEIADEEKSEKEECNLWTEVWQENVPGSFGGIRLYLQELITITQKALQSQSWKMKAQGAIAMASIAKQTSSLVPPYLGMILTALLQGLAGRTWAGKEELLKAIACVVTACSAELEKSVPNQPSTNEILQAVLKECSKENVKYKIVAISCAADILKATKEDRFQEFSNIVIPLIKKNSLESSGVRTTKNEEENEKEKELQLEYLLGAFESLGKAWPRNAETQRCYRQELCKLMCERLKLSTWKVQLGVLQSMNAFFQGLMLLEEEHADPEALAEILLETCKSITYSLENKTYSSVRTEALSVIELLLKKLEESKQWECLTSECRVLLIESLATMEPDSRPELQEKAALLKKTLENLE

SEQ ID NO: 817236 - protein, 1476 aa, Homo sapiens
QNSSSAQGSSSNSGGGSGIPQPPPGMSFYAAKRVIGDNPWTPEQLEQCKLGIVKFIEAEQVPELEAVLHLVIASSDTRHSVATAADLELKSKQSLIDWNNPAIINKMYKVYLGDIPLKTKEGAVLKPELKRDPVSTRVKLKIVPHLLRSRQAAETFPANIQVVYDGLFGTNTNSKLRTLSLQFVHHICITCPEIKIKPLGPMLLNGLTKLINEYKEDPKLLSMAYSAVGKLSSRMPHLFTKDIALVQQLFEALCKEEPETRLAIQEALSMMVGAYSTLEGAQRTLMEALVASYLIKPEVQVRQVAVKFASTVFPSDHIPSRYLLLLAAGDPREEVHGEAQRVLRCLPGRNRKESTSEQMPSFPEMVYYIQEKASHRMKTPVKYMTGTTVLPFNPAAFGEIVLYLRMCLAHSAGVVPTSQSLADMQDHAPAIGRYIRTLMSSGQMAPSSSNKSGETNPVQIYIGLLQQLLAGVGGLPVMYCLLEAVSVYPEKLATKFVDKTEWIKSLMNNSKEEMRELAALFYSVVVSTVSGNELKSMIEQLIKTTKDNHSPEIQHGSLLALGFTVGRYLAKKKMRMSEQQDLERNADTLPDQEELIQSATETIGSFLDSTSPLLAIAACTALGEIGRNGPLPIPSEGSGFTKLHLVESLLSRIPSSKETNKMKERAIQTLGYFPVGDGDFPHQKLLLQGLMDSVEAKQIELQFTIGEAITSAAIGTSSVAARDAWQMTEEEYTPPAGAKVNDVVPWVLDVILNKHIISPNPHVRQAACIWLLSLVRKLSTHKEVKSHLKEIQSAFVSVLSENDELSQDVASKGLGLVYELGNEQDQQELVSTLVETLMTGKRVKHEVSGETVVFQGGALGKTPDGQGLSTYKELCSLASDLSQPDLVYKFMNLANHHAMWNSRKGAAFGFNVIATRAGEQLAPFLPQLVPRLYRYQFDPNLGIRQAMTSIWNALVTDKSMVDKYLKEILQDLVKNLTSNMWRVRESSCLALNDLLRGRPLDDIIDKLPEIWETLFRVQDDIKESVRKAAELALKTLSKVCVKMCDPAKGAAGQRTIAALLPCLLDKGMMSTVTEVRALSINTLVKISKSAGAMLKPHAPKLIPALLESLSVLEPQVLNYLSLRATEQEKAAMDSARLSAAKSSPMMETINMCLQYLDVSVLGELVPRLCELIRSGVGLGTKGGCASVIVSLTTQCPQDLTPYSGKLMSALLSGLTDRNSVIQKSCAFAMGHLVRTSRDSSTEKLLQKLNGWYMEKEEPIYKTSCALTIHAIGRYSPDVLKNHAKEVLPLAFLGMHEIADEEKSEKEECNLWTEVWQENVPGSFGGIRLYLQELITITQKALQSQSWKMKAQGAIAMASIAKQTSSLVPPYLGMILTALLQGLAGRTWAGKEELLKAIACVVTACSAELEKSVPNQPSTNEILQAVLKECSKENVKYKIVAISCAADILKATKEDRFQEFSNIVIPLIKKKTLENLE

SEQ ID NO: 817237 - protein, 1615 aa, Homo sapiens; identical to SEQ ID NO: 817233

SEQ ID NO: 817238 - protein, 1592 aa, Homo sapiens
QNSSSAQGSSSNSGGGSGIPQPPPGMSFYAAKRVIGDNPWTPEQLEQCKLGIVKFIEAEQVPELEAVLHLVIASSDTRHSVATAADLELKSKQSLIDWNNPAIINKMYKVYLGDIPLKTKEGAVLKPELKRDPVSTRVKLKIVPHLLRSRQAAETFPANIQVVYDGLFGTNTNSKLRTLSLQFVHHICITCPEIKIKPLGPMLLNGLTKLINEYKEDPKLLSMAYSAVGKLSSRMPHLFTKDIALVQQLFEALCKEEPETRLAIQEALSMMVGAYSTLEGAQRTLMEALVASYLIKPEVQVRQVAVKFASTVFPSDHIPSRYLLLLAAGDPREEVHGEAQRVLRCLPGRNRKESTSEQMPSFPEMVYYIQEKASHRMKTPVKYMTGTTVLPFNPAAFGEIVLYLRMCLAHSAGVVPTSQSLADMQDHAPAIGRYIRTLMSSGQMAPSSSNKSGETNPVQIYIGLLQQLLAGVGGLPVMYCLLEAVSVYPEKLATKFVDKTEWIKSLMNNSKEEMRELAALFYSVVVSTVSGNELKSMIEQLIKTTKDNHSPEIQHGSLLALGFTVGRYLAKKKMRMSEQQDLERNADTLPDQEELIQSATETIGSFLDSTSPLLAIAACTALGEIGRNGPLPIPSEGSGFTKLHLVESLLSRIPSSKETNKMKERAIQTLGYFPVGDGDFPHQKLLLQGLMDSVEAKQIELQFTIGEAITSAAIGTSSVAARDAWQMTEEEYTPPAGAKVNDVVPWVLDVILNKHIISPNPHVRQAACIWLLSLVRKLSTHKEVKSHLKEIQSAFVSVLSENDELSQDVASKGLGLVYELGNEQDQQELVSTLVETLMTGKRVKHEVSGETVVFQGGALGKTPDGQGLSTYKELCSLASDLSQPDLVYKFMNLANHHAMWNSRKGAAFGFNVIATRAGEQLAPFLPQLVPRLYRYQFDPNLGIRQAMTSIWNALVTDKSMVDKYLKEILQDLVKNLTSNMWRVRESSCLALNDLLRGRPLDDIIDKLPEIWETLFRVQDDIKESVRKAAELALKTLSKVCVKMCDPAKGAAGQRTIAALLPCLLDKGMMSTVTEVRALSINTLVKISKSAGAMLKPHAPKLIPALLESLSVLEPQVLNYLSLRATEQEKAAMDSARLSAAKSSPMMETINMCLQYLDVSVLGELVPRLCELIRSGVGLGTKGGCASVIVSLTTQCPQDLTPYSGKLMSALLSGLTDRNSVIQKSCAFAMGHLVRTSRDSSTEKLLQKLNGWYMEKEEPIYKTSCALTIHAIGRYSPDVLKNHAKEVLPLAFLGMHEIADEEKSEKEECNLWTEVWQENVPGSFGGIRLYLQELITITQKALQSQSWKMKAQGAIAMASIAKQTSSLVPPYLGMILTALLQGLAGRTWAGKEELLKAIACVVTACSAELEKSVPNQPSTNEILQAVLKECSKENVKYKIVAISCAADILKATKEDRFQEFSNIVIPLIKKNSLESSGVRTTKNEEENEKEKELQLEYLLGAFESLGKAWPRNAETQRCYRQELCKLMCERLKLSTWKVQLGVLQSMNAFFQGLMLLEEEHADPEALAEILLETCKSITYSLGECSKLKLMRES

SEQ ID NO: 817239 - protein, 378 aa, Homo sapiens
GDLARLVAVLQGKHSTYDTDLFSPLLNAIQQGCRAPPYLGRVGVENVPGSFGGIRLYLQELITITQKALQSQSWKMKAQGAIAMASIAKQTSSLVPPYLGMILTALLQGLAGRTWAGKEELLKAIACVVTACSAELEKSVPNQPSTNEILQAVLKECSKENVKYKIVAISCAADILKATKEDRFQEFSNIVIPLIKKNSLESSGVRTTKNEEENEKEKELQLEYLLGAFESLGKAWPRNAETQRCYRQELCKLMCERLKLSTWKVQLGVLQSMNAFFQGLMLLEEEHADPEALAEILLETCKSITYSLENKTYSSVRTEALSVIELLLKKLEESKQWECLTSECRVLLIESLATMEPDSRPELQEKAALLKKTLENLE

SEQ ID NO: 817240 - protein, 177 aa, Homo sapiens
MLYLRTTKNEEENEKEKELQLEYLLGAFESLGKAWPRNAETQRCYRQELCKLMCERLKLSTWKVQLGVLQSMNAFFQGLMLLEEEHADPEALAEILLETCKSITYSLENKTYSSVRTEALSVIELLLKKLEESKQWECLTSECRVLLIESLATMEPDSRPELQEKAALLKKTLENLE

SEQ ID NO: 817241 - protein, 1270 aa, Homo sapiens
QNSSSAQGSSSNSGGGSGIPQPPPGMSFYAAKRVIGDNPWTPEQLEQCKLGIVKFIEAEQVPELEAVLHLVIASSDTRHSVATAADLELKSKQSLIDWNNPAIINKMYKVYLGDIPLKTKEGAVLKPELKRDPVSTRVKLKIVPHLLRSRQAAETFPANIQVVYDGLFGTNTNSKLRTLSLQFVHHICITCPEIKIKPLGPMLLNGLTKLINEYKEDPKLLSMAYSAVGKLSSRMPHLFTKDIALVQQLFEALCKEEPETRLAIQEALSMMVGAYSTLEGAQRTLMEALVASYLIKPEVQVRQVAVKFASTVFPSDHIPSRYLLLLAAGDPREEVHGEAQRVLRCLPGRNRKESTSEQMPSFPEMVYYIQEKASHRMKTPVKYMTGTTVLPFNPAAFGEIVLYLRMCLAHSAGVVPTSQSLADMQDHAPAIGRYIRTLMSSGQMAPSSSNKSGETNPVQIYIGLLQQLLAGVGGLPVMYCLLEAVSVYPEKLATKFVDKTEWIKSLMNNSKEEMRELAALFYSVVVSTVSGNELKSMIEQLIKTTKDNHSPEIQHGSLLALGFTVGRYLAKKKMRMSEQQDLERNADTLPDQEELIQSATETIGSFLDSTSPLLAIAACTALGEIGRNGPLPIPSEGSGFTKLHLVESLLSRIPSSKETNKMKERAIQTLGYFPVGDGDFPHQKLLLQGLMDSVEAKQIELQFTIGEAITSAAIGTSSVAARDAWQMTEEEYTPPAGAKVNDVVPWVLDVILNKHIISPNPHVRQAACIWLLSLVRKLSTHKEVKSHLKEIQSAFVSVLSENDELSQDVASKGLGLVYELGNEQDQQELVSTLVETLMTGKRVKHEVSGETVVFQGGALGKTPDGQGLSTYKELCSLASDLSQPDLVYKFMNLANHHAMWNSRKGAAFGFNVIATRAGEQLAPFLPQLVPRLYRYQFDPNLGIRQAMTSIWNALVTDKSMVDKYLKEILQDLVKNLTSNMWRVRESSCLALNDLLRGRPLDDIIDKLPEIWETLFRVQDDIKESVRKAAELALKTLSKVCVKMCDPAKGAAGQRTIAALLPCLLDKGMMSTVTEVRALSINTLVKISKSAGAMLKPHAPKLIPALLESLSVLEPQVLNYLSLRATEQEKAAMDSARLSAAKSSPMMETINMCLQYLDVSVLGELVPRLCELIRSGVGLGTKGGCASVIVSLTTQCPQDLTPYSGKLMSALLSGLTDRNSVIQKSCAFAMGHLVRTSRDSSTEKLLQKLNGWYMEKEEPIYKTSWLAFSMG

SEQ ID NO: 817242 - protein, 204 aa, Homo sapiens
GDLARLVAVLQGKHSTYDTDLFSPLLNAIQQGCRAPPYLGRVGVENVPGSFGGIRLYLQELITITQKALQSQSWKMKAQGAIAMASIAKQTSSLVPPYLGMILTALLQGLAGRTWAGKEELLKAIACVVTACSAELEKSVPNQPSTNEILQAVLKECSKENVKYKIVAISCAADILKATKEDRFQEFSNIVIPLIKKKTLENLE

SEQ ID NO: 817243 - protein, 1291 aa, Homo sapiens
QNSSSAQGSSSNSGGGSGIPQPPPGMSFYAAKRVIGDNPWTPEQLEQCKLGIVKFIEAEQVPELEAVLHLVIASSDTRHSVATAADLELKSKQSLIDWNNPAIINKMYKVYLGDIPLKTKEGAVLKPELKRDPVSTRVKLKIVPHLLRSRQAAETFPANIQVVYDGLFGTNTNSKLRTLSLQFVHHICITCPEIKIKPLGPMLLNGLTKLINEYKEDPKLLSMAYSAVGKLSSRMPHLFTKDIALVQQLFEALCKEEPETRLAIQEALSMMVGAYSTLEGAQRTLMEALVASYLIKPEVQVRQVAVKFASTVFPSDHIPSRYLLLLAAGDPREEVHGEAQRVLRCLPGRNRKESTSEQMPSFPEMVYYIQEKASHRMKTPVKYMTGTTVLPFNPAAFGEIVLYLRMCLAHSAGVVPTSQSLADMQDHAPAIGRYIRTLMSSGQMAPSSSNKSGETNPVQIYIGLLQQLLAGVGGLPVMYCLLEAVSVYPEKLATKFVDKTEWIKSLMNNSKEEMRELAALFYSVVVSTVSGNELKSMIEQLIKTTKDNHSPEIQHGSLLALGFTVGRYLAKKKMRMSEQQDLERNADTLPDQEELIQSATETIGSFLDSTSPLLAIAACTALGEIGRNGPLPIPSEGSGFTKLHLVESLLSRIPSSKETNKMKERAIQTLGYFPVGDGDFPHQKLLLQGLMDSVEAKQIELQFTIGEAITSAAIGTSSVAARDAWQMTEEEYTPPAGAKVNDVVPWVLDVILNKHIISPNPHVRQAACIWLLSLVRKLSTHKEVKSHLKEIQSAFVSVLSENDELSQDVASKGLGLVYELGNEQDQQELVSTLVETLMTGKRVKHEVSGETVVFQGGALGKTPDGQGLSTYKELCSLASDLSQPDLVYKFMNLANHHAMWNSRKGAAFGFNVIATRAGEQLAPFLPQLVPRLYRYQFDPNLGIRQAMTSIWNALVTDKSMVDKYLKEILQDLVKNLTSNMWRVRESSCLALNDLLRGRPLDDIIDKLPEIWETLFRVQDDIKESVRKAAELALKTLSKVCVKMCDPAKGAAGQRTIAALLPCLLDKGMMSTVTEVRALSINTLVKISKSAGAMLKPHAPKLIPALLESLSVLEPQVLNYLSLRATEQEKAAMDSARLSAAKSSPMMETINMCLQYLDVSVLGELVPRLCELIRSGVGLGTKGGCASVIVSLTTQCPQDLTPYSGKLMSALLSGLTDRNSVIQKSCAFAMGHLVRTSRDSSTEKLLQKLNGWYMEKEEPIYKTSCALTIHAIETSKTRPSFRSFIAPSFRSP

SEQ ID NO: 817244 - protein, 1194 aa, Homo sapiens
QNSSSAQGSSSNSGGGSGIPQPPPGMSFYAAKRVIGDNPWTPEQLEQCKLGIVKFIEAEQVPELEAVLHLVIASSDTRHSVATAADLELKSKQSLIDWNNPAIINKMYKVYLGDIPLKTKEGAVLKPELKRDPVSTRVKLKIVPHLLRSRQAAETFPANIQVVYDGLFGTNTNSKLRTLSLQFVHHICITCPEIKIKPLGPMLLNGLTKLINEYKEDPKLLSMAYSAVGKLSSRMPHLFTKDIALVQQLFEALCKEEPETRLAIQEALSMMVGAYSTLEGAQRTLMEALVASYLIKPEVQVRQVAVKFASTVFPSDHIPSRYLLLLAAGDPREEVHGEAQRVLRCLPGRNRKESTSEQMPSFPEMVYYIQEKASHRMKTPVKYMTGTTVLPFNPAAFGEIVLYLRMCLAHSAGVVPTSQSLADMQDHAPAIGRYIRTLMSSGQMAPSSSNKSGETNPVQIYIGLLQQLLAGVGGLPVMYCLLEAVSVYPEKLATKFVDKTEWIKSLMNNSKEEMRELAALFYSVVVSTVSGNELKSMIEQLIKTTKDNHSPEIQHGSLLALGFTVGRYLAKKKMRMSEQQDLERNADTLPDQEELIQSATETIGSFLDSTSPLLAIAACTALGEIGRNGPLPIPSEGSGFTKLHLVESLLSRIPSSKETNKMKERAIQTLGYFPVGDGDFPHQKLLLQGLMDSVEAKQIELQFTIGEAITSAAIGTSSVAARDAWQMTEEEYTPPAGAKVNDVVPWVLDVILNKHIISPNPHVRQAACIWLLSLVRKLSTHKEVKSHLKEIQSAFVSVLSENDELSQDVASKGLGLVYELGNEQDQQELVSTLVETLMTGKRVKHEVSGETVVFQGGALGKTPDGQGLSTYKELCSLASDLSQPDLVYKFMNLANHHAMWNSRKGAAFGFNVIATRAGEQLAPFLPQLVPRLYRYQFDPNLGIRQAMTSIWNALVTDKSMVDKYLKEILQDLVKNLTSNMWRVRESSCLALNDLLRGRPLDDIIDKLPEIWETLFRVQDDIKESVRKAAELALKTLSKVCVKMCDPAKGAAGQRTIAALLPCLLDKGMMSTVTEVRALSINTLVKISKSAGAMLKPHAPKLIPALLESLSVLEPQVLNYLSLRATEQEKAAMDSARLSAAKSSPMMETINMCLQYLDVSVLGELVPRLCELIRSGVGLGTKVSVLSTRGNVHLH

SEQ ID NO: 817245 - protein, 1108 aa, Homo sapiens
QNSSSAQGSSSNSGGGSGIPQPPPGMSFYAAKRVIGDNPWTPEQLEQCKLGIVKFIEAEQVPELEAVLHLVIASSDTRHSVATAADLELKSKQSLIDWNNPAIINKMYKVYLGDIPLKTKEGAVLKPELKRDPVSTRVKLKIVPHLLRSRQAAETFPANIQVVYDGLFGTNTNSKLRTLSLQFVHHICITCPEIKIKPLGPMLLNGLTKLINEYKEDPKLLSMAYSAVGKLSSRMPHLFTKDIALVQQLFEALCKEEPETRLAIQEALSMMVGAYSTLEGAQRTLMEALVASYLIKPEVQVRQVAVKFASTVFPSDHIPSRYLLLLAAGDPREEVHGEAQRVLRCLPGRNRKESTSEQMPSFPEMVYYIQEKASHRMKTPVKYMTGTTVLPFNPAAFGEIVLYLRMCLAHSAGVVPTSQSLADMQDHAPAIGRYIRTLMSSGQMAPSSSNKSGETNPVQIYIGLLQQLLAGVGGLPVMYCLLEAVSVYPEKLATKFVDKTEWIKSLMNNSKEEMRELAALFYSVVVSTVSGNELKSMIEQLIKTTKDNHSPEIQHGSLLALGFTVGRYLAKKKMRMSEQQDLERNADTLPDQEELIQSATETIGSFLDSTSPLLAIAACTALGEIGRNGPLPIPSEGSGFTKLHLVESLLSRIPSSKETNKMKERAIQTLGYFPVGDGDFPHQKLLLQGLMDSVEAKQIELQFTIGEAITSAAIGTSSVAARDAWQMTEEEYTPPAGAKVNDVVPWVLDVILNKHIISPNPHVRQAACIWLLSLVRKLSTHKEVKSHLKEIQSAFVSVLSENDELSQDVASKGLGLVYELGNEQDQQELVSTLVETLMTGKRVKHEVSGETVVFQGGALGKTPDGQGLSTYKELCSLASDLSQPDLVYKFMNLANHHAMWNSRKGAAFGFNVIATRAGEQLAPFLPQLVPRLYRYQFDPNLGIRQAMTSIWNALVTDKSMVDKYLKEILQDLVKNLTSNMWRVRESSCLALNDLLRGRPLDDIIDKLPEIWETLFRVQDDIKESVRKAAELALKTLSKVCVKMCDPAKGAAGQRTIAALLPCLLDKGMMSTACTKTHSSSARVLKCIGAPSSQLFEPPGDRARKGCDG

SEQ ID NO: 817246 - protein, 180 aa, Homo sapiens
MYHIDCRDQLERVFLRLGHAETDEQLQNIISKFLPPVLLKLSSTQEGVRKKVMELLVHLNKRIKSRPKIQLPVETLLVQYQDPAAVSFVTNFTIIYVKMGYPRLPVEKQCELAPTLLTAMEGKPQPQQDSLMHLLIPTLFHMKYPVESSKSASPFNLAEKPKTVQLLLDFMLDVLLMPYG

SEQ ID NO: 817247 - protein, 223 aa, Homo sapiens
QNSSSAQGSSSNSGGGSGIPQPPPGMSFYAAKRVIGDNPWTPEQLEQCKLGIVKFIEAEQVPELEAVLHLVIASSDTRHSVATAADLELKSKQSLIDWNNPAIINKMYKVYLGDIPLKTKEGAVLKPELKRDPVSTRVKLKIVPHLLRSRQAAETFPANIQVVYDGLFGTNTNSKLRTLSLQFVHHICITCPEIKIKPLGPMLLNGLTKTKLAWYRARLYHVT

SEQ ID NO: 817248 - protein, 84 aa, Homo sapiens
MLLYGPCSAELEKSVPNQPSTNEILQAVLKECSKENVKYKIVAISCAADILKATKEDRFQEFSNIVIPLIKKVIPPVSSVLVYT

SEQ ID NO: 817249 - protein, 742 aa, Homo sapiens
MEEGFRDRAAFIRGAKDIAKEVKKHAAKKVVKGLDRVQDEYSRRSYSRFEEEDDDDDFPAPSDGYYRGEGTQDEEEGGASSDATEGHDEDDEIYEGEYQGIPRAESGGKGERMADGAPLAGVRGGLSDGEGPPGGRGEAQRRKEREELAQQYEAILRECGHGRFQWTLYFVLGLALMADGVEVFVVGFVLPSAEKDMCLSDSNKGMLGLIVYLGMMVGAFLWGGLADRLGRRQCLLISLSVNSVFAFFSSFVQGYGTFLFCRLLSGVGIGGSIPIVFSYFSEFLAQEKRGEHLSWLCMFWMIGGVYAAAMAWAIIPHYGWSFQMGSAYQFHSWRVFVLVCAFPSVFAIGALTTQPESPRFFLENGKHDEAWMVLKQVHDTNMRAKGHPERVFSVTHIKTIHQEDELIEIQSDTGTWYQRWGVRALSLGGQVWGNFLSCFGPEYRRITLMMMGVWFTMSFSYYGLTVWFPDMIRHLQAVDYASRTKVFPGERVEHVTFNFTLENQIHRGGQYFNDKFIGLRLKSVSFEDSLFEECYFEDVTSSNTFFRNCTFINTVFYNTDLFEYKFVNSRLINSTFLHNKEGCPLDVTGTGEGAYMVYFVSFLGTLAVLPGNIVSALLMDKIGRLRMLAGSSVMSCVSCFFLSFGNSESAMIALLCLFGGVSIASWNALDVLTVELYPSDKRTTAFGFLNALCKLAAVLGISIFTSFVGITKAAPILFASAALALGSSLALKLPETRGQVLQ

SEQ ID NO: 817250 - protein, 198 aa, Homo sapiens
NLRLGTRLGCKSAEADLFEYKFVNSRLINSTFLHNKEGCPLDVTGTGEGAYMVYFVSFLGTLAVLPGNIVSALLMDKIGRLRMLAGSSVMSCVSCFFLSFGNSESAMIALLCLFGGVSIASWNALDVLTVELYPSDKRTTAFGFLNALCKLAAVLGISIFTSFVGITKAAPILFASAALALGSSLALKLPETRGQVLQ

SEQ ID NO: 817251 - protein, 194 aa, Homo sapiens
MTACLSWPLPTDLFEYKFVNSRLINSTFLHNKEGCPLDVTGTGEGAYMVYFVSFLGTLAVLPGNIVSALLMDKIGRLRMLAGSSVMSCVSCFFLSFGNSESAMIALLCLFGGVSIASWNALDVLTVELYPSDKRTTAFGFLNALCKLAAVLGISIFTSFVGITKAAPILFASAALALGSSLALKLPETRGQVLQ

SEQ ID NO: 817252 - protein, 742 aa, Homo sapiens; identical to SEQ ID NO: 817249

SEQ ID NO: 817253 - protein, 742 aa, Homo sapiens; identical to SEQ ID NO: 817249

SEQ ID NO: 817254 - protein, 742 aa, Homo sapiens; identical to SEQ ID NO: 817249

SEQ ID NO: 817255 - protein, 742 aa, Homo sapiens; identical to SEQ ID NO: 817249

SEQ ID NO: 817256 - protein, 637 aa, Homo sapiens
MEEGFRDRAAFIRGAKDIAKEVKKHAAKKVVKGLDRVQDEYSRRSYSRFEEEDDDDDFPAPSDGYYRGEGTQDEEEGGASSDATEGHDEDDEIYEGEYQGIPRAESGGKGERMADGAPLAGVRGGLSDGEGPPGGRGEAQRRKEREELAQQYEAILRECGHGRFQWTLYFVLGLALMADGVEVFVVGFVLPSAEKDMCLSDSNKGMLGLIVYLGMMVGAFLWGGLADRLGRRQCLLISLSVNSVFAFFSSFVQGYGTFLFCRLLSGVGIGGSIPIVFSYFSEFLAQEKRGEHLSWLCMFWMIGGVYAAAMAWAIIPHYGWSFQMGSAYQFHSWRVFVLVCAFPSVFAIGALTTQPESPRFFLENGKHDEAWMVLKQVHDTNMRAKGHPERVFSVTHIKTIHQEDELIEIQSDTGTWYQRWGVRALSLGGQVWGNFLSCFGPEYRRITLMMMGVWFTMSFSYYGLTVWFPDMIRHLQAVDYASRTKVFPGERVEHVTFNFTLENQIHRGGQYFNDKFIGLRLKSVSFEDSLFEECYFEDVTSSNTFFRNCTFINTVFYNTDLFEYKFVNSRLINSTFLHNKEGCPLDVTGTGEGAYMVYFVSFLGTLAVLPGNIVSALLMDKIGRLRMLGKGERLSQI

SEQ ID NO: 817257 - protein, 485 aa, Homo sapiens
MEEGFRDRAAFIRGAKDIAKEVKKHAAKKVVKGLDRVQDEYSRRSYSRFEEEDDDDDFPAPSDGYYRGEGTQDEEEGGASSDATEGHDEDDEIYEGEYQGIPRAESGGKGERMADGAPLAGVRGGLSDGEGPPGGRGEAQRRKEREELAQQYEAILRECGHGRFQWTLYFVLGLALMADGVEVFVVGFVLPSAEKDMCLSDSNKGMLGLIVYLGMMVGAFLWGGLADRLGRRQCLLISLSVNSVFAFFSSFVQGYGTFLFCRLLSGVGIGGSIPIVFSYFSEFLAQEKRGEHLSWLCMFWMIGGVYAAAMAWAIIPHYGWSFQMGSAYQFHSWRVFVLVCAFPSVFAIGALTTQPESPRFFLENGKHDEAWMVLKQVHDTNMRAKGHPERVFSVTHIKTIHQEDELIEIQSDTGTWYQRWGVRALSLGGQVWGNFLSCFGPEYRRITLMMMGVWFTMSFSYYGLTVWFPDTSVLSVTTVVKHRPA

SEQ ID NO: 817258 - protein, 195 aa, Homo sapiens
RPPRETVRLELVLKDPTDESCVEFSYPELLLCGEQRKKLIHTEDPFNDEHQERQEVEMLAKKFEMKYGGKPRKHRKDRLQDLIDIGFGYDETDPFIDNSEAYDELVPASLTTKYGGFYINTGTLQFRQASDTEEDDITDNQKHKPPKVPKIKEDDIEMKKRKRKEEGEKEKKPRKKVPKQLGVVALNSHKSENNK

SEQ ID NO: 817259 - protein, 685 aa, Homo sapiens
RPPRETVRLELVLKDPTDESCVEFSYPELLLCGEQRKKLIHTEDPFNDEHQERQEVEMLAKKFEMKYGGKPRKHRKDRLQDLIDIGFGYDETDPFIDNSEAYDELVPASLTTKYGGFYINTGTLQFRQASDTEEDDITDNQKHKPPKVPKIKEDDIEMKKRKRKEEGEKEKKPRKKVPKQLGVVALNSHKSEKKKKRYKDSLSLAAMIRKFQKEKDALKKESNPKVPVTLSTPSLNKPPCAAAALGNDVPDLNLSSGDPDLPIFVSTNEHELFQEAENALEMLDDFDFDRLLDAASDGSPLSESGGENGTTTQPTYTSQVMPKVVPTLPEGLPVLLEKRIEDLRVAAKLFDEEGRKKFFTQDMNNILLDIELQLQELGPVIRSGVYSHLEAFVPCNKETLVKRLKKLHLNVQDDRLREPLQKLKLAVSNVMPEQLFKYQEDCQARSQAKCAKLQTDEEREKNGSEEDDDEKPGKRVIGPRKKFHWDDTIRTLLCNLVEIKLGCYELEPNKSQSAEDYLKSFMETEVKPLWPKGWMQARMLFKESRSVHNHLTSAPAKKKVIPAPKPKVKEVMVKTLPLHSFPTMLKECSPKKDQKTPTSLVASVSGPPTSSSTAAIAAASSSSAPAQETICLDDSLDEDLSFHSPSLDLVSEALAVINNGNKGPPVGSRISMPTTKPRPGLREEK

SEQ ID NO: 817260 - protein, 592 aa, Homo sapiens
MSYRENHIYDELVPASLTTKYGGFYINTGTLQFRQASDTEEDDITDNQKHKPPKVPKIKEDDIEMKKRKRKEEGEKEKKPRKKVPKQLGVVALNSHKSEKKKKRYKDSLSLAAMIRKFQKEKDALKKESNPKVPVTLSTPSLNKPPCAAAALGNDVPDLNLSSGDPDLPIFVSTNEHELFQEAENALEMLDDFDFDRLLDAASDGSPLSESGGENGTTTQPTYTSQVMPKVVPTLPEGLPVLLEKRIEDLRVAAKLFDEEGRKKFFTQDMNNILLDIELQLQELGPVIRSGVYSHLEAFVPCNKETLVKRLKKLHLNVQDDRLREPLQKLKLAVSNVMPEQLFKYQEDCQARSQAKCAKLQTDEEREKNGSEEDDDEKPGKRVIGPRKKFHWDDTIRTLLCNLVEIKLGCYELEPNKSQSAEDYLKSFMETEVKPLWPKGWMQARMLFKESRSVHNHLTSAPAKKKVIPAPKPKVKEVMVKTLPLHSFPTMLKECSPKKDQKTPTSLVASVSGPPTSSSTAAIAAASSSSAPAQETICLDDSLDEDLSFHSPSLDLVSEALAVINNGNKGPPVGSRISMPTTKPRPGLREEK

SEQ ID NO: 817261 - protein, 360 aa, Homo sapiens
IQVRYDTRFFCLLVEVCNFNAAKLFDEEGRKKFFTQDMNNILLDIELQLQELGPVIRSGVYSHLEAFVPCNKETLVKRLKKLHLNVQDDRLREPLQKLKLAVSNVMPEQLFKYQEDCQARSQAKCAKLQTDEEREKNGSEEDDDEKPGKRVIGPRKKFHWDDTIRTLLCNLVEIKLGCYELEPNKSQSAEDYLKSFMETEVKPLWPKGWMQARMLFKESRSVHNHLTSAPAKKKVIPAPKPKVKEVMVKTLPLHSFPTMLKECSPKKDQKTPTSLVASVSGPPTSSSTAAIAAASSSSAPAQETICLDDSLDEDLSFHSPSLDLVSEALAVINNGNKGPPVGSRISMPTTKPRPGLREEK

SEQ ID NO: 817262 - protein, 128 aa, Homo sapiens
MAEQVKCASAGVSSGAGSGPVVNAELEVKKLQELVRKLEKQNEQLRSRAASAAAAPHLLLLPPPPPAAPPPAGLQPLGPRSPPAATATAAASGGLGLGLALGAGGGGGSGSGSGGGSSPAFPGTFCLP

SEQ ID NO: 817263 - protein, 305 aa, Homo sapiens
MGYKLQDLTDVQIMARLQEESLRQDYASTSASVSRHSSSVSLSSGKKGTCSDQEYDQYSLEDEEEFDHLPPPQPRLPRCSPFQRGIPHSQTFSSIRECRRSPSSQYFPSNNYQQQQYYSPQAQTPDQQPNRTNGDKLRRSMPNLARMPSTTAISSNISSPVTVRNSQSFDSSLHGAGNGISRIQSCIPSPGQLQHRVHSVGHFPVSIRQPLKATAYVSPTVQGSSNMPLSNGLQLYSNTGIPTPNKAAASGIMGRSALPRPSLAINGSNLPRSKIAQPVRSFLQPPKPLSSLSTLRDGNWRDGCY

SEQ ID NO: 817264 - protein, 443 aa, Homo sapiens
MNSANKEDFSWSGMNRLYIGSSKTFTSSEKSLTPLQWCRHVLDNPTPEMEAARRSLCFRLEQVYIGSSKTFTSSEKSLTPLQWCRHVLDNPTPEMEAARRSLCFRLEQGYTSRGSPLSPQSSIDSELSTSELEDDSISMGYKLQDLTDVQIMARLQEESLRQDYASTSASVSRHSSSVSLSSGKKGTCSDQEYDQYSLEDEEEFDHLPPPQPRLPRCSPFQRGIPHSQTFSSIRECRRSPSSQYFPSNNYQQQQYYSPQAQTPDQQPNRTNGDKLRRSMPNLARMPSTTAISSNISSPVTVRNSQSFDSSLHGAGNGISRIQSCIPSPGQLQHRVHSVGHFPVSIRQPLKATAYVSPTVQGSSNMPLSNGLQLYSNTGIPTPNKAAASGIMGRSALPRPSLAINGSNLPRSKIAQPVRSFLQPPKPLSSLSTLRDGNWRDGCY

SEQ ID NO: 817265 - protein, 449 aa, Homo sapiens
PPEAPFVYFKPAAGFFGAGGGGPEPGGAGTPPGAAAAPPSPPPTLLDEVELLDLESVAAWRDEDDYTWLYIGSSKTFTSSEKSLTPLQWCRHVLDNPTPEMEAARRSLCFRLEQGYTSRGSPLSPQSSIDSELSTSELEDDSISMGYKLQDLTDVQIMARLQEESLRQDYASTSASVSRHSSSVSLSSGKKGTCSDQEYDQYSLEDEEEFDHLPPPQPRLPRCSPFQRGIPHSQTFSSIRECRRSPSSQYFPSNNYQQQQYYSPQAQTPDQQPNRTNGDKLRRSMPNLARMPSTTAISSNISSPVTVRNSQSFDSSLHGAGNGISRIQSCIPSPGQLQHRVHSVGHFPVSIRQPLKATAYVSPTVQGSSNMPLSNGLQLYSNTGIPTPNKAAASGIMGRSALPRPSLAINGSNLPRSKIAQPVRSFLQPPKPLSSLSTLRDGNWRDGCY

SEQ ID NO: 817266 - protein, 305 aa, Homo sapiens; identical to SEQ ID NO: 817263

SEQ ID NO: 817267 - protein, 499 aa, Homo sapiens
PPEAPFVYFKPAAGFFGAGGGGPEPGGAGTPPGAAAAPPSPPPTLLDEVELLDLESVAAWRDEDDYTWLYIGSSKTFTSSEKSLTPLQWCRHVLDNPTPEMEAARRSLCFRLEQASRWRSLFSSTASLAFPYSPVARLSPYSNGINTPSFSKTSNKAILTPEKTGYTSRGSPLSPQSSIDSELSTSELEDDSISMGYKLQDLTDVQIMARLQEESLRQDYASTSASVSRHSSSVSLSSGKKGTCSDQEYDQYSLEDEEEFDHLPPPQPRLPRCSPFQRGIPHSQTFSSIRECRRSPSSQYFPSNNYQQQQYYSPQAQTPDQQPNRTNGDKLRRSMPNLARMPSTTAISSNISSPVTVRNSQSFDSSLHGAGNGISRIQSCIPSPGQLQHRVHSVGHFPVSIRQPLKATAYVSPTVQGSSNMPLSNGLQLYSNTGIPTPNKAAASGIMGRSALPRPSLAINGSNLPRSKIAQPVRSFLQPPKPLSSLSTLRDGNWRDGCY

SEQ ID NO: 817268 - protein, 305 aa, Homo sapiens; identical to SEQ ID NO: 817263

SEQ ID NO: 817269 - protein, 349 aa, Homo sapiens
MEAARRSLCFRLEQGYTSRGSPLSPQSSIDSELSTSELEDDSISMGYKLQDLTDVQIMARLQEESLRQDYASTSASVSRHSSSVSLSSGKKGTCSDQEYDQYSLEDEEEFDHLPPPQPRLPRCSPFQRGIPHSQTFSSIRECRRSPSSQYFPSNNYQQQQYYSPQAQTPDQQPNRTNGDKLRRSMPNLARMPSTTAISSNISSPVTVRNSQSFDSSLHGAGNGISRIQSCIPSPGQLQHRVHSVGHFPVSIRQPLKATAYVSPTVQGSSNMPLSNGLQLYSNTGIPTPNKAAASGIMGRSALPRPSLAINGSNLPRSKIAQPVRSFLQPPKPLSSLSTLRDGNWRDGCY

SEQ ID NO: 817270 - protein, 305 aa, Homo sapiens; identical to SEQ ID NO: 817263

SEQ ID NO: 817271 - protein, 138 aa, Homo sapiens
AVRPGITGSGNGISRIQSCIPSPGQLQHRVHSVGHFPVSIRQPLKATAYVSPTVQGSSNMPLSNGLQLYSNTGIPTPNKAAASGIMGRSALPRPSLAINGSNLPRSKIAQPVRSFLQPPKPLSSLSTLRDGNWRDGCY

SEQ ID NO: 817272 - protein, 256 aa, Homo sapiens
MNSANKEDFSWSGMNRLYIGSSKTFTSSEKSLTPLQWCRHVLDNPTPEMEAARRSLCFRLEQVYIGSSKTFTSSEKSLTPLQWCRHVLDNPTPEMEAARRSLCFRLEQGYTSRGSPLSPQSSIDSELSTSELEDDSISMGYKLQDLTDVQIMARLQEESLRQDYASTSASVSRHSSSVSLSSGKKGTCSDQEYDQYSLEDEEEFDHLPPPQPRLPRCSPFQRGIPHSQTFSSIRECRRSPSSQYFPSNNYKLQLLG

SEQ ID NO: 817273 - protein, 286 aa, Homo sapiens
MNSANKEDFSWSGMNRLYIGSSKTFTSSEKSLTPLQWCRHVLDNPTPEMEAARRSLCFRLEQVYIGSSKTFTSSEKSLTPLQWCRHVLDNPTPEMEAARRSLCFRLEQGYTSRGSPLSPQSSIDSELSTSELEDDSISMGYKLQDLTDVQIMARLQEESLRQDYASTSASVSRHSSSVSLSSGKKGTCSDQEYDQYSLEDEEEFDHLPPPQPRLPRCSPFQRGIPHSQTFSSIRECRRSPSSQYFPSNNYQQQQYYSPQAQTPDQQPNRTNGDKLRRRFLQPPKPL

SEQ ID NO: 817274 - protein, 1247 aa, Homo sapiens
MPILCWLLPNIKIPLFLGNVQIFGKAQHPNQAAVWLLNGLQLFLHSKWNELAVCVCGGGGRGWCMCVCVCASAAASKLEILQDTPVMDWWQLGGTADVHCVGGNPVVVGYLNAPRQASDVCSYQKHFRFKKSEMMVVLVSGEIEKPQMMRISFCPLSFFCNPFKTINKPILLSPYFFLEAQGFLSASQNIFVVNWEKVILGLGGVGIKNGGRPDFKIQARTPNDSTHESHFRSHLVHHLYFEVEEVEAGKEQDQRKNPDFLMLGPHTSSLSISLIAVYVLLENTKWIIFFRITFEPTIFNNNSTSSILLLIEYKEMFLYGILEGAGDEAWHSPKFKSPIINCILNCFKLAHFQGNFFCVSVTELLHPCHSLPILPNPILALKFHCVNFCTVYTHQVSKHLPPLPILLPLFYTHTHTHTHNPSLACSYLLIFLPYRNRNRDKEGENVYIGAGLNNNFISSINWGKLREKLLFLFTVLERIAISMTAFVLMDFSISLDVNYSVFLAEGTLRSHHLLLYSKFLILQARKPRHRGKVISPRSHSWLGQDWVYNPHLLALIPGPFPTEVVLPSIRLLRVISQGHVASWSHMLLALISVGNPPSNLIQPLFPAFTWFPSTWVADVLEESEALRANRSNGVPGLVHLIQEITAAIVRSPLNSPPLNACLAQMEWRKIDFLHQFTLCHLINGWSFQAEGNVSCFQSRKKKEWNNSFVHPNFLRWLFNILKKLVWYHSLAGFLLEYGSKMSRENNLVSLWLPSSTMSPKPSCSDEDNFQVYSKGLCDKNVPWLMLNIGSCVCTKIASCVLYTLFPSSCVHCSCGLPQQKPGQKGPNTWFSLLQGSSWELRGYLLVQFKRPPSGLTPLLRYFSLLPPSPPQSQVTKEPESGCVAIWRRQGTLRFFFESFSPSLRPVIGAYLEQNFVCVPNPFNYSGYNAPNHPAHLILNGFYFLKIHIPRTREQDAYIPKMSSRTLMGMIPKITPPQKRLCQETSPDRNTGTVVGTTSFMVVQFAMEIKGIDFLKKMIGTCLWPHEGHLDPFPGLTHILPSLKGFGFKSQTGLPSEPEVFWSSSGVRHENVAPSIPSGKGAFPPFLLKPGPPEIVFVSKSLVWSLYTQTLSVASCLVSLLRIYADLPLWLSQRDIGYHLTRLTFFFFFFDLSLPLSPRLECSGTILARCNLHPSPPRSKRFSCLSLPSSWDYRRAPPNLAIFLLLLFLVEMGFHHVGQTGLELLASNYLPTSASQSAGITGMSTMPS

SEQ ID NO: 817275 - protein, 1161 aa, Homo sapiens
MDWWQLGGTADVHCVGGNPVVVGYSNAPRQASDVCSYQKHFRFKKSEMMVVLVSGEIEKPQMMRISFCPLSFFCNPFKTINKPILLSPYFFLEAQGFLSASQNIFVVNWEKVILGLGGVGIKNGGRPDFKIQARTPNDSTHESHFRSHLVHHLYFEVEEVEAGKEQDQRKNPDFLMLGPHTSSLSISLIAVYVLLENTKWIIFFRITFEPTIFNNNSTSSILLLIEYKEMFLYGILEGAGDEAWHSPKFKSPIINCILNCFKLAHFQGNFFCVSVTELLHPCHSLPILPNPILALKFHCVNFCTVYTHQVSKHLPPLPILLPLFYTHTHTHTHNPSLACSYLLIFLPYRNRNRDKEGENVYIGAGLNNNFISSINWGKLREKLLFLFTVLERIAISMTAFVLMDFSISLDWNYSVFLAEGTLRSHHLLLYSKFLILQARKPRHRGKVISPRSHSWLGQDWVYNPHLLALIPGPFPTEVVLPSIRLLRVISQGHVASWSHMLLALISVGNPPSNLIQPLFPAFTWFPSTWVADVLEESEALRANRSNGVPGLVHLIQEITAAIVRSPLNSPPLNACLAQMEWRKIDFLHQFTLCHLINGWSFQAEGNVSCFQSRKKKEWNNSFVHPNFLRWLFNILKKLVWYHSLAGFLLEYGSKMSRENNLVSLWLPSSTMSPKPSCSDEDNFQDISKGLCDKNVPWLMLNIGSCVCTKIASCVLYTLFPSSCVHCSCGLPQQKPGQKGPNTWFSLLQGSSWELRGYLLVQFKRPPSGLTPLLRYFSLLPPSPPQSQVTKEPESGCVAISRRQGTLRFFFESFSPSLRPVIGAYLEQNFVCVPNPFNYSGYNAPNHPAHLILNGFYFLKIHIPRTREQDAYIPKMSSRTLMGMIPKITPPQKRLCQETSPDRNTGTVVGTTSFMVVQFAMEIKGIDFLKKMIGTCLWPHKGHLDPFPGLTHILPSLKGFGFKSQTGLPSEPEVFWSSSGVRHENVAPSIPSGKGAFPPFLLKPGPPEIVFVSKSLVWSLYTQTLSVASCLVSLLRIYADLPLWLSQRDIGYHLTRLTFFFFFFDLSLPLSPRLECSGTILARCNLHPSPPRSKRFSCLSLPSSWDYRRAPPNLAIFLLLLFLVEMGFHHVGQTGLELLASNYLPTSASQSAGITGMSTMPS

SEQ ID NO: 817276 - protein, 1161 aa, Homo sapiens; identical to SEQ ID NO: 817275

SEQ ID NO: 817277 - protein, 1162 aa, Homo sapiens
MDWWQLGGTADVHCVGGNPVVVGYLNAPRQASDVCSYQKHFRFKKSEMMVVLVSGEIEKPQMMRISFCPLSFFCNPFKTINKPILLSPYFFLEAQGFLSASQNIFVVNWEKVILGLGGVGIKNGGRPDFKIQARTPNDSTHESHFRSHLVHHLYFEVEEVEAGKEQDQRKNPDFLMLGPHTSSLSISLIAVYVLLENTKWIIFFRITFEPTIFNNNSTSSILLLIEYKEMFLLAILEGAGDEAWHSPKFKSPIINCILNCFKLAHFQGNFFCVSVTELLHPCHSLPILPNPILALKFHCVNFCTVYTHQVSKHLPPLPILLPLFYTHTHTHTHNPSLACSYLLIFLPYRNRNRDKEGENVYIGAGLNNKLHKYVLTRGEIERKAPFLFTVLERIAISMTAFVLMDFSISLDVNYSVFLAEGTLRSHHLLLYSKFLILQARKPRHRGKVISPRSHSWLGQDWVYNPHLLALIPGPFPTEVVLPSIRLLRVISQGHVASWSHMLLALISVGNPPSNLIQPLFPAFTWFPSTWVADVLEESEALRANRSNGVPGLVHLIQEITAAIVRSPLNSPPLNACLAQMEWRKIDFLHQFTLCHLINGWSFQAEGNVSCFQSRKKKEWNNSFVHPNFLRWLFNILKKLVWYHSLAGFLLEYGSKMSRENNLVSLWLPSSTMSPKPSCSDEDNFQVYSKGLCDKNVPWLMLNIGSCVCTKIASCVLYTLFPSSCVHCSCGLPQQKPGQKGPNTWFSLLQGSSWELRGYLLVQFKRPPSGLTPLLRYFSLLPPSPPQSQVTKEPESGCVAISRRQGTLRFFFESFSPSLRPVIGAYLEQNFVCVPNPFNYSGYNAPNHPAHLILNGFYFLKIHIPRTREQDAYIPKMSSRTLMGMIPKITPPQKRLCQETSPDRNTGTVVCTTSFMVVQFAMEIKGIDFLKKMIGTCLWPHEGHLDPFPGLTHILPSLKGFGFKSQTGLPSEPEVFWSSSGVRHENVAPSIPSGKGAFPPFLLKPGPPEIVFVSKSLVWSLYTQTLSVASCLVSLLRIYADLPLWLSYRDIGYHLTRLTFFFFFFDLSLPLSPRLECSGTILARCNLHPSPPRSKRFSCLSLPSSWDYRRAPPNLAIFLLLLFLVEMGFHHVGQTGLELLASNYLPTSASQSAGITGMSTMPS

SEQ ID NO: 817278 - protein, 114 aa, Homo sapiens
MSALSLLILGLLTAVPPASCQQGLGNLQPWMQGLIAVAVFLVLVAIAFAVNHFWCQEEPEPAHMILTVGNKADGVLVGTDGRYSSMAASFRSSEHENAYENVPEEEGKVRSTPM

SEQ ID NO: 817279 - protein, 114 aa, Homo sapiens; identical to SEQ ID NO: 817278

SEQ ID NO: 817280 - protein, 100 aa, Homo sapiens
GSWMDVSATPKPLLLCVESAIVGCLPPAPCRPYPPLKYSQPRLEPEPAHMILTVGNKADGVLVGTDGRYSSMAASFRSSEHENAYENVPEEEGKVRSTPM

SEQ ID NO: 817281 - protein, 131 aa, Homo sapiens
MAGIKALISLSFGGAIGLMFLMLGCALPIYNKYWPLFVLFFYILSPIPYCIARRLVDDTDAMSNACKELAIFLTTGIVVSAFGLPIVFARAHLIEWGACALVLTGNTVIFATILGFFLVFGSNDDFSWQQW

SEQ ID NO: 817282 - protein, 169 aa, Homo sapiens
MAGIKALISLSFGGAIGLMFLMLGCALPIYNKYWPLFVLFFYILSPIPYCIARRLVDDTDAMSNACKELAIFLTTGIVVSAFGLPIVFARAHLMGRLPFFSKMGTAESEGRETLTQQLPLPAAAMRRLLPASRVSTQPVLRLADSAESLLGRPALWALGFLLCPPSQAQ

SEQ ID NO: 817283 - protein, 131 aa, Homo sapiens; identical to SEQ ID NO: 817281

SEQ ID NO: 817284 - protein, 131 aa, Homo sapiens; identical to SEQ ID NO: 817281

SEQ ID NO: 817285 - protein, 96 aa, Homo sapiens
  misc_feature (5)..(5): Xaa can be any naturally occurring amino acid
TKLAXGPILSPIPYCIARRLVDDTDAMSNACKELAIFLTTGIVVSAFGLPIVFARAHLIEWGACALVLTGNTVIFATILGFFLVFGSNDDFSWQQW

SEQ ID NO: 817286 - protein, 92 aa, Homo sapiens
QRQTLSGVKGRSGFHTEENPSSGQTGRVCRRDEVWDITPALTGCLCGSEERKLAFPLTCSCRIRHEGAFPLEAESGLWYYNVQISRGRCRYT

SEQ ID NO: 817287 - protein, 207 aa, Homo sapiens
RRGSDPRPGPALGPEVGAAPSGNGRLRPRLRPAAPTFCRFRQPLSHPSPPGQNMKWLAVSEESRRDLDGHTRFAGVCIRERALISLSFGGAIGLMFLMLGCALPIYNKYWPLFVLFFYILSPIPYCIARRLVDDTDAMSNACKELAIFLTTGIVVSAFGLPIVFARAHLIEWGACALVLTGNTVIFATILGFFLVFGSNDDFSWQQW

SEQ ID NO: 817288 - protein, 142 aa, Homo sapiens
RRPRVGSDDSAGRQSTALISLSFGGAIGLMFLMLGCALPIYNKYWPLFVLFFYILSPIPYCIARRLVDDTDAMSNACKELAIFLTTGIVVSAFGLPIVFARAHLIEWGACALVLTGNTVIFATILGFFLVFGSNDDFSWQQW

SEQ ID NO: 817289 - protein, 156 aa, Homo sapiens
RRGSDPRPGPALGPEVGAAPSGNGRLRPRLRPAAPTFCRFRQPLSHPSPPGQNMKWLAVSEESRRDLDGHTRFAGVCIRERGRQSVGLRRLRLLEMPAMENQSFPTERHKCGLRALHGSARNLDPTSTPAARARGFTGSRNGCIFICGVWTLELIL

SEQ ID NO: 817290 - protein, 113 aa, Homo sapiens
MFLMLGCALPIYNKYWPLFVLFFYILSPIPYCIARRLVDDTDAMSNACKELAIFLTTGIVVSAFGLPIVFARAHLIEWGACALVLTGNTVIFATILGFFLVFGSNDDFSWQQW

SEQ ID NO: 817291 - protein, 137 aa, Homo sapiens
YGVCRNGMISKALIDSPCGAIGLMVDALACVPVQLYNKYWPLFVLFFYILSPIPYCIARRLVDDTDAMSNACKELAIFLTTGIVVSAFGLPIVFARAHLIEWGACALVLTGNTVIFATILGFFLVFGSNDDFSWQQW

SEQ ID NO: 817292 - protein, 131 aa, Homo sapiens; identical to SEQ ID NO: 817281

SEQ ID NO: 817293 - protein, 473 aa, Homo sapiens
MASRLTLLTLLLLLLAGDRASSNPNATSSSSQDPESLQDRGEGKVATTVISKMLFVEPILEVSSLPTTNSTTNSATKITANTTDEPTTQPTTEPTTQPTIQPTQPTTQLPTDSPTQPTTGSFCPGPVTLCSDLESHSTEAVLGDALVDFSLKLYHAFSAMKKVETNMAFSPFSIASLLTQVLLGAGENTKTNLESILSYPKDFTCVHQALKGFTTKGVTSVSQIFHSPDLAIRDTFVNASRTLYSSSPRVLSNNSDANLELINTWVAKNTNNKISRLLDSLPSDTRLVLLNAIYLSAKWKTTFDPKKTRMEPFHFKNSVIKVPMMNSKKYPVAHFIDQTLKAKVGQLQLSHNLSLVILVPQNLKHRLEDMEQALSPSVFKAIMEKLEMSKFQPTLLTLPRIKVTTSQDMLSIMEKLEFFDFSYDLNLCGLTEDPDLQVSAMQHQTVLGTDRDWGGKAAASLRHLCGPATLLVF

SEQ ID NO: 817294 - protein, 507 aa, Homo sapiens
MGAGPGRGGGPWAPRVGAGSEAGWLRRSADVAAQMASRLTLLTLLLLLLAGDRASSNPNATSSSSQDPESLQDRGEGKVATTVISKMLFVEPILEVSSLPTTNSTTNSATKITANTTDEPTTQPTTEPTTQPTIQPTQPTTQLPTDSPTQPTTGSFCPGPVTLCSDLESHSTEAVLGDALVDFSLKLYHAFSAMKKVETNMAFSPFSIASLLTQVLLGAGENTKTNLESILSYPKDFTCVHQALKGFTTKGVTSVSQIFHSPDLAIRDTFVNASRTLYSSSPRVLSNNSDANLELINTWVAKNTNNKISRLLDSLPSDTRLVLLNAIYLSAKWKTTFDPKKTRMEPFHFKNSVIKVPMMNSKKYPVAHFIDQTLKAKVGQLQLSHNLSLVILVPQNLKHRLEDMEQALSPSVFKAIMEKLEMSKFQPTLLTLPRIKVTTSQDMLSIMEKLEFFDFSYDLNLCGLTEDPDLQVSAMQHQTVLGTDRDWGGKAAASLRHLCGPATLLVF

SEQ ID NO: 817295 - protein, 454 aa, Homo sapiens
MASRLTLLTLLLLLLAGDRASSNPNATRTVISKMLFVEPILEVSSLPTTNSTTNSATKITANTTDEPTTQPTTEPTTQPTIQPTQPTTQLPTDSPTQPTTGSFCPGPVTLCSDLESHSTEAVLGDALVDFSLKLYHAFSAMKKVETNMAFSPFSIASLLTQVLLGAGENTKTNLESILSYPKDFTCVHQALKGFTTKGVTSVSQIFHSPDLAIRDTFVNASRTLYSSSPRVLSNNSDANLELINTWVAKNTNNKISRLLDSLPSDTRLVLLNAIYLSAKWKTTFDPKKTRMEPFHFKNSVIKVPMMNSKKYPVAHFIDQTLKAKVGQLQLSHNLSLVILVPQNLKHRLEDMEQALSPSVFKAIMEKLEMSKFQPTLLTLPRIKVTTSQDMLSIMEKLEFFDFSYDLNLCGLTEDPDLQVSAMQHQTVLGTDRDWGGKAAASLRHLCGPATLLVF

SEQ ID NO: 817296 - protein, 425 aa, Homo sapiens
MLPAPAPRIQRVCKTEAKGRSQPTNSATKITANTTDEPTTQPTTEPTTQPTIQPTQPTTQLPTDSPTQPTTGSFCPGPVTLCSDLESHSTEAVLGDALVDFSLKLYHAFSAMKKVETNMAFSPFSIASLLTQVLLGAGENTKTNLESILSYPKDFTCVHQALKGFTTKGVTSVSQIFHSPDLAIRDTFVNASRTLYSSSPRVLSNNSDANLELINTWVAKNTNNKISRLLDSLPSDTRLVLLNAIYLSAKWKTTFDPKKTRMEPFHFKNSVIKVPMMNSKKYPVAHFIDQTLKAKVGQLQLSHNLSLVILVPQNLKHRLEDMEQALSPSVFKAIMEKLEMSKFQPTLLTLPRIKVTTSQDMLSIMEKLEFFDFSYDLNLCGLTEDPDLQVSAMQHQTVLGTDRDWGGKAAASLRHLCGPATLLVF

SEQ ID NO: 817297 - protein, 176 aa, Homo sapiens
MASRLTLLTLLLLLLAGDRASSNPNATSSSSQDPESLQDRGEGKVATTVISKMLFVEPILEVSSLPTTNSTTNSATKITANTTDEPTTQPTTEPTTQPTIQPTQPTTQLPTDSPTQPTTGSFCPGPVTLCSDLESHSTEAVLGDALVDFSLKLYHAFSAMKKVETNMATSPVSTRP

SEQ ID NO: 817298 - protein, 608 aa, Homo sapiens
MASRLTLLTLLLLLLAGDRASSNPNATSSSSQDPESLQDRGEGKVATTVISKMLFVEPILEVSSLPTTNSTTNSATKITANTTDEPTTQPTTEPTTQPTIQPTQPTTQLPTDSPTQPTTGSFCPGPVTLCSDLESHSTEAVLGDALVDFSLKLYHAFSAMKKVETNMAFSPFSIASLLTQVLLGAGENTKTNLESILSYPKDFTCVHQALKGFTTKGVTSVSQIFHSPVDWRLLQSKSQEVLSQTSTKARKQSLFRAKIKGRKEGKSRQMEFNISKRLSCRAIVTYKLRQRRLGATSLVLGSGFTFFGPYLPHLEEEWAGPRSTMPYSLSEQKNHRKHAHSQIVLMERTTCSGLMPPFLNIPPDLAIRDTFVNASRTLYSSSPRVLSNNSDANLELINTWVAKNTNNKISRLLDSLPSDTRLVLLNAIYLSAKWKTTFDPKKTRMEPFHFKNSVIKVPMMNSKKYPVAHFIDQTLKAKVGQLQLSHNLSLVILVPQNLKHRLEDMEQALSPSVFKAIMEKLEMSKFQPTLLTLPRIKVTTSQDMLSIMEKLEFFDFSYDLNLCGLTEDPDLQVSAMQHQTVLGTDRDWGGKAAASLRHLCGPATLLVF

SEQ ID NO: 817299 - protein, 164 aa, Homo sapiens
MEPFHFKNSVIKVPMMNSKKYPVAHFIDQTLKAKVGQLQLSHNLSLVILVPQNLKHRLEDMEQALSPSVFKAIMEKLEMSKFQPTLLTLPRIKVTTSQDMLSIMEKLEFFDFSYDLNLCGLTEDPDLQVSAMQHQTVLGTDRDWGGKAAASLRHLCGPATLLVF

SEQ ID NO: 817300 - protein, 262 aa, Homo sapiens
MTIYTGTRTLRTYHRPGDLAIRDTFVNASRTLYSSSPRVLSNNSDANLELINTWVAKNTNNKISRLLDSLPSDTRLVLLNAIYLSAKWKTTFDPKKTRMEPFHFKNSVIKVPMMNSKKYPVAHFIDQTLKAKVGQLQLSHNLSLVILVPQNLKHRLEDMEQALSPSVFKAIMEKLEMSKFQPTLLTLPRIKVTTSQDMLSIMEKLEFFDFSYDLNLCGLTEDPDLQVSAMQHQTVLGTDRDWGGKAAASLRHLCGPATLLVF

SEQ ID NO: 817301 - protein, 516 aa, Homo sapiens
MGAGPGRGGGPWAPRVGAGSEAGWLRRSADVAAQMASRLTLLTLLLLLLAGDRASSNPNATSSSSQDPESLQDRGEGKVATTVISKMLFVEPILEVSSLPTTNSTTNSATKITANTTDEPTTQPTTEPTTQPTIQPTQPTTQLPTDSPTQPTTGSFCPGPVTLCSDLESHSTEAVLGDALVDFSLKLYHAFSAMKKVETNMAFSPFSIASLLTQVLLGAGENTKTNLESILSYPKDFTCVHQALKGFTTKGVTSVSQIFHSPDLAIRDTFVNASRTLYSSSPRVLSNNSDANLELINTWVAKNTNNKISRLLDSLPSDTRLVLLNAIYLSEQPSHLFPLAKWKTTFDPKKTRMEPFHFKNSVIKVPMMNSKKYPVAHFIDQTLKAKVGQLQLSHNLSLVILVPQNLKHRLEDMEQALSPSVFKAIMEKLEMSKFQPTLLTLPRIKVTTSQDMLSIMEKLEFFDFSYDLNLCGLTEDPDLQVSAMQHQTVLGTDRDWGGKAAASLRHLCGPATLLVF

SEQ ID NO: 817302 - protein, 343 aa, Homo sapiens
MASRLTLLTLLLLLLAGDRASSNPNATSSSSQDPESLQDRGEGKVATTVISKMLFVEPILEVSSLPTTNSTTNSATKITANTTDEPTTQPTTEPTTQPTIQPTQPTTQLPTDSPTQPTTGSFCPGPVTLCSDLESHSTEAVLGDALVDFSLKLYHAFSAMKKVETNMAFSPFSIASLLTQVLLGAGENTKTNLESILSYPKDFTCVHQALKGFTTKGVTSVSQIFHSPDLAIRDTFVNASRTLYSSSPRVLSNNSDANLELINTWVAKNTNNKISRLLDSLPSDTRLVLLNAIYLSAKWKTTFDPKKTRMEPFHFKNSVSGAAAALPQSEFGDPGTPEPETSS

SEQ ID NO: 817303 - protein, 164 aa, Homo sapiens; identical to SEQ ID NO: 817299

SEQ ID NO: 817304 - protein, 156 aa, Homo sapiens
MSLKVPMMNSKKYPVAHFIDQTLKAKVGQLQLSHNLSLVILVPQNLKHRLEDMEQALSPSVFKAIMEKLEMSKFQPTLLTLPRIKVTTSQDMLSIMEKLEFFDFSYDLNLCGLTEDPDLQVSAMQHQTVLGTDRDWGGKAAASLRHLCGPATLLVF

SEQ ID NO: 817305 - protein, 152 aa, Homo sapiens
YFRLETGFSSFFMHLYYIEWQNVGQLQLSHNLSLVILVPQNLKHRLEDMEQALSPSVFKAIMEKLEMSKFQPTLLTLPRIKVTTSQDMLSIMEKLEFFDFSYDLNLCGLTEDPDLQVSAMQHQTVLGTDRDWGGKAAASLRHLCGPATLLVF

SEQ ID NO: 817306 - protein, 152 aa, Homo sapiens
KLRGELLTQAELQGELRGELLTVGQLQLSHNLSLVILVPQNLKHRLEDMEQALSPSVFKAIMEKLEMSKFQPTLLTLPRIKVTTSQDMLSIMEKLEFFDFSYDLNLCGLTEDPDLQVSAMQHQTVLGTDRDWGGKAAASLRHLCGPATLLVF

SEQ ID NO: 817307 - protein, 473 aa, Homo sapiens; identical to SEQ ID NO: 817293

SEQ ID NO: 817308 - protein, 476 aa, Homo sapiens
MASRLTLLTLLLLLLAGDRASSNPNATSSSSQDPESLQDRGEGKVATTVISKMLFVEPILEVSSLPTTNSTTNSATKITANTTDEPTTQPTTEPTTQPTIQPTQPTTQLPTDSPTQPTTGSFCPGPVTLCSDLESHSTEAVLGDALVDFSLKLYHAFSAMKKVETNMAFSPFSIASLLTQVLLGAGENTKTNLESILSYPKDFTCVHQALKGFTTKGVTSVSQIFHSPDLAIRDTFVNASRTLYSSSPRVLSNNSDANLELINTWVAKNTNNKISRLLDSLPSDTRLVLLNAIYLSAKWKTTFDPKKTRMEPFHFKNSVIKVPMMNSKKYPVAHFIDQTLKAKVGQLQLSHNLSLVILVPQNLKHRLEDMEQALSPSVFKAIMEKLEMSKFQPTLLTLPRIKVTTSQDMLKFCEPCCCLPGLGPCHLLPQVSAIHQKGSLRVWARDLLLLALLSMALPCSPNHFLQLSLVQVHQTL

SEQ ID NO: 817309 - protein, 435 aa, Homo sapiens
  misc_feature (417)..(417): Xaa can be any naturally occurring amino acid
MASRLTLLTLLLLLLAGDRASSNPNATSSSSQDPESLQDRGEGKVATTVISKMLFVEPILEVSSLPTTNSTTNSATKITANTTDEPTTQPTTEPTTQPTIQPTQPTTQLPTDSPTQPTTGSFCPGPVTLCSDLESHSTEAVLGDALVDFSLKLYHAFSAMKKVETNMAFSPFSIASLLTQVLLGAGENTKTNLESILSYPKDFTCVHQALKGFTTKGVTSVSQIFHSPDLAIRDTFVNASRTLYSSSPRVLSNNSDANLELINTWVAKNTNNKISRLLDSLPSDTRLVLLNAIYLSAKWKTTFDPKKTRMEPFHFKNSVIKVPMMNSKKYPVAHFIDQTLKAKVGQLQLSHNLSLVILVPQNLKHRLEDMEQALSPSVFKAIMEKLEMSKFQPTLLTLPRIKVTTSQDMLSIMEKLXILRFFLSVQHPGSVQHPG

SEQ ID NO: 817310 - protein, 382 aa, Homo sapiens
MASRLTLLTLLLLLLAGDRASSNPNATSSSSQDPESLQDRGEGKVATTVISKMLFVEPILEVSSLPTTNSTTNSATKITANTTDEPTTQPTTEPTTQPTIQPTQPTTQLPTDSPTQPTTGSFCPGPVTLCSDLESHSTEAVLGDALVDFSLKLYHAFSAMKKVETNMAFSPFSIASLLTQVLLGAGENTKTNLESILSYPKDFTCVHQALKGFTTKGVTSVSQIFHSPDLAIRDTFVNASRTLYSSSPRVLSNNSDANLELINTWVAKNTNNKISRLLDSLPSDTRLVLLNAIYLSAKWKTTFDPKKTRMEPFHFKNSVIKVPMMNSKKYPVAHFIDQTLKAKVGQLQLSHNLSLVILVPQNLKHRALGPAAQVPCLHGASI

SEQ ID NO: 817311 - protein, 386 aa, Homo sapiens
MASRLTLLTLLLLLLAGDRASSNPNATSSSSQDPESLQDRGEGKVATTVISKMLFVEPILEVSSLPTTNSTTNSATKITANTTDEPTTQPTTEPTTQPTIQPTQPTTQLPTDSPTQPTTGSFCPGPVTLCSDLESHSTEAVLGDALVDFSLKLYHAFSAMKKVETNMAFSPFSIASLLTQVLLGAGENTKTNLESILSYPKDFTCVHQALKGFTTKGVTSVSQIFHSPDLAIRDTFVNASRTLYSSSPRVLSNNSDANLELINTWVAKNTNNKISRLLDSLPSDTRLVLLNAIYLSAKWKTTFDPKKTRMEPFHFKNSVIKVPMMNSKKYPVAHFIDQTLKAKFVGQKLDTTGNWKRVSYIGKASTWHVVLQIKLQADHAFVYLSK

SEQ ID NO: 817312 - protein, 373 aa, Homo sapiens
MASRLTLLTLLLLLLAGDRASSNPNATSSSSQDPESLQDRGEGKVATTVISKMLFVEPILEVSSLPTTNSTTNSATKITANTTDEPTTQPTTEPTTQPTIQPTQPTTQLPTDSPTQPTTGSFCPGPVTLCSDLESHSTEAVLGDALVDFSLKLYHAFSAMKKVETNMAFSPFSIASLLTQVLLGAGENTKTNLESILSYPKDFTCVHQALKGFTTKGVTSVSQIFHSPDLAIRDTFVNASRTLYSSSPRVLSNNSDANLELINTWVAKNTNNKISRLLDSLPSDTRLVLLNAIYLSAKWKTTFDPKKTRMEPFHFKNSVIKVPMMNSKKCAWVQKCAWVQKCAWVQKCAWVQKCAWVQKCAWVQKCAWVQKRL

SEQ ID NO: 817313 - protein, 259 aa, Homo sapiens
MASRLTLLTLLLLLLAGDRASSNPNATSSSSQDPESLQDRGEGKVATTVISKMLFVEPILEVSSLPTTNSTTNSATKITANTTDEPTTQPTTEPTTQPTIQPTQPTTQLPTDSPTQPTTGSFCPGPVTLCSDLESHSTEAVLGDALVDFSLKLYHAFSAMKKVETNMAFSPFSIASLLTQVLLGAGENTKTNLESILSYPKSSWGEYMTPGPETCRIRLGRALPLQPQLSSFASPAAACLDLAPATSCLRCPLSTKRAP

SEQ ID NO: 817314 - protein, 230 aa, Homo sapiens
MASRLTLLTLLLLLLAGDRASSNPNATSSSSQDPESLQDRGEGKVATTVISKMLFVEPILEVSSLPTTNSTTNSATKITANTTDEPTTQPTTEPTTQPTIQPTQPTTQLPTDSPTQPTTGSFCPGPVTLCSDLESHSTEAVLGDALVDFSLKLYHAFSAMKKVETNMAFSPFSIASLLTQVLLGAGENTKTNLESILSYPKDFTCVHQALKGFTTKGVTSVSQIFHSPVD

SEQ ID NO: 817315 - protein, 348 aa, Homo sapiens
MAVAQQLRAESDFEQLPDDVAISANIADIEEKRGFTSHFVFVIEVKTKGGSKYLIYRRYRQFHALQSKLEERFGPDSKSSALACTLPTLPAKVYVGVKQEIAEMRIPALNAYMKSLLSLPVWVLMDEDVRIFFYQSPYDSEQVPQALRRLRPRTRKVKSVSPQGNSVDRMAAPRAEALFDFTGNSKLELNFKAGDVIFLLSRINKDWLEGTVRGATGIFPLSFVKILKDFPEEDDPTNWLRCYYYEDTISTIKSVAWEGGACPAFLPSLRPPPLTSPSHGSLSHSKAPSGSQMSHNAVTSHQRPGWPGQPHSPFPHPTPHFQPDASLLQPVTPLGTSRWRKISAALPY

SEQ ID NO: 817316 - protein, 339 aa, Homo sapiens
MAVAQQLRAESDFEQLPDDVAISANIADIEEKRGFTSHFVFVIEVKTKGGSKYLIYRRYRQFHALQSKLEERFGPDSKSSALACTLPTLPAKVYVGVKQEIAEMRIPALNAYMKSLLSLPVWVLMDEDVRIFFYQSPYDSEQVPQALRRLRPRTRKVKSVSPQGNSVDRMAAPRAEALFDFTGNSKLELNFKAGDVIFLLSRINKDWLEGTVRGATGIFPLSFVKILKDFPEEDDPTNWLRCYYYEDTISTIKDIAVEEDLSSTPLLKDLLELTRREFQREDIALNYRDAEGDLVRLLSDEDVALMVRQARGLPSQKRLFPWKLHITQKDNYRVYNTMP

SEQ ID NO: 817317 - protein, 382 aa, Homo sapiens
GRVSPSQSQAEFTSHFLQPPCVSSQPGTGWARLSTCSLGPSPTMAVAQQLRAESDFEQLPDDVAISANIADIEEKRGFTSHFVFVIEVKTKGGSKYLIYRRYRQFHALQSKLEERFGPDSKSSALACTLPTLPAKVYVGVKQEIAEMRIPALNAYMKSLLSLPVWVLMDEDVRIFFYQSPYDSEQVPQALRRLRPRTRKVKSVSPQGNSVDRMAAPRAEALFDFTGNSKLELNFKAGDVIFLLSRINKDWLEGTVRGATGIFPLSFVKILKDFPEEDDPTNWLRCYYYEDTISTIKDIAVEEDLSSTPLLKDLLELTRREFQREDIALNYRDAEGDLVRLLSDEDVALMVRQARGLPSQKRLFPWKLHITQKDNYRVYNTMP

SEQ ID NO: 817318 - protein, 212 aa, Homo sapiens
WSQGDLGSIPSSSTKKWGGLREVAYSPQASVSTSVKWETKALFDFTGNSKLELNFKAGDVIFLLSRINKDWLEGTVRGATGIFPLSFVKILKDFPEEDDPTNWLRCYYYEDTISTIKSVAWEGGACPAFLPSLRPPPLTSPSHGSLSHSKAPSGSQMSHNAVTSHQRPGWPGQPHSPFPHPTPHFQPDASLLQPVTPLGTSRWRKISAALPY

SEQ ID NO: 817319 - protein, 72 aa, Homo sapiens
MASLLFLLQGTVRGATGIFPLSFVKILKDFPEEDDPTNWLRCYYYEDTISTIKSVAWEGGACPAFLPSLRPP

SEQ ID NO: 817320 - protein, 624 aa, Homo sapiens
EGVLARPGAAGGGPGLPSVPPPGLGAWLADVALAALRAGGQGRRDRGGGGPESLSGGSGVGDSGGGCAPGPSAPPARRRVPLAMGHSPPVLPLCASVSLLGGLTFGYELAVISGALLPLQLDFGLSCLEQEFLVGSLLLGALLASLVGGFLIDCYGRKQAILGSNLVLLAGSLTLGLAGSLAWLVLGRAVVGFAISLSSMACCIYVSELVGPRQRGVLVSLYEAGITVGILLSYALNYALAGTPWGWRHMFGWATAPAVLQSLSLLFLPAGTDETATHKDLIPLQGGEAPKLGPGRPRYSFLDLFRARDNMRGRTTVGLGLVLFQQLTGQPNVLCYASTIFSSVGFHGGSSAVLASVGLGAVKVAATLTAMGLVDRAGRRALLLAGCALMALSVSGIGLVSFAVPMDSGPSCLAVPNATGQTGLPGDSGLLQDSSLPPIPRTNEDQREPILSTAKKTKPHPRSGDPSAPPRLALSSALPGPPLPARGHALLRWTALLCLMVFVSAFSFGFGPVTWLVLSEIYPVEIRGRAFAFCNSFNWAANLFISLSFLDLIGTIGLSWTFLLYGLTAVLGLGFIYLFVPETKGQSLAEIDQQFQKRRFTLSFGHRQNSTGIPYSRIEISAAS

SEQ ID NO: 817321 - protein, 624 aa, Homo sapiens; identical to SEQ ID NO: 817320

SEQ ID NO: 817322 - protein, 250 aa, Homo sapiens
EGVLARPGAAGGGPGLPSVPPPGLGAWLADVALAALRAGGQGRRDRGGGGPESLSGGSGVGDSGGGCAPGPSAPPARRRVPLAMGKSRSGAACWKPDPFPGCRHRPHAPLRVRAPWLPQGRPGRIPPLGWPARDCRPAAGAGTGLGRASFHLPFCPGKVAPHLLQRPLGPRHSPGRPDPTAPGKCSCSWSADEEMEAPKEAKQFIDSLSAVVPQALLWAWGRCRERNCEQNRRTPSSGRDSAERGQRRRF

SEQ ID NO: 817323 - protein, 554 aa, Homo sapiens
LTIGLTHYRARAAARHSPPVLPLCASVSLLGGLTFGYELAVISGALLPLQLDFGLSCLEQEFLVGSLLLGALLASLVGGFLIDCYGRKQAILGSNLVLLAGSLTLGLAGSLAWLVLGRAVVGFAISLSSMACCIYVSELVGPRQRGVLVSLYEAGITVGILLSYALNYALAGTPWGWRHMFGWATAPAVLQSLSLLFLPAGTDETATHKDLIPLQGGEAPKLGPGRPRYSFLDLFRARDNMRGRTTVGLGLVLFQQLTGQPNVLCYASTIFSSVGFHGGSSAVLASVGLGAVKVAATLTAMGLVDRAGRRALLLAGCALMALSVSGIGLVSFAVPMDSGPSCLAVPNATGQTGLPGDSGLLQDSSLPPIPRTNEDQREPILSTAKKTKPHPRSGDPSAPPRLALSSALPGPPLPARGHALLRWTALLCLMVFVSAFSFGFGPVTWLVLSEIYPVEIRGRAFAFCNSFNWAANLFISLSFLDLIGTIGLSWTFLLYGLTAVLGLGFIYLFVPETKGQSLAEIDQQFQKRRFTLSFGHRQNSTGIPYSRIEISAAS

SEQ ID NO: 817324 - protein, 624 aa, Homo sapiens; identical to SEQ ID NO: 817320

SEQ ID NO: 817325 - protein, 356 aa, Homo sapiens
MPEGEDFGPGKSWEVINSKPDERPRLSHCIAESWMNFSIFLQEMSLFKQQSPGKFCLLVCSVCTFFTILGSYIPGVILSYLLLLCAFLCPLFKCNDIGQKIYSKIKSVLLKLDFGIGEYINQKKRERSEADKEKSHKDDSELDFSALCPKISLTVAAKELSVSDTDVSEVSWTDNGTFNLSEGYTPQTDTSDDLDRPSEEVFSRDLSDFPSLENGMGTNDEDELSLGLPTELKRKKEQLDSGHRPSKETQSAAGLTLPLNSDQTFHLMSNLAGDVITAAVTAAIKDQLEGVQQALSQAAPIPEEDTDTEEGDDFELLDQSELDQIESELGLTQDQEAEAQQNKKSSGFLSNLLGGH

SEQ ID NO: 817326 - protein, 107 aa, Homo sapiens [sequence omitted]

SEQ ID NO: 817327 - protein, 497 aa, Homo sapiens
MASPAPPEHAEEGCPAPAAEEQAPPSPPPPQASPAERQQQEEEAQEAGAAEGAGLQVEEAAGRAAAAVTWLLGEPVLWLGCRADELLSWKRPLRSLLGFVAANLLFWFLALTPWRVYHLISVMILGRVIMQIIKDMVLSRTRGAQLWRSLSESWEVINSKPDERPRLSHCIAESWMNFSIFLQEMSLFKQQSPGKFCLLVCSVCTFFTILGSYIPGVILSYLLLLCAFLCPLFKCNDIGQKIYSKIKSVLLKLDFGIGEYINQKKRERSEADKEKSHKDDSELDFSALCPKISLTVAAKELSVSDTDVSEVSWTDNGTFNLSEGYTPQTDTSDDLDRPSEEVFSRDLSDFPSLENGMGTNDEDELSLGLPTELKRKKEQLDSGHRPSKETQSAAGLTLPLNSDQTFHLMSNLAGDVITAAVTAAIKDQLEGVQQALSQAAPIPEEDTDTEEGDDFELLDQSELDQIESELGLTQDQEAEAQQNKKSSGFLSNLLGGH

SEQ ID NO: 817328 - protein, 497 aa, Homo sapiens; identical to SEQ ID NO: 817327

SEQ ID NO: 817329 - protein, 497 aa, Homo sapiens; identical to SEQ ID NO: 817327

SEQ ID NO: 817330 - protein, 497 aa, Homo sapiens; identical to SEQ ID NO: 817327

SEQ ID NO: 817331 - protein, 497 aa, Homo sapiens; identical to SEQ ID NO: 817327

SEQ ID NO: 817332 - protein, 497 aa, Homo sapiens; identical to SEQ ID NO: 817327

SEQ ID NO: 817333 - protein, 497 aa, Homo sapiens; identical to SEQ ID NO: 817327

SEQ ID NO: 817334 - protein, 107 aa, Homo sapiens [sequence omitted]

SEQ ID NO: 817335 - protein, 140 aa, Homo sapiens
MPGTAAEDPVNCPTCCGKLPCVGSWYWGGGRGQMALKLLLLLFREKVAVASEGTAVAVNASCRRSKERRLGEIQHMSQACLLSLLPVPRDVLETEDEEPPPRRWCNTCQLYYMGDLIQHRRTQDHKVGGPARCRGTRTAV

SEQ ID NO: 817336 - protein, 133 aa, Homo sapiens
SRCGGRGTEATMFSQQQQQQLQQQQQQLQQLQQQQLQQQQLQQQQLLQLQQLLQQSPPQAPLPMAVSRGLPPQQPQQPLLNLQGTNSASLLNGSMLQRALLLQQLQDLDQFAMPPGSVSTYFLREIAIENVIE

SEQ ID NO: 817337 - protein, 908 aa, Homo sapiens
HDSSGQAKGRATLTGAPHPGAVAKQGAGCSEKDKKWFLLPSSLPHPAARASPLAALRTDGGGSRRATMFSQQQQQQLQQQQQQLQQLQQQQLQQQQLQQQQLLQLQQLLQQSPPQAPLPMAVSRGLPPQQPQQPLLNLQGTNSASLLNGSMLQRALLLQQLQGLDQFAMPPATYDTAGLTMPTATLGNLRGYGMASPGLAAPSLTPPQLATPNLQQFFPQATRQSLLGPPPVGVPMNPSQFNLSGRNPQKQARTSSSTTPNRKDSSSQTMPVEDKSDPPEGSEEAAEPRMDTPEDQDLPPCPEDIAKEKRTPAPEPEPCEASELPAKRLRSSEEPTEKEPPGQLQVKAQPQARMTVPKQTQTPDLLPEALEAQVLPRFQPRVLQVQAQVQSQTQPRIPSTDTQVQPKLQKQAQTQTSPEHLVLQQKQVQPQLQQEAEPQKQVQPVHTQAQPSVQPQEHPPAQVSVQPPEQTHEQPHTQPQVSLLAPEQTPVVVHVCGLEMPPDAVEAGGGMEKTLPEPVGTQVSMEEIQNESACGLDVGECENRAREMPGVWGAGGSLKVTILQSSDSRAFSTVPLTPVPRPSDSVSSTPAATSTPSKQALQFFCYICKASCSSQQEFQDHMSEPQHQQRLGEIQHMSQACLLSLLPVPRDVLETEDEEPPPRRWCNTCQLYYMGDLIQHRRTQDHKIAKQSLRPFCTVCNRYFKTPRKFVEHVKSQGHKDKAKELKSLEKEIAGQDEDHFITVDAVGCFEGDEEEEEDDEDEEEIEVEEELCKQVRSRDISREEWKGSETYSPNTAYGVDFLVPVMGYICRICHKFYHSNSGAQLSHCKSLGHFENLQKYKAAKNPSPTTRPVSRRCAINARNALTALFTSSGRPPSQPNTQDKTPSKVTARPSQPPLPRRSTRLKT

SEQ ID NO: 817338 - protein, 898 aa, Homo sapiens
MFSQQQQQQLQQQQQQLQQLQQQQLQQQQLQQQQLLQLQQLLQQSPPQAPLPMAVSRGLPPQQPQQPLLNLQGTNSASLLNGSMLQRALLLQQLQGLDQFAMPPATYDTAGLTMPTATLGNLRGYGMASPGLAAPSLTPPQLATPNLQQFFPQATRQSLLGPPPVGVPMNPSQFNLSGRNPQKQARTSSSTTPNRKDSSSQTMPVEDKSDPPEGSEEAAEPRMDTPEDQDLPPCPEDIAKEKRTPAPEPEPCEASELPAKRLRSSEEPTEKEPPGQLQVKAQPQARMTVPKQTQTPDLLPEALEAQVLPRFQPRVLQVQAQVQSQTQPRIPSTDTQVQPKLQKQAQTQTSPEHLVLQQKQVQPQLQQEAEPQKQVQPQVQPQAHSQGPRQVQLQQEAEPLKQVQPQVQPQAHSQPPRQVQLQLQKQVQTQTYPQVHTQAQPSVQPQEHPPAQVSVQPPEQTHEQPHTQPQVSLLAPEQTPVVVHVCGLEMPPDAVEAGGGMEKTLPEPVGTQVSMEEIQNESACGLDVGECENRAREMPGVWGAGGSLKVTILQSSDSRAFSTVPLTPVPRPSDSVSSTPAATSTPSKQALQFFCYICKASCSSQQEFQDHMSEPQHQQRLGEIQHMSQACLLSLLPVPRDVLETEDEEPPPRRWCNTCQLYYMGDLIQHRRTQDHKIAKQSLRPFCTVCNRYFKTPRKFVEHVKSQGHKDKAKELKSLEKEIAGQDEDHFITVDAVGCFEGDEEEEEDDEDEEEIEVEEELCKQVRSRDISREEWKGSETYSPNTAYGVDFLVPVMGYICRICHKFYHSNSGAQLSHCKSLGHFENLQKYKAAKNPSPTTRPVSRRCAINARNALTALFTSSGRPPSQPNTQDKTPSKVTARPSQPPLPRRSTRLKT

SEQ ID NO: 817339 - protein, 898 aa, Homo sapiens; identical to SEQ ID NO: 817338

SEQ ID NO: 817340 - protein, 898 aa, Homo sapiens; identical to SEQ ID NO: 817338

SEQ ID NO: 817341 - protein, 874 aa, Homo sapiens
MFSQQQQQQLQQQQQQLQQLQQQQLQQQQLQQQQLLQLQQLLQQSPPQAPLPMAVSRGLPPQQPQQPLLNLQGTNSASLLNGSMLQRALLLQQLQGNLRGYGMASPGLAAPSLTPPQLATPNLQQFFPQATRQSLLGPPPVGVPMNPSQFNLSGRNPQKQARTSSSTTPNRKDSSSQTMPVEDKSDPPEGSEEAAEPRMDTPEDQDLPPCPEDIAKEKRTPAPEPEPCEASELPAKRLRSSEEPTEKEPPGQLQVKAQPQARMTVPKQTQTPDLLPEALEAQVLPRFQPRVLQVQAQVQSQTQPRIPSTDTQVQPKLQKQAQTQTSPEHLVLQQKQVQPQLQQEAEPQKQVQPQVQPQAHSQGPRQVQLQQEAEPLKQVQPQVQPQAHSQPPRQVQLQLQKQVQTQTYPQVHTQAQPSVQPQEHPPAQVSVQPPEQTHEQPHTQPQVSLLAPEQTPVVVHVCGLEMPPDAVEAGGGMEKTLPEPVGTQVSMEEIQNESACGLDVGECENRAREMPGVWGAGGSLKVTILQSSDSRAFSTVPLTPVPRPSDSVSSTPAATSTPSKQALQFFCYICKASCSSQQEFQDHMSEPQHQQRLGEIQHMSQACLLSLLPVPRDVLETEDEEPPPRRWCNTCQLYYMGDLIQHRRTQDHKIAKQSLRPFCTVCNRYFKTPRKFVEHVKSQGHKDKAKELKSLEKEIAGQDEDHFITVDAVGCFEGDEEEEEDDEDEEEIEVEEELCKQVRSRDISREEWKGSETYSPNTAYGVDFLVPVMGYICRICHKFYHSNSGAQLSHCKSLGHFENLQKYKAAKNPSPTTRPVSRRCAINARNALTALFTSSGRPPSQPNTQDKTPSKVTARPSQPPLPRRSTRLKT

SEQ ID NO: 817342 - protein, 905 aa, Homo sapiens
MFSQQQQQQLQQQQQQLQQLQQQQLQQQQLQQQQLLQLQQLLQQSPPQAPLPMAVSRGLPPQQPQQPLLNLQGTNSASLLNGSMLQRALLLQQLQGLDQFAMPPATYDTAGLTMPTATLGNLRGYGMASPGLAAPSLTPPQLATPNLQQFFPQATRQSLLGPPPVGVPMNPSQFNLSGRNPQKQARTSSSTTPNRKDSSSQTMPVEDKSDPPEGSEEAAEPRMDTPEDQDLPPCPEDIAKEKRTPAPEPEPCEASELPAKRLRSSEEPTEKEPPGQLQVKAQPQARMTVPKQTQTPDLLPEALEAQVLPRFQPRVLQVQAQVQSQTQPRIPSTDTQVQPKLQKQAQTQTSPEHLVLQQKQVQPQLQQEAEPQKQVQPQVQPQAHSQGPRQVQLQQEAEPLKQVQPQVQPQAHSQPPRQVQLQLQKQVQTQTYPQVHTQAQPSVQPQEHPPAQVSVQPPEQTHEQPHTQPQVSLLAPEQTPVVVHVCGLEMPPDAVEAGGGMEKTLPEPVGTQVSMEEIQNESACGLDVGECENRAREMPGVWGAGGSLKVTILQSSDSRAFSTVPLTPVPRPSDSVSSTPAATSTPSKQALQFFCYICKASCSSQQEFQDHMSEPQHQQRLGEIQHMSQACLLSLLPVPRDVLETEDEEPPPRRWCNTCQLYYMGDLIQHRRTQDHKIAKQSLRPFCTVCNRYFKTPRKFVEHVKSQGHKDKAKELKSLEKEIAGQDEDHFITVDAVGCFEGDEEEEEDDEDEEEIEVEEELCKQVRSRDISREEWKGSETYSPNTAYGVDFLVPVMGYICRICHKFYHSNSGAQLSHCKSLGHFENLQKYKAAKNPSPTTRPVSRRCAINARNALTALFTSSGRPPSQPNTQDKTPTPTTSALNPPQNLIEGPPCPWPAWVQIC

SEQ ID NO: 817343 - protein, 865 aa, Homo sapiens
MFSQQQQQQLQQQQQAPLPMAVSRGLPPQQPQQPLLNLQGTNSASLLNGSMLQRALLLQQLQGLDQFAMPPATYDTAGLTMPTATLGNLRGYGMASPGLAAPSLTPPQLATPNLQQFFPQATRQSLLGPPPVGVPMNPSQFNLSGRNPQKQARTSSSTTPNRKDSSSQTMPVEDKSDPPEGSEEAAEPRMDTPEDQDLPPCPEDIAKEKRTPAPEPEPCEASELPAKRLRSSEEPTEKEPPGQLQVKAQPQARMTVPKQTQTPDLLPEALEAQVLPRFQPRVLQVQAQVQSQTQPRIPSTDTQVQPKLQKQAQTQTSPEHLVLQQKQVQPQLQQEAEPQKQVQPQVQPQAHSQGPRQVQLQQEAEPLKQVQPQVQPQAHSQPPRQVQLQLQKQVQTQTYPQVHTQAQPSVQPQEHPPAQVSVQPPEQTHEQPHTQPQVSLLAPEQTPVVVHVCGLEMPPDAVEAGGGMEKTLPEPVGTQVSMEEIQNESACGLDVGECENRAREMPGVWGAGGSLKVTILQSSDSRAFSTVPLTPVPRPSDSVSSTPAATSTPSKQALQFFCYICKASCSSQQEFQDHMSEPQHQQRLGEIQHMSQACLLSLLPVPRDVLETEDEEPPPRRWCNTCQLYYMGDLIQHRRTQDHKIAKQSLRPFCTVCNRYFKTPRKFVEHVKSQGHKDKAKELKSLEKEIAGQDEDHFITVDAVGCFEGDEEEEEDDEDEEEIEVEEELCKQVRSRDISREEWKGSETYSPNTAYGVDFLVPVMGYICRICHKFYHSNSGAQLSHCKSLGHFENLQKYKAAKNPSPTTRPVSRRCAINARNALTALFTSSGRPPSQPNTQDKTPSKVTARPSQPPLPRRSTRLKT

SEQ ID NO: 817344 - protein, 841 aa, Homo sapiens
MFSQQQQQQLQQQQQQLQQLQQQQLQQQQLQQQQLLQLQQLLQQSPPQAPLPMAVSRGLPPQQPQQPLLNLQGTNSASLLNGSMLQRALLLQQLQGLDQFAMPPATYDTAGLTMPTATLGNLRGYGMASPGLAAPSLTPPQLATPNLQQFFPQATRQSLLGPPPVGVPMNPSQFNLSGRNPQKQARTSSSTTPNRKDSSSQTMPVEDKSDPPEGSEEAAEPRMDTPEDQDLPPCPEDIAKEKRTPAPEPEPCEASELPAKRLRSSEEPTEKEPPGQLQVKAQPQARMTVPKQTQTPDLLPEALEAQVLPRFQPRVLQVQAQVQSQTQPRIPSTDTQVQPKLQKQAQTQTSPEHLVLQQKQVQPQLQQEAEPQKQVQPVHTQAQPSVQPQEHPPAQVSVQPPEQTHEQPHTQPQVSLLAPEQTPVVVHVCGLEMPPDAVEAGGGMEKTLPEPVGTQVSMEEIQNESACGLDVGECENRAREMPGVWGAGGSLKVTILQSSDSRAFSTVPLTPVPRPSDSVSSTPAATSTPSKQALQFFCYICKASCSSQQEFQDHMSEPQHQQRLGEIQHMSQACLLSLLPVPRDVLETEDEEPPPRRWCNTCQLYYMGDLIQHRRTQDHKIAKQSLRPFCTVCNRYFKTPRKFVEHVKSQGHKDKAKELKSLEKEIAGQDEDHFITVDAVGCFEGDEEEEEDDEDEEEIEVEEELCKQVRSRDISREEWKGSETYSPNTAYGVDFLVPVMGYICRICHKFYHSNSGAQLSHCKSLGHFENLQKYKAAKNPSPTTRPVSRRCAINARNALTALFTSSGRPPSQPNTQDKTPSKVTARPSQPPLPRRSTRLKT

SEQ ID NO: 817345 - protein, 871 aa, Homo sapiens
MFSQQQQQQLQQQQQQLQQLQQQQLQQQQLQQQQLLQLQQLLQQSPPQAPLPMAVSRGLPPQQPQQPLLNLQGTNSASLLNGSMLQRALLLQQLQGLDQFAMPPATYDTAGLTMPTATLGNLRGYGMASPGLAAPSLTPPQLATPNLQQFFPQATRQSLLGPPPVGVPMNPSQFNLSGRNPQKQARTSSSTTPNRKDSSSQTMPVEDKSDPPEGSEEAAEPRMDTPEDQDLPPCPEDIAKEKRTPAPEPEPCEASELPAKRLRSSEEPTEKEPPGQLQVKAQPQARMTVPKQTQTPDLLPEALEAQVLPRFQPRVLQVQAQVQSQTQPRIPSTDTQVQPKLQKQAQTQTSPEHLVLQQKQVQPQLQQEAEPQKQVQPPQVQPQAHSQPPRQVQLQLQKQVQTQTYPQVHTQAQPSVQPQEHPPAQVSVQPPEQTHEQPHTQPQVSLLAPEQTPVVVHVCGLEMPPDAVEAGGGMEKTLPEPVGTQVSMEEIQNESACGLDVGECENRAREMPGVWGAGGSLKVTILQSSDSRAFSTVPLTPVPRPSDSVSSTPAATSTPSKQALQFFCYICKASCSSQQEFQDHMSEPQHQQRLGEIQHMSQACLLSLLPVPRDVLETEDEEPPPRRWCNTCQLYYMGDLIQHRRTQDHKIAKQSLRPFCTVCNRYFKTPRKFVEHVKSQGHKDKAKELKSLEKEIAGQDEDHFITVDAVGCFEGDEEEEEDDEDEEEIEVEEELCKQVRSRDISREEWKGSETYSPNTAYGVDFLVPVMGYICRICHKFYHSNSGAQLSHCKSLGHFENLQKYKAAKNPSPTTRPVSRRCAINARNALTALFTSSGRPPSQPNTQDKTPSKVTARPSQPPLPRRSTRLKT

SEQ ID NO: 817346 - protein, 835 aa, Homo sapiens
MFSQQQQQQLQQQQQAPLPMAVSRGLPPQQPQQPLLNLQGTNSASLLNGSMLQRALLLQQLQGLDQFAMPPATYDTAGLTMPTATLGNLRGYGMASPGLAAPSLTPPQLATPNLQQFFPQATRQSLLGPPPVGVPMNPSQFNLSGRNPQKQARTSSSTTPNRKDSSSQTMPVEDKSDPPEGSEEAAEPRMDTPEDQDLPPCPEDIAKEKRTPAPEPEPCEASELPAKRLRSSEEPTEKEPPGQLQVKAQPQARMTVPKQTQTPDLLPEALEAQVLPRFQPRVLQVQAQVQSQTQPRIPSTDTQVQPKLQKQAQTQTSPEHLVLQQKQVQPQLQQEAEPQKQVQPQVQPQAHSQGPRQVQLQQEAEPLKQVQVHTQAQPSVQPQEHPPAQVSVQPPEQTHEQPHTQPQVSLLAPEQTPVVVHVCGLEMPPDAVEAGGGMEKTLPEPVGTQVSMEEIQNESACGLDVGECENRAREMPGVWGAGGSLKVTILQSSDSRAFSTVPLTPVPRPSDSVSSTPAATSTPSKQALQFFCYICKASCSSQQEFQDHMSEPQHQQRLGEIQHMSQACLLSLLPVPRDVLETEDEEPPPRRWCNTCQLYYMGDLIQHRRTQDHKIAKQSLRPFCTVCNRYFKTPRKFVEHVKSQGHKDKAKELKSLEKEIAGQDEDHFITVDAVGCFEGDEEEEEDDEDEEEIEVEEELCKQVRSRDISREEWKGSETYSPNTAYGVDFLVPVMGYICRICHKFYHSNSGAQLSHCKSLGHFENLQKYKAAKNPSPTTRPVSRRCAINARNALTALFTSSGRPPSQPNTQDKTPSKVTARPSQPPLPRRSTRLKT

SEQ ID NO: 817347 - protein, 971 aa, Homo sapiens
MFSQQQQQQLQQQQQQLQQLQQQQLQQQQLQQQQLLQLQQLLQQSPPQAPLPMAVSRGLPPQQPQQPLLNLQGTNSASLLNGSMLQRALLLQQLQGLDQFAMPPATYDTAGLTMPTATLGNLRGYGMASPGLAAPSLTPPQLATPNLQQFFPQATRQSLLGPPPVGVPMNPSQFNLSGRNPQKQARTSSSTTPNRKDSSSQTMPVEDKSDPPEGSEEAAEPRMDTPEDQDLPPCPEDIAKEKRTPAPEPEPCEASELPAKRLRSSEEPTEKEPPGQLQVKAQPQARMTVPKQTQTPDLLPEALEAQVLPRFQPRVLQVQAQVQSQTQPRIPSTDTQVQPKLQKQAQTQTSPEHLVLQQKQVQPQLQQEAEPQKQVQPQVQPQAHSQGPRQVQLQQEAEPLKQVQPQVQPQAHSQPPRQVQLQLQKQVQTQTYPQVHTQAQPSVQPQEHPPAQVSVQPPEQTHEQPHTQPQVSLLAPEQTPVVVHVCGLEMPPDAVEAGGGKGALAPSWSGDGTALPRPFIPPLTGCCLGLRAEAWNPGPGPSMLGASRFWLRTEKAALGPGDSGKYSTSVISGMEKTLPEPVGTQVSMEEIQNESACGLDVGECENRAREMPGVWGAGGSLKVTILQSSDSRAFSTVPLTPVPRPSDSVSSTPAATSTPSKQALQFFCYICKASCSSQQEFQDHMSEPQHQQRLGEIQHMSQACLLSLLPVPRDVLETEDEEPPPRRWCNTCQLYYMGDLIQHRRTQDHKIAKQSLRPFCTVCNRYFKTPRKFVEHVKSQGHKDKAKELKSLEKEIAGQDEDHFITVDAVGCFEGDEEEEEDDEDEEEIEVEEELCKQVRSRDISREEWKGSETYSPNTAYGVDFLVPVMGYICRICHKFYHSNSGAQLSHCKSLGHFENLQKYKAAKNPSPTTRPVSRRCAINARNALTALFTSSGRPPSQPNTQDKTPSKVTARPSQPPLPRRSTRLKT

SEQ ID NO: 817348 - protein, 696 aa, Homo sapiens
MPVEDKSDPPEGSEEAAEPRMDTPEDQDLPPCPEDIAKEKRTPAPEPEPCEASELPAKRLRSSEEPTEKEPPGQLQVKAQPQARMTVPKQTQTPDLLPEALEAQVLPRFQPRVLQVQAQVQSQTQPRIPSTDTQVQPKLQKQAQTQTSPEHLVLQQKQVQPQLQQEAEPQKQVQPQVQPQAHSQGPRQVQLQQEAEPLKQVQPQVQPQAHSQPPRQVQLQLQKQVQTQTYPQVHTQAQPSVQPQEHPPAQVSVQPPEQTHEQPHTQPQVSLLAPEQTPVVVHVCGLEMPPDAVEAGGGMEKTLPEPVGTQVSMEEIQNESACGLDVGECENRAREMPGVWGAGGSLKVTILQSSDSRAFSTVPLTPVPRPSDSVSSTPAATSTPSKQALQFFCYICKASCSSQQEFQDHMSEPQHQQRLGEIQHMSQACLLSLLPVPRDVLETEDEEPPPRRWCNTCQLYYMGDLIQHRRTQDHKIAKQSLRPFCTVCNRYFKTPRKFVEHVKSQGHKDKAKELKSLEKEIAGQDEDHFITVDAVGCFEGDEEEEEDDEDEEEIEVEEELCKQVRSRDISREEWKGSETYSPNTAYGVDFLVPVMGYICRICHKFYHSNSGAQLSHCKSLGHFENLQKYKAAKNPSPTTRPVSRRCAINARNALTALFTSSGRPPSQPNTQDKTPSKVTARPSQPPLPRRSTRLKT

SEQ ID NO: 817349 - protein, 785 aa, Homo sapiens
MFSQQQQQQLQQQQQQLQQLQQQQLQQQQLQQQQLLQLQQLLQQSPPQAPLPMAVSRGLPPQQPQQPLLNLQGTNSASLLNGSMLQRALLLQQLQGLDQFAMPPATYDTAGLTMPTATLGNLRGYGMASPGLAAPSLTPPQLATPNLQQFFPQATRQSLLGPPPVGVPMNPSQFNLSGRNPQKQARTSSSTTPNRKDSSSQTMPVEDKSDPPEGSEEAAEPRMDTPEDQDLPPCPEDIAKEKRTPAPEPEPCEASELPAKRLRSSEEPTEKEPPGQLQVKAQPQARMTVPKQTQTPDLLPEALEAQVLPRFQPRVLQVQAQVHTQAQPSVQPQEHPPAQVSVQPPEQTHEQPHTQPQVSLLAPEQTPVVVHVCGLEMPPDAVEAGGGMEKTLPEPVGTQVSMEEIQNESACGLDVGECENRAREMPGVWGAGGSLKVTILQSSDSRAFSTVPLTPVPRPSDSVSSTPAATSTPSKQALQFFCYICKASCSSQQEFQDHMSEPQHQQRLGEIQHMSQACLLSLLPVPRDVLETEDEEPPPRRWCNTCQLYYMGDLIQHRRTQDHKIAKQSLRPFCTVCNRYFKTPRKFVEHVKSQGHKDKAKELKSLEKEIAGQDEDHFITVDAVGCFEGDEEEEEDDEDEEEIEVEEELCKQVRSRDISREEWKGSETYSPNTAYGVDFLVPVMGYICRICHKFYHSNSGAQLSHCKSLGHFENLQKYKAAKNPSPTTRPVSRRCAINARNALTALFTSSGRPPSQPNTQDKTPSKVTARPSQPPLPRRSTRLKT

SEQ ID NO: 817350 - protein, 680 aa, Homo sapiens
TYGWVRGLGYQDLPPCPEDIAKEKRTPAPEPEPCEASELPAKRLRSSEEPTEKEPPGQLQVKAQPQARMTVPKQTQTPDLLPEALEAQVLPRFQPRVLQVQAQVQSQTQPRIPSTDTQVQPKLQKQAQTQTSPEHLVLQQKQVQPQLQQEAEPQKQVQPQVQPQAHSQGPRQVQLQQEAEPLKQVQPQVQPQAHSQPPRQVQLQLQKQVQTQTYPQVHTQAQPSVQPQEHPPAQVSVQPPEQTHEQPHTQPQVSLLAPEQTPVVVHVCGLEMPPDAVEAGGGMEKTLPEPVGTQVSMEEIQNESACGLDVGECENRAREMPGVWGAGGSLKVTILQSSDSRAFSTVPLTPVPRPSDSVSSTPAATSTPSKQALQFFCYICKASCSSQQEFQDHMSEPQHQQRLGEIQHMSQACLLSLLPVPRDVLETEDEEPPPRRWCNTCQLYYMGDLIQHRRTQDHKIAKQSLRPFCTVCNRYFKTPRKFVEHVKSQGHKDKAKELKSLEKEIAGQDEDHFITVDAVGCFEGDEEEEEDDEDEEEIEVEEELCKQVRSRDISREEWKGSETYSPNTAYGVDFLVPVMGYICRICHKFYHSNSGAQLSHCKSLGHFENLQKYKAAKNPSPTTRPVSRRCAINARNALTALFTSSGRPPSQPNTQDKTPSKVTARPSQPPLPRRSTRLKT

SEQ ID NO: 817351 - protein, 890 aa, Homo sapiens
MFSQQQQQQLQQQQQQLQQLQQQQLQQQQLQQQQLLQLQQLLQQSPPQAPLPMAVSRGLPPQQPQQPLLNLQGTNSASLLNGSMLQRALLLQQLQGLDQFAMPPATYDTAGLTMPTATLGNLRGYGMASPGLAAPSLTPPQLATPNLQQFFPQATRQSLLGPPPVGVPMNPSQFNLSGRNPQKQARTSSSTTPNRKDSSSQTMPVEDKSDPPEGSEEAAEPRMDTPEDQDLPPCPEDIAKEKRTPAPEPEPCEASELPAKRLRSSEEPTEKEPPGQLQVKAQPQARMTVPKQTQTPDLLPEALEAQVLPRFQPRVLQVQAQVQSQTQPRIPSTDTQVQPKLQKQAQTQTSPEHLVLQQKQVQPQLQQEAEPQKQVQPQVQPQAHSQGPRQVQLQQEAEPLKQVQPQVQPQAHSQPPRQVQLQLQKQVQTQTYPQVHTQAQPSVQPQEHPPAQVSVQPPEQTHEQPHTQPQVSLLAPEQTPVVVHVCGLEMPPDAVEAGGGMEKTLPEPVGTQVSMEEIQNESACGLDVGECENRAREMPGVWGAGGSLKVTILQSSDSRAFSTVPLTPVPRPSDSVSSTPAATSTPSKQALQFFCYICKASCSSQQEFQDHMSEPQHQQRLGEIQHMSQACLLSLLPVPRDVLETEDEEPPPRRWCNTCQLYYMGDLIQHRRTQDHKIAKQSLRPFCTVCNRYFKTPRKFVEHVKSQGHKDKAKELKSLEKEIAGQDEDHFITVDAVGCFEGDEEEEEDDEDEEEIEVRSRDISREEWKGSETYSPNTAYGVDFLVPVMGYICRICHKFYHSNSGAQLSHCKSLGHFENLQKYKAAKNPSPTTRPVSRRCAINARNALTALFTSSGRPPSQPNTQDKTPSKVTARPSQPPLPRRSTRLKT

SEQ ID NO: 817352 - protein, 858 aa, Homo sapiens
MFSQQQQQQLQQQQQQLQQLQQQQLQQQQLQQQQLLQLQQLLQQSPPQAPLPMAVSRGLPPQQPQQPLLNLQGTNSASLLNGSMLQRALLLQQLQGLDQFAMPPATYDTAGLTMPTATLGNLRGYGMASPGLAAPSLTPPQLATPNLQQFFPQATRQSLLGPPPVGVPMNPSQFNLSGRNPQKQARTSSSTTPNRKDSSSQTMPVEDKSDPPEGSEEAAEPRMDTPEDQDLPPCPEDIAKEKRTPAPEPEPCEASELPAKRLRSSEEPTEKEPPGQLQVKAQPQARMTVPKQTQTPDLLPEALEAQVLPRFQPRVLQVQAQVQSQTQPRIPSTDTQVQPKLQKQAQTQTSPEHLVLQQKQVQPQLQQEAEPQKQVQPQVQPQAHSQGPRQVQLQQEAEPLKQVQPQVQPQAHSQPPRQVQLQLQKQVQTQTYPQVHTQAQPSVQPQEHPPAQVSVQPPEQTHEQPHTQPQVSLLAPEQTPVVVHVCGLEMPPDAVEAGGGMEKTLPEPVGTQVSMEEIQNESACGLDVGECENRAREMPGVWGAGGSLKVTILQSSDSRAFSTVPLTPVPRPSDSVSSTPAATSTPSKQALQFFCYICKASCSSQQEFQDHMSEPQHQQRLGEIQHMSQACLLSLLPVPRDVLETEDEEPPPRRWCNTCQLYYMGDLIQHRRTQDHKIAKQSLRPFCTVCNRYFKTPRKFVEHVKSQGHKDKAKELKSLEKEIAGQDEDHFITVDAVGCFEGDEEEEEDDEDEEEIEVEEELCKQVRSRDISREEWKGSETYSPNTAYGVDFLVPVMGYICRICHKFYHSNSGAQLSHCKSLGHFENLQKYKAAKNPSPTTRPVSRRWATGSVPRSRR

SEQ ID NO: 817353 - protein, 843 aa, Homo sapiens
  misc_feature (819)..(819): Xaa can be any naturally occurring amino acid
MFSQQQQQQLQQQQQQLQQLQQQQLQQQQLQQQQLLQLQQLLQQSPPQAPLPMAVSRGLPPQQPQQPLLNLQGTNSASLLNGSMLQRALLLQQLQGLDQFAMPPATYDTAGLTMPTATLGNLRGYGMASPGLAAPSLTPPQLATPNLQQFFPQATRQSLLGPPPVGVPMNPSQFNLSGRNPQKQARTSSSTTPNRKDSSSQTMPVEDKSDPPEGSEEAAEPRMDTPEDQDLPPCPEDIAKEKRTPAPEPEPCEASELPAKRLRSSEEPTEKEPPGQLQVKAQPQARMTVPKQTQTPDLLPEALEAQVLPRFQPRVLQVQAQVQSQTQPRIPSTDTQVQPKLQKQAQTQTSPEHLVLQQKQVQPQLQQEAEPQKQVQPQVQPQAHSQGPRQVQLQQEAEPLKQVQPQVQPQAHSQPPRQVQLQLQKQVQTQTYPQVHTQAQPSVQPQEHPPAQVSVQPPEQTHEQPHTQPQVSLLAPEQTPVVVHVCGLEMPPDAVEAGGGMEKTLPEPVGTQVSMEEIQNESACGLDVGECENRAREMPGVWGAGGSLKVTILQSSDSRAFSTVPLTPVPRPSDSVSSTPAATSTPSKQALQFFCYICKASCSSQQEFQDHMSEPQHQQRLGEIQHMSQACLLSLLPVPRDVLETEDEEPPPRRWCNTCQLYYMGDLIQHRRTQDHKIAKQSLRPFCTVCNRYFKTPRKFVEHVKSQGHKDKAKELKSLEKEIAGQDEDHFITVDAVGCFEGDEEEEEDDEDEEEIEVEEELCKQVRSRDISREEWKGSETYSPNTAYGVDFLVPVMGYICRICHKFYHSNSGAQLSHXKRIRQELIKRPESSLNRDMEPPVR

SEQ ID NO: 817354 - protein, 801 aa, Homo sapiens [sequence omitted]

SEQ ID NO: 817355 - protein, 308 aa, Homo sapiens
MFSQQQQQQLQQQQQQLQQLQQQQLQQQQLQQQQLLQLQQLLQQSPPQAPLPMAVSRGLPPQQPQQPLLNLQGTNSASLLNGSMLQRALLLQQLQGLDQFAMPPATYDTAGLTMPTATLGNLRGYGMASPGLAAPSLTPPQLATPNLQQFFPQATRQSLLGPPPVGVPMNPSQFNLSGRNPQKQARTSSSTTPNRKDSSSQTMPVEDKSDPPEGSEEAAEPRMDTPEDQDLPPCPEDIAKEKRTPAPEPEPCEASELPAKRLRSSEEPTEKEPPGQLQVKAQLPNNPCDPSAPFATATSKPLASLWST

SEQ ID NO: 817356 - protein, 740 aa, Homo sapiens
MFSQQQQQQLQQQQQQLQQLQQQQLQQQQLQQQQLLQLQQLLQQSPPQAPLPMAVSRGLPPQQPQQPLLNLQGTNSASLLNGSMLQRALLLQQLQGLDQFAMPPATYDTAGLTMPTATLGNLRGYGMASPGLAAPSLTPPQLATPNLQQFFPQATRQSLLGPPPVGVPMNPSQFNLSGRNPQKQARTSSSTTPNRKDSSSQTMPVEDKSDPPEGSEEAAEPRMDTPEDQDLPPCPEDIAKEKRTPAPEPEPCEASELPAKRLRSSEEPTEKEPPGQLQVKAQPQARMTVPKQTQTPDLLPEALEAQVLPRFQPRVLQVQAQVQSQTQPRIPSTDTQVQPKLQKQAQTQTSPEHLVLQQKQVQPQLQQEAEPQKQVQPQVQPQAHSQGPRQVQLQQEAEPLKQVQPQVQPQAHSQPPRQVQLQLQKQVQTQTYPQVHTQAQPSVQPQEHPPAQVSVQPPEQTHEQPHTQPQVSLLAPEQTPVVVHVCGLEMPPDAVEAGGGMEKTLPEPVGTQVSMEEIQNESACGLDVGECENRAREMPGVWGAGGSLKVTILQSSDSRAFSTVPLTPVPRPSDSVSSTPAATSTPSKQALQFFCYICKASCSSQQEFQDHMSEPQHQQRLGEIQHMSQACLLSLLPVPRDVLETEDEEPPPRRWCNTCQLYYMGDLIQHRRTQDHKIAKQSLRPFCTVCNRYFKTPRKFVEHVKSQGHKDKAKELKSLEKEIAGQDEDHFITVWTSWCP

SEQ ID NO: 817357 - protein, 712 aa, Homo sapiens
MFSQQQQQQLQQQQQQLQQLQQQQLQQQQLQQQQLLQLQQLLQQSPPQAPLPMAVSRGLPPQQPQQPLLNLQGTNSASLLNGSMLQRALLLQQLQGLDQFAMPPATYDTAGLTMPTATLGNLRGYGMASPGLAAPSLTPPQLATPNLQQFFPQATRQSLLGPPPVGVPMNPSQFNLSGRNPQKQARTSSSTTPNRKDSSSQTMPVEDKSDPPEGSEEAAEPRMDTPEDQDLPPCPEDIAKEKRTPAPEPEPCEASELPAKRLRSSEEPTEKEPPGQLQVKAQPQARMTVPKQTQTPDLLPEALEAQVLPRFQPRVLQVQAQVQSQTQPRIPSTDTQVQPKLQKQAQTQTSPEHLVLQQKQVQPQLQQEAEPQKQVQPQVQPQAHSQGPRQVQLQQEAEPLKQVQPQVQPQAHSQPPRQVQLQLQKQVQTQTYPQVHTQAQPSVQPQEHPPAQVSVQPPEQTHEQPHTQPQVSLLAPEQTPVVVHVCGLEMPPDAVEAGGGMEKTLPEPVGTQVSMEEIQNESACGLDVGECENRAREMPGVWGAGGSLKVTILQSSDSRAFSTVPLTPVPRPSDSVSSTPAATSTPSKQALQFFCYICKASCSSQQEFQDHMSEPQHQQRLGEIQHMSQACLLSLLPVPRDVLETEDEEPPPRRWCNTCQLYYMGDLIQHPGQNTQQGDGSTLPAPTTSALNPPQNLIEGPPCPWPAWVQIC

SEQ ID NO: 817358 - protein, 534 aa, Homo sapiens
MFSQQQQQQLQQQQQQLQQLQQQQLQQQQLQQQQLLQLQQLLQQSPPQAPLPMAVSRGLPPQQPQQPLLNLQGTNSASLLNGSMLQRALLLQQLQGLDQFAMPPATYDTAGLTMPTATLGNLRGYGMASPGLAAPSLTPPQLATPNLQQFFPQATRQSLLGPPPVGVPMNPSQFNLSGRNPQKQARTSSSTTPNRKDSSSQTMPVEDKSDPPEGSEEAAEPRMDTPEDQDLPPCPEDIAKEKRTPAPEPEPCEASELPAKRLRSSEEPTEKEPPGQLQVKAQPQARMTVPKQTQTPDLLPEALEAQVLPRFQPRVLQVQAQVQSQTQPRIPSTDTQVQPKLQKQAQTQTSPEHLVLQQKQVQPQLQQEAEPQKQVQPQVQPQAHSQGPRQVQLQQEAEPLKQVQPQVQPQAHSQPPRQVQLQLQKQVQTQTYPQVHTQAQPSVQPQEHPPAQVSVQPPEQTHEQPHTQPQVSLLGEVQRYIQRGVEGLGDLQPQYCIWCGLPGARDGLYLPHLPQVLSQQLRGTALPLQVPGPL

SEQ ID NO: 817359 - protein, 465 aa, Homo sapiens
MFSQQQQQQLQQQQQQLQQLQQQQLQQQQLQQQQLLQLQQLLQQSPPQAPLPMAVSRGLPPQQPQQPLLNLQGTNSASLLNGSMLQRALLLQQLQGLDQFAMPPATYDTAGLTMPTATLGNLRGYGMASPGLAAPSLTPPQLATPNLQQFFPQATRQSLLGPPPVGVPMNPSQFNLSGRNPQKQARTSSSTTPNRKDSSSQTMPVEDKSDPPEGSEEAAEPRMDTPEDQDLPPCPEDIAKEKRTPAPEPEPCEASELPAKRLRSSEEPTEKEPPGQLQVKAQPQARMTVPKQTQTPDLLPEALEAQVLPRFQPRVLQVQAQVQSQTQPRIPSTDTQVQPKLQKQAQTQTSPEHLVLQQKQVQPQLQQEAEPQKQVQPVHTQAQPSVQPQEHPPAQVSVQPPEQTHEQPHTQPQVSLLAPEQTPVVVHVCGLEMPPDAVEAGGGMEKTLARALWHPSQHGTDIGIL

SEQ ID NO: 817360 - protein, 425 aa, Homo sapiens
MFSQQQQQQLQQQQQQLQQLQQQQLQQQQLQQQQLLQLQQLLQQSPPQAPLPMAVSRGLPPQQPQQPLLNLQGTNSASLLNGSMLQRALLLQQLQGLDQFAMPPATYDTAGLTMPTATLGNLRGYGMASPGLAAPSLTPPQLATPNLQQFFPQATRQSLLGPPPVGVPMNPSQFNLSGRNPQKQARTSSSTTPNRKDSSSQTMPVEDKSDPPEGSEEAAEPRMDTPEDQDLPPCPEDIAKEKRTPAPEPEPCEASELPAKRLRSSEEPTEKEPPGQLQVKAQPQARMTVPKQTQTPDLLPEALEAQVLPRFQPRVLQVQAQVQSQTQPRIPSTDTQVQPKLQKQAQTQTSPEHLVLQQKQVQPQLQQEAEPQKQVQPQVQPQAHSQGPALPLSRPSSSSATSARPAAPASRSSRTTCRSLSTSSG

SEQ ID NO: 817361 - protein, 441 aa, Homo sapiens
MFSQQQQQQLQQQQQQLQQLQQQQLQQQQLQQQQLLQLQQLLQQSPPQAPLPMAVSRGLPPQQPQQPLLNLQGTNSASLLNGSMLQRALLLQQLQGLDQFAMPPATYDTAGLTMPTATLGNLRGYGMASPGLAAPSLTPPQLATPNLQQFFPQATRQSLLGPPPVGVPMNPSQFNLSGRNPQKQARTSSSTTPNRKDSSSQTMPVEDKSDPPEGSEEAAEPRMDTPEDQDLPPCPEDIAKEKRTPAPEPEPCEASELPAKRLRSSEEPTEKEPPGQLQVKAQPQARMTVPKQTQTPDLLPEALEAQVLPRFQPRVLQVQAQVQSQTQPRIPSTDTQVQPKLQKQAQTQTSPEHLVLQQKQVQPQLQQEAEPQKQVQPPQVQPQAHSQPPRQVQLQLQKQVQTQTYPQVHTQAQPSVQPQEHPPAQVSVQPPEQKVDGDPAR

SEQ ID NO: 817362 - protein, 425 aa, Homo sapiens
MFSQQQQQQLQQQQQQLQQLQQQQLQQQQLQQQQLLQLQQLLQQSPPQAPLPMAVSRGLPPQQPQQPLLNLQGTNSASLLNGSMLQRALLLQQLQGLDQFAMPPATYDTAGLTMPTATLGNLRGYGMASPGLAAPSLTPPQLATPNLQQFFPQATRQSLLGPPPVGVPMNPSQFNLSGRNPQKQARTSSSTTPNRKDSSSQTMPVEDKSDPPEGSEEAAEPRMDTPEDQDLPPCPEDIAKEKRTPAPEPEPCEASELPAKRLRSSEEPTEKEPPGQLQVKAQPQARMTVPKQVRSRDISREEWKGSETYSPNTAYGVDFLVPVMGYICRICHKFYHSNSGAQLSHCKSLGHFENLQKYKAAKNPSPTTRPVSRRCAINARNALTALFTSSGRPPSQPNTQDKTPSKVTARPSQPPLPRRSTRLKT

SEQ ID NO: 817363 - protein, 414 aa, Homo sapiens
MFSQQQQQQLQQQQQQLQQLQQQQLQQQQLQQQQLLQLQQLLQQSPPQAPLPMAVSRGLPPQQPQQPLLNLQGTNSASLLNGSMLQRALLLQQLQGNLRGYGMASPGLAAPSLTPPQLATPNLQQFFPQATRQSLLGPPPVGVPMNPSQFNLSGRNPQKQARTSSSTTPNRKDSSSQTMPVEDKSDPPEGSEEAAEPRMDTPEDQDLPPCPEDIAKEKRTPAPEPEPCEASELPAKRLRSSEEPTEKEPPGQLQVKAQPQARMTVPKQTQTPDLLPEALEAQVLPRFQPRVLQVQAQVQSQTQPRIPSTDTQVQPKLQKQAQTQTSPEHLVLQQKQVQPQLQQEAEPQKQVQPQVQPQAHSQGPRQVQLQQEAEPLKQVQPQVQPQAHSQPHLPQVLSQQLRGTALPLQVPGPL

SEQ ID NO: 817364 - protein, 359 aa, Homo sapiens
MFSQQQQQQLQQQQQQLQQLQQQQLQQQQLQQQQLLQLQQLLQQSPPQAPLPMAVSRGLPPQQPQQPLLNLQGTNSASLLNGSMLQRALLLQQLQGLDQFAMPPATYDTAGLTMPTATLGNLRGYGMASPGLAAPSLTPPQLATPNLQQFFPQATRQSLLGPPPVGVPMNPSQFNLSGRNPQKQARTSSSTTPNRKDSSSQTMPVEDKSDPPEGSEEAAEPRMDTPEDQDLPPCPEDIAKEKRTPAPEPEPCEASELPAKRLRSSEEPTEKEPPGQLQVKAQPQARMTVPKQTQTPDLLPEALEAQVLPRFQPRVLQVQAQVQSQTQPRIPSTAASPWATLRTCRNTRRPRTPAPPPDL

SEQ ID NO: 817365 - protein, 210 aa, Homo sapiens
MFSQQQQQQLQQQQQQLQQLQQQQLQQQQLQQQQLLQLQQLLQQSPPQAPLPMAVSRGLPPQQPQQPLLNLQGTNSASLLNGSMLQRALLLQQLQGLDQFAMPPATYDTAGLTMPTATLGNLRGYGMASPGLAAPSLTPPQLATPNLQQFFPQATRQSLLGPPPVGVPMNPSQFNLSGRNPQKCAWVRTHGALLGQPFEVAYGMHVGSRK

SEQ ID NO: 817366 - protein, 134 aa, Homo sapiens
MDFVMKQALGGATKDMGKMLGGEEEKDPDAQKKEEERQEALRQQEEERKAKHARMEAEREKVRQQIRDKYGLKKKEEKEAEEKAALEQPCEGSLTRPKKAIPAGCGDEEEEEEESILDTVLKYLPGPLQDMFKK

SEQ ID NO: 817367 - protein, 134 aa, Homo sapiens; identical to SEQ ID NO: 817366

SEQ ID NO: 817368 - protein, 123 aa, Homo sapiens
MTHSSPAQHADLWPLTLSGPPGQGRGTEWPGSEEGSQGKPVPGRPRLRGPGSGQAGIWVGGWGSSSSISLVTPSPGAPPSPAPTWRDMAPAKLVPSNGSFVDFSSFVEEPQVGTPLVPHPHPT

SEQ ID NO: 817369 - protein, 134 aa, Homo sapiens; identical to SEQ ID NO: 817366

SEQ ID NO: 817370 - protein, 134 aa, Homo sapiens; identical to SEQ ID NO: 817366

SEQ ID NO: 817371 - protein, 134 aa, Homo sapiens; identical to SEQ ID NO: 817366

SEQ ID NO: 817372 - protein, 134 aa, Homo sapiens; identical to SEQ ID NO: 817366

SEQ ID NO: 817373 - protein, 104 aa, Homo sapiens [sequence omitted]

SEQ ID NO: 817374 - protein, 143 aa, Homo sapiens
SSWLTLEDTQLRGELPERSKKAAVDRPGLGTSDRSGSPNMDVLPSKSRSSQKVSLTAKLCRVLLQMESGSRDTIPGVCKRERENREDTEVLQPRSPIRGTAGGQSSHPTALWLEYSGVDPPAPIALVPSWQGCPPLLSTCSIL

SEQ ID NO: 817375 - protein, 134 aa, Homo sapiens; identical to SEQ ID NO: 817366

SEQ ID NO: 817376 - protein, 155 aa, Homo sapiens
  misc_feature (18)..(18): Xaa can be any naturally occurring amino acid
MEQGKFGGRHVLRPGRPXWPQPPCAVRGLWNPGGYRSIAAQIPYQGDSWWAKQPPHSLVARVQWGGPSSPNSPSTQLAGLPTPAVHLLHPLGFHRPLTAQGGWGQPGLPGLRTCLPPKCPLLQSHSCHPTLCTGEKTGGARAGPGWERGVLVRPR

SEQ ID NO: 817377 - protein, 122 aa, Homo sapiens
SRGSSGGLIPYQGDSWWAKQPPHSLVARVQWGGPSSPNSPSTQLAGLPTPAVHLLHPLGFHRPLTAQGGWGQPGLPGLRTCLPPKCPLLQSHSCHPTLCTGEKTGGARAGPGWERGVLVRPR

SEQ ID NO: 817378 - protein, 118 aa, Homo sapiens
MDFVMKQALGGATKDMGKMLGGEEEKDPDAQKKEEERQEALRQQEEERKAKHARMEAEREKVRQQIRDKYGLKKKEEKEAEEKAALEQPCEGSLTRPGPFNASGPFNASGPFNASGPF

SEQ ID NO: 817379 - protein, 582 aa, Homo sapiens
MSIETLLEAARFLEWQAQQQQRAREEQERLRLEQEREQEQKKANSLARLAHTLPVEEPRMEAPPLPLSPPAPPPAPPPPLATPAPLTVIPIPVVTNSPQPLPPPPPLPAAAQPLPLAPRQPALVGAPGLSIKEPAPLPSRPQVPTPAPLLPDSKATIPPNGSPKPLQPLPTPVLTIAPHPGVQPQLAPQQPPPPTLGTLKLAPAEEVKSSEQKKRPGGIGTREVHNKLEKNRRAHLKECFETLKRNIPNVDDKKTSNLSVLRTALRYIQSLKRKEKEYEHEMERLAREKIATQQRLAELKHELSQWMDVLEIDRVLRQTGQPEDDQASTSTASEGEDNIDEDMEEDRAGLGPPKLSHRPQPELLKSTLPPPSTTPAPLPPHPHPHPHSVALPPAHLPVQQQQPQQKTPLPAPPPPPAAPAQTLVPAPAHLVATAGGGSTVIAHTATTHASVIQTVNHVLQGPGGKHIAHIAPSAPSPAVQLAPATPPIGHITVHPATLNHVAHLGSQLPLYPQPVAVSHIAHTLSHQQVNGTAGLGPPATVMAKPAVGAQVVHHPQLVGQTVLNPVTMVTMPSFPVSTLKLA

SEQ ID NO: 817380 - protein, 301 aa, Homo sapiens
MERLAREKIATQQRLAELKHELSQWMDVLEIDRVLRQTGQPEDDQASTSTASEGEDNIDEDMEEDRAGLGPPKLSHRPQPELLKSTLPPPSTTPAPLPPHPHPHPHSVALPPAHLPVQQQQPQQKTPLPAPPPPPAAPAQTLVPAPAHLVATAGGGSTVIAHTATTHASVIQTVNHVLQGPGGKHIAHIAPSAPSPAVQLAPATPPIGHITVHPATLNHVAHLGSQLPLYPQPVAVSHIAHTLSHQQVNGTAGLGPPATVMAKPAVGAQVVHHPQLVGQTVLNPVTMVTMPSFPVSTLKLA

SEQ ID NO: 817381 - protein, 582 aa, Homo sapiens; identical to SEQ ID NO: 817379

SEQ ID NO: 817382 - protein, 582 aa, Homo sapiens; identical to SEQ ID NO: 817379

SEQ ID NO: 817383 - protein, 97 aa, Homo sapiens
RPPPACAQRLTQPQSRQSANTVVPAPLFPWPCPPSPPLARSAFLPPTPTSRVRAIPGQETPWRRVGPNSSPAASRECRAPQPGPRPRQRLGQGLQNY

SEQ ID NO: 817384 - protein, 123 aa, Homo sapiens
RPPPACAQRLTQPQSRQSANTVVPAPLFPWPCPPSPPLARSAFLPPTPTSRVRAIPGQETPWRRVGPNSSPAASRECRAPQPGPRPRQRLGQDTEIEEERFWRSVGLWRELIRDCSLAELLSA

SEQ ID NO: 817385 - protein, 1442 aa, Homo sapiens
MSIAIPLGVTTSDTSYSDMAAGSDPESVEASPAVNEKSVYSTHNYGTTQRHGCRGLPYATIIPRSDLNGLPSPVEERCGDSPNSEGETVPTWCPCGLSQDGFLLNCDKCRGMSRGKVIRLHRRKQDNISGGDSSATESWDEELSPSTVLYTATQHTPTSITLTVRRTKPKKRKKSPEKGRAAPKTKKIKNSPSEAQNLDENTTEGWENRIRLWTDQYEEAFTNQYSADVQNALEQHLHSSKEFVGKPTILDTINKTELACNNTVIGSQMQLQLGRVTRVQKHRKILRAARDLALDTLIIEYRGKVMLRQQFEVNGHFFKKPYPFVLFYSKFNGVEMCVDARTFGNDARFIRRSCTPNAEVRHMIADGMIHLCIYAVSAITKDAEVTIAFDYEYSNCNYKVDCACHKGNRNCPIQKRNPNATELPLLPPPPSLPTIGAETRRRKARRKELEMEQQNEASEENNDQQSQEVPEKVTVSSDHEEVDNPEEKPEEEKEEVIDDQENLAHSRRTREDRKVEAIMHAFENLEKRKKRRDQPLEQSNSDVEITTTTSETPVGEETKTEAPESEVSNSVSNVTIPSTPQSVGVNTRRSSQAGDIAAEKLVPKPPPAKPSRPRPKSRISRYRTSSAQRLKRQKQANAQQAELSQAALEEGGSNSLVTPTEAGSLDSSGENRPLTGSDPTVVSITGSHVNRAASKYPKTKKYLVTEWLNDKAEKQECPVECPLRITTDPTVLATTLNMLPGLIHSPLICTTPKHYIRFGSPFIPERRRRPLLPDGTFSSCKKRWIKQALEEGMTQTSSVPQETRTQHLYQSNENSSSSSICKDNADLLSPLKKWKSRYLMEQNVTKLLRPLSPVTPPPPNSGSKSPQLATPGSSHPGEEECRNGYSLMFSPVTSLTTASRCNTPLQFELCHRKDLDLAKVGYLDSNTNSCADRPSLLNSGHSDLAPHPSLGPTSETGFPSRSGDGHQTLVRNSDQAFRTEFNLMYAYSPLNAMPRADGLYRGSPLVGDRKPLHLDGGYCSPAEGFSSRYEHGLMKDLSRGSLSPGGERACEGVPSAPQNPPQRKKVSLLEYRKRKQEAKENSAGGGGDSAQSKSKSAGAGQGSSNSVSDTGAHGVQGSSARTPSSPHKKFSPSHSSMSHLEAVSPSDSRGTSSSHCRPQENISSRWMVPTSVERLREGGSIPKVLRSSVRVAQKGEPSPTWESNITEKDSDPADGEGPETLSSALSKGATVYSPSRYSYQLLQCDSPRTESQSLLQQSSSPFRGHPTQSPGYSYRTTALRPGNPPSHGSSESSLSSTSYSSPAHPVSTDSLAPFTGTPGYFSSQPHSGNSTGSNLPRRSCPSSAASPTLQGPSDSPTSDSVSQSSTGTLSSTSFPQNSRSSLPSDLRTISLPSAGQSAVYQASRVSAVSNSQHYPHRGSGGVHQYRLQPLQGSGVKTQTGLS

SEQ ID NO: 817386 - protein, 1455 aa, Homo sapiens
MSIAIPLGVTTSDTSYSDMAAGSDPESVEASPAVNEKSVYSTHNYGTTQRHGCRGLPYATIIPRSDLNGLPSPVEERCGDSPNSEGETVPTWCPCGLSQDGFLLNCDKCRGMSRGKVIRLHRRKQDNISGGDSSATESWDEELSPSTVLYTATQHTPTSITLTVRRTKPKKRKKSPEKGRAAPKTKKIKAFREGSRKSLRMKNSPSEAQNLDENTTEGWENRIRLWTDQYEEAFTNQYSADVQNALEQHLHSSKEFVGKPTILDTINKTELACNNTVIGSQMQLQLGRVTRVQKHRKILRAARDLALDTLIIEYRGKVMLRQQFEVNGHFFKKPYPFVLFYSKFNGVEMCVDARTFGNDARFIRRSCTPNAEVRHMIADGMIHLCIYAVSAITKDAEVTIAFDYEYSNCNYKVDCACHKGNRNCPIQKRNPNATELPLLPPPPSLPTIGAETRRRKARRKELEMEQQNEASEENNDQQSQEVPEKVTVSSDHEEVDNPEEKPEEEKEEVIDDQENLAHSRRTREDRKVEAIMHAFENLEKRKKRRDQPLEQSNSDVEITTTTSETPVGEETKTEAPESEVSNSVSNVTIPSTPQSVGVNTRRSSQAGDIAAEKLVPKPPPAKPSRPRPKSRISRYRTSSAQRLKRQKQANAQQAELSQAALEEGGSNSLVTPTEAGSLDSSGENRPLTGSDPTVVSITGSHVNRAASKYPKTKKYLVTEWLNDKAEKQECPVECPLRITTDPTVLATTLNMLPGLIHSPLICTTPKHYIRFGSPFIPERRRRPLLPDGTFSSCKKRWIKQALEEGMTQTSSVPQETRTQHLYQSNENSSSSSICKDNADLLSPLKKWKSRYLMEQNVTKLLRPLSPVTPPPPNSGSKSPQLATPGSSHPGEEECRNGYSLMFSPVTSLTTASRCNTPLQFELCHRKDLDLAKVGYLDSNTNSCADRPSLLNSGHSDLAPHPSLGPTSETGFPSRSGDGHQTLVRNSDQAFRTEFNLMYAYSPLNAMPRADGLYRGSPLVGDRKPLHLDGGYCSPAEGFSSRYEHGLMKDLSRGSLSPGGERACEGVPSAPQNPPQRKKVSLLEYRKRKQEAKENSAGGGGDSAQSKSKSAGAGQGSSNSVSDTGAHGVQGSSARTPSSPHKKFSPSHSSMSHLEAVSPSDSRGTSSSHCRPQENISSRWMVPTSVERLREGGSIPKVLRSSVRVAQKGEPSPTWESNITEKDSDPADGEGPETLSSALSKGATVYSPSRYSYQLLQCDSPRTESQSLLQQSSSPFRGHPTQSPGYSYRTTALRPGNPPSHGSSESSLSSTSYSSPAHPVSTDSLAPFTGTPGYFSSQPHSGNSTGSNLPRRSCPSSAASPTLQGPSDSPTSDSVSQSSTGTLSSTSFPQNSRSSLPSDLRTISLPSAGQSAVYQASRVSAVSNSQHYPHRGSGGVHQYRLQPLQGSGVKTQTGLS

SEQ ID NO: 817387 - protein, 1461 aa, Homo sapiens
MSIAIPLGVTTSDTSYSDMAAGSDPESVEASPAVNEKSVYSTHNYGTTQRHGCRGLPYADHNYGAPPPPTPPASPPVQTIIPRSDLNGLPSPVEERCGDSPNSEGETVPTWCPCGLSQDGFLLNCDKCRGMSRGKVIRLHRRKQDNISGGDSSATESWDEELSPSTVLYTATQHTPTSITLTVRRTKPKKRKKSPEKGRAAPKTKKIKNSPSEAQNLDENTTEGWENRIRLWTDQYEEAFTNQYSADVQNALEQHLHSSKEFVGKPTILDTINKTELACNNTVIGSQMQLQLGRVTRVQKHRKILRAARDLALDTLIIEYRGKVMLRQQFEVNGHFFKKPYPFVLFYSKFNGVEMCVDARTFGNDARFIRRSCTPNAEVRHMIADGMIHLCIYAVSAITKDAEVTIAFDYEYSNCNYKVDCACHKGNRNCPIQKRNPNATELPLLPPPPSLPTIGAETRRRKARRKELEMEQQNEASEENNDQQSQEVPEKVTVSSDHEEVDNPEEKPEEEKEEVIDDQENLAHSRRTREDRKVEAIMHAFENLEKRKKRRDQPLEQSNSDVEITTTTSETPVGEETKTEAPESEVSNSVSNVTIPSTPQSVGVNTRRSSQAGDIAAEKLVPKPPPAKPSRPRPKSRISRYRTSSAQRLKRQKQANAQQAELSQAALEEGGSNSLVTPTEAGSLDSSGENRPLTGSDPTVVSITGSHVNRAASKYPKTKKYLVTEWLNDKAEKQECPVECPLRITTDPTVLATTLNMLPGLIHSPLICTTPKHYIRFGSPFIPERRRRPLLPDGTFSSCKKRWIKQALEEGMTQTSSVPQETRTQHLYQSNENSSSSSICKDNADLLSPLKKWKSRYLMEQNVTKLLRPLSPVTPPPPNSGSKSPQLATPGSSHPGEEECRNGYSLMFSPVTSLTTASRCNTPLQFELCHRKDLDLAKVGYLDSNTNSCADRPSLLNSGHSDLAPHPSLGPTSETGFPSRSGDGHQTLVRNSDQAFRTEFNLMYAYSPLNAMPRADGLYRGSPLVGDRKPLHLDGGYCSPAEGFSSRYEHGLMKDLSRGSLSPGGERACEGVPSAPQNPPQRKKVSLLEYRKRKQEAKENSAGGGGDSAQSKSKSAGAGQGSSNSVSDTGAHGVQGSSARTPSSPHKKFSPSHSSMSHLEAVSPSDSRGTSSSHCRPQENISSRWMVPTSVERLREGGSIPKVLRSSVRVAQKGEPSPTWESNITEKDSDPADGEGPETLSSALSKGATVYSPSRYSYQLLQCDSPRTESQSLLQQSSSPFRGHPTQSPGYSYRTTALRPGNPPSHGSSESSLSSTSYSSPAHPVSTDSLAPFTGTPGYFSSQPHSGNSTGSNLPRRSCPSSAASPTLQGPSDSPTSDSVSQSSTGTLSSTSFPQNSRSSLPSDLRTISLPSAGQSAVYQASRVSAVSNSQHYPHRGSGGVHQYRLQPLQGSGVKTQTGLS

SEQ ID NO: 817388 - protein, 1442 aa, Homo sapiens; identical to SEQ ID NO: 817385

SEQ ID NO: 817389 - protein, 1571 aa, Homo sapiens
MSIAIPLGVTTSDTSYSDMAAGSDPESVEASPAVNEKSVYSTHNYGTTQRHGCRGLPYATIIPRSDLNGLPSPVEERCGDSPNSEGETVPTWCPCGLSQDGFLLNCDKCRGMSRGKVIRLHRRKQDNISGGDSSATESWDEELSPSTVLYTATQHTPTSITLTVRRTKPKKRKKSPEKGRAAPKTKKIKNSPSEAQNLDENTTEGWENRIRLWTDQYEEAFTNQYSADVQNALEQHLHSSKEFVGKPTILDTINKTELACNNTVIGSQMQLQLGRVTRVQKHRKILRAARDLALDTLIIEYRGKVMLRQQFEVNGHFFKKEERHSLSSEELRWTWLTSVVVKIILFDKTLLGEKNHNSDKLTPVCYLERSASKSSNCSMYKMVTPPFQAKHSLLCACSLIKSRQTCCFPKFRRCKRLLLLLSAYASYLESWGGLLICVENYRNFNCIPRPYPFVLFYSKFNGVEMCVDARTFGNDARFIRRSCTPNAEVRHMIADGMIHLCIYAVSAITKDAEVTIAFDYEYSNCNYKVDCACHKGNRNCPIQKRNPNATELPLLPPPPSLPTIGAETRRRKARRKELEMEQQNEASEENNDQQSQEVPEKVTVSSDHEEVDNPEEKPEEEKEEVIDDQENLAHSRRTREDRKVEAIMHAFENLEKRKKRRDQPLEQSNSDVEITTTTSETPVGEETKTEAPESEVSNSVSNVTIPSTPQSVGVNTRRSSQAGDIAAEKLVPKPPPAKPSRPRPKSRISRYRTSSAQRLKRQKQANAQQAELSQAALEEGGSNSLVTPTEAGSLDSSGENRPLTGSDPTVVSITGSHVNRAASKYPKTKKYLVTEWLNDKAEKQECPVECPLRITTDPTVLATTLNMLPGLIHSPLICTTPKHYIRFGSPFIPERRRRPLLPDGTFSSCKKRWIKQALEEGMTQTSSVPQETRTQHLYQSNENSSSSSICKDNADLLSPLKKWKSRYLMEQNVTKLLRPLSPVTPPPPNSGSKSPQLATPGSSHPGEEECRNGYSLMFSPVTSLTTASRCNTPLQFELCHRKDLDLAKVGYLDSNTNSCADRPSLLNSGHSDLAPHPSLGPTSETGFPSRSGDGHQTLVRNSDQAFRTEFNLMYAYSPLNAMPRADGLYRGSPLVGDRKPLHLDGGYCSPAEGFSSRYEHGLMKDLSRGSLSPGGERACEGVPSAPQNPPQRKKVSLLEYRKRKQEAKENSAGGGGDSAQSKSKSAGAGQGSSNSVSDTGAHGVQGSSARTPSSPHKKFSPSHSSMSHLEAVSPSDSRGTSSSHCRPQENISSRWMVPTSVERLREGGSIPKVLRSSVRVAQKGEPSPTWESNITEKDSDPADGEGPETLSSALSKGATVYSPSRYSYQLLQCDSPRTESQSLLQQSSSPFRGHPTQSPGYSYRTTALRPGNPPSHGSSESSLSSTSYSSPAHPVSTDSLAPFTGTPGYFSSQPHSGNSTGSNLPRRSCPSSAASPTLQGPSDSPTSDSVSQSSTGTLSSTSFPQNSRSSLPSDLRTISLPSAGQSAVYQASRVSAVSNSQHYPHRGSGGVHQYRLQPLQGSGVKTQTGLS

SEQ ID NO: 817390 - protein, 1455 aa, Homo sapiens
ESKPAQSGFSRGNSPLSCPESVEASPAVNEKSVYSTHNYGTTQRHGCRGLPYADHNYGAPPPPTPPASPPVQTIIPRSDLNGLPSPVEERCGDSPNSEGETVPTWCPCGLSQDGFLLNCDKCRGMSRGKVIRLHRRKQDNISGGDSSATESWDEELSPSTVLYTATQHTPTSITLTVRRTKPKKRKKSPEKGRAAPKTKKIKNSPSEAQNLDENTTEGWENRIRLWTDQYEEAFTNQYSADVQNALEQHLHSSKEFVGKPTILDTINKTELACNNTVIGSQMQLQLGRVTRVQKHRKILRAARDLALDTLIIEYRGKVMLRQQFEVNGHFFKKPYPFVLFYSKFNGVEMCVDARTFGNDARFIRRSCTPNAEVRHMIADGMIHLCIYAVSAITKDAEVTIAFDYEYSNCNYKVDCACHKGNRNCPIQKRNPNATELPLLPPPPSLPTIGAETRRRKARRKELEMEQQNEASEENNDQQSQEVPEKVTVSSDHEEVDNPEEKPEEEKEEVIDDQENLAHSRRTREDRKVEAIMHAFENLEKRKKRRDQPLEQSNSDVEITTTTSETPVGEETKTEAPESEVSNSVSNVTIPSTPQSVGVNTRRSSQAGDIAAEKLVPKPPPAKPSRPRPKSRISRYRTSSAQRLKRQKQANAQQAELSQAALEEGGSNSLVTPTEAGSLDSSGENRPLTGSDPTVVSITGSHVNRAASKYPKTKKYLVTEWLNDKAEKQECPVECPLRITTDPTVLATTLNMLPGLIHSPLICTTPKHYIRFGSPFIPERRRRPLLPDGTFSSCKKRWIKQALEEGMTQTSSVPQETRTQHLYQSNENSSSSSICKDNADLLSPLKKWKSRYLMEQNVTKLLRPLSPVTPPPPNSGSKSPQLATPGSSHPGEEECRNGYSLMFSPVTSLTTASRCNTPLQFELCHRKDLDLAKVGYLDSNTNSCADRPSLLNSGHSDLAPHPSLGPTSETGFPSRSGDGHQTLVRNSDQAFRTEFNLMYAYSPLNAMPRADGLYRGSPLVGDRKPLHLDGGYCSPAEGFSSRYEHGLMKDLSRGSLSPGGERACEGVPSAPQNPPQRKKVSLLEYRKRKQEAKENSAGGGGDSAQSKSKSAGAGQGSSNSVSDTGAHGVQGSSARTPSSPHKKFSPSHSSMSHLEAVSPSDSRGTSSSHCRPQENISSRWMVPTSVERLREGGSIPKVLRSSVRVAQKGEPSPTWESNITEKDSDPADGEGPETLSSALSKGATVYSPSRYSYQLLQCDSPRTESQSLLQQSSSPFRGHPTQSPGYSYRTTALRPGNPPSHGSSESSLSSTSYSSPAHPVSTDSLAPFTGTPGYFSSQPHSGNSTGSNLPRRSCPSSAASPTLQGPSDSPTSDSVSQSSTGTLSSTSFPQNSRSSLPSDLRTISLPSAGQSAVYQASRVSAVSNSQHYPHRGSGGVHQYRLQPLQGSGVKTQTGLS

SEQ ID NO: 817391 - protein, 1107 aa, Homo sapiens
MCVDARTFGNDARFIRRSCTPNAEVRHMIADGMIHLCIYAVSAITKDAEVTIAFDYEYSNCNYKVDCACHKGNRNCPIQKRNPNATELPLLPPPPSLPTIGAETRRRKARRKELEMEQQNEASEENNDQQSQEVPEKVTVSSDHEEVDNPEEKPEEEKEEVIDDQENLAHSRRTREDRKVEAIMHAFENLEKRKKRRDQPLEQSNSDVEITTTTSETPVGEETKTEAPESEVSNSVSNVTIPSTPQSVGVNTRRSSQAGDIAAEKLVPKPPPAKPSRPRPKSRISRYRTSSAQRLKRQKQANAQQAELSQAALEEGGSNSLVTPTEAGSLDSSGENRPLTGSDPTVVSITGSHVNRAASKYPKTKKYLVTEWLNDKAEKQECPVECPLRITTDPTVLATTLNMLPGLIHSPLICTTPKHYIRFGSPFIPERRRRPLLPDGTFSSCKKRWIKQALEEGMTQTSSVPQETRTQHLYQSNENSSSSSICKDNADLLSPLKKWKSRYLMEQNVTKLLRPLSPVTPPPPNSGSKSPQLATPGSSHPGEEECRNGYSLMFSPVTSLTTASRCNTPLQFELCHRKDLDLAKVGYLDSNTNSCADRPSLLNSGHSDLAPHPSLGPTSETGFPSRSGDGHQTLVRNSDQAFRTEFNLMYAYSPLNAMPRADGLYRGSPLVGDRKPLHLDGGYCSPAEGFSSRYEHGLMKDLSRGSLSPGGERACEGVPSAPQNPPQRKKVSLLEYRKRKQEAKENSAGGGGDSAQSKSKSAGAGQGSSNSVSDTGAHGVQGSSARTPSSPHKKFSPSHSSMSHLEAVSPSDSRGTSSSHCRPQENISSRWMVPTSVERLREGGSIPKVLRSSVRVAQKGEPSPTWESNITEKDSDPADGEGPETLSSALSKGATVYSPSRYSYQLLQCDSPRTESQSLLQQSSSPFRGHPTQSPGYSYRTTALRPGNPPSHGSSESSLSSTSYSSPAHPVSTDSLAPFTGTPGYFSSQPHSGNSTGSNLPRRSCPSSAASPTLQGPSDSPTSDSVSQSSTGTLSSTSFPQNSRSSLPSDLRTISLPSAGQSAVYQASRVSAVSNSQHYPHRGSGGVHQYRLQPLQGSGVKTQTGLS

SEQ ID NO: 817392 - protein, 992 aa, Homo sapiens
MEQQNEASEENNDQQSQEVPEKVTVSSDHEEVDNPEEKPEEEKEEVIDDQENLAHSRRTREDRKVEAIMHAFENLEKRKKRRDQPLEQSNSDVEITTTTSETPVGEETKTEAPESEVSNSVSNVTIPSTPQSVGVNTRRSSQAGDIAAEKLVPKPPPAKPSRPRPKSRISRYRTSSAQRLKRQKQANAQQAELSQAALEEGGSNSLVTPTEAGSLDSSGENRPLTGSDPTVVSITGSHVNRAASKYPKTKKYLVTEWLNDKAEKQECPVECPLRITTDPTVLATTLNMLPGLIHSPLICTTPKHYIRFGSPFIPERRRRPLLPDGTFSSCKKRWIKQALEEGMTQTSSVPQETRTQHLYQSNENSSSSSICKDNADLLSPLKKWKSRYLMEQNVTKLLRPLSPVTPPPPNSGSKSPQLATPGSSHPGEEECRNGYSLMFSPVTSLTTASRCNTPLQFELCHRKDLDLAKVGYLDSNTNSCADRPSLLNSGHSDLAPHPSLGPTSETGFPSRSGDGHQTLVRNSDQAFRTEFNLMYAYSPLNAMPRADGLYRGSPLVGDRKPLHLDGGYCSPAEGFSSRYEHGLMKDLSRGSLSPGGERACEGVPSAPQNPPQRKKVSLLEYRKRKQEAKENSAGGGGDSAQSKSKSAGAGQGSSNSVSDTGAHGVQGSSARTPSSPHKKFSPSHSSMSHLEAVSPSDSRGTSSSHCRPQENISSRWMVPTSVERLREGGSIPKVLRSSVRVAQKGEPSPTWESNITEKDSDPADGEGPETLSSALSKGATVYSPSRYSYQLLQCDSPRTESQSLLQQSSSPFRGHPTQSPGYSYRTTALRPGNPPSHGSSESSLSSTSYSSPAHPVSTDSLAPFTGTPGYFSSQPHSGNSTGSNLPRRSCPSSAASPTLQGPSDSPTSDSVSQSSTGTLSSTSFPQNSRSSLPSDLRTISLPSAGQSAVYQASRVSAVSNSQHYPHRGSGGVHQYRLQPLQGSGVKTQTGLS

SEQ ID NO: 817393 - protein, 1442 aa, Homo sapiens; identical to SEQ ID NO: 817385

SEQ ID NO: 817394 - protein, 1560 aa, Homo sapiens
MSIAIPLGVTTSDTSYSDMAAGSDPESVEASPAVNEKSVYSTHNYGTTQRHGCRGLPYATIIPRSDLNGLPSPVEERCGDSPNSEGETVPTWCPCGLSQDGFLLNCDKCRGMSRGKVIRLHRRKQDNISGGDSSATESWDEELSPSTVLYTATQHTPTSITLTVRRTKPKKRKKSPEKGRAAPKTKKIKNSPSEAQNLDENTTEGWENRIRLWTDQYEEAFTNQYSADVQNALEQHLHSSKEFVGKPTILDTINKTELACNNTVIGSQMQLQLGRVTRVQKHRKILRAARDLALDTLIIEYRGKVMLRQQFEVNGHFFKKPYPFVLFYSKFNGVEMCVDARTFGNDARFIRRSCTPNAEVRHMIADGMIHLCIYAVSAITKDAEVTIAFDYEYSNCNYKVDCACHKGNRNCPIQKRNPNATELPLLPPPPSLPTIGAETRRRKARRKELEMEQQNEASEENNDQQSQEVPEKVTVSSDHEVIAPGQMMMLWHQSSKGRGPGLPHGLSRGAIVTLSALYINVGLLCSYISFCFTKSKTSFAGFAPENEGLVIICVYHVASHELQFKALEIVIESFKLPELNRLIFSQSLSTAEYASILKEVDNPEEKPEEEKEEVIDDQENLAHSRRTREDRKVEAIMHAFENLEKRKKRRDQPLEQSNSDVEITTTTSETPVGEETKTEAPESEVSNSVSNVTIPSTPQSVGVNTRRSSQAGDIAAEKLVPKPPPAKPSRPRPKSRISRYRTSSAQRLKRQKQANAQQAELSQAALEEGGSNSLVTPTEAGSLDSSGENRPLTGSDPTVVSITGSHVNRAASKYPKTKKYLVTEWLNDKAEKQECPVECPLRITTDPTVLATTLNMLPGLIHSPLICTTPKHYIRFGSPFIPERRRRPLLPDGTFSSCKKRWIKQALEEGMTQTSSVPQETRTQHLYQSNENSSSSSICKDNADLLSPLKKWKSRYLMEQNVTKLLRPLSPVTPPPPNSGSKSPQLATPGSSHPGEEECRNGYSLMFSPVTSLTTASRCNTPLQFELCHRKDLDLAKVGYLDSNTNSCADRPSLLNSGHSDLAPHPSLGPTSETGFPSRSGDGHQTLVRNSDQAFRTEFNLMYAYSPLNAMPRADGLYRGSPLVGDRKPLHLDGGYCSPAEGFSSRYEHGLMKDLSRGSLSPGGERACEGVPSAPQNPPQRKKVSLLEYRKRKQEAKENSAGGGGDSAQSKSKSAGAGQGSSNSVSDTGAHGVQGSSARTPSSPHKKFSPSHSSMSHLEAVSPSDSRGTSSSHCRPQENISSRWMVPTSVERLREGGSIPKVLRSSVRVAQKGEPSPTWESNITEKDSDPADGEGPETLSSALSKGATVYSPSRYSYQLLQCDSPRTESQSLLQQSSSPFRGHPTQSPGYSYRTTALRPGNPPSHGSSESSLSSTSYSSPAHPVSTDSLAPFTGTPGYFSSQPHSGNSTGSNLPRRSCPSSAASPTLQGPSDSPTSDSVSQSSTGTLSSTSFPQNSRSSLPSDLRTISLPSAGQSAVYQASRVSAVSNSQHYPHRGSGGVHQYRLQPLQGSGVKTQTGLS

SEQ ID NO: 817395 - protein, 924 aa, Homo sapiens
MHAFENLEKRKKRRDQPLEQSNSDVEITTTTSETPVGEETKTEAPESEVSNSVSNVTIPSTPQSVGVNTRRSSQAGDIAAEKLVPKPPPAKPSRPRPKSRISRYRTSSAQRLKRQKQANAQQAELSQAALEEGGSNSLVTPTEAGSLDSSGENRPLTGSDPTVVSITGSHVNRAASKYPKTKKYLVTEWLNDKAEKQECPVECPLRITTDPTVLATTLNMLPGLIHSPLICTTPKHYIRFGSPFIPERRRRPLLPDGTFSSCKKRWIKQALEEGMTQTSSVPQETRTQHLYQSNENSSSSSICKDNADLLSPLKKWKSRYLMEQNVTKLLRPLSPVTPPPPNSGSKSPQLATPGSSHPGEEECRNGYSLMFSPVTSLTTASRCNTPLQFELCHRKDLDLAKVGYLDSNTNSCADRPSLLNSGHSDLAPHPSLGPTSETGFPSRSGDGHQTLVRNSDQAFRTEFNLMYAYSPLNAMPRADGLYRGSPLVGDRKPLHLDGGYCSPAEGFSSRYEHGLMKDLSRGSLSPGGERACEGVPSAPQNPPQRKKVSLLEYRKRKQEAKENSAGGGGDSAQSKSKSAGAGQGSSNSVSDTGAHGVQGSSARTPSSPHKKFSPSHSSMSHLEAVSPSDSRGTSSSHCRPQENISSRWMVPTSVERLREGGSIPKVLRSSVRVAQKGEPSPTWESNITEKDSDPADGEGPETLSSALSKGATVYSPSRYSYQLLQCDSPRTESQSLLQQSSSPFRGHPTQSPGYSYRTTALRPGNPPSHGSSESSLSSTSYSSPAHPVSTDSLAPFTGTPGYFSSQPHSGNSTGSNLPRRSCPSSAASPTLQGPSDSPTSDSVSQSSTGTLSSTSFPQNSRSSLPSDLRTISLPSAGQSAVYQASRVSAVSNSQHYPHRGSGGVHQYRLQPLQGSGVKTQTGLS

SEQ ID NO: 817396 - protein, 1461 aa, Homo sapiens
MSIAIPLGVTTSDTSYSDMAAGSDPESVEASPAVNEKSVYSTHNYGTTQRHGCRGLPYATIIPRSDLNGLPSPVEERCGDSPNSEGETVPTWCPCGLSQDGFLLNCDKCRGMSRGKVIRLHRRKQDNISGGDSSATESWDEELSPSTVLYTATQHTPTSITLTVRRTKPKKRKKSPEKGRAAPKTKKIKNSPSEAQNLDENTTEGWENRIRLWTDQYEEAFTNQYSADVQNALEQHLHSSKEFVGKPTILDTINKTELACNNTVIGSQMQLQLGRVTRVQKHRKILRAARDLALDTLIIEYRGKVMLRQQFEVNGHFFKKPYPFVLFYSKFNGVEMCVDARTFGNDARFIRRSCTPNAEVRHMIADGMIHLCIYAVSAITKDAEVTIAFDYEYSNCNYKVDCACHKGNRNCPIQKRNPNATELPLLPPPPSLPTIGAETRRRKARRKELEMEQQNEASEENNDQQSQEVPEKVTVSSDHEEVDNPEEKPEEEKEEVIDDQENLAHSRRTREDRKVEAIMHAFENLEKRKKRRDQPLEQSNSDVEITTTTSETPVGEETKTEAPESEVSNSVSNVTIPSTPQSVGVNTRRSSQAGDIAAEKLVPKPPPAKPSRPRPKSRISRYRTSSAQRLKRQKQANAQQAELSQAALEEGGSNSLVTPTEAGSLDSSGENRPLTGSDPTVVSITGSHVNRAASKYPKTKKYLVTEWLNDKAEKQECPVECPLRITTDPTVLATTLNMLPGLIHSPLICTTPKHYIRFGSPFIPERRRRPLLPDGTFSSCKKRWIKQALEEGMTQTSSVPQETRTQHLYQSNENSSSSSICKDNADLLSPLKKWKSRYLMEQNVTKLLRPLSPVTPPPPNSGSKSPQLATPGSSHPGEEECRNGYSLMFSPVTSLTTASRCNTPLQFENISSPESSPAHRPESLSPELCHRKDLDLAKVGYLDSNTNSCADRPSLLNSGHSDLAPHPSLGPTSETGFPSRSGDGHQTLVRNSDQAFRTEFNLMYAYSPLNAMPRADGLYRGSPLVGDRKPLHLDGGYCSPAEGFSSRYEHGLMKDLSRGSLSPGGERACEGVPSAPQNPPQRKKVSLLEYRKRKQEAKENSAGGGGDSAQSKSKSAGAGQGSSNSVSDTGAHGVQGSSARTPSSPHKKFSPSHSSMSHLEAVSPSDSRGTSSSHCRPQENISSRWMVPTSVERLREGGSIPKVLRSSVRVAQKGEPSPTWESNITEKDSDPADGEGPETLSSALSKGATVYSPSRYSYQLLQCDSPRTESQSLLQQSSSPFRGHPTQSPGYSYRTTALRPGNPPSHGSSESSLSSTSYSSPAHPVSTDSLAPFTGTPGYFSSQPHSGNSTGSNLPRRSCPSSAASPTLQGPSDSPTSDSVSQSSTGTLSSTSFPQNSRSSLPSDLRTISLPSAGQSAVYQASRVSAVSNSQHYPHRGSGGVHQYRLQPLQGSGVKTQTGLS

SEQ ID NO: 817397 - protein, 910 aa, Homo sapiens
MSIAIPLGVTTSDTSYSDMAAGSDPESVEASPAVNEKSVYSTHNYGTTQRHGCRGLPYATIIPRSDLNGLPSPVEERCGDSPNSEGETVPTWCPCGLSQDGFLLNCDKCRGMSRGKVIRLHRRKQDNISGGDSSATESWDEELSPSTVLYTATQHTPTSITLTVRRTKPKKRKKSPEKGRAAPKTKKIKNSPSEAQNLDENTTEGWENRIRLWTDQYEEAFTNQYSADVQNALEQHLHSSKEFVGKPTILDTINKTELACNNTVIGSQMQLQLGRVTRVQKHRKILRAARDLALDTLIIEYRGKVMLRQQFEVNGHFFKKPYPFVLFYSKFNGVEMCVDARTFGNDARFIRRSCTPNAEVRHMIADGMIHLCIYAVSAITKDAEVTIAFDYEYSNCNYKVDCACHKGNRNCPIQKRNPNATELPLLPPPPSLPTIGAETRRRKARRKELEMEQQNEASEENNDQQSQEVPEKVTVSSDHEEVDNPEEKPEEEKEEVIDDQENLAHSRRTREDRKVEAIMHAFENLEKRKKRRDQPLEQSNSDVEITTTTSETPVGEETKTEAPESEVSNSVSNVTIPSTPQSVGVNTRRSSQAGDIAAEKLVPKPPPAKPSRPRPKSRISRYRTSSAQRLKRQKQANAQQAELSQAALEEGGSNSLVTPTEAGSLDSSGENRPLTGSDPTVVSITGSHVNRAASKYPKTKKYLVTEWLNDKAEKQECPVECPLRITTDPTVLATTLNMLPGLIHSPLICTTPKHYIRFGSPFIPERRRRPLLPDGTFSSCKKRWIKQALEEGMTQTSSVPQETRTQHLYQSNENSSSSSICKDNADLLSPLKKWKSRYLMEQNVTKLLRPLSPVTPPPPNSGSKSPQLATPGSSHPGEEECRNGYSLMFSPVTSLTTASRCNTPLQFELC

SEQ ID NO: 817398 - protein, 1242 aa, Homo sapiens
MSIAIPLGVTTSDTSYSDMAAGSDPESVEASPAVNEKSVYSTHNYGTTQRHGCRGLPYATIIPRSDLNGLPSPVEERCGDSPNSEGETVPTWCPCGLSQDGFLLNCDKCRGMSRGKVIRLHRRKQDNISGGDSSATESWDEELSPSTVLYTATQHTPTSITLTVRRTKPKKRKKSPEKGRAAPKTKKIKNSPSEAQNLDENTTEGWENRIRLWTDQYEEAFTNQYSADVQNALEQHLHSSKEFVGKPTILDTINKTELACNNTVIGSQMQLQLGRVTRVQKHRKILRAARDLALDTLIIEYRGKVMLRQQFEVNGHFFKKPYPFVLFYSKFNGVEMCVDARTFGNDARFIRRSCTPNAEVRHMIADGMIHLCIYAVSAITKDAEVTIAFDYEYSNCNYKVDCACHKGNRNCPIQKRNPNATELPLLPPPPSLPTIGAETRRRKARRKELEMEQQNEASEENNDQQSQEVPEKVTVSSDHEEVDNPEEKPEEEKEEVIDDQENLAHSRRTREDRKVEAIMHAFENLEKRKKRRDQPLEQSNSDVEITTTTSETPVGEETKTEAPESEVSNSVSNVTIPSTPQSVGVNTRRSSQAGDIAAEKLVPKPPPAKPSRPRPKSRISRYRTSSAQRLKRQKQANAQQAELSQAALEEGGSNSLVTPTEAGSLDSSGENRPLTGSDPTVVSITGSHVNRAASKYPKTKKYLVTEWLNDKAEKQECPVECPLRITTDPTVLATTLNMLPGLIHSPLICTTPKHYIRFGSPFIPERRRRPLLPDGTFSSCKKRWIKQALEEGMTQTSSVPQETRTQHLYQSNENSSSSSICKDNADLLSPLKKWKSRYLMEQNVTKLLRPLSPVTPPPPNSGSKSPQLATPGSSHPGEEECRNGYSLMFSPVTSLTTASRCNTPLQFELCHRKDLDLAKVGYLDSNTNSCADRPSLLNSGHSDLAPHPSLGPTSETGFPSRSGDGHQTLVRNSDQAFRTEFNLMYAYSPLNAMPRADGLYRGSPLVGDRKPLHLDGGYCSPAEGFSSRYEHGLMKDLSRGSLSPGGERACEGVPSAPQNPPQRKKVSLLEYRKRKQEAKENSAGGGGDSAQSKSKSAGAGQGSSNSVSDTGAHGVQGSSARTPSSPHKKFSPSHSSMSHLEAVSPSDSRGTSSSHCRPQENISSRWMVPTSVERLREGGSIPKVLRSSVRVAQKGEPSPTWESNITEKDSDPADGEGPETLSSALSKGATVYSPSRYSYQVR

SEQ ID NO: 817399 - protein, 75 aa, Homo sapiens
STGTLSSTSFPQNSQVVIAIRLTDYQSAQCRADTATSSCSVIVLGQNHKASFSRVPPPSEDILHSLQDTVIELLH

SEQ ID NO: 817400 - protein, 787 aa, Homo sapiens
MSIAIPLGVTTSDTSYSDMAAGSDPESVEASPAVNEKSVYSTHNYGTTQRHGCRGLPYATIIPRSDLNGLPSPVEERCGDSPNSEGETVPTWCPCGLSQDGFLLNCDKCRGMSRGKVIRLHRRKQDNISGGDSSATESWDEELSPSTVLYTATQHTPTSITLTVRRTKPKKRKKSPEKGRAAPKTKKIKNSPSEAQNLDENTTEGWENRIRLWTDQYEEAFTNQYSADVQNALEQHLHSSKEFVGKPTILDTINKTELACNNTVIGSQMQLQLGRVTRVQKHRKILRAARDLALDTLIIEYRGKVMLRQQFEVNGHFFKKPYPFVLFYSKFNGVEMCVDARTFGNDARFIRRSCTPNAEVRHMIADGMIHLCIYAVSAITKDAEVTIAFDYEYSNCNYKVDCACHKGNRNCPIQKRNPNATELPLLPPPPSLPTIGAETRRRKARRKELEMEQQNEASEENNDQQSQEVPEKVTVSSDHEEVDNPEEKPEEEKEEVIDDQENLAHSRRTREDRKVEAIMHAFENLEKRKKRRDQPLEQSNSDVEITTTTSETPVGEETKTEAPESEVSNSVSNVTIPSTPQSVGVNTRRSSQAGDIAAEKLVPKPPPAKPSRPRPKSRISRYRTSSAQRLKRQKQANAQQAELSQAALEEGGSNSLVTPTEAGSLDSSGENRPLTGSDPTVVSITGSHVNRAASKYPKTKKYLVTEWLNDKAEKQECPVECPLRITTDPTVLATTLNMLPGLIHSPLICTTPKHYIRFGSPFIPERRRRPLLPDGAHSCFLPAASGT

SEQ ID NO: 817401 - protein, 1456 aa, Homo sapiens
MSIAIPLGVTTSDTSYSDMAAGSDPESVEASPAVNEKSVYSTHNYGTTQRHGCRGLPYATIIPRSDLNGLPSPVEERCGDSPNSEGETVPTWCPCGLSQDGFLLNCDKCRGMSRGKVIRLHRRKQDNISGGDSSATESWDEELSPSTVLYTATQHTPTSITLTVRRTKPKKRKKSPEKGRAAPKTKKIKNSPSEAQNLDENTTEGWENRIRLWTDQYEEAFTNQYSADVQNALEQHLHSSKEFVGKPTILDTINKTELACNNTVIGSQMQLQLGRVTRVQKHRKILRAARDLALDTLIIEYRGKVMLRQQFEVNGHFFKKPYPFVLFYSKFNGVEMCVDARTFGNDARFIRRSCTPNAEVRHMIADGMIHLCIYAVSAITKDAEVTIAFDYEYSNCNYKVDCACHKGNRNCPIQKRNPNATELPLLPPPPSLPTIGAETRRRKARRKELEMEQQNEASEENNDQQSQEVPEKVTVSSDHEEVDNPEEKPEEEKEEVIDDQENLAHSRRTREDRKVEAIMHAFENLEKRKKRRDQPLEQSNSDVEITTTTSETPVGEETKTEAPESEVSNSVSNVTIPSTPQSVGVNTRRSSQAGDIAAEKLVPKPPPAKPSRPRPKSRISRYRTSSAQRLKRQKQANAQQAELSQAALEEGGSNSLVTPTEAGSLDSSGENRPLTGSDPTVVSITGSHVNRAASKYPKTKKYLVTEWLNDKAEKQECPVECPLRITTDPTVLATTLNMLPGLIHSPLICTTPKHYIRFGSPFIPERRRRPLLPDGTFSSCKKRWIKQALEEGMTQTSSVPQETRTQHLYQSNENSSSSSICKDNADLLSPLKKWKSRYLMEQNVTKLLRPLSPVTPPPPNSGSKSPQLATPGSSHPGEEECRNGYSLMFSPVTSLTTASRCNTPLQFELCHRKDLDLAKVGYLDSNTNSCADRPSLLNSGHSDLAPHPSLGPTSETGFPSRSGDGHQTLVRNSDQAFRTEFNLMYAYSPLNAMPRADGLYRGSPLVGDRKPLHLDGGYCSPAEGFSSRYEHGLMKDLSRGSLSPGGERACEGVPSAPQNPPQRKKVSLLEYRKRKQEAKENSAGGGGDSAQSKSKSAGAGQGSSNSVSDTGAHGVQGSSARTPSSPHKKFSPSHSSMSHLEAVSPSDSRGTSSSHCRPQENISSRWMVPTSVERLREGGSIPKVLRSSVRVAQKGEPSPTWESNITEKDSDPADGEGPETLSSALSKGATVYSPSRYSYQLLQCDSPRTESQSLLQQSSSPFRGHPTQSPGYSYRTTALRPGNPPSHGSSESSLSSTSYSSPAHPVSTDSLAPFTGTPGYFSSQPHSGNSTGSNLPRRSCPSSAASPTLQGPSDSPTSDSVSQSSTGTLSSTSFPQNSRSSLPSDLRTISLPSAGQSAVYQASRVSAVSNSQHYPHRGSGGVHQYRLQPLQGSGVKTYLVLSSGFGTRPAFWWERG

SEQ ID NO: 817402 - protein, 931 aa, Homo sapiens
MSIAIPLGVTTSDTSYSDMAAGSDPESVEASPAVNEKSVYSTHNYGTTQRHGCRGLPYATIIPRSDLNGLPSPVEERCGDSPNSEGETVPTWCPCGLSQDGFLLNCDKCRGMSRGKVIRLHRRKQDNISGGDSSATESWDEELSPSTVLYTATQHTPTSITLTVRRTKPKKRKKSPEKGRAAPKTKKIKNSPSEAQNLDENTTEGWENRIRLWTDQYEEAFTNQYSADVQNALEQHLHSSKEFVGKPTILDTINKTELACNNTVIGSQMQLQLGRVTRVQKHRKILRAARDLALDTLIIEYRGKVMLRQQFEVNGHFFKKPYPFVLFYSKFNGVEMCVDARTFGNDARFIRRSCTPNAEVRHMIADGMIHLCIYAVSAITKDAEVTIAFDYEYSNCNYKVDCACHKGNRNCPIQKRNPNATELPLLPPPPSLPTIGAETRRRKARRKELEMEQQNEASEENNDQQSQEVPEKVTVSSDHEEVDNPEEKPEEEKEEVIDDQENLAHSRRTREDRKVEAIMHAFENLEKRKKRRDQPLEQSNSDVEITTTTSETPVGEETKTEAPESEVSNSVSNVTIPSTPQSVGVNTRRSSQAGDIAAEKLVPKPPPAKPSRPRPKSRISRYRTSSAQRLKRQKQANAQQAELSQAALEEGGSNSLVTPTEAGSLDSSGENRPLTGSDPTVVSITGSHVNRAASKYPKTKKYLVTEWLNDKAEKQECPVECPLRITTDPTVLATTLNMLPGLIHSPLICTTPKHYIRFGSPFIPERRRRPLLPDGTFSSCKKRWIKQALEEGMTQTSSVPQETRTQHLYQSNENSSSSSICKDNADLLSPLKKWKSRYLMEQNVTKLLRPLSPVTPPPPNSGSKSPQLATPGSSHPGEEECRNGYSLMFSPVTSLTTASRCNTPLQFEVIWVWLLGVLDMKIIICTFSFQI

SEQ ID NO: 817403 - protein, 803 aa, Homo sapiens
MSIAIPLGVTTSDTSYSDMAAGSDPESVEASPAVNEKSVYSTHNYGTTQRHGCRGLPYATIIPRSDLNGLPSPVEERCGDSPNSEGETVPTWCPCGLSQDGFLLNCDKCRGMSRGKVIRLHRRKQDNISGGDSSATESWDEELSPSTVLYTATQHTPTSITLTVRRTKPKKRKKSPEKGRAAPKTKKIKNSPSEAQNLDENTTEGWENRIRLWTDQYEEAFTNQYSADVQNALEQHLHSSKEFVGKPTILDTINKTELACNNTVIGSQMQLQLGRVTRVQKHRKILRAARDLALDTLIIEYRGKVMLRQQFEVNGHFFKKPYPFVLFYSKFNGVEMCVDARTFGNDARFIRRSCTPNAEVRHMIADGMIHLCIYAVSAITKDAEVTIAFDYEYSNCNYKVDCACHKGNRNCPIQKRNPNATELPLLPPPPSLPTIGAETRRRKARRKELEMEQQNEASEENNDQQSQEVPEKVTVSSDHEEVDNPEEKPEEEKEEVIDDQENLAHSRRTREDRKVEAIMHAFENLEKRKKRRDQPLEQSNSDVEITTTTSETPVGEETKTEAPESEVSNSVSNVTIPSTPQSVGVNTRRSSQAGDIAAEKLVPKPPPAKPSRPRPKSRISRYRTSSAQRLKRQKQANAQQAELSQAALEEGGSNSLVTPTEAGSLDSSGENRPLTGSDPTVVSITGSHVNRAASKYPKTKKYLVTEWLNDKAEKQECPVECPLRITTDPTVLATTLNMLPGLIHSPLICTTPKHYIRFGSPFIPERRRRPLLPDGTFSSCKKIWIQAAFLSVCHCPPPLASRT

SEQ ID NO: 817404 - protein, 279 aa, Homo sapiens
MSIAIPLGVTTSDTSYSDMAAGSDPESVEASPAVNEKSVYSTHNYGTTQRHGCRGLPYATIIPRSDLNGLPSPVEERCGDSPNSEGETVPTWCPCGLSQDGFLLNCDKCRGMSRGKVIRLHRRKQDNISGGDSSATESWDEELSPSTVLYTATQHTPTSITLTVRRTKPKKRKKSPEKGRAAPKTKKIKNSPSEAQNLDENTTEGWENRIRLWTDQYEEAFTNQYSADVQNALEQHLHSSKEFVGKPTILDTINKTELACNNTVIGSQMQVSTKGLRTL

SEQ ID NO: 817405 - protein, 82 aa, Homo sapiens
ASIQRLSEAYEACSLSEAALLFLPVLFTGLLKQTCSEFLSLDWLFIGLLSASCFRLTCLMQFLLLKSVGIVHKTLFVCLLCE

SEQ ID NO: 817406 - protein, 642 aa, Homo sapiens
CVITSRGRRGQTRTAPEPPEPPGLGGASAPPEPPASPAPHSIPTGWGRARCGCVGSGAELQNPRTHFVLSPHCFMGGIMAPKDIMTNTHAKSILNSMNSLRKSNTLCDVTLRVEQKDFPAHRIVLAACSDYFCAMFTSELSEKGKPYVDIQGLTASTMEILLDFVYTETVHVTVENVQELLPAACLLQLKGVKQACCEFLESQLDPSNCLGIRDFAETHNCVDLMQAAEVFSQKHFPEVVQHEEFILLSQGEVEKLIKCDEIQVDSEEPVFEAVINWVKHAKKEREESLPNLLQYVRMPLLTPRYITDVIDAEPFIRCSLQCRDLVDEAKKFHLRPELRSQMQGPRTRARLGANEVLLVVGGFGSQQSPIDVVEKYDPKTQEWSFLPSITRKRRYVASVSLHDRIYVIGGYDGRSRLSSVECLDYTADEDGVWYSVAPMNVRRGLAGATTLGDMIYVSGGFDGSRRHTSMERYDPNIDQWSMLGDMQTAREGAGLVVASGVIYCLGGYDGLNILNSVEKYDPHTGHWTNVTPMATKRSGAGVALLNDHIYVVGGFDGTAHLSSVEAYNIRTDSWTTVTSMTTPRCYVGATVLRGRLYAIAGYDGNSLLSSIECYDPIIDSWEVVTSMGTQRCDAGVCVLREK

SEQ ID NO: 817407 - protein, 244 aa, Homo sapiens
PQCLTLLSAIFQPFIRCSLQCRDLVDEAKKFHLRPELRSQMQGPRTRARLGANEVLLVVGGFGSQQSPIDVVEKYDPKTQEWSFLPSITRKRRYVASVSLHDRIYVIGGYDGRSRLSSVECLDYTADEDGVWYSVAPMNVRRGLAGATTLGDMIYVSGGFDGSRRHTSMERYDPNIDQWSMLGDMQTAREGAGLVVASGVIYCLGGYDGLNILNSVEKYDPHTGHWTNVTPMATKRSDMMVIPC

SEQ ID NO: 817408 - protein, 642 aa, Homo sapiens; identical to SEQ ID NO: 817406

SEQ ID NO: 817409 - protein, 642 aa, Homo sapiens; identical to SEQ ID NO: 817406

SEQ ID NO: 817410 - protein, 642 aa, Homo sapiens; identical to SEQ ID NO: 817406

SEQ ID NO: 817411 - protein, 541 aa, Homo sapiens
CVITSRGRRGQTRTAPEPPEPPGLGGASAPPEPPASPAPHSIPTGWGRARCGCVGSGAELQNPRTHFVLSPHCFMGGIMAPKDIMTNTHAKSILNSMNSLRKSNTLCDVTLRVEQKDFPAHRIVLAACSDYFCAMFTSELSEKGKPYVDIQGLTASTMEILLDFVYTETVHVTVENVQELLPAACLLQLKGVKQACCEFLESQLDPSNCLGIRDFAETHNCVDLMQAAEVFSQKHFPEVVQHEEFILLSQGEVEKLIKCDEIQVDSEEPVFEAVINWVKHAKKEREESLPNLLQYVRMPLLTPRYITDVIDAEPFIRCSLQCRDLVDEAKKFHLRPELRSQMQGPRTRARLDMIYVSGGFDGSRRHTSMERYDPNIDQWSMLGDMQTAREGAGLVVASGVIYCLGGYDGLNILNSVEKYDPHTGHWTNVTPMATKRSGAGVALLNDHIYVVGGFDGTAHLSSVEAYNIRTDSWTTVTSMTTPRCYVGATVLRGRLYAIAGYDGNSLLSSIECYDPIIDSWEVVTSMGTQRCDAGVCVLREK

SEQ ID NO: 817412 - protein, 652 aa, Homo sapiens
AEYILRSVDPKAQRILAAALFGPKRPLWTMDVNKFEASVGFLDVKKFLSTWKKRGFAVIPRRVWNSGAQLQNPRTHFVLSPHCFMGGIMAPKDIMTNTHAKSILNSMNSLRKSNTLCDVTLRVEQKDFPAHRIVLAACSDYFCAMFTSELSEKGKPYVDIQGLTASTMEILLDFVYTETVHVTVENVQELLPAACLLQLKGVKQACCEFLESQLDPSNCLGIRDFAETHNCVDLMQAAEVFSQKHFPEVVQHEEFILLSQGEVEKLIKCDEIQVDSEEPVFEAVINWVKHAKKEREESLPNLLQYVRMPLLTPRYITDVIDAEPFIRCSLQCRDLVDEAKKFHLRPELRSQMQGPRTRARLGANEVLLVVGGFGSQQSPIDVVEKYDPKTQEWSFLPSITRKRRYVASVSLHDRIYVIGGYDGRSRLSSVECLDYTADEDGVWYSVAPMNVRRGLAGATTLGDMIYVSGGFDGSRRHTSMERYDPNIDQWSMLGDMQTAREGAGLVVASGVIYCLGGYDGLNILNSVEKYDPHTGHWTNVTPMATKRSGAGVALLNDHIYVVGGFDGTAHLSSVEAYNIRTDSWTTVTSMTTPRCYVGATVLRGRLYAIAGYDGNSLLSSIECYDPIIDSWEVVTSMGTQRCDAGVCVLREK

SEQ ID NO: 817413 - protein, 330 aa, Homo sapiens
CVITSRGRRGQTRTAPEPPEPPGLGGASAPPEPPASPAPHSIPTGWGRARCGCVGSGAELQNPRTHFVLSPHCFMGGIMAPKDIMTNTHAKSILNSMNSLRKSNTLCDVTLRVEQKDFPAHRIVLAACSDYFCAMFTSELSEKGKPYVDIQGLTASTMEILLDFVYTETVHVTVENVQELLPAACLLQLKGVKQACCEFLESQLDPSNCLGIRDFAETHNCVDLMQAAEVFSQKHFPEVVQHEEFILLSQGEVEKLIKCDEIQVDSEEPVFEAVINWVKHAKKEREESLPNLLQYVRMPLLTPRYITDVIDAECFGGDSMQLQDMMVIPC

SEQ ID NO: 817414 - protein, 302 aa, Homo sapiens
CVITSRGRRGQTRTAPEPPEPPGLGGASAPPEPPASPAPHSIPTGWGRARCGCVGSGAELQNPRTHFVLSPHCFMGGIMAPKDIMTNTHAKSILNSMNSLRKSNTLCDVTLRVEQKDFPAHRIVLAACSDYFCAMFTSELSEKGKPYVDIQGLTASTMEILLDFVYTETVHVTVENVQELLPAACLLQLKGVKQACCEFLESQLDPSNCLGIRDFAETHNCVDLMQAAEVFSQKHFPEVVQHEEFILLSQGEVEKLIKCDEIQDLALWFLHEDSGCGAWTYNTTSAVTVKSAIRRLKELKDQ

SEQ ID NO: 817415 - protein, 243 aa, Homo sapiens
MAKVEQVLSLEPQHELKFRGPFTDVVTTNLKLGNPTDRNVCFKVKTTAPRRYCVRPNSGIIDAGASINVSVMLQPFDYDPNEKSKHKFMVQSMFAPTDTSDMEAVWKEAKPEDLMDSKLRCVFELPAENDKPHDVEINKIISTTASKTETPIVSKSLSSSLDDTEVKKVMEECKRLQGEVQRLREENKQFKEEDGLRMRKTVQSNSPISALAPTGKEEGLSTRLLALVVLFFIVGVIIGKIAL

SEQ ID NO: 817416 - protein, 243 aa, Homo sapiens; identical to SEQ ID NO: 817415

SEQ ID NO: 817417 - protein, 243 aa, Homo sapiens; identical to SEQ ID NO: 817415

SEQ ID NO: 817418 - protein, 256 aa, Homo sapiens
RRHPPAPSPRRRNMAKVEQVLSLEPQHELKFRGPFTDVVTTNLKLGNPTDRNVCFKVKTTAPRRYCVRPNSGIIDAGASINVSVMLQPFDYDPNEKSKHKFMVQSMFAPTDTSDMEAVWKEAKPEDLMDSKLRCVFELPAENDKPHDVEINKIISTTASKTETPIVSKSLSSSLDDTEVKKVMEECKRLQGEVQRLREENKQFKEEDGLRMRKTVQSNSPISALAPTGKEEGLSTRLLALVVLFFIVGVIIGKIAL

SEQ ID NO: 817419 - protein, 243 aa, Homo sapiens; identical to SEQ ID NO: 817415

SEQ ID NO: 817420 - protein, 68 aa, Homo sapiens
PAPGAGGAGRSFPPPERASLLRACVCTTLRACVRACVPSARRAPRPRPRPPPLRLHRVDRPPPSAPTR

SEQ ID NO: 817421 - protein, 203 aa, Homo sapiens
  misc_feature (130)..(130): Xaa can be any naturally occurring amino acid
MRKMVTCDGTQSSMARYPRQAAQAELTLQEHIEAIPSDRAEKAWCQHGGLLKRRCGPSMPNEILSTAIAHPSFSHNTNYPQLGLPRTSTFRCPSVLTSNHMLTLLRFCNIRDCSSRRMYAPVKCSRAPRXMVDTVEVRAWPREASVIDRMPCIVDAPKIDDGAHCTPIGFTSPTGKEEGLSTRLLALVVLFFIVGVIIGKIAL

SEQ ID NO: 817422 - protein, 256 aa, Homo sapiens; identical to SEQ ID NO: 817418

SEQ ID NO: 817423 - protein, 68 aa, Homo sapiens; identical to SEQ ID NO: 817420

SEQ ID NO: 817424 - protein, 70 aa, Homo sapiens
RIINTEQYMHSFVGSAAHEVVLLLEGCGLLCLWRVWSCGGGVYWDAGEELPGSVFSGSVNNNCHREGNSQ

SEQ ID NO: 817425 - protein, 243 aa, Homo sapiens; identical to SEQ ID NO: 817415

SEQ ID NO: 817426 - protein, 388 aa, Homo sapiens
MAKVEQVLSLEPQHELKFRGPFTDVVTTNLKLGNPTDRNVCFKVKTTAPRRYCVRPNSGIIDAGASINVSVMLQPFDYDPNEKSKHKFMVQSMFAPTDTSDMEAVWKEAKPEDLMDSKLRCVFELPAENDKPTSDRAGGGGRGLAQRREQLNFKHKQLHERAPTAPEPCPDPRPPRPCGARAETPWPRRSSGRGPPSRRGPREGRSGAAPHRRRANLGSRFPARRGARGARSPAMSRSNRAEGVQMRGPGVRQDEGLPTLAGRIDEMPEAAVKSTAKKYKSCCRDHETASLGPENSSLTGIQEKWEATREGSARVWTSRKLLKSRHKLRKMVTPDKRSAGAKQDEGKREAGQRRENTGTKERSNQGTEEDTTQEHVTQNEKAHKQGNS

SEQ ID NO: 817427 - protein, 490 aa, Homo sapiens
MSEVTKNSLEKILPQLKCHFTWNLFKEDSVSRDLEDRVCNQIEFLNTEFKATMYNLLAYIKHLDGNNEAALECLRQAEELIQQEHADQAEIRSLVTWGNYAWVYYHLGRLSDAQIYVDKVKQTCKKFSNPYSIEYSELDCEEGWTQLKCGRNERAKVCFEKALEEKPNNPEFSSGLAIAMYHLDNHPEKQFSTDVLKQAIELSPDNQYVKVLLGLKLQKMNKEAEGEQFVEEALEKSPCQTDVLRSAAKFYRRKGDLDKAIELFQRVLESTPNNGYLYHQIGCCYKAKVRQMQNTGESEASGNKEMIEALKQYAMDYSNKALEKGLNPLNAYSDLAEFLETECYQTPFNKEVPDAEKQQSHQRYCNLQKYNGKSEDTAVQHGLEGLSISKKSTDKEEIKDQPQNVSENLLPQNAPNYWYLQGLIHKQNGDLLQAAKCYEKELGRLLRDAPSGIGSIFLSASELEDGSEEMGQGAVSSSPRELLSNSEQLN

SEQ ID NO: 817428 - protein, 490 aa, Homo sapiens; identical to SEQ ID NO: 817427

SEQ ID NO: 817429 - protein, 438 aa, Homo sapiens
MYNLLAYIKHLDGNNEAALECLRQAEELIQQEHADQAEIRSLVTWGNYAWVYYHLGRLSDAQIYVDKVKQTCKKFSNPYSIEYSELDCEEGWTQLKCGRNERAKVCFEKALEEKPNNPEFSSGLAIAMYHLDNHPEKQFSTDVLKQAIELSPDNQYVKVLLGLKLQKMNKEAEGEQFVEEALEKSPCQTDVLRSAAKFYRRKGDLDKAIELFQRVLESTPNNGYLYHQIGCCYKAKVRQMQNTGESEASGNKEMIEALKQYAMDYSNKALEKGLNPLNAYSDLAEFLETECYQTPFNKEVPDAEKQQSHQRYCNLQKYNGKSEDTAVQHGLEGLSISKKSTDKEEIKDQPQNVSENLLPQNAPNYWYLQGLIHKQNGDLLQAAKCYEKELGRLLRDAPSGIGSIFLSASELEDGSEEMGQGAVSSSPRELLSNSEQLN

SEQ ID NO: 817430 - protein, 311 aa, Homo sapiens
MYHLDNHPEKQFSTDVLKQAIELSPDNQYVKVLLGLKLQKMNKEAEGEQFVEEALEKSPCQTDVLRSAAKFYRRKGDLDKAIELFQRVLESTPNNGYLYHQIGCCYKAKVRQMQNTGESEASGNKEMIEALKQYAMDYSNKALEKGLNPLNAYSDLAEFLETECYQTPFNKEVPDAEKQQSHQRYCNLQKYNGKSEDTAVQHGLEGLSISKKSTDKEEIKDQPQNVSENLLPQNAPNYWYLQGLIHKQNGDLLQAAKCYEKELGRLLRDAPSGIGSIFLSASELEDGSEEMGQGAVSSSPRELLSNSEQLN

SEQ ID NO: 817431 - protein, 311 aa, Homo sapiens; identical to SEQ ID NO: 817430

SEQ ID NO: 817432 - protein, 271 aa, Homo sapiens
MNKEAEGEQFVEEALEKSPCQTDVLRSAAKFYRRKGDLDKAIELFQRVLESTPNNGYLYHQIGCCYKAKVRQMQNTGESEASGNKEMIEALKQYAMDYSNKALEKGLNPLNAYSDLAEFLETECYQTPFNKEVPDAEKQQSHQRYCNLQKYNGKSEDTAVQHGLEGLSISKKSTDKEEIKDQPQNVSENLLPQNAPNYWYLQGLIHKQNGDLLQAAKCYEKELGRLLRDAPSGIGSIFLSASELEDGSEEMGQGAVSSSPRELLSNSEQLN

SEQ ID NO: 817433 - protein, 490 aa, Homo sapiens; identical to SEQ ID NO: 817427

SEQ ID NO: 817434 - protein, 154 aa, Homo sapiens
GQGDQLGTCCGGPGEMMLVLGENVRNGGEEKRSYYGKSEDTAVQHGLEGLSISKKSTDKEEIKDQPQNVSENLLPQNAPNYWYLQGLIHKQNGDLLQAAKCYEKELGRLLRDAPSGIGSIFLSASELEDGSEEMGQGAVSSSPRELLSNSEQLN

SEQ ID NO: 817435 - protein, 845 aa, Homo sapiens
PRGNLWWREEFGSFRAGVESSWEPPRDFGGGSSLAAGMAGTVVLDDVELREAQRDYLDFLDDEEDQGIYQSKVRELISDNQYRLIVNVNDLRRKNEKRANRLLNNAFEELVAFQRALKDFVASIDATYAKQYEEFYVGLEGSFGSKHVSPRTLTSCFLSCVVCVEGIVTKCSLVRPKVVRSVHYCPATKKTIERRYSDLTTLVAFPSSSVYPTKDEENNPLETEYGLSVYKDHQTITIQEMPEKAPAGQLPRSVDVILDDDLVDKAKPGDRVQVVGTYRCLPGKKGGYTSGTFRTVLIACNVKQMSKDAQPSFSAEDIAKIKKFSKTRSKDIFDQLAKSLAPSIHGHDYVKKAILCLLLGGVERDLENGSHIRGDINILLIGDPSVAKSQLLRYVLCTAPRAIPTTGRGSSGVGLTAAVTTDQETGERRLEAGAMVLADRGVVCIDEFDKMSDMDRTAIHEVMEQGRVTIAKAGIHARLNARCSVLAAANPVYGRYDQYKTPMENIGLQDSLLSRFDLLFIMLDQMDPEQDREISDHVLRMHRYRAPGEQDGDAMPLGSAVDILATDDPNFSQEDQQDTQIYEKHDNLLHGTKKKKEKMVSAAFMKKYIHVAKIIKPVLTQESATYIAEEYSRLRSQDSMSSDTARTSPVTARTLETLIRLATAHAKARMSKTVDLQDAEEAVELVQYAYFKKVLEKEKKRKKRSEDESETEDEEEKSQEDQEQKRKRRKTRQPDAKDGDSYDPYDFSDTEEEMPQVHTPKTADSQETKESQKVELSESRLKAFKVALLDVFREAHAQSIGMNRLTESINRDSEEPFSSVEIQAALSKMQDDNQVMVSEGIIFLI

SEQ ID NO: 817436 - protein, 845 aa, Homo sapiens; identical to SEQ ID NO: 817435

SEQ ID NO: 817437 - protein, 870 aa, Homo sapiens
PRGNLWWREEFGSFRAGVESSWEPPRDFGGGSSLAAGMAGTVVLDDVELREAQRDYLDFLDDEEDQGIYQSKVRELISDNQYRLIVNVNDLRRKNEKRANRLLNNAFEELVAFQRALKDFVASIDATYAKQYEEFYVGLEGSFGSKHVSPRTLTSCFLSCVVCVEGIVTKCSLVRPKVVRSVHYCPATKKTIERRYSDLTTLVAFPSSSVYPTKDEENNPLETEYGLSVYKDHQTITIQEMPEKAPAGQLPRSVDVILDDDLVDKAKPGDRVQVVGTYRCLPGKKGGYTSGTFRTVLIACNVKQMSKDAQPSFSAEDIAKIKKFSKTRSKDIFDQLAKSLAPSIHGHDYVKKAILCLLLGGVERDLENGSHIRGDINILLIGDPSVAKSQLLRYVLCTAPRAIPTTGRGSSGVGLTAAVTTDQETGERRLEAGAMVLADRGVVCIDEFDKMSDMDRTAIHEVMEQGRVTIAKAGIHARLNARCSVLAAANPVYGRYDQYKTPMENIGLQDSLLSRFDLLFIMLDQMDPEQDREISDHVLRMHRYRAPGEQDGDAMPLGSAVDILATDDPNFSQEDQQDTQIYEKHDNLLHGTKKKKEKMVSAAFMKKYIHVAKIIKPVLTQESATYIAEEYSRLRSQDSMSSDTARTSPVTARTLETLIRLATAHAKARMSKTVDLQDAEEAVELVQYAYFKKVLEKEKKRKKRSEDESETEDEEEKSQEDQEQKRKRRKTRQPDAKDGDSYDPYDFSDTEEEMPQVHTPKTADSQETKESQKVELSESRDGISPCCPGWSWTPGLKQSFYLSLPKGWDYRHKPLCLFDLILFNDCRVSMVEGIQGGPLGCVPGSSCAVNRHESPHRIHQPGQRRALLFS

SEQ ID NO: 817438 - protein, 828 aa, Homo sapiens
PRGNLWWREEFGSFRAGVESSWEPPRDFGGGSSLAAGMAGTVVLDDVELREAQRDYLDFLDDEEDQGIYQSKVRELISDNQYRLIVNVNDLRRKNEKRANRLLNNAFEELVAFQRALKDFVASIDATYAKQYEEFYVGLEGSFGSKHVSPRTLTSCFLSCVVCVEGIVTKCSLVRPKVVRSVHYCPATKKTIERRYSDLTTLVAFPSSSVYPTKDHQTITIQEMPEKAPAGQLPRSVDVILDDDLVDKAKPGDRVQVVGTYRCLPGKKGGYTSGTFRTVLIACNVKQMSKDAQPSFSAEDIAKIKKFSKTRSKDIFDQLAKSLAPSIHGHDYVKKAILCLLLGGVERDLENGSHIRGDINILLIGDPSVAKSQLLRYVLCTAPRAIPTTGRGSSGVGLTAAVTTDQETGERRLEAGAMVLADRGVVCIDEFDKMSDMDRTAIHEVMEQGRVTIAKAGIHARLNARCSVLAAANPVYGRYDQYKTPMENIGLQDSLLSRFDLLFIMLDQMDPEQDREISDHVLRMHRYRAPGEQDGDAMPLGSAVDILATDDPNFSQEDQQDTQIYEKHDNLLHGTKKKKEKMVSAAFMKKYIHVAKIIKPVLTQESATYIAEEYSRLRSQDSMSSDTARTSPVTARTLETLIRLATAHAKARMSKTVDLQDAEEAVELVQYAYFKKVLEKEKKRKKRSEDESETEDEEEKSQEDQEQKRKRRKTRQPDAKDGDSYDPYDFSDTEEEMPQVHTPKTADSQETKESQKVELSESRLKAFKVALLDVFREAHAQSIGMNRLTESINRDSEEPFSSVEIQAALSKMQDDNQVMVSEGIIFLI

SEQ ID NO: 817439 - protein, 845 aa, Homo sapiens; identical to SEQ ID NO: 817435

SEQ ID NO: 817440 - protein, 845 aa, Homo sapiens; identical to SEQ ID NO: 817435

SEQ ID NO: 817441 - protein, 836 aa, Homo sapiens
PRGNLWWREEFGSFRAGVESSWEPPRDFGGGSSLAAGMAGTVVLDDVELREAQRDYLDFLDDEEDQGIYQSKVRELISDNQYRLIVNVNDLRRKNEKRANRLLNNAFEELVAFQRALKDFVASIDATYAKQYEEFYVGLEGSFGSKHVSPRTLTSCFLSCVVCVEGIVTKCSLVRPKVVRSVHYCPATKKTIERRYSDLTTLVAFPSSSVYPTKDEENNPLETEYGLSVYKDHQTITIQEMPEKAPAGQLPRSVDVILDDDLVDKAKPGDRVQVVGTYRCLPGKKGGYTSGTFRTVLIACNVKQMSKDAQPSFSAEDIAKIKKFSKTRSKDIFDQLAKSLAPSIHGHDYVKKAILCLLLGGVERDLENGSHIRGDINILLIGDPSVAKSQLLRYVLCTAPRAIPTTGRGSSGVGLTAAVTTDQETGERRLEAGAMVLADRGVVCIDEFDKMSDMDRTAIHEVMEQGRVTIAKAGIHARLNARCSVLAAANPVYGRYDQYKTPMENIGLQDSLLSRFDLLFIMLDQMDPEQDREISDHVLRMHRYRAPGEQDGDAMPLGSAVDILATDDPNFSQEDQQDTQIYEKHDNLLHGTKKKKEKMVSAAFMKKYIHVAKIIKPVLTQESATYIAEEYSRLRSQDSMSSDTARTSPVTARTLETLIRLATAHAKARMSKTVDLQDAEEAVELVQYAYFKKVLEKEKKRKKRSEDESETEDEEEKSQEDQEQKRKRRKTRQPDAKDGDSYDPYDFSDTEEEMPQVHTPKTADSQETKESQKVELSESRLKAFKVALLDVFREAHAQSIGMNRLTESINRDSEEPFSSVEIQAALSKMQDDNQQC

SEQ ID NO: 817442 - protein, 845 aa, Homo sapiens; identical to SEQ ID NO: 817435

SEQ ID NO: 817443 - protein, 605 aa, Homo sapiens
MPEKAPAGQLPRSVDVILDDDLVDKAKPGDRVQVVGTYRCLPGKKGGYTSGTFRTVLIACNVKQMSKDAQPSFSAEDIAKIKKFSKTRSKDIFDQLAKSLAPSIHGHDYVKKAILCLLLGGVERDLENGSHIRGDINILLIGDPSVAKSQLLRYVLCTAPRAIPTTGRGSSGVGLTAAVTTDQETGERRLEAGAMVLADRGVVCIDEFDKMSDMDRTAIHEVMEQGRVTIAKAGIHARLNARCSVLAAANPVYGRYDQYKTPMENIGLQDSLLSRFDLLFIMLDQMDPEQDREISDHVLRMHRYRAPGEQDGDAMPLGSAVDILATDDPNFSQEDQQDTQIYEKHDNLLHGTKKKKEKMVSAAFMKKYIHVAKIIKPVLTQESATYIAEEYSRLRSQDSMSSDTARTSPVTARTLETLIRLATAHAKARMSKTVDLQDAEEAVELVQYAYFKKVLEKEKKRKKRSEDESETEDEEEKSQEDQEQKRKRRKTRQPDAKDGDSYDPYDFSDTEEEMPQVHTPKTADSQETKESQKVELSESRLKAFKVALLDVFREAHAQSIGMNRLTESINRDSEEPFSSVEIQAALSKMQDDNQVMVSEGIIFLI

SEQ ID NO: 817444 - protein, 541 aa, Homo sapiens [sequence omitted]

SEQ ID NO: 817445 - protein, 541 aa, Homo sapiens [sequence omitted]

SEQ ID NO: 817446 - protein, 516 aa, Homo sapiens
PRGNLWWREEFGSFRAGVESSWEPPRDFGGGSSLAAGMAGTVVLDDVELREAQRDYLDFLDDEEDQGIYQSKVRELISDNQYRLIVNVNDLRRKNEKRANRLLNNAFEELVAFQRALKDFVASIDATYAKQYEEFYVGLEGSFGSKHVSPRTLTSCFLTANPVYGRYDQYKTPMENIGLQDSLLSRFDLLFIMLDQMDPEQDREISDHVLRMHRYRAPGEQDGDAMPLGSAVDILATDDPNFSQEDQQDTQIYEKHDNLLHGTKKKKEKMVSAAFMKKYIHVAKIIKPVLTQESATYIAEEYSRLRSQDSMSSDTARTSPVTARTLETLIRLATAHAKARMSKTVDLQDAEEAVELVQYAYFKKVLEKEKKRKKRSEDESETEDEEEKSQEDQEQKRKRRKTRQPDAKDGDSYDPYDFSDTEEEMPQVHTPKTADSQETKESQKVELSESRLKAFKVALLDVFREAHAQSIGMNRLTESINRDSEEPFSSVEIQAALSKMQDDNQVMVSEGIIFLI

SEQ ID NO: 817447 - protein, 343 aa, Homo sapiens [sequence omitted]

SEQ ID NO: 817448 - protein, 291 aa, Homo sapiens
TRRSCHLQLQGQNVLINKDIRCTDDEFTHLYTLIVRPDNTYEEKMVSAAFMKKYIHVAKIIKPVLTQESATYIAEEYSRLRSQDSMSSDTARTSPVTARTLETLIRLATAHAKARMSKTVDLQDAEEAVELVQYAYFKKVLEKEKKRKKRSEDESETEDEEEKSQEDQEQKRKRRKTRQPDAKDGDSYDPYDFSDTEEEMPQVHTPKTADSQETKESQKVELSESRLKAFKVALLDVFREAHAQSIGMNRLTESINRDSEEPFSSVEIQAALSKMQDDNQVMVSEGIIFLI

SEQ ID NO: 817449 - protein, 273 aa, Homo sapiens
MVSAAFMKKYIHLLLFLLGPMKKKEKMVSAAFMKKYIHVAKIIKPVLTQESATYIAEEYSRLRSQDSMSSDTARTSPVTARTLETLIRLATAHAKARMSKTVDLQDAEEAVELVQYAYFKKVLEKEKKRKKRSEDESETEDEEEKSQEDQEQKRKRRKTRQPDAKDGDSYDPYDFSDTEEEMPQVHTPKTADSQETKESQKVELSESRLKAFKVALLDVFREAHAQSIGMNRLTESINRDSEEPFSSVEIQAALSKMQDDNQVMVSEGIIFLI

SEQ ID NO: 817450 - protein, 172 aa, Homo sapiens
MGLNRPLRVMRLVCRGCLEKVLEKEKKRKKRSEDESETEDEEEKSQEDQEQKRKRRKTRQPDAKDGDSYDPYDFSDTEEEMPQVHTPKTADSQETKESQKVELSESRLKAFKVALLDVFREAHAQSIGMNRLTESINRDSEEPFSSVEIQAALSKMQDDNQVMVSEGIIFLI

SEQ ID NO: 817451 - protein, 299 aa, Homo sapiens
PRGNLWWREEFGSFRAGVESSWEPPRDFGGGSSLAAGMAGTVVLDDVELREAQRDYLDFLDDEEDQGIYQSKVRELISDNQYRLIVNVNDLRRKNEKRANRLLNNAFEELVAFQRALKDFVASIDATYAKQYEEFYVGLEGSFGSKHVSPRTLTSCFLSCVVCVEGIVTKCSLVRPKVVRSVHYCPATKKTIERRYSDLTTLVAFPSSSVYPTKDEENNPLETEYGLSVYKDHQTITIQEMPEKAPAGQLPRSVDVILDDDLVDKAKPGDRVQVVGTYRCLPGKKGGYTSGTFRMADGE

SEQ ID NO: 817452 - protein, 234 aa, Homo sapiens
PRGNLWWREEFGSFRAGVESSWEPPRDFGGGSSLAAGMAGTVVLDDVELREAQRDYLDFLDDEEDQGIYQSKVRELISDNQYRLIVNVNDLRRKNEKRANRLLNNAFEELVAFQRALKDFVASIDATYAKQYEEFYVGLEGSFGSKHVSPRTLTSCFLSCVVCVEGIVTKCSLVRPKVVRSVHYCPATKKTIERRYSDLTTLVAFPSSSVYPTKVWEQVGIGKCFLLGVQIDLD

SEQ ID NO: 817453 - protein, 310 aa, Homo sapiens
RPCSSQFLRQPAGPGWRLLPVGERCRASRSQLLVMSYGPLDMYRNPGPSGPQLRDFSSIIQTCSGNIQRISQATAQIKNLMSQLGTKQDSSKLQENLQQLQHSTNQLAKETNELLKELGSLPLPLSTSEQRQQRLQKERLMNDFSAALNNFQAVQRRVSEKEKESIARARAGSRLSAEERQREEQLVSFDSHEEWNQMQSQEDEVAITEQDLELIKERETAIRQLEADILDVNQIFKDLAMMIHDQGDLIDSIEANVESSEVHVERATEQLQRAAYYQKKSRKKMCILVLVLSVIILILGLIIWLVYKTK

SEQ ID NO: 817454 - protein, 113 aa, Homo sapiens [sequence omitted]

SEQ ID NO: 817455 - protein, 333 aa, Homo sapiens
RPCSSQFLRQPAGPGWRLLPVGERCRASRSQLLVMSYGPLDMYRNPGPSGPQLRDFSSIIQTCSGNIQRISQATAQIKNLMSQLGTKQDSSKLQENLQQLQHSTNQLAKETNELLKELGSLPLPLSTSEQRQQRLQKERLMNDFSAALNNFQAVQRRVSEKEKESIARARAGSRLSAEERQREEQLVSFDSSLLLDMKNVALQDFIDSRGLEPCHEEWNQMQSQEDEVAITEQDLELIKERETAIRQLEADILDVNQIFKDLAMMIHDQGDLIDSIEANVESSEVHVERATEQLQRAAYYQKKSRKKMCILVLVLSVIILILGLIIWLVYKTK

SEQ ID NO: 817456 - protein, 310 aa, Homo sapiens; identical to SEQ ID NO: 817453

SEQ ID NO: 817457 - protein, 310 aa, Homo sapiens; identical to SEQ ID NO: 817453

SEQ ID NO: 817458 - protein, 211 aa, Homo sapiens
RPCSSQFLRQPAGPGWRLLPVGERCRASRSQLLVMSYGPLDMYRNPGPSGPQLRDFSSIIQTCSGNIQRISQATAQIKNLMSQLGTKQDSSKLQENLQQLQHSTNQLAKETNELLKELGSLPLPLSTSEQRQQRLQKERLMNDFSAALNNFQAVQRRVSEKEKESIARARAGSRLSAEERQREEQLVSFDSHEEWNQMQSQEDECLLKIPF

SEQ ID NO: 817459 - protein, 310 aa, Homo sapiens; identical to SEQ ID NO: 817453

SEQ ID NO: 817460 - protein, 310 aa, Homo sapiens; identical to SEQ ID NO: 817453

SEQ ID NO: 817461 - protein, 310 aa, Homo sapiens; identical to SEQ ID NO: 817453

SEQ ID NO: 817462 - protein, 50 aa, Homo sapiens
MNLAWILNGLEFVVVAKEVLLGGLNKPIHRKNKLTAKYSYNPEAQQSKRR

SEQ ID NO: 817463 - protein, 310 aa, Homo sapiens; identical to SEQ ID NO: 817453

SEQ ID NO: 817464 - protein, 310 aa, Homo sapiens; identical to SEQ ID NO: 817453

SEQ ID NO: 817465 - protein, 229 aa, Homo sapiens
  misc_feature (229)..(229): Xaa can be any naturally occurring amino acid
RPCSSQFLRQPAGPGWRLLPVGERCRASRSQLLVMSYGPLDMYRNPGPSGPQLRDFSSIIQTCSGNIQRISQATAQIKNLMSQLGTKQDSSKLQENLQQLQHSTNQLAKETNELLKELGSLPLPLSTSEQRQQRLQKERLMNDFSAALNNFQAVQRRVSEKEKESIARARAGSRLSAEERQREEQLVSFDSHEEWNQMQSQEDEVAITEQDLELIKERETAIRQLEAAX

SEQ ID NO: 817466 - protein, 277 aa, Homo sapiens
RPCSSQFLRQPAGPGWRLLPVGERCRASRSQLLVMSYGPLDMYRNPGPSGPQLRDFSSIIQTCSGNIQRISQATAQIKNLMSQLGTKQDSSKLQENLQQLQHSTNQLAKETNELLKELGSLPLPLSTSEQRQQRLQKERLMNDFSAALNNFQAVQRRVSEKEKESIARARAGSRLSAEERQREEQLVSFDSSLLLDMKNVALQDFIDSRGLEPCHEEWNQMQSQEDEVAITEQDLELIKERETAIRQLEADILDVNQIFKDLAMMIHDQGDLIGMYY

SEQ ID NO: 817467 - protein, 178 aa, Homo sapiens
RPCSSQFLRQPAGPGWRLLPVGERCRASRSQLLVMSYGPLDMYRNPGPSGPQLRDFSSIIQTCSGNIQRISQATAQIKNLMSQLGTKQDSSKLQENLQQLQHSTNQLAKETNELLKELGSLPLPLSTSEQRQQRLQKERLMNDFSAALNNFQAVQRRVSEKEKESIARARAGSRLSVS

SEQ ID NO: 817468 - protein, 284 aa, Homo sapiens
MEAIKKKMQMLKLDKENAIDRAEQAEADKKAAEDKCKQVEEELTHLQKKLKGTEDELDKYSEDLKDAQEKLELTEKKASDAEGDVAALNRRIQLVEEELDRAQERLATALQKLEEAEKAADESERGMKVIENRAMKDEEKMEIQEMQLKEAKHIAEEADRKYEEVARKLVILEGELERAEERAEVSELKCGDLEEELKNVTNNLKSLEAASEKYSEKEDKYEEEIKLLSDKLKEAETRAEFAERTVAKLEKTIDDLEEKLAQAKEENVGLHQTLDQTLNELNCI

SEQ ID NO: 817469 - protein, 248 aa, Homo sapiens
MAGLNSLEAVKRKIQALQQQADEAEDRAQGLQRELDGERERREKAEGDVAALNRRIQLVEEELDRAQERLATALQKLEEAEKAADESERGMKVIENRAMKDEEKMEIQEMQLKEAKHIAEEADRKYEEVARKLVILEGELERAEERAEVSELKCGDLEEELKNVTNNLKSLEAASEKYSEKEDKYEEEIKLLSDKLKEAETRAEFAERTVAKLEKTIDDLEEKLAQAKEENVGLHQTLDQTLNELNCI

SEQ ID NO: 817470 - protein, 248 aa, Homo sapiens; identical to SEQ ID NO: 817469

SEQ ID NO: 817471 - protein, 284 aa, Homo sapiens; identical to SEQ ID NO: 817468

SEQ ID NO: 817472 - protein, 248 aa, Homo sapiens; identical to SEQ ID NO: 817469

SEQ ID NO: 817473 - protein, 248 aa, Homo sapiens; identical to SEQ ID NO: 817469

SEQ ID NO: 817474 - protein, 248 aa, Homo sapiens; identical to SEQ ID NO: 817469

SEQ ID NO: 817475 - protein, 248 aa, Homo sapiens; identical to SEQ ID NO: 817469

SEQ ID NO: 817476 - protein, 248 aa, Homo sapiens; identical to SEQ ID NO: 817469

SEQ ID NO: 817477 - protein, 248 aa, Homo sapiens; identical to SEQ ID NO: 817469

SEQ ID NO: 817478 - protein, 248 aa, Homo sapiens; identical to SEQ ID NO: 817469

SEQ ID NO: 817479 - protein, 248 aa, Homo sapiens; identical to SEQ ID NO: 817469

SEQ ID NO: 817480 - protein, 240 aa, Homo sapiens
MEAIKKKMQMLKLDKENAIDRAEQAEADKKAAEDKCKQVEEELTHLQKKLKGTEDELDKYSEDLKDAQEKLELTEKKASDRGMKVIENRAMKDEEKMEIQEMQLKEAKHIAEEADRKYEEVARKLVILEGELERAEERAEVSELKCGDLEEELKNVTNNLKSLEAASEKYSEKEDKYEEEIKLLSDKLKEAETRAEFAERTVAKLEKTIDDLEEKLAQAKEENVGLHQTLDQTLNELNCI

SEQ ID NO: 817481 - protein, 248 aa, Homo sapiens; identical to SEQ ID NO: 817469

SEQ ID NO: 817482 - protein, 248 aa, Homo sapiens; identical to SEQ ID NO: 817469

SEQ ID NO: 817483 - protein, 248 aa, Homo sapiens; identical to SEQ ID NO: 817469

SEQ ID NO: 817484 - protein, 80 aa, Homo sapiens
LKATEGTDVRHCRYGKGALEEQKRPSRSREGNKQADEDSQGTQNLFTSREIHIPKCGTQAVNVECLGNSHNYPHIVINRW

SEQ ID NO: 817485 - protein, 121 aa, Homo sapiens
MFQKTWGPTKALPTFLTIIQFLSCMDALVKVKIQPPFVALPTLHTFVWFFSTMGSLVGNSIVNLCKILSHILAHLNGFSATVGLAGCFKRHEAHLKLFPHSLQLYGFSPVWTIDAYKDLAY

SEQ ID NO: 817486 - protein, 121 aa, Homo sapiens; identical to SEQ ID NO: 817485

SEQ ID NO: 817487 - protein, 86 aa, Homo sapiens
GFACRSQADRYSTERLDYHSQNCLYPPPGASVYDSTEHLDYTPPNAEGKTLKISFFRGKRCHSEVPTGNESQSHERLPSGECELLS

SEQ ID NO: 817488 - protein, 121 aa, Homo sapiens; identical to SEQ ID NO: 817485

SEQ ID NO: 817489 - protein, 290 aa, Homo sapiens
GAIDAQTTASHKSSTHIKKQMSSYFVNSFCGRYPNGPDYQLHNYGDHSSVSEQFRDSASMHSGRYGYGYNGMDLSVGRSGSGHFGSGERARSYAASASAAPAEPRYSQPATSTHSPQPDPLPCSAVAPSPGSDSHHGGKNSLSNSSGASADAGSTHISSREGVGTASGAEEDAPASSEQASAQSEPSPAPPAQPQIYPWMRKLHISHDNIGGPEGKRARTAYTRYQTLELEKEFHFNRYLTRRRRIEIAHALCLSERQIKIWFQNRRMKWKKDNKLKSMSMAAAGGAFRP

SEQ ID NO: 817490 - protein, 99 aa, Homo sapiens
ALGRAPGSGQPSKAQRDNIGGPEGKRARTAYTRYQTLELEKEFHFNRYLTRRRRIEIAHALCLSERQIKIWFQNRRMKWKKDNKLKSMSMAAAGGAFRP

SEQ ID NO: 817491 - protein, 302 aa, Homo sapiens
RGLWEGGGVNLLGLGEAVWTKQVRSVAMFSEQAAQRAHTLLSPPSANNATFARVPVATYTNSSQPFRLGERSFSRQYAHIYATRLIQMRPFLENRAQQHWGSGVGVKKLCELQPEEKCCVVGTLFKAMPLQPSILREVSEEHNLLPQPPRSKYIHPDDELVLEDELQRIKLKGTIDVSKLVTGTVLAVFGSVRDDGKFLVEDYCFADLAPQKPAPPLDTDRFVLLVSGLGLGGGGGESLLGTQLLVDVVTGQLGDEGEQCSAAHVSRVILAGNLLSQDHDRIFQYGKSPQKPGRNGTGRAGE

SEQ ID NO: 817492 - protein, 106 aa, Homo sapiens
MAAHPNGQQQQGQGLVTMSGGAPIVTLGVSYWPAMGGGAAAPHPVQSASAEAEPSSELPLLLQVVTPSTKLTRSSSQSARMSTFVATPPALAPKSSEVLRTRQCCW

SEQ ID NO: 817493 - protein, 469 aa, Homo sapiens
MFSEQAAQRAHTLLSPPSANNATFARVPVATYTNSSQPFRLGERSFSRQYAHIYATRLIQMRPFLENRAQQHWGSGVGVKKLCELQPEEKCCVVGTLFKAMPLQPSILREVSEEHNLLPQPPRSKYIHPDDELVLEDELQRIKLKGTIDVSKLVTGTVLAVFGSVRDDGKFLVEDYCFADLAPQKPAPPLDTDRFVLLVSGLGLGGGGGESLLGTQLLVDVVTGQLGDEGEQCSAAHVSRVILAGNLLSHSTQSRDSINKAKYLTKKTQAASVEAVKMLDEILLQLSASVPVDVMPGEFDPTNYTLPQQPLHPCMFPLATAYSTLQLVTNPYQATIDGVRFLGTSGQNVSDIFRYSSMEDHLEILEWTLRVRHISPTAPDTLGCYPFYKTDPFIFPECPHVYFCGNTPSFGSKIIRGPEDQTVLLVTVPDFSATQTACLVNLRSLACQPISFSGFGAEDDDLGGLGLGP

SEQ ID NO: 817494 - protein, 507 aa, Homo sapiens
RLGTRPGVNRPRAGCGAPRVNLLGLGEAVWTKQVRSVAMFSEQAAQRAHTLLSPPSANNATFARVPVATYTNSSQPFRLGERSFSRQYAHIYATRLIQMRPFLENRAQQHWGSGVGVKKLCELQPEEKCCVVGTLFKAMPLQPSILREVSEEHNLLPQPPRSKYIHPDDELVLEDELQRIKLKGTIDVSKLVTGTVLAVFGSVRDDGKFLVEDYCFADLAPQKPAPPLDTDRFVLLVSGLGLGGGGGESLLGTQLLVDVVTGQLGDEGEQCSAAHVSRVILAGNLLSHSTQSRDSINKAKYLTKKTQAASVEAVKMLDEILLQLSASVPVDVMPGEFDPTNYTLPQQPLHPCMFPLATAYSTLQLVTNPYQATIDGVRFLGTSGQNVSDIFRYSSMEDHLEILEWTLRVRHISPTAPDTLGCYPFYKTDPFIFPECPHVYFCGNTPSFGSKIIRGPEDQTVLLVTVPDFSATQTACLVNLRSLACQPISFSGFGAEDDDLGGLGLGP

SEQ ID NO: 817495 - protein, 504 aa, Homo sapiens
LIRSAIPVEAGCGAPRVNLLGLGEAVWTKQVRSVAMFSEQAAQRAHTLLSPPSANNATFARVPVATYTNSSQPFRLGERSFSRQYAHIYATRLIQMRPFLENRAQQHWGSGVGVKKLCELQPEEKCCVVGTLFKAMPLQPSILREVSEEHNLLPQPPRSKYIHPDDELVLEDELQRIKLKGTIDVSKLVTGTVLAVFGSVRDDGKFLVEDYCFADLAPQKPAPPLDTDRFVLLVSGLGLGGGGGESLLGTQLLVDVVTGQLGDEGEQCSAAHVSRVILAGNLLSHSTQSRDSINKAKYLTKKTQAASVEAVKMLDEILLQLSASVPVDVMPGEFDPTNYTLPQQPLHPCMFPLATAYSTLQLVTNPYQATIDGVRFLGTSGQNVSDIFRYSSMEDHLEILEWTLRVRHISPTAPDTLGCYPFYKTDPFIFPECPHVYFCGNTPSFGSKIIRGPEDQTVLLVTVPDFSATQTACLVNLRSLACQPISFSGFGAEDDDLGGLGLGP

SEQ ID NO: 817496 - protein, 469 aa, Homo sapiens; identical to SEQ ID NO: 817493

SEQ ID NO: 817497 - protein, 469 aa, Homo sapiens; identical to SEQ ID NO: 817493

SEQ ID NO: 817498 - protein, 469 aa, Homo sapiens; identical to SEQ ID NO: 817493

SEQ ID NO: 817499 - protein, 469 aa, Homo sapiens; identical to SEQ ID NO: 817493

SEQ ID NO: 817500 - protein, 504 aa, Homo sapiens
MGGAGARGLAGCGAPRVNLLGLGEAVWTKQVRSVAMFSEQAAQRAHTLLSPPSANNATFARVPVATYTNSSQPFRLGERSFSRQYAHIYATRLIQMRPFLENRAQQHWGSGVGVKKLCELQPEEKCCVVGTLFKAMPLQPSILREVSEEHNLLPQPPRSKYIHPDDELVLEDELQRIKLKGTIDVSKLVTGTVLAVFGSVRDDGKFLVEDYCFADLAPQKPAPPLDTDRFVLLVSGLGLGGGGGESLLGTQLLVDVVTGQLGDEGEQCSAAHVSRVILAGNLLSHSTQSRDSINKAKYLTKKTQAASVEAVKMLDEILLQLSASVPVDVMPGEFDPTNYTLPQQPLHPCMFPLATAYSTLQLVTNPYQATIDGVRFLGTSGQNVSDIFRYSSMEDHLEILEWTLRVRHISPTAPDTLGCYPFYKTDPFIFPECPHVYFCGNTPSFGSKIIRGPEDQTVLLVTVPDFSATQTACLVNLRSLACQPISFSGFGAEDDDLGGLGLGP

SEQ ID NO: 817501 - protein, 469 aa, Homo sapiens; identical to SEQ ID NO: 817493

SEQ ID NO: 817502 - protein, 471 aa, Homo sapiens
MFSEQAAQRAHTLLSPPSANNATFARVPVATYTNSSQPFRLGERSFSRQYAHIYATRLIQMRPFLENRAQQHWGSGVGVKKLCELQPEEKCCVVGTLFKAMPLQPSILREVSEEHNLLPQPPRSKYIHPDDELVLEDELQRIKLKGTIDVSKLVTGTVLAVFGSVRDDGKFLVEDYCFADLAPQKPAPPLDTDRFVLLVSGLGLGGGGGESLLGTQLLVDVVTGQLGDEGEQCSAAHVSRVILAGNLLSHSTQSRDSINKAKYLTKKTQAASVEAVKMLDEILLQLSASVPVDVMPGEFDPTNYTLPQQPLHPCMFPLATAYSTLQLVTNPYQATIDGVRVRFLGTSGQNVSDIFRYSSMEDHLEILEWTLRVRHISPTAPDTLGCYPFYKTDPFIFPECPHVYFCGNTPSFGSKIIRGPEDQTVLLVTVPDFSATQTACLVNLRSLACQPISFSGFGAEDDDLGGLGLGP

SEQ ID NO: 817503 - protein, 469 aa, Homo sapiens; identical to SEQ ID NO: 817493

SEQ ID NO: 817504 - protein, 496 aa, Homo sapiens
RGLWEGGGVNLLGLGEAVWTKQVRSVAMFSEQAAQRAHTLLSPPSANNATFARVPVATYTNSSQPFRLGERSFSRQYAHIYATRLIQMRPFLENRAQQHWGSGVGVKKLCELQPEEKCCVVGTLFKAMPLQPSILREVSEEHNLLPQPPRSKYIHPDDELVLEDELQRIKLKGTIDVSKLVTGTVLAVFGSVRDDGKFLVEDYCFADLAPQKPAPPLDTDRFVLLVSGLGLGGGGGESLLGTQLLVDVVTGQLGDEGEQCSAAHVSRVILAGNLLSHSTQSRDSINKAKYLTKKTQAASVEAVKMLDEILLQLSASVPVDVMPGEFDPTNYTLPQQPLHPCMFPLATAYSTLQLVTNPYQATIDGVRFLGTSGQNVSDIFRYSSMEDHLEILEWTLRVRHISPTAPDTLGCYPFYKTDPFIFPECPHVYFCGNTPSFGSKIIRGPEDQTVLLVTVPDFSATQTACLVNLRSLACQPISFSGFGAEDDDLGGLGLGP

SEQ ID NO: 817505 - protein, 500 aa, Homo sapiens
GRVGRPTRRAPRVNLLGLGEAVWTKQVRSVAMFSEQAAQRAHTLLSPPSANNATFARVPVATYTNSSQPFRLGERSFSRQYAHIYATRLIQMRPFLENRAQQHWGSGVGVKKLCELQPEEKCCVVGTLFKAMPLQPSILREVSEEHNLLPQPPRSKYIHPDDELVLEDELQRIKLKGTIDVSKLVTGTVLAVFGSVRDDGKFLVEDYCFADLAPQKPAPPLDTDRFVLLVSGLGLGGGGGESLLGTQLLVDVVTGQLGDEGEQCSAAHVSRVILAGNLLSHSTQSRDSINKAKYLTKKTQAASVEAVKMLDEILLQLSASVPVDVMPGEFDPTNYTLPQQPLHPCMFPLATAYSTLQLVTNPYQATIDGVRFLGTSGQNVSDIFRYSSMEDHLEILEWTLRVRHISPTAPDTLGCYPFYKTDPFIFPECPHVYFCGNTPSFGSKIIRGPEDQTVLLVTVPDFSATQTACLVNLRSLACQPISFSGFGAEDDDLGGLGLGP

SEQ ID NO: 817506 - protein, 469 aa, Homo sapiens; identical to SEQ ID NO: 817493

SEQ ID NO: 817507 - protein, 516 aa, Homo sapiens
SLGVPGTGRTVVGGMRRLVTDGARRAAIVNLLGLGEAVWTKQVRSVAMFSEQAAQRAHTLLSPPSANNATFARVPVATYTNSSQPFRLGERSFSRQYAHIYATRLIQMRPFLENRAQQHWGSGVGVKKLCELQPEEKCCVVGTLFKAMPLQPSILREVSEEHNLLPQPPRSKYIHPDDELVLEDELQRIKLKGTIDVSKLVTGTVLAVFGSVRDDGKFLVEDYCFADLAPQKPAPPLDTDRFVLLVSGLGLGGGGGESLLGTQLLVDVVTGQLGDEGEQCSAAHVSRVILAGNLLSHSTQSRDSINKAKYLTKKTQAASVEAVKMLDEILLQLSASVPVDVMPGEFDPTNYTLPQQPLHPCMFPLATAYSTLQLVTNPYQATIDGVRFLGTSGQNVSDIFRYSSMEDHLEILEWTLRVRHISPTAPDTLGCYPFYKTDPFIFPECPHVYFCGNTPSFGSKIIRGPEDQTVLLVTVPDFSATQTACLVNLRSLACQPISFSGFGAEDDDLGGLGLGP

SEQ ID NO: 817508 - protein, 469 aa, Homo sapiens; identical to SEQ ID NO: 817493

SEQ ID NO: 817509 - protein, 521 aa, Homo sapiens
MTATGVRHRYPGTINFQVDTMSGVNYSCSPSFPMNLLGLGEAVWTKQVRSVAMFSEQAAQRAHTLLSPPSANNATFARVPVATYTNSSQPFRLGERSFSRQYAHIYATRLIQMRPFLENRAQQHWGSGVGVKKLCELQPEEKCCVVGTLFKAMPLQPSILREVSEEHNLLPQPPRSKYIHPDDELVLEDELQRIKLKGTIDVSKLVTGTVLAVFGSVRDDGKFLVEDYCFADLAPQKPAPPLDTDRFVLLVSGLGLGGGGGESLLGTQLLVDVVTGQLGDEGEQCSAAHVSRVILAGNLLSHSTQSRDSINKAKYLTKKTQAASVEAVKMLDEILLQLSASVPVDVMPGEFDPTNYTLPQQPLHPCMFPLATAYSTLQLVTNPYQATIDGVRFLGTSGQNVSDIFRYSSMEDHLEILEWTLRVRHISPTAPDTLGCYPFYKTDPFIFPECPHVYFCGNTPSFGSKIIRGPEDQTVLLVTVPDFSATQTACLVNLRSLACQPISFSGFGAEDDDLGGLGLGP

SEQ ID NO: 817510 - protein, 454 aa, Homo sapiens
MFSEQAAQRAHTLLSPPSANNATFARVPVATYTNSSQPFRLGERSFSRQYAHIYATRLIQMRPFLENRAQQHWGSGVGVKKLCELQPEEKCCVVGTLFKAMPLQPSILREVSEEHNLLPQPPRSKYIHPDDELVLEDELQRIKLKGTIDVSKLVTGTVLAVFGSVRDDGKFLVEDYCFADLAPQKPAPPLDTDRFVLLVSGLGLGGGGGESLLGTQLLVDVVTGQLGDEGEQCSAAHVSRVILAGNLLSHSTQSRDSINKAKYLTKKTQAASVEAVKMLDEILLQLSASVPVDVMPGEFDPTNYTLPQQPLHPCMFPLATAYSTLQLVTNPYQATIDGVRFLGTSGQNVSDIFRYSSMEDHLEILEWTLRVRHISPTAPDTLGPHVYFCGNTPSFGSKIIRGPEDQTVLLVTVPDFSATQTACLVNLRSLACQPISFSGFGAEDDDLGGLGLGP

SEQ ID NO: 817511 - protein, 435 aa, Homo sapiens
MFSEQAAQRAHTLLSPPSANNATFARVPVATYTNSSQPFRLGERSFSRQYAHIYATRLIQMRPFLENRAQQHWGSGVGVKKLCELQPEEKCCVVGTLFKAMPLQPSILREVSEEHNLLPQPPRSKYIHPDDELVLEDELQRIKLKGTIDVSKLVTGTVLAVFGSVRDDGKFLVEDYCFADLAPQKPAPPLDTDRFVLLVSGLGLGGGGGESLLGTQLLVDVVTGQLGDEGEQCSAAHVSRVILAGNLLSHSTQSRDSINKAKYLTKKTQAASVEAVKMLDEILLQLSASVPVDVMPGEFDPTNYTLPQQPLHPCMFPLATAYSTLQLVTNPYQATIDGVRFLGTSGQNVSDIFRYSSMEDHLEILEWTLRVRHISPTAPDTLGPEDQTVLLVTVPDFSATQTACLVNLRSLACQPISFSGFGAEDDDLGGLGLGP

SEQ ID NO: 817512 - protein, 448 aa, Homo sapiens
MFSEQAAQRAHTLLSPPSANNATFARVPVATYTNSSQPFRLGERSFSRQYAHIYATRLIQMRPFLENRAQQHWGSGVGVKKLCELQPEEKCCVVGTLFKAMPLQPSILREVSEEHNLLPQPPRSKYIHPDDELVLEDELQRIKLKGTIDVSKLVTGTVLAVFGSVRDDGKFLVEDYCFADLAPQKPAPPLDTDRFVLLVSGLGLGGGGGESLLGTQLLVDVVTGQLGDEGEQCSAAHVSRVILAGNLLSHSTQSRDSINKAKYLTKKTQAASVEAVKMLDEILLQLSQPLHPCMFPLATAYSTLQLVTNPYQATIDGVRFLGTSGQNVSDIFRYSSMEDHLEILEWTLRVRHISPTAPDTLGCYPFYKTDPFIFPECPHVYFCGNTPSFGSKIIRGPEDQTVLLVTVPDFSATQTACLVNLRSLACQPISFSGFGAEDDDLGGLGLGP

SEQ ID NO: 817513 - protein, 428 aa, Homo sapiens
MFSEQAAQRAHTLLSPPSANNATFARVPVATYTNSSQPFRLGERSFSRQYAHIYATRLIQMRPFLENRAQQHWGSGVGVKKLCELQPEEKCCVVGTLFKAMPLQPSILREVSEEHNLLPQPPRSKYIHPDDELVLEDELQRIKLKGTIDVSKLVTGTVLAVFGSVRDDGKFLVEDYCFADLAPQKPAPPLDTDRFVLLVSGLGLGGGGGESLLGTQLLVDVVTGQLGDEGEQCSAAHVSRVILAGNLLSHSTQSRDSINKAKYLTKKTQAASVEAVKMLDEILLQLSASVPVDVMPGEFDPTNYTLPQQPLHPCMFPLATAYSTLQLVTNPYQATIDGVRFLGTSGQNVSDIFRYSSPHVYFCGNTPSFGSKIIRGPEDQTVLLVTVPDFSATQTACLVNLRSLACQPISFSGFGAEDDDLGGLGLGP

SEQ ID NO: 817514 - protein, 396 aa, Homo sapiens
MFSEQAAQRAHTLLSPPSANNATFARVPVATYTNSSQPFRLGERSFSRQYAHIYATRLIQMRPFLENRAQQHWGSGVGVKKLCELQPEEKCCVVGTLFKAMPLQPSILREVSEEHNLLPQPPRSKYIHPDDELVLEDELQRIKLKGTIDVSKLVTGTVLAVFGSVRDDGKFLVEDYCFADLAPQKPAPPLDTDRFVLLVSGLGLGGGGGESLLGTQLLVDVVTGQLGDEGEQCSAAHVSRVILAGNLLSHSTQSRDSINKAKYLTKKTQAASVEAVKMLDEILLQLSASVPVDVMPGEFDPTNYTLPQQPLHPCMFPLATAYSTLQLVTNPYQATIDGVSMVGPIGASATGEFERGGHWTGGLGDNKRTGGLKSGQAGLGPVATGERGRREKGHGE

SEQ ID NO: 817515 - protein, 559 aa, Homo sapiens
MTARLRLKTKTKTETTITEKHRHLLSGSSGGQKLKSRCQQDWLLLKARGEGPSWPPPWCSWACGRITPLCPSSHSLLSVCLSLCSHEDTWHPGPNHTQSPWSPVADSLFTVTVKSRGSLYLMFSPGKGQGPVIGLSWSAGQGLHGLCRAGGLLHLCVCTPRVPGSGVGVKKLCELQPEEKCCVVGTLFKAMPLQPSILREVSEEHNLLPQPPRSKYIHPDDELVLEDELQRIKLKGTIDVSKLVTGTVLAVFGSVRDDGKFLVEDYCFADLAPQKPAPPLDTDRFVLLVSGLGLGGGGGESLLGTQLLVDVVTGQLGDEGEQCSAAHVSRVILAGNLLSHSTQSRDSINKAKYLTKKTQAASVEAVKMLDEILLQLSASVPVDVMPGEFDPTNYTLPQQPLHPCMFPLATAYSTLQLVTNPYQATIDGVRFLGTSGQNVSDIFRYSSMEDHLEILEWTLRVRHISPTAPDTLGCYPFYKTDPFIFPECPHVYFCGNTPSFGSKIIRGPEDQTVLLVTVPDFSATQTACLVNLRSLACQPISFSGFGAEDDDLGGLGLGP

SEQ ID NO: 817516 - protein, 363 aa, Homo sapiens
IPPVSAFQHNLLPQPPRSKYIHPDDELVLEDELQRIKLKGTIDVSKLVTGTVLAVFGSVRDDGKFLVEDYCFADLAPQKPAPPLDTDRFVLLVSGLGLGGGGGESLLGTQLLVDVVTGQLGDEGEQCSAAHVSRVILAGNLLSHSTQSRDSINKAKYLTKKTQAASVEAVKMLDEILLQLSASVPVDVMPGEFDPTNYTLPQQPLHPCMFPLATAYSTLQLVTNPYQATIDGVRFLGTSGQNVSDIFRYSSMEDHLEILEWTLRVRHISPTAPDTLGCYPFYKTDPFIFPECPHVYFCGNTPSFGSKIIRGPEDQTVLLVTVPDFSATQTACLVNLRSLACQPISFSGFGAEDDDLGGLGLGP

SEQ ID NO: 817517 - protein, 287 aa, Homo sapiens
MFSEQAAQRAHTLLSPPSANNATFARVPVATYTNSSQPFRLGERSFSRQYAHIYATRLIQMRPFLENRAQQHWGSGVGVKKLCELQPEEKCCVVGTLFKAMPLQPSILREVSEEHNLLPQPPRSKYIHPDDELVLEDELQRIKLKGTIDVSKLVTGTVLAVFGSVRDDGKFLVEDYCFADLAPQKPAPPLDTDRFVLLVSGLGLGGGGGESLLGTQLLVDVVTGQLGDEGEQCSAAHVSRVILAGNLLSHSTQSRDSINKAKYLTKKTQAALAPKSSEVLRTRQCCW

SEQ ID NO: 817518 - protein, 364 aa, Homo sapiens
VTADFLRVNRRSASWPRLLWAIHPDDELVLEDELQRIKLKGTIDVSKLVTGTVLAVFGSVRDDGKFLVEDYCFADLAPQKPAPPLDTDRFVLLVSGLGLGGGGGESLLGTQLLVDVVTGQLGDEGEQCSAAHVSRVILAGNLLSHSTQSRDSINKAKYLTKKTQAASVEAVKMLDEILLQLSASVPVDVMPGEFDPTNYTLPQQPLHPCMFPLATAYSTLQLVTNPYQATIDGVRFLGTSGQNVSDIFRYSSMEDHLEILEWTLRVRHISPTAPDTLGCYPFYKTDPFIFPECPHVYFCGNTPSFGSKIIRGPEDQTVLLVTVPDFSATQTACLVNLRSLACQPISFSGFGAEDDDLGGLGLGP

SEQ ID NO: 817519 - protein, 516 aa, Homo sapiens
MGGAGARGLAGCGAPRVNLLGLGEAVWTKQVRSVAMFSEQAAQRAHTLLSPPSANNATFARVPVATYTNSSQPFRLGERSFSRQYAHIYATRLIQMRPFLENRAQQHWGSGVGVKKLCELQPEEKCCVVGTLFKAMPLQPSILREVSEEHNLLPQPPRSKYIHPDDELVLEDELQRIKLKGTIDVSKLVTGREPNEKDVGDAGTVLAVFGSVRDDGKFLVEDYCFADLAPQKPAPPLDTDRFVLLVSGLGLGGGGGESLLGTQLLVDVVTGQLGDEGEQCSAAHVSRVILAGNLLSHSTQSRDSINKAKYLTKKTQAASVEAVKMLDEILLQLSASVPVDVMPGEFDPTNYTLPQQPLHPCMFPLATAYSTLQLVTNPYQATIDGVRFLGTSGQNVSDIFRYSSMEDHLEILEWTLRVRHISPTAPDTLGCYPFYKTDPFIFPECPHVYFCGNTPSFGSKIIRGPEDQTVLLVTVPDFSATQTACLVNLRSLACQPISFSGFGAEDDDLGGLGLGP

SEQ ID NO: 817520 - protein, 571 aa, Homo sapiens
MTARLRLKTKTKTETTITEKHRHLLSGSSGGQKLKSRCQQDWLLLKARGEGPSWPPPWCSWACGRITPLCPSSHSLLSVCLSLCSHEDTWHPGPNHTQSPWSPVADSLFTVTVKSRGSLYLMFSPGKGQGPVIGLSWSAGQGLHGLCRAGGLLHLCVCTPRVPGSGVGVKKLCELQPEEKCCVVGTLFKAMPLQPSILREVSEEHNLLPQPPRSKYIHPDDELVLEDELQRIKLKGTIDVSKLVTGREPNEKDVGDAGTVLAVFGSVRDDGKFLVEDYCFADLAPQKPAPPLDTDRFVLLVSGLGLGGGGGESLLGTQLLVDVVTGQLGDEGEQCSAAHVSRVILAGNLLSHSTQSRDSINKAKYLTKKTQAASVEAVKMLDEILLQLSASVPVDVMPGEFDPTNYTLPQQPLHPCMFPLATAYSTLQLVTNPYQATIDGVRFLGTSGQNVSDIFRYSSMEDHLEILEWTLRVRHISPTAPDTLGCYPFYKTDPFIFPECPHVYFCGNTPSFGSKIIRGPEDQTVLLVTVPDFSATQTACLVNLRSLACQPISFSGFGAEDDDLGGLGLGP

SEQ ID NO: 817521 - protein, 307 aa, Homo sapiens
MFSEQAAQRAHTLLSPPSANNATFARVPVATYTNSSQPFRLGERSFSRQYAHIYATRLIQMRPFLENRAQQHWGSGVGVKKLCELQPEEKCCVVGTLFKAMPLQPSILREVSEEHNLLPQPPRSKYIHPDDELVLEDELQRIKLKGTIDVSKLVTGTVLAVFGSVRDDGKFLVEDYCFADLAPQKPAPPLDTDRFVLLVSGLGLGGGGGESLLGTQLLVDVVTGQLGDEGEQCSAAHVSRVILAGNLLSHSTQSRDSINKQIPHKKPSSRVEVKMRMNPRGEAPVPGRMPRVGPIKSQRPPGVPGPE

SEQ ID NO: 817522 - protein, 192 aa, Homo sapiens [sequence omitted]

SEQ ID NO: 817523 - protein, 273 aa, Homo sapiens
THASDPRVAHASGESLLGTQLLVDVVTGQLGDEGEQCSAAHVSRVILAGNLLSHSTQSRDSINKAKYLTKKTQAASVEAVKMLDEILLQLSASVPVDVMPGEFDPTNYTLPQQPLHPCMFPLATAYSTLQLVTNPYQATIDGVRFLGTSGQNVSDIFRYSSMEDHLEILEWTLRVRHISPTAPDTLGCYPFYKTDPFIFPECPHVYFCGNTPSFGSKIIRGPEDQTVLLVTVPDFSATQTACLVNLRSLACQPISFSGFGAEDDDLGGLGLGP

SEQ ID NO: 817524 - protein, 346 aa, Homo sapiens
MFSEQAAQRAHTLLSPPSANNATFARVPVATYTNSSQPFRLGERSFSRQYAHIYATRLIQMRPFLENRAQQHWGSGVGVKKLCELQPEEKCCVVGTLFKAMPLQPSILREVSEEHNLLPQPPRSKYIHPDDELVLEDELQRIKLKGTIDVSKLVTGTVLAVFGSVRDDGKFLVEDYCFADLAPQKPAPPLDTDRLATAYSTLQLVTNPYQATIDGVRFLGTSGQNVSDIFRYSSMEDHLEILEWTLRVRHISPTAPDTLGCYPFYKTDPFIFPECPHVYFCGNTPSFGSKIIRGPEDQTVLLVTVPDFSATQTACLVNLRSLACQPISFSGFGAEDDDLGGLGLGP

SEQ ID NO: 817525 - protein, 171 aa, Homo sapiens
MLDEILLQLSQPLHPCMFPLATAYSTLQLVTNPYQATIDGVRFLGTSGQNVSDIFRYSSMEDHLEILEWTLRVRHISPTAPDTLGCYPFYKTDPFIFPECPHVYFCGNTPSFGSKIIRGPEDQTVLLVTVPDFSATQTACLVNLRSLACQPISFSGFGAEDDDLGGLGLGP

SEQ ID NO: 817526 - protein, 241 aa, Homo sapiens
MGQQLHLPAGGALLSSEPGTRLGLMASGLLFQAKYLTKKTQAASVEAVKMLDEILLQLSASVPVDVMPGEFDPTNYTLPQQPLHPCMFPLATAYSTLQLVTNPYQATIDGVRFLGTSGQNVSDIFRYSSMEDHLEILEWTLRVRHISPTAPDTLGCYPFYKTDPFIFPECPHVYFCGNTPSFGSKIIRGPEDQTVLLVTVPDFSATQTACLVNLRSLACQPISFSGFGAEDDDLGGLGLGP

SEQ ID NO: 817527 - protein, 296 aa, Homo sapiens
DAWAGQLGDEGEQCSAVTTSTSSWVPSRLSPPPPPGPGRTQLLVDVVTGQLGDEGEQCSAAHVSRVILAGNLLSHSTQSRDSINKAKYLTKKTQAASVEAVKMLDEILLQLSASVPVDVMPGEFDPTNYTLPQQPLHPCMFPLATAYSTLQLVTNPYQATIDGVRVRFLGTSGQNVSDIFRYSSMEDHLEILEWTLRVRHISPTAPDTLGCYPFYKTDPFIFPECPHVYFCGNTPSFGSKIIRGPEDQTVLLVTVPDFSATQTACLVNLRSLACQPISFSGFGAEDDDLGGLGLGP

SEQ ID NO: 817528 - protein, 165 aa, Homo sapiens
MFSEQAAQRAHTLLSPPSANNATFARVPVATYTKVRFLGTSGQNVSDIFRYSSMEDHLEILEWTLRVRHISPTAPDTLGCYPFYKTDPFIFPECPHVYFCGNTPSFGSKIIRGPEDQTVLLVTVPDFSATQTACLVNLRSLACQPISFSGFGAEDDDLGGLGLGP

SEQ ID NO: 817529 - protein, 194 aa, Homo sapiens
MFSEQAAQRAHTLLSPPSANNATFARVPVATYTNSSQPFRLGERSFSRQYAHIYATRLIQMRPFLENRAQQHWGSGVGVKKLCELQPEEKCCVVGTLFKAMPLQPSILREVSEEHNLLPQPPRSKYIHPDDELVLEDELQRIKLKGTIDVSKLVTGTVLAVFGSVRDDGKFLVEDYCFADLAPQKPAPPLDTDR

SEQ ID NO: 817530 - protein, 210 aa, Homo sapiens
MGGAGARGLAGCGAPRVNLLGLGEAVWTKQVRSVAMFSEQAAQRAHTLLSPPSANNATFARVPVATYTNSSQPFRLGERSFSRQYAHIYATRLIQMRPFLENRAQQHWGSGVGVKKLCELQPEEKCCVVGTLFKAMPLQPSILREVSEEHNLLPQPPRSKYIHPDDELVLEDELQRIKLKGTIDVSKLVTGREPNERMWVMQVKSPAVVC

SEQ ID NO: 817531 - protein, 160 aa, Homo sapiens
MGGAGARGLAGCGAPRVNLLGLGEAVWTKQVRSVAMFSEQAAQRAHTLLSPPSANNATFARVPVATYTNSSQPFRLGERSFSRQYAHIYATRLIQMRPFLENRAQQHWGSGVGVKKLCELQPEEKCCVVGTLFKAMPLQPSILREVSEEHNLLPQPPRSK

SEQ ID NO: 817532 - protein, 185 aa, Homo sapiens
SGSCGDGRGRRAGIGGMRRAAREPPWPGRSCVDQASQQPLHPCMFPLATAYSTLQLVTNPYQATIDGVRVRFLGTSGQNVSDIFRYSSMEDHLEILEWTLRVRHISPTAPDTLGPHVYFCGNTPSFGSKIIRGPEDQTVLLVTVPDFSATQTACLVNLRSLACQPISFSGFGAEDDDLGGLGLGP

SEQ ID NO: 817533 - protein, 150 aa, Homo sapiens
  misc_feature (119)..(119): Xaa can be any naturally occurring amino acid
  misc_feature (122)..(122): Xaa can be any naturally occurring amino acid
  misc_feature (125)..(125): Xaa can be any naturally occurring amino acid
  misc_feature (132)..(132): Xaa can be any naturally occurring amino acid
  misc_feature (138)..(138): Xaa can be any naturally occurring amino acid
  misc_feature (143)..(143): Xaa can be any naturally occurring amino acid
MFSEEDRKSLLEQCHLGLDQKRRKYVVGELIWNFADFMTNQWLVNYQISVKCIPNLLFHQLKHYSIVKNMIQQYNRAEDSICLADSKPLPHQNVTNHVGKAVEELHEGHIGVLLNLTNXNEXGQXQNQESRXGLIGTXPELVXFQGSKVL

SEQ ID NO: 817534 - protein, 370 aa, Homo sapiens
MLPRRLLAAWLAGTRGGGLLALLANQCRFVTGLRVRRAQQIAQLYGRLYSESSRRVLLGRLWRRLHGRPGHASALMAALAGVFVWDEERIQEEELQRSINEMKRLEEMSNMFQSSGVQHHPPEPKAQTEGNEDSEGKEQRWEMVMDKKHFKLWRRPITGTHLYQYRVFGTYTDVTPRQFFNVQLDTEYRKKWDALVIKLEVIERDVVSGSEVLHWVTHFPYPMYSRDYVYVRRYSVDQENNMMVLVSRAVEHPSVPESPEFVRVRSYESQMVIRPHKSFDENGFDYLLTYSDNPQTVFPRYCVSWMVSSGMPDFLEKLHMATLKAKNMEIKVKDYISAKPLEMSSEAKATSQSSERKNEGSCGPARIEYA

SEQ ID NO: 817535 - protein, 147 aa, Homo sapiens
MLPRRLLAAWLAGTRGGGLLALLANQCRFVTGLRVRRAQQIAQLYGRLYSESSRRVLLGRLWRRLHGRPGHASALMAALAGVFVWDEERIQEEELQRSITADDPRAQNFNYVPAALESSTNPPEPPPNPKGTDHPQAPPARPRPADA

SEQ ID NO: 817536 - protein, 370 aa, Homo sapiens; identical to SEQ ID NO: 817534

SEQ ID NO: 817537 - protein, 365 aa, Homo sapiens
MLPRRLLAAWLAGTRGGGLLALLANQCRFVTGLRVRRAQQIAQLYGRLYSESSRRVLLGRLWRRLHGRPGHASALMAALAGVFVWDEERIQEEELQRSINEMKRLEEMSNMFQSSGVQHHPPEPKAQTEGNEDSEGKEQRWEMVMDKKHFKLWRRPITGTHLYQYRVFGTYTDVTPRQFFNVQLDTEYRKKWDALVIKLEVCVMQNTNPAPPFLQYPMYSRDYVYVRRYSVDQENNMMVLVSRAVEHPSVPESPEFVRVRSYESQMVIRPHKSFDENGFDYLLTYSDNPQTVFPRYCVSWMVSSGMPDFLEKLHMATLKAKNMEIKVKDYISAKPLEMSSEAKATSQSSERKNEGSCGPARIEYA

SEQ ID NO: 817538 - protein, 370 aa, Homo sapiens; identical to SEQ ID NO: 817534

SEQ ID NO: 817539 - protein, 357 aa, Homo sapiens
MLPRRLLALLANQCRFVTGLRVRRAQQIAQLYGRLYSESSRRVLLGRLWRRLHGRPGHASALMAALAGVFVWDEERIQEEELQRSINEMKRLEEMSNMFQSSGVQHHPPEPKAQTEGNEDSEGKEQRWEMVMDKKHFKLWRRPITGTHLYQYRVFGTYTDVTPRQFFNVQLDTEYRKKWDALVIKLEVIERDVVSGSEVLHWVTHFPYPMYSRDYVYVRRYSVDQENNMMVLVSRAVEHPSVPESPEFVRVRSYESQMVIRPHKSFDENGFDYLLTYSDNPQTVFPRYCVSWMVSSGMPDFLEKLHMATLKAKNMEIKVKDYISAKPLEMSSEAKATSQSSERKNEGSCGPARIEYA

SEQ ID NO: 817540 - protein, 370 aa, Homo sapiens; identical to SEQ ID NO: 817534

SEQ ID NO: 817541 - protein, 370 aa, Homo sapiens; identical to SEQ ID NO: 817534

SEQ ID NO: 817542 - protein, 370 aa, Homo sapiens; identical to SEQ ID NO: 817534

SEQ ID NO: 817543 - protein, 264 aa, Homo sapiens
MKRLEEMSNMFQSSGVQHHPPEPKAQTEGNEDSEGKEQRWEMVMDKKHFKLWRRPITGTHLYQYRVFGTYTDVTPRQFFNVQLDTEYRKKWDALVIKLEVCVMQNTNPAPPFLQYPMYSRDYVYVRRYSVDQENNMMVLVSRAVEHPSVPESPEFVRVRSYESQMVIRPHKSFDENGFDYLLTYSDNPQTVFPRYCVSWMVSSGMPDFLEKLHMATLKAKNMEIKVKDYISAKPLEMSSEAKATSQSSERKNEGSCGPARIEYA

SEQ ID NO: 817544 - protein, 209 aa, Homo sapiens
MSQYRVFGTYTDVTPRQFFNVQLDTEYRKKWDALVIKLEVIERDVVSGSEVLHWVTHFPYPMYSRDYVYVRRYSVDQENNMMVLVSRAVEHPSVPESPEFVRVRSYESQMVIRPHKSFDENGFDYLLTYSDNPQTVFPRYCVSWMVSSGMPDFLEKLHMATLKAKNMEIKVKDYISAKPLEMSSEAKATSQSSERKNEGSCGPARIEYA

SEQ ID NO: 817545 - protein, 166 aa, Homo sapiens
TAVLPVQDNSITDVPFYPMYSRDYVYVRRYSVDQENNMMVLVSRAVEHPSVPESPEFVRVRSYESQMVIRPHKSFDENGFDYLLTYSDNPQTVFPRYCVSWMVSSGMPDFLEKLHMATLKAKNMEIKVKDYISAKPLEMSSEAKATSQSSERKNEGSCGPARIEYA

SEQ ID NO: 817546 - protein, 370 aa, Homo sapiens; identical to SEQ ID NO: 817534

SEQ ID NO: 817547 - protein, 183 aa, Homo sapiens
MTPDKVTVAYNRDCCDRSLPVGVNLTSALVQLITTSSIIAGVVRSVHSVDQENNMMVLVSRAVEHPSVPESPEFVRVRSYESQMVIRPHKSFDENGFDYLLTYSDNPQTVFPRYCVSWMVSSGMPDFLEKLHMATLKAKNMEIKVKDYISAKPLEMSSEAKATSQSSERKNEGSCGPARIEYA

SEQ ID NO: 817548 - protein, 80 aa, Homo sapiens
STLEDTTARRPCVSWMVASGMPDFLEKLHMATLKAKNMEIKVKDYISAKPLEMSSEAKATSQSSERKNEGSCGPARIEYA

SEQ ID NO: 817549 - protein, 177 aa, Homo sapiens [sequence omitted]

SEQ ID NO: 817550 - protein, 102 aa, Homo sapiens
MLPRRLLAAWLAGTRGGGLLALLANQCRFVTGLRVRRAQQIAQLYGRLYSESSRRVLLGRLWRRLHGRPGHASALMAALAGVFVWDEERIQEEELQRRSIMR

SEQ ID NO: 817551 - protein, 113 aa, Homo sapiens
MLPRRLLAAWLAGTRGGGLLALLANQCRFVTGLRVRRAQQIAQLYGRLYSESSRRVLLGRLWRRLHGRPGHASALMAALAGVFVWDEERIQEEELQRVGAAASSFWAVGWGGL

SEQ ID NO: 817552 - protein, 147 aa, Homo sapiens; identical to SEQ ID NO: 817535

SEQ ID NO: 817553 - protein, 333 aa, Homo sapiens
SGAAAAGRTAPAHLGGRAGEARCASRVRGTMSDAGGGKKPPVDPQAGPGPGPGRAAGERGLSGSFPLVLKKLMENPPREARLDKEKGKEKLEEDEAAAASTMAVSASLMPPIWDKTIPYDGESFHLEYMDLDEFLLENGIPASPTHLAHNLLLPVAELEGKESASSSTASPPSSSTAIFQPSETVSSTESSLEKERETPSPIDPNCVEVDVNFNPDPADLVLSSVPGGELFNPRKHKFAEEDLKPQPMIKKAKKVFVPDEQKDEKYWTRRKKNNVAAKRSRDARRLKENQITIRAAFLEKENTALRTEVAELRKEVGKCKTIVSKYETKYGPL

SEQ ID NO: 817554 - protein, 333 aa, Homo sapiens; identical to SEQ ID NO: 817553

SEQ ID NO: 817555 - protein, 157 aa, Homo sapiens
MGENPSETVSSTESSLEKERETPSPIDPNCVEVDVNFNPDPADLVLSSVPGGELFNPRKHKFAEEDLKPQPMIKKAKKVFVPDEQKDEKYWTRRKKNNVAAKRSRDARRLKENQITIRAAFLEKENTALRTEVAELRKEVGKCKTIVSKYETKYGPL

SEQ ID NO: 817556 - protein, 90 aa, Homo sapiens
KKNTKQNIRLGRGRGLIGGDEKYWTRRKKNNVAAKRSRDARRLKENQITIRAAFLEKENTALRTEVAELRKEVGKCKTIVSKYETKYGPL

SEQ ID NO: 817557 - protein, 333 aa, Homo sapiens; identical to SEQ ID NO: 817553

SEQ ID NO: 817558 - protein, 3027 aa, Homo sapiens
  misc_feature (1094)..(1094): Xaa can be any naturally occurring amino acid
MNLHQVLTGAVNPGDHCFSVGSIGDQRFTAYASGCDIVILGSDFERLQIIPGAKHGNIQVGCVDCSMQQGKIAASYGNVISIFEPVNLPKQKKNLELYSQWQKSGQFFLESIAHNITWDPTGSRLLTGSSYLQLWSNTNLEKPTEDENLNKTDLNFGDWKCIWHCKTASQVHLMKFSPDGEFFATAGKDDCLLKVWYNVENWRTAVTSPDGSSEKQSQGEIDFSFVYLAHPRAVNGFSWRKTSKYMPRASVCNVLLTCCKDNVCRLWVETFLPNDCLLYGGDCSHWTESINLTNNFKRNASSKERVQNALEVNLRHFRRGRRRSLALVAHTGYLPHQQDPHHVHRNTPLHANALCHFHIAASINPATDIPLLPSITSLSLNENEEKTGPFVVHWLNNKELHFTLSMEVFLQQLRKSFEQPSSEASVEDSNQADVKSDEETDDGVDDLKINPEKKELGCDKMVPNSSFTSLSSAAIDHQIEVLLSEWSKNADMLFSIHPMDGSLLVWHVDWLDEYQPGMFRQVQVSFVSRIPVAFPTGDANSLCKSIMMYACTKNVDLAIQQGKQKPSGLTRSTSMLISSGHNKSSNSLKLSIFTPNVMMISKHADGSLNQWLVSFAEESAFSTVLSISHKSRYCGHRFHLNDLACHSVLPLLLTTSHHNALRTPDVDNPEQPFDALNIEECSLTQQNKSTVDVAFQDPSAVYSELILWRVDPVGPLSFSGGVSELARINSLHVSAFSNVAWLPTLIPSYCLGAYCNSPSACFVASDGQYLRLYEAVIDAKKLLSELSNPEISKYVGEVFNIVSQQSTARPGCIIALDPITKLHGRKTQLLHVFEEDFILNNLEKKSLGKDSILSNAGSSPNGFSEKFYLIVIECTQDNRSLLHMWNLHLKSIPVSLDEKVDTKLSEAVWQPEEHYSSSPEKILSPFSQKYQACRANLQSTSRLTLFSEMVYSQELHLPEGVEIISIKPSAGHLSSSSIYPACSAPYLLATSCSDEKVRFWRCRVTDGESATSKNGKIDLAYIWEEWPLLIEDGLQSNSSITVPGRPVEVSCAHTNRLAVAYKQPASNSRSSQDFVMHVSIFECESTGGSCWVLXQTIHLDELSTVLDSGISVDSNLVAYNKQDMYLSSKENITSNTKHLVHLDWMSREDGSHILTVGIGSKLFMYGPLAGKVQDQTGKETLAFPLWESTKVVPLSKFVLLRSVDLVSSVDGSPPFPVSLSWVRDGILVVGMDCEMHVYCQWQPSSKQEPVITDSYSGSTPSITSLIKQSNSSSGLHPPKKTLTRSMTSLAQKICGKKTAFDPSVDMEDSGLFEAAHVLSPTLPQYHPLQLLELMDLGKVRRAKAILSHLVKCIAGEVVALNEAESNHERRLRSLTISASGSTTRDPQAFNKAENTDYTEIDSVPPLPLYALLAADDDSCYSSLEKSSNESTLSKSNQLSKESYDELFQTQLLMTDTHMLETDEENTKPRVIDLSQYSPTYFGPEHAQVLSGHLLHSSLPGLSRMEQMSLMALADTIATTSTDIGESRDRSQGGETLDECGLKFLLAVRLHTFLTTSLPAYRAQLLHQGLSTSHFAWAFHSVAEEELLNMLPAMQKDDPTWSELRAMGVGWWVRNTRILRKCIEKVAKAAFYRKNDPLDAAIFYLAMKKKAVIWGLYRAEKNTRMTQFFGHNFEDERWRKAALKNAFSLLGKQRFEHSAAFFLLAGCLRDAIEVCLEKLNDIQLALVIARLYESEFDTSAAYKSILRKKVLGIDSPVSELCSLNINMHHDPFLRSMAYWILEDYSGALETLIKQPIRENDDQVLSASNPTVFNFYNYLRTHPLLLRRHFGSSDTFSTHMSLTGKSGLAGTINLSERRLFFTTASAHLKAGCPMLALEVLSKMPKVIKKTRPFYRASSFLDTSKDCSPSSPLKLDAREDKSSAVDWSQSLINGFGSSSEGSSEKQSNSTLSFDWSQPSVVFQDDSLELKWDSDNDEENEDVPISMKELKPLQRKTDKKLDDISSNYTESFSTLDENDLLNPSEDIIAVQLKFRACLKILTVELRTLSTGYEIDGGKLRYQLYHWLEKEVIALQRTCDFCSDAEELQSAFGRNEDEFGLNEDAEDLPHQTKVKQLRENFQEKRQWLLKYQSLLRMFLSYCILHGSHGGGLASVRMELILLLQESQQETSEPLFSSLLSEQTSVPLLFACTANAKTVVANPLLHLSNLTHDILHAIINFDSPPHPDIQSNKVYVMHTLAASLSACIYQCLCGSHNYSSFQTNQFTGMVYQTVLLPHRPSLKTGSLDEALTPNTSPAQWPGITCLIRLLNSSGEEAQSGLTVLLCEILTAVYLSLFIHGLATHSSNELFRIVAHPLNEKMWSAVFGGGAHVPSKEQTHSKTLPVSSLVEEGEKQNKRFRPSKMSCRESAPLTPSSAPVSQESLAVKEKFIPPELSIWDYFIAKPFLPSSQSRAEYDSEESLGSDDDDNDDDDDVLASDFHLQEHSNSNSYSWSLMRLAMVQLVLNNLKTFYPFAGHDLAELPVSSPLCHAVLKTLQCWEQVLLRRLEIHGGPPQNYIASHTAEESLSAGPAILRHKALLEPTNTPFKSKHHLALSVKRLWQYLVKQEEIQETFIKNIFTKKRCLNEIEADLGYPGGKARIIHKESDIITAFAVNKANRNCIAIASSHDVQELDVSGILATQVYTWVDDDIEVETKGSEDFLVIHARDDLTAVQGTTPYTHSNPGTPINMPWLGSTQTGRGASVMIKKAINNVRRMTSHPTLPYYLTGAQDGSVRMFEWGHSQQITCFRSGGNSRVTRMRFNYQGNKFGIVDADGYLSLYQTNWKCCPVTGSMPKPYLTWQCHNKTANDFVFVSSSSLIATAGLSTDNRNVCLWDTLVAPANSLVHAFTCHDSGATVLAYAPKHQLLISGGRKGFTYVFDLCQRQQRQLFQSHDSPVKAVAVDPTEEYFVTGSAEGNIKIWSLSTFGLLHTFVSEHARQSIFRNIGTGVMQIETGPANHIFSCGADGTMKMRILPDQFSPLNEVLKNDVKFML

SEQ ID NO: 817559 - protein, 3027 aa, Homo sapiens; identical to SEQ ID NO: 817558
  misc_feature (1094)..(1094): Xaa can be any naturally occurring amino acid

SEQ ID NO: 817560 - protein, 345 aa, Homo sapiens
MNLHQVLTGAVNPGDHCFSVGSIGDQRFTAYASGCDIVILGSDFERLQIIPGAKHGNIQVGCVDCSMQQGKIAASYGNVISIFEPVNLPKQKKNLELYSQWQKSGQFFLESIAHNITWDPTGSRLLTGSSYLQLWSNTNLEKPTEDENLNKTDLNFGDWKCIWHCKTASQVHLMKFSPDGEFFATAGKDDCLLKVWYNVENWRTAVTSPDGSSEKQSQGEIDFSFVYLAHPRAVNGFSWRKTSNHDSPVKAVAVDPTEEYFVTGSAEGNIKIWSLSTFGLLHTFVSEHARQSIFRNIGTGVMQIETGPANHIFSCGADGTMKMRILPDQFSPLNEVLKNDVKFML

SEQ ID NO: 817561 - protein, 196 aa, Homo sapiens
MATSVLCCLRCCRDGGTGHIPLKEMPAVQLDTQHMGTDVVIVKNGRRICGTGGCLASAPLHQNKSYFEFKIQSTGIWGIGVATQKVNLNQIPLGRDMHSLVMRNDGALYHNNEEKNRLPANSLPQEGDVVGITYDHVELNVYLNGKNMHCPASGIRGTVYPVVYVDDSAILDCQFSEFYHTPPPGFEKILFEQQIF

SEQ ID NO: 817562 - protein, 196 aa, Homo sapiens; identical to SEQ ID NO: 817561

SEQ ID NO: 817563 - protein, 196 aa, Homo sapiens; identical to SEQ ID NO: 817561

SEQ ID NO: 817564 - protein, 196 aa, Homo sapiens; identical to SEQ ID NO: 817561

SEQ ID NO: 817565 - protein, 157 aa, Homo sapiens
MATSVLCCLRCCRDGGTGHIPLKEMPAVQLDTQHMGIWGIGVATQKVNLNQIPLGRDMHSLVMRNDGALYHNNEEKNRLPANSLPQEGDVVGITYDHVELNVYLNGKNMHCPASGIRGTVYPVVYVDDSAILDCQFSEFYHTPPPGFEKILFEQQIF

SEQ ID NO: 817566 - protein, 196 aa, Homo sapiens; identical to SEQ ID NO: 817561

SEQ ID NO: 817567 - protein, 157 aa, Homo sapiens; identical to SEQ ID NO: 817565

SEQ ID NO: 817568 - protein, 167 aa, Homo sapiens
MATSVLCCLRCCRDGGTGHIPLKEMPAVQLDTQHMGTDVVIVKNGRRICGTGGCLASAPLHQNKSYFEFKIQSTGIWGIGVATQKVNLNQIPLGRDMHSLVMRNDGALYHNNEEKNRLPANSLPQEGDVVLMTVQFWIASSVSFIIRLHLVLKKYYLNSKSSECICF

SEQ ID NO: 817569 - protein, 196 aa, Homo sapiens; identical to SEQ ID NO: 817561

SEQ ID NO: 817570 - protein, 99 aa, Homo sapiens
MDERNRQVTFTKRKFGLMKKAYELSVLCDCEIALIIFNSTNKLFQYASTDMDKVLLKYTEYNEPHESRTNSDIVEGERACVVSPKPPQAGEFGPPPATH

SEQ ID NO: 817571 - protein, 462 aa, Homo sapiens
MDERNRQVTFTKRKFGLMKKAYELSVLCDCEIALIIFNSTNKLFQYASTDMDKVLLKYTEYNEPHESRTNSDIVETLRKKGLNGCDSPDPDADDSVGHSPESEDKYRKINEDIDLMISRQRLCAVPPPNFEMPVSIPVSSHNSLVYSNPVSSLGNPNLLPLAHPSLQRNSMSPGVTHRPPSAGNTGGLMGGDLTSGAGTSAGNGYGNPRNSPGLLVSPGNLNKNMQAKSPPPMNLGMNNRKPDLRVLIPPGSKNTMPSVSEDVDLLLNQRINNSQSAQSLATPVVSVATPTLPGQGMGGYPSAISTTYGTEYSLSSADLSSLSGFNTASALHLGSVTGWQQQHLHNMPPSALSQLGACTSTHLSQSSNLSLPSTQSLNIKSEPVSPPRDRTTTPSRYPQHTRHEAGRSPVDSLSSCSSSYDGSDREDHRNEFHSPIGLTRPSPDERESPSVKRMRLSEGWAT

SEQ ID NO: 817572 - protein, 454 aa, Homo sapiens
MDERNRQVTFTKRKFGLMKKAYELSVLCDCEIALIIFNSTNKLFQYASTDMDKVLLKYTEYNEPHESRTNSDIVETLRKKGLNGCDSPDPDADDSVGHSPESEDKYRKINEDIDLMISRQRLCAVPPPNFEMPVSIPVSSHNSLVYSNPVSSLGNPNLLPLAHPSLQRNSMSPGVTHRPPSAGNTGGLMGGDLTSGAGTSAGNGYGNPRNSPGLLVSPGNLNKNMQAKSPPPMNLGMNNRKPDLRVLIPPGSKNTMPSVNQRINNSQSAQSLATPVVSVATPTLPGQGMGGYPSAISTTYGTEYSLSSADLSSLSGFNTASALHLGSVTGWQQQHLHNMPPSALSQLGACTSTHLSQSSNLSLPSTQSLNIKSEPVSPPRDRTTTPSRYPQHTRHEAGRSPVDSLSSCSSSYDGSDREDHRNEFHSPIGLTRPSPDERESPSVKRMRLSEGWAT

SEQ ID NO: 817573 - protein, 430 aa, Homo sapiens
MDERNRQVTFTKRKFGLMKKAYELSVLCDCEIALIIFNSTNKLFQYASTDMDKVLLKYTEYNEPHESRTNSDIVETLRKKGLNGCDSPDPDADDSVGHSPESEDKYRKINEDIDLMISRQRLCAVPPPNFEMPVSIPVSSHNSLVYSNPVSSLGNPNLLPLAHPSLQRNSMSPGVTHRPPSAGNTGGLMGGDLTSGAGTSAGNGYGNPRNSPGLLVSPGNLNKNMQAKSPPPMNLGMNNRKPDLRVLIPPGSKNTMPSVSEDVDLLLNQRINNSQSAQSLATPVVSVATPTLPGQGMGGYPSAISTTYGTEYSLSSADLSSLSGFNTASALHLGSVTGWQQQHLHNMPPSALSQLGDRTTTPSRYPQHTRHEAGRSPVDSLSSCSSSYDGSDREDHRNEFHSPIGLTRPSPDERESPSVKRMRLSEGWAT

SEQ ID NO: 817574 - protein, 452 aa, Homo sapiens
MDERNRQVTFTKRKFGLMKKAYELSVLCDCEIALIIFNSTNKLFQYASTDMDKVLLKYTEYNEPHESRTNSDIVEALNKKENKGCESPDPDSSYALTPRTEEKYKKINEEFDNMIKSHKIPAVPPPNFEMPVSIPVSSHNSLVYSNPVSSLGNPNLLPLAHPSLQRNSMSPGVTHRPPSAGNTGGLMGGDLTSGAGTSAGNGYGNPRNSPGLLVSPGNLNKNMQAKSPPPMNLGMNNRKPDLRVLIPPGSKNTMPSVNQRINNSQSAQSLATPVVSVATPTLPGQGMGGYPSAISTTYGTEYSLSSADLSSLSGFNTASALHLGSVTGWQQQHLHNMPPSALSQLGACTSTHLSQSSNLSLPSTQSLNIKSEPVSPPRDRTTTPSRYPQHTRHEAGRSPVDSLSSCSSSYDGSDREDHRNEFHSPIGLTRPSPDERESPSVKRMRLSEGWAT

SEQ ID NO: 817575 - protein, 454 aa, Homo sapiens; identical to SEQ ID NO: 817572

SEQ ID NO: 817576 - protein, 465 aa, Homo sapiens
MGRKKIQITRIMDERNRQVTFTKRKFGLMKKAYELSVLCDCEIALIIFNSTNKLFQYASTDMDKVLLKYTEYNEPHESRTNSDIVETLRKKGLNGCDSPDPDADDSVGHSPESEDKYRKINEDIDLMISRQRLCAVPPPNFEMPVSIPVSSHNSLVYSNPVSSLGNPNLLPLAHPSLQRNSMSPGVTHRPPSAGNTGGLMGGDLTSGAGTSAGNGYGNPRNSPGLLVSPGNLNKNMQAKSPPPMNLGMNNRKPDLRVLIPPGSKNTMPSVNQRINNSQSAQSLATPVVSVATPTLPGQGMGGYPSAISTTYGTEYSLSSADLSSLSGFNTASALHLGSVTGWQQQHLHNMPPSALSQLGACTSTHLSQSSNLSLPSTQSLNIKSEPVSPPRDRTTTPSRYPQHTRHEAGRSPVDSLSSCSSSYDGSDREDHRNEFHSPIGLTRPSPDERESPSVKRMRLSEGWAT

SEQ ID NO: 817577 - protein, 452 aa, Homo sapiens; identical to SEQ ID NO: 817574

SEQ ID NO: 817578 - protein, 166 aa, Homo sapiens
MGGYPSAISTTYGTEYSLSSADLSSLSGFNTASALHLGSVTGWQQQHLHNMPPSALSQLGACTSTHLSQSSNLSLPSTQSLNIKSEPVSPPRDRTTTPSRYPQHTRHEAGRSPVDSLSSCSSSYDGSDREDHRNEFHSPIGLTRPSPDERESPSVKRMRLSEGWAT

SEQ ID NO: 817579 - protein, 462 aa, Homo sapiens; identical to SEQ ID NO: 817571

SEQ ID NO: 817580 - protein, 454 aa, Homo sapiens; identical to SEQ ID NO: 817572

SEQ ID NO: 817581 - protein, 449 aa, Homo sapiens
MDERNRQVTFTKRKFGLMKKAYELSVLCDCEIALIIFNSTNKLFQYASTDMDKVLLKYTEYNEPHESRTNSDIVETLRKKGLNGCDSPDPDADDSVGHSPESEDKYRKINEDIDLMISRQRLCAVPPPNFEMPVSIPVSSHNSLVYSNPVSSLGNPNLLPLAHPSLQRNSMSPGVTHRPPSAGNTGGLMGGDLTSGAGTSAGNGYGNPRNSPGLLVSPGNLNKNMQAKSPPPMNLGMNNRKPDLRVLIPPGSKNTMPSVNQRINNSQSAQSLATPVVSVATPTLPGQGMGGYPSAISTTYGTEYSLSSADLSSLSGFNTASALHLGSVTGWQQQHLHNMPPSALSQLGACTSTHLSQSSNLSLPSTQSLNIKSEPVSPPRDRTTTPSRYPQHTRHEAGRSPVDSLSSCSSSYDGSDREDHRNEFHSPIGLTRPSPDERESPSVKRMRLS

SEQ ID NO: 817582 - protein, 269 aa, Homo sapiens
MDERNRQVTFTKRKFGLMKKAYELSVLCDCEIALIIFNSTNKLFQYASTDMDKVLLKYTEYNEPHESRTNSDIVETLRKKGLNGCDSPDPDADDSVGHSPESEDKYRKINEDIDLMISRQRLCAVPPPNFEMPVSIPVSSHNSLVYSNPVSSLGNPNLLPLAHPSLQRNSMSPGVTHRPPSAGNTGGLMGGDLTSGAGTSAGNGYGNPRNSPGLLVSPGNLNKNMQAKSPPPMNLGMNNRKPDLRVLIPPGSKNTMPSVVIQNYILNKY

SEQ ID NO: 817583 - protein, 114 aa, Homo sapiens
MDERNRQVTFTKRKFGLMKKAYELSVLCDCEIALIIFNSTNKLFQYASTDMDKVLLKYTEYNEPHESRTNSDIVEDVGSDGRFLRGYHQYAYDGKDYIALKEDLRSWTAADTMF

SEQ ID NO: 817584 - protein, 715 aa, Homo sapiens
MSKAHKPWPYRRRSQFSSRKYLKKEMNSFQQQPPPFGTVPPQMMFPPNWQGAEKDAAFLAKDFNFLTLNNQPPPGNRSQPRAMGPENNLYSQYEQKVRPCIDLIDSLRALGVEQDLALPAIAVIGDQSSGKSSVLEALSGVALPRGSGIVTRCPLVLKLKKQPCEAWAGRISYRNTELELQDPGQVEKEIHKAQNVMAGNGRGISHELISLEITSPEVPDLTIIDLPGITRVAVDNQPRDIGLQIKALIKKYIQRQQTINLVVVPCNVDIATTEALSMAHEVDPEGDRTIGILTKPDLMDRGTEKSVMNVVRNLTYPLKKGYMIVKCRGQQEITNRLSLAEATKKEITFFQTHPYFRVLLEEGSATVPRLAERLTTELIMHIQKSLPLLEGQIRESHQKATEELRRCGADIPSQEADKMFFLIEKIKMFNQDIEKLVEGEEVVRENETRLYNKIREDFKNWVGILATNTQKVKNIIHEEVEKYEKQYRGKELLGFVNYKTFEIIVHQYIQQLVEPALSMLQKAMEIIQQAFINVAKKHFGEFFNLNQTVQSTIEDIKVKHTAKAENMIQLQFRMEQMVFCQDQIYSVVLKKVREEIFNPLGTPSQNMKLNSHFPSNESSVSSFTEIGIHLNAYFLETSKRLANQIPFIIQYFMLRENGDSLQKAMMQILQEKNRYSWLLQEQSETATKRRILKERIYRLTQARHALCQFSSKEIH

SEQ ID NO: 817585 - protein, 111 aa, Homo sapiens
MCASRNSMPSLCNHRPWAETTPANPSFSLFQETSKRLANQIPFIIQYFMLRENGDSLQKAMMQILQEKNRYSWLLQEQSETATKRRILKERIYRLTQARHALCQFSSKEIH

SEQ ID NO: 817586 - protein, 102 aa, Homo sapiens
RGSPLFAFFMEIGIHLYMPTYLETSKRLANQIPFIIQYFMLRENGDSLQKAMMQILQEKNRYSWLLQEQSETATKRRILKERIYRLTQARHALCQFSSKEIH

SEQ ID NO: 817587 - protein, 715 aa, Homo sapiens; identical to SEQ ID NO: 817584

SEQ ID NO: 817588 - protein, 553 aa, Homo sapiens
MSKAHKPWPYRRRSQFSSRKYLKKEMNSFQQQPPPFGTVPPQMMFPPNWQGAEKDAAFLAKDFNFLTLNNQPPPGNRSQPRAMGPENNLYSQYEQKVRPCIDLIDSLRALGVEQDLALPAIAVIGDQSSGKSSVLEALSGVALPRGSGIVTRCPLVLKLKKQPCEAWAGRISYRNTELELQDPGQVEKEIHKAQNVMAGNGRGISHELISLEITSPEVPDLTIIDLPGITRVAVDNQPRDIGLQIKALIKKYIQRQQTINLVVVPCNVDIATTEALSMAHEVDPEGDRTIGILTKPDLMDRGTEKSVMNVVRNLTYPLKKGYMIVKCRGQQEITNRLSLAEATKKEITFFQTHPYFRVLLEEGSATVPRLAERLTTELIMHIQKSLPLLEGQIRESHQKATEELRRCGADIPSQEADKMFFLIEKIKMFNQDIEKLVEGEEVVRENETRLYNKIREDFKNWVGILATNTQKGKFWAGLPAKQGGIYPDQRLCPAHDKCAKSGTRPSKTVEPLVISNCLSTNKTQKYGASTSATQHRAIPLPLMSSCLDFVLFC

SEQ ID NO: 817589 - protein, 196 aa, Homo sapiens
MSKAHKPWPYRRRSQFSSRKYLKKEMNSFQQQPPPFGTVPPQMMFPPNWQGAEKDAAFLAKDFNFLTLNNQPPPGNRSQPRAMGPENNLYSQYEQKVRPCIDLIDSLRALGVEQDLALPAIAVIGDQSSGKSSVLEALSGVALPRGSGIVTRCPLVLKLKKQPCEAWAGRISYRNTELELQDPGQVEKEIHKDKIK

SEQ ID NO: 817590 - protein, 37 aa, Homo sapiens
MGRMTSNDALILISGTCERAVTRQRGVKATNGIKFAN

SEQ ID NO: 817591 - protein, 102 aa, Homo sapiens
DGVGNLIPLMNQLSQRQRAMRKDPVVPVKKRTHEGLLPPVENHPLPLCVCDSVYVTASDFCESCSATNVLPPDVSPDPQQAHISPRDDQFYAYCVLLIPWLW

SEQ ID NO: 817592 - protein, 102 aa, Homo sapiens; identical to SEQ ID NO: 817591

SEQ ID NO: 817593 - protein, 102 aa, Homo sapiens; identical to SEQ ID NO: 817591

SEQ ID NO: 817594 - protein, 102 aa, Homo sapiens; identical to SEQ ID NO: 817591

SEQ ID NO: 817595 - protein, 102 aa, Homo sapiens; identical to SEQ ID NO: 817591

SEQ ID NO: 817596 - protein, 102 aa, Homo sapiens; identical to SEQ ID NO: 817591

SEQ ID NO: 817597 - protein, 489 aa, Homo sapiens
MPPRTLLCAPKIPRRGQLLSELFTNRKENIPLKLSEDCLYLNIYTPADLTKKNRLPVMVWIHGGGLMVGAASTYDGLALAAHENVVVVTIQYRLGIWGFFSTGDEHSRGNWGHLDQVAALRWVQDNIASFGGNPGSVTIFGESAGGESVSVLVLSPLAKNLFHRAISESGVALTSVLVKKGDVKPLAEQIAITAGCKTTTSAVMVHCLRQKTEEELLETTLKMKFLSLDLQGDPRESQPLLGTVIDGMLLLKTPEELQAERNFHTVPYMVGINKQEFGWLIPMQLMSYPLSEGQLDQKTAMSLLWKSYPLVCIAKELIPEATEKYLGGTDDTVKKKDLFLDLIADVMFGVPSVIVARNHRDAGAPTYMYEFQYRPSFSSDMKPKTVIGDHGDELFSVFGAPFLKEGASEEEIRLSKMVMKFWANFARNGNPNGEGLPHWPEYNQKEGYLQIGANTQAAQKLKDKEVAFWTNLFAKKAVEKPPQTEHIEL

SEQ ID NO: 817598 - protein, 489 aa, Homo sapiens; identical to SEQ ID NO: 817597

SEQ ID NO: 817599 - protein, 208 aa, Homo sapiens
MPPRTLLCAPKIPRRGQLLSELFTNRKENIPLKLSEDCLYLNIYTPADLTKKNRLPVMVWIHGGGLMVGAASTYDGLALAAHENVVVVTIQYRLGIWGFFSTGDEHSRGNWGHLDQVAALRWVQDNIASFGGNPGSVTIFGESAGGESVSVLVLSPLAKNLFHRAISESGVALTSVLVKKGDVKPLAEVGLRLVRLWLDTHTSLALCS

SEQ ID NO: 817600 - protein, 489 aa, Homo sapiens; identical to SEQ ID NO: 817597

SEQ ID NO: 817601 - protein, 578 aa, Homo sapiens
LASPSLPRVGRTLQTSEQTLLISAARCSEAFQQPTSGRLLFFPFLKNNVYCFYFLSANVIYTYYRKFRKYRERKVRKLRSHTIFHHPERTTISILDGAPKIPRRGQLLSELFTNRKENIPLKLSEDCLYLNIYTPADLTKKNRLPVMVWIHGGGLMVGAASTYDGLALAAHENVVVVTIQYRLGIWGFFSTGDEHSRGNWGHLDQVAALRWVQDNIASFGGNPGSVTIFGESAGGESVSVLVLSPLAKNLFHRAISESGVALTSVLVKKGDVKPLAEQIAITAGCKTTTSAVMVHCLRQKTEEELLETTLKMKFLSLDLQGDPRESQPLLGTVIDGMLLLKTPEELQAERNFHTVPYMVGINKQEFGWLIPMQLMSYPLSEGQLDQKTAMSLLWKSYPLVCIAKELIPEATEKYLGGTDDTVKKKDLFLDLIADVMFGVPSVIVARNHRDAGAPTYMYEFQYRPSFSSDMKPKTVIGDHGDELFSVFGAPFLKEGASEEEIRLSKMVMKFWANFARNGNPNGEGLPHWPEYNQKEGYLQIGANTQAAQKLKDKEVAFWTNLFAKKAVEKPPQTEHIEL

SEQ ID NO: 817602 - protein, 471 aa, Homo sapiens
MPPRTLLCAPKIPRRGQLLSELFTNRKENIPLKLSEDCLYLNIYTPADLTKKNRLPVMVWIHGGGLMVGAASTYDGLALAAHDTGDEHSRGNWGHLDQVAALRWVQDNIASFGGNPGSVTIFGESAGGESVSVLVLSPLAKNLFHRAISESGVALTSVLVKKGDVKPLAEQIAITAGCKTTTSAVMVHCLRQKTEEELLETTLKMKFLSLDLQGDPRESQPLLGTVIDGMLLLKTPEELQAERNFHTVPYMVGINKQEFGWLIPMQLMSYPLSEGQLDQKTAMSLLWKSYPLVCIAKELIPEATEKYLGGTDDTVKKKDLFLDLIADVMFGVPSVIVARNHRDAGAPTYMYEFQYRPSFSSDMKPKTVIGDHGDELFSVFGAPFLKEGASEEEIRLSKMVMKFWANFARNGNPNGEGLPHWPEYNQKEGYLQIGANTQAAQKLKDKEVAFWTNLFAKKAVEKPPQTEHIEL

SEQ ID NO: 817603 - protein, 286 aa, Homo sapiens
MVHCLRQKTEEELLETTLKMKFLSLDLQGDPRESQPLLGTVIDGMLLLKTPEELQAERNFHTVPYMVGINKQEFGWLIPMQLMSYPLSEGQLDQKTAMSLLWKSYPLVCIAKELIPEATEKYLGGTDDTVKKKDLFLDLIADVMFGVPSVIVARNHRDAGAPTYMYEFQYRPSFSSDMKPKTVIGDHGDELFSVFGAPFLKEGASEEEIRLSKMVMKFWANFARNGNPNGEGLPHWPEYNQKEGYLQIGANTQAAQKLKDKEVAFWTNLFAKKAVEKPPQTEHIEL

SEQ ID NO: 817604 - protein, 237 aa, Homo sapiens
ASCSRVSRFRVISVPYMVGINKQEFGWLIPMQLMSYPLSEGQLDQKTAMSLLWKSYPLVCIAKELIPEATEKYLGGTDDTVKKKDLFLDLIADVMFGVPSVIVARNHRDAGAPTYMYEFQYRPSFSSDMKPKTVIGDHGDELFSVFGAPFLKEGASEEEIRLSKMVMKFWANFARNGNPNGEGLPHWPEYNQKEGYLQIGANTQAAQKLKDKEVAFWTNLFAKKAVEKPPQTEHIEL

SEQ ID NO: 817605 - protein, 234 aa, Homo sapiens
LEYLVYEIYSVPYMVGINKQEFGWLIPMQLMSYPLSEGQLDQKTAMSLLWKSYPLVCIAKELIPEATEKYLGGTDDTVKKKDLFLDLIADVMFGVPSVIVARNHRDAGAPTYMYEFQYRPSFSSDMKPKTVIGDHGDELFSVFGAPFLKEGASEEEIRLSKMVMKFWANFARNGNPNGEGLPHWPEYNQKEGYLQIGANTQAAQKLKDKEVAFWTNLFAKKAVEKPPQTEHIEL

SEQ ID NO: 817606 - protein, 235 aa, Homo sapiens
LCIPGYTRMYSVPYMVGINKQEFGWLIPMQLMSYPLSEGQLDQKTAMSLLWKSYPLVCIAKELIPEATEKYLGGTDDTVKKKDLFLDLIADVMFGVPSVIVARNHRDAGAPTYMYEFQYRPSFSSDMKPKTVIGDHGDELFSVFGAPFLKEGASEEEIRLSKMVMKFWANFARNGNPNGEGLPHWPEYNQKEGYLQIGANTQAAQKLKDKEVAFWTNLFAKKAVEKPPQTEHIEL

SEQ ID NO: 817607 - protein, 204 aa, Homo sapiens
MSYPLSEGQLDQKTAMSLLWKSYPLVCIAKELIPEATEKYLGGTDDTVKKKDLFLDLIADVMFGVPSVIVARNHRDAGAPTYMYEFQYRPSFSSDMKPKTVIGDHGDELFSVFGAPFLKEGASEEEIRLSKMVMKFWANFARNGNPNGEGLPHWPEYNQKEGYLQIGANTQAAQKLKDKEVAFWTNLFAKKAVEKPPQTEHIEL

SEQ ID NO: 817608 - protein, 256 aa, Homo sapiens
MPPRTLLCAPKIPRRGQLLSELFTNRKENIPLKLSEDCLYLNIYTPADLTKKNRLPVMVWIHGGGLMVGAASTYDGLALAAHENVVVVTIQYRLGIWGFFSTGDEHSRGNWGHLDQVAALRWVQDNIASFGGNPGSVTIFGESAGGESVSVLVLSPLAKNLFHRAISESGVALTSVLVKKGDVKPLAEQIAITAGCKTTTSAVMVHCLRQKTEEELLETTLKMKFLSLDLQGDPREMLEHPPTCMSFSTVQASHQT

SEQ ID NO: 817609 - protein, 519 aa, Homo sapiens
MPPRTLLCAPKIPRRGQLLSELFTNRKENIPLKLSEDCLYLNIYTPADLTKKNRLPVMVWIHGGGLMVGAASTYDGLALAAHENVVVVTIQYRLGIWGFFSTGDEHSRGNWGHLDQVAALRWVQDNIASFGGNPGSVTIFGESAGGESVSVLVLSPLAKNLFHRAISESGVALTSVLVKKGDVKPLAEQIAITAGCKTTTSAVMVHCLRQKTEEELLETTLKMKFLSLDLQGDPRESQPLLGTVIDGMLLLKTPEELQAERNFHTVPYMVGINKQEFGWLIPMQLMSYPLSEGQLDQKTAMSLLWKSYPLVCIAKELIPEATEKYLGGTDDTVKKKDLFLDLIADVMFGVPSVIVARNHRDAGAPTYMYEFQYRPSFSSDMKPKTVIGDHGDELFSVFGAPFLKVLGQLCSQWKPQWGRAAPLARVQPEGRVSADWCQHPGGPEAEGQRSSFLDQPLCQEGSGEATPDRTHRAVNEDPAGLGSLEEQRLGSFAKGIAGSEGILPWLGNCLVVGGRGQRP

SEQ ID NO: 817610 - protein, 445 aa, Homo sapiens
MPPRTLLCAPKIPRRGQLLSELFTNRKENIPLKLSEDCLYLNIYTPADLTKKNRLPVMVWIHGGGLMVGAASTYDGLALAAHENVVVVTIQYRLGIWGFFSTGDEHSRGNWGHLDQVAALRWVQDNIASFGGNPGSVTIFGESAGGESVSVLVLSPLAKNLFHRAISESGVALTSVLVKKGDVKPLAEQIAITAGCKTTTSAVMVHCLRQKTEEELLETTLKMKFLSLDLQGDPRESQPLLGTVIDGMLLLKTPEELQAERNFHTVPYMVGINKQEFGWLIPMQLMSYPLSEGQLDQKTAMSLLWKSYPLVCIAKELIPEATEKYLGGTDDTVKKKDLFLDLIADVMFGVPSVIVARNHREGASEEEIRLSKMVMKFWANFARNGNPNGEGLPHWPEYNQKEGYLQIGANTQAAQKLKDKEVAFWTNLFAKKAVEKPPQTEHIEL

SEQ ID NO: 817611 - protein, 384 aa, Homo sapiens
MPPRTLLCAPKIPRRGQLLSELFTNRKENIPLKLSEDCLYLNIYTPADLTKKNRLPVMVWIHGGGLMVGAASTYDGLALAAHENVVVVTIQYRLGIWGFFSTGDEHSRGNWGHLDQVAALRWVQDNIASFGGNPGSVTIFGESAGGESVSVLVLSPLAKNLFHRAISESGVALTSVLVKKGDVKPLAEQIAITAGCKTTTSAVMVHCLRQKTEEELLETTLKMKFLSLDLQGDPRESQPLLGTVIDGMLLLKTPEELQAERNFHTVPYMVGINKQEFGWLIPMQLMSYPLSEGQLDQKTAMSLLWKSYPLVCIAKELIPEATEKYLGGTDDTVKKKDLFLDLIADVMFGVPSVIVARNHRDAGAPTYMYEFQYRPSFSSDLARW

SEQ ID NO: 817612 - protein, 230 aa, Homo sapiens
GSVSCVNSVWTEQIRGLSSSLRPRSDVLSACDLQEFGWLIPMQLMSYPLSEGQLDQKTAMSLLWKSYPLVCIAKELIPEATEKYLGGTDDTVTVIVARNHRDAGAPTYMYEFQYRPSFSSDMKPKTVIGDHGDELFSVFGAPFLKEGASEEEIRLSKMVMKFWANFARNGNPNGEGLPHWPEYNQKEGYLQIGANTQAAQKLKDKEVAFWTNLFAKKAVEKPPQTEHIEL

SEQ ID NO: 817613 - protein, 314 aa, Homo sapiens
MPPRTLLCAPKIPRRGQLLSELFTNRKENIPLKLSEDCLYLNIYTPADLTKKNRLPVMVWIHGGGLMVGAASTYDGLALAAHENVVVVTIQYRLGIWGFFSTGDEHSRGNWGHLDQVAALRWVQDNIASFGGNPGSVTIFGESAGGESVSVLVLSPLAKNLFHRAISESGVALTSVLVKKGDVKPLAEQIAITAGCKTTTSAVMVHCLRQKTEEELLETTLKMKFLSLDLQGDPRESQPLLGTVIDGMLLLKTPEELQAERNFHTVPYMVGINKQEFGWLIPMQLMSYPLSEGQLDQKTAMSLLWKSYPLVVRV

SEQ ID NO: 817614 - protein, 68 aa, Homo sapiens
AAAYYYYCSIQASNDVRGMVVTAKPGTVPQHLLEAAGTGGKVARLEAVSVSSTAPSGSRPPQDTQGPP

SEQ ID NO: 817615 - protein, 1704 aa, Homo sapiens
MAVLRQLALLLWKNYTLQKRKVLVTVLELFLPLLFSGILIWLRLKIQSENVPNATIYPGQSIQELPLFFTFPPPGDTWELAYIPSHSDAAKTVTETVRRALVINMRVRGFPSEKDFEDYIRYDNCSSSVLAAVVFEHPFNHSKEPLPLAVKYHLRFSYTRRNYMWTQTGSFFLKETEGWHTTSLFPLFPNPGPREPTSPDGGEPGYIREGFLAVQHAVDRAIMEYHADAATRQLFQRLTVTIKRFPYPPFIADPFLVAIQYQLPLLLLLSFTYTALTIARAVVQEKERRLKEYMRMMGLSSWLHWSAWFLLFFLFLLIAASFMTLLFCVKVKPNVAVLSRSDPSLVLAFLLCFAISTISFSFMVSTFFSKANMAAAFGGFLYFFTYIPYFFVAPRYNWMTLSQKLCSCLLSNVAMAMGAQLIGKFEAKGMGIQWRDLLSPVNVDDDFCFGQVLGMLLLDSVLYGLVTWYMEAVFPGQFGVPQPWYFFIMPSYWCGKPRAVAGKEEEDSDPEKALRNEYFEAEPEDLVAGIKIKHLSKVFRVGNKDRAAVRDLNLNLYEGQITVLLGHNGAGKTTTLSMLTGLFPPTSGRAYISGYEISQDMVQIRKSLGLCPQHDILFDNLTVAEHLYFYAQLKGLSRQKCPEEVKQMLHIIGLEDKWNSRSRFLSGGMRRKLSIGIALIAGSKVLILDEPTSGMDAISRRAIWDLLQRQKSDRTIVLTTHFMDEADLLGDRIAIMAKGELQCCGSSLFLKQKYGAGYHMTLVKEPHCNPEDISQLVHHHVPNATLESSAGAELSFILPRESTHRFEGLFAKLEKKQKELGIASFGASITTMEEVFLRVGKLVDSSMDIQAIQLPALQYQHERRASDWAVDSNLCGAMDPSDGIGALIEEERTAVKLNTGLALHCQQFWAMFLKKAAYSWREWKMVAAQVLVPLTCVTLALLAINYSSELFDDPMLRLTLGEYGRTVVPFSVPGTSQLGQQLSEHLKDALQAEGQEPREVLGDLEEFLIFRASVEGGGFNERCLVAASFRDVGERTVVNALFNNQAYHSPATALAVVDNLLFKLLCGPHASIVVSNFPQPRSALQAAKDQFNEGRKGFDIALNLLFAMAFLASTFSILAVSERAVQAKHVQFVSGVHVASFWLSALLWDLISFLIPSLLLLVVFKAFDVRAFTRDGHMADTLLLLLLYGWAIIPLMYLMNFFFLGAATAYTRLTIFNILSGIATFLMVTIMRIPAVKLEELSKTLDHVFLVLPNHCLGMAVSSFYENYETRRYCTSSEVAAHYCKKYNIQYQENFYAWSAPGVGRFVASMAASGCAYLILLFLIETNLLQRLRGILCALRRRRTLTELYTRMPVLPEDQDVADERTRILAPSPDSLLHTPLIIKELSKVYEQRVPLLAVDRLSLAVQKGECFGLLGFNGAGKTTTFKMLTGEESLTSGDAFVGGHRISSDVGKVRQRIGYCPQFDALLDHMTGREMLVMYARLRGIPERHIGACVENTLRGLLLEPHANKLVRTYSGGNKRKLSTGIALIGEPAVIFLDEPSTGMDPVARRLLWDTVARARESGKAIIITSHSMEECEALCTRLAIMVQGQFKCLGSPQHLKSKFGSGYSLRAKVQSEGQQEALEEFKAFVDLTFPGSVLEDEHQGMVHYHLPGRDLSWAKVFGILEKAKEKYGVDDYSVSQISLEQVFLSFAHLQPPTAEEGR

SEQ ID NO: 817616 - protein, 134 aa, Homo sapiens
YYMVQMQKPLSIPFPEGNDVSGVSFYVYVYTQQNVRWSGSASRQEPCISLRPLSLQLKGLSRQKCPEEVKQMLHIIGLEDKWNSRSRFLSGGMRRKLSIGIALIAGSKVRRWDWRQWVPLLLDLGLQAPATTPG

SEQ ID NO: 817617 - protein, 162 aa, Homo sapiens
ESKQCSESKQCPESKQCPESKQCPESKQCPESKQCPSWDSLGLSLSSAFSTAVPRSPGTEAAWLCASSVSAGCCFARHKQNKLTAVCFPPSPPIGVGSQGRLQGRRKKTVTPRKHSETSTLKPSQRTWWRGSRSSTCPRCRLLWGQGGPGLPGPWEDLPARQ

SEQ ID NO: 817618 - protein, 132 aa, Homo sapiens
MGSSDQRRAVRRHTGCSRGLQAARSCQCRRNCEAGADARVAEGGDPCERARAPAAAPRRPGSVLESHACEPWAPPDVLRGHGVPKPQGCPAPLQRLSGPTPEPSVRSRLLLASSPVVLKGDLLCGASSGTQP

SEQ ID NO: 817619 - protein, 1664 aa, Homo sapiens
MAVLRQLALLLWKNYTLQKRKVLVTVLELFLPLLFSGILIWLRLKIQSENVPNATIYPGQSIQELPLFFTFPPPGDTWELAYIPSHSDAAKTVTETVRRALVINMRVRGFPSEKDFEDYIRYDNCSSSVLAAVVFEHPFNHSKEPLPLAVKYHLRFSYTRRNYMWTQTGSFFLKETEGWHTTSLFPLFPNPGPREPTSPDGGEPGYIREGFLAVQHAVDRAIMEYHADAATRQLFQRLTVTIKRFPYPPFIADPFLVAIQYQLPLLLLLSFTYTALTIARAVVQEKERRLKEYMRMMGLSSWLHWSAWFLLFFLFLLIAASFMTLLFCVKANMAAAFGGFLYFFTYIPYFFVAPRYNWMTLSQKLCSCLLSNVAMAMGAQLIGKFEAKGMGIQWRDLLSPVNVDDDFCFGQVLGMLLLDSVLYGLVTWYMEAVFPGQFGVPQPWYFFIMPSYWCGKPRAVAGKEEEDSDPEKALRNEYFEAEPEDLVAGIKIKHLSKVFRVGNKDRAAVRDLNLNLYEGQITVLLGHNGAGKTTTLSMLTGLFPPTSGRAYISGYEISQDMVQIRKSLGLCPQHDILFDNLTVAEHLYFYAQLKGLSRQKCPEEVKQMLHIIGLEDKWNSRSRFLSGGMRRKLSIGIALIAGSKVLILDEPTSGMDAISRRAIWDLLQRQKSDRTIVLTTHFMDEADLLGDRIAIMAKGELQCCGSSLFLKQKYGAGYHMTLVKEPHCNPEDISQLVHHHVPNATLESSAGAELSFILPRESTHRFEGLFAKLEKKQKELGIASFGASITTMEEVFLRVGKLVDSSMDIQAIQLPALQYQHERRASDWAVDSNLCGAMDPSDGIGALIEEERTAVKLNTGLALHCQQFWAMFLKKAAYSWREWKMVAAQVLVPLTCVTLALLAINYSSELFDDPMLRLTLGEYGRTVVPFSVPGTSQLGQQLSEHLKDALQAEGQEPREVLGDLEEFLIFRASVEGGGFNERCLVAASFRDVGERTVVNALFNNQAYHSPATALAVVDNLLFKLLCGPHASIVVSNFPQPRSALQAAKDQFNEGRKGFDIALNLLFAMAFLASTFSILAVSERAVQAKHVQFVSGVHVASFWLSALLWDLISFLIPSLLLLVVFKAFDVRAFTRDGHMADTLLLLLLYGWAIIPLMYLMNFFFLGAATAYTRLTIFNILSGIATFLMVTIMRIPAVKLEELSKTLDHVFLVLPNHCLGMAVSSFYENYETRRYCTSSEVAAHYCKKYNIQYQENFYAWSAPGVGRFVASMAASGCAYLILLFLIETNLLQRLRGILCALRRRRTLTELYTRMPVLPEDQDVADERTRILAPSPDSLLHTPLIIKELSKVYEQRVPLLAVDRLSLAVQKGECFGLLGFNGAGKTTTFKMLTGEESLTSGDAFVGGHRISSDVGKVRQRIGYCPQFDALLDHMTGREMLVMYARLRGIPERHIGACVENTLRGLLLEPHANKLVRTYSGGNKRKLSTGIALIGEPAVIFLDEPSTGMDPVARRLLWDTVARARESGKAIIITSHSMEECEALCTRLAIMVQGQFKCLGSPQHLKSKFGSGYSLRAKVQSEGQQEALEEFKAFVDLTFPGSVLEDEHQGMVHYHLPGRDLSWAKVFGILEKAKEKYGVDDYSVSQISLEQVFLSFAHLQPPTAEEGR

SEQ ID NO: 817620 - protein, 1558 aa, Homo sapiens
GPVFNATGTAALGQRPYMWTQTGSFFLKETEGWHTTSLFPLFPNPGPREPTSPDGGEPGYIREGFLAVQHAVDRAIMEYHADAATRQLFQRLTVTIKRFPYPPFIADPFLVAIQYQLPLLLLLSFTYTALTIARAVVQEKERRLKEYMRMMGLSSWLHWSAWFLLFFLFLLIAASFMTLLFCVKVKPNVAVLSRSDPSLVLAFLLCFAISTISFSFMVSTFFSKANMAAAFGGFLYFFTYIPYFFVAPRYNWMTLSQKLCSCLLSNVAMAMGAQLIGKFEAKGMGIQWRDLLSPVNVDDDFCFGQVLGMLLLDSVLYGLVTWYMEAVFPGQFGVPQPWYFFIMPSYWCGKPRAVAGKEEEDSDPEKALRNEYFEAEPEDLVAGIKIKHLSKVFRVGNKDRAAVRDLNLNLYEGQITVLLGHNGAGKTTTLSMLTGLFPPTSGRAYISGYEISQDMVQIRKSLGLCPQHDILFDNLTVAEHLYFYAQLKGLSRQKCPEEVKQMLHIIGLEDKWNSRSRFLSGGMRRKLSIGIALIAGSKVLILDEPTSGMDAISRRAIWDLLQRQKSDRTIVLTTHFMDEADLLGDRIAIMAKGELQCCGSSLFLKQKYGAGYHMTLVKEPHCNPEDISQLVHHHVPNATLESSAGAELSFILPRESTHRFEGLFAKLEKKQKELGIASFGASITTMEEVFLRVGKLVDSSMDIQAIQLPALQYQHERRASDWAVDSNLCGAMDPSDGIGALIEEERTAVKLNTGLALHCQQFWAMFLKKAAYSWREWKMVAAQVLVPLTCVTLALLAINYSSELFDDPMLRLTLGEYGRTVVPFSVPGTSQLGQQLSEHLKDALQAEGQEPREVLGDLEEFLIFRASVEGGGFNERCLVAASFRDVGERTVVNALFNNQAYHSPATALAVVDNLLFKLLCGPHASIVVSNFPQPRSALQAAKDQFNEGRKGFDIALNLLFAMAFLASTFSILAVSERAVQAKHVQFVSGVHVASFWLSALLWDLISFLIPSLLLLVVFKAFDVRAFTRDGHMADTLLLLLLYGWAIIPLMYLMNFFFLGAATAYTRLTIFNILSGIATFLMVTIMRIPAVKLEELSKTLDHVFLVLPNHCLGMAVSSFYENYETRRYCTSSEVAAHYCKKYNIQYQENFYAWSAPGVGRFVASMAASGCAYLILLFLIETNLLQRLRGILCALRRRRTLTELYTRMPVLPEDQDVADERTRILAPSPDSLLHTPLIIKELSKVYEQRVPLLAVDRLSLAVQKGECFGLLGFNGAGKTTTFKMLTGEESLTSGDAFVGGHRISSDVGKVRQRIGYCPQFDALLDHMTGREMLVMYARLRGIPERHIGACVENTLRGLLLEPHANKLVRTYSGGNKRKLSTGIALIGEPAVIFLDEPSTGMDPVARRLLWDTVARARESGKAIIITSHSMEECEALCTRLAIMVQGQFKCLGSPQHLKSKFGSGYSLRAKVQSEGQQEALEEFKAFVDLTFPGSVLEDEHQGMVHYHLPGRDLSWAKVFGILEKAKEKYGVDDYSVSQISLEQVFLSFAHLQPPTAEEGR

SEQ ID NO: 817621 - protein, 1445 aa, Homo sapiens
MAVLRQLALLLWKNYTLQKRKVLVTVLELFLPLLFSGILIWLRLKIQSENVPNATIYPGQSIQELPLFFTFPPPGDTWELAYIPSHSDAAKTVTETVRRALVINMRVRGFPSEKDFEDYIRYDNCSSSVLAAVVFEHPFNHSKEPLPLAVKYHLRFSYTRRNYMWTQTGSFFLKETEGWHTTSLFPLFPNPGPREPTSPDGGEPGYIREGFLAVQHAVDRAIMEYHADAATRQLFQRLTVTIKRFPYPPFIADPFLVAIQYQLPLLLLLSFTYTALTIARAVVQEKERRLKEYMRMMGLSSWLHWSAWFLLFFLFLLIAASFMTLLFCVKVKPNVAVLSRSDPSLVLAFLLCFAISTISFSFMVSTFFSKANMAAAFGGFLYFFTYIPYFFVAPRYNWMTLSQKLCSCLLSNVAMAMGAQLIGKFEAKGMGIQWRDLLSPVNVDDDFCFGQVLGMLLLDSVLYGLVTWYMEAVFPGQFGVPQPWYFFIMPSYWCGKPRAVAGKEEEDSDPEKALRNEYFEAEPEDLVAGIKIKHLSKVFRVGNKDRAAVRDLNLNLYEGQITVLLGHNGAGKTTTLSMLTGLFPPTSGRAYISGYEISQDMVQIRKSLGLCPQHDILFDNLTVAEHLYFYAQLKGLSRQKCPEEVKQMLHIIGLEDKWNSRSRFLSGGMRRKLSIGIALIAGSKVLILDEPTSGMDAISRRAIWDLLQRQKSDRTIVLTTHFMDEADLLGDRIAIMAKGELQCCGSSLFLKQKYGAGYHMTLVKEPHCNPEDISQLVHHHVPNATLESSAGAELSFILPRESTHRFEGLFAKLEKKQKELGIASFGASITTMEEVFLRVGKLVDSSMDIQAIQLPALQYQHERRASDWAVDSNLCGAMDPSDGIGALIEEERTAVKLNTGLALHCQQFWAMFLKKAAYSWREWKMVAAQVLVPLTCVTLALLAINYSSELFDDPMLRLTLGEYGRTVVPFSVPGTSQLGQQLSEHLKDALQAEGQEPREVLGDLEEFLIFRASVEGGGFNERCLVAASFRDVGERTVVNALFNNQAYHSPATALAVVDNLLFKLLCGPHASIVVSNFPQPRSALQAAKDQFNEGRKGFDIALNLLFAMAFLASTFSILAVSERAVQAKHVQFVSGVHVASFWLSALLWDLISFLIPSLLLLVVFKAFDVRAFTRDGHMADTLLLLLLYGWAIIPLMYLMNFFSVYEQRVPLLAVDRLSLAVQKGECFGLLGFNGAGKTTTFKMLTGEESLTSGDAFVGGHRISSDVGKVRQRIGYCPQFDALLDHMTGREMLVMYARLRGIPERHIGACVENTLRGLLLEPHANKLVRTYSGGNKRKLSTGIALIGEPAVIFLDEPSTGMDPVARRLLWDTVARARESGKAIIITSHSMEECEALCTRLAIMVQGQFKCLGSPQHLKSKFGSGYSLRAKVQSEGQQEALPGERTQ

SEQ ID NO: 817622 - protein, 121 aa, Homo sapiens
MHRMDECSPALMPRISMRISMSAYSGVHFPRAGAGRAVCGQAPGSLGGELTQEGLQLSWGLNFSRHSLERGPSDLSKFTHDTNLPWGGSGKPARLNCSEAPRPPGMDHADHCQWREAADCD

SEQ ID NO: 817623 - protein, 1588 aa, Homo sapiens
  misc_feature (1579)..(1579): Xaa can be any naturally occurring amino acid
MAVLRQLALLLWKNYTLQKRKVLVTVLELFLPLLFSGILIWLRLKIQSENVPNATIYPGQSIQELPLFFTFPPPGDTWELAYIPSHSDAAKTVTETVRRALVINMRVRGFPSEKDFEDYIRYDNCSSSVLAAVVFEHPFNHSKEPLPLAVKYHLRFSYTRRNYMWTQTGSFFLKETEGWHTTSLFPLFPNPGPREPTSPDGGEPGYIREGFLAVQHAVDRAIMEYHADAATRQLFQRLTVTIKRFPYPPFIADPFLVAIQYQLPLLLLLSFTYTALTIARAVVQEKERRLKEYMRMMGLSSWLHWSAWFLLFFLFLLIAASFMTLLFCVKVKPNVAVLSRSDPSLVLAFLLCFAISTISFSFMVSTFFSKANMAAAFGGFLYFFTYIPYFFVAPRYNWMTLSQKLCSCLLSNVAMAMGAQLIGKFEAKGMGIQWRDLLSPVNVDDDFCFGQVLGMLLLDSVLYGLVTWYMEAVFPGQFGVPQPWYFFIMPSYWCGKPRAVAGKEEEDSDPEKALRNEYFEAEPEDLVAGIKIKHLSKVFRVGNKDRAAVRDLNLNLYEGQITVLLGHNGAGKTTTLSMLTGLFPPTSGRAYISGYEISQDMVQIRKSLGLCPQHDILFDNLTVAEHLYFYAQLKGLSRQKCPEEVKQMLHIIGLEDKWNSRSRFLSGGMRRKLSIGIALIAGSKVLILDEPTSGMDAISRRAIWDLLQRQKSDRTIVLTTHFMDEADLLGDRIAIMAKGELQCCGSSLFLKQKYGAGYHMTLVKEPHCNPEDISQLVHHHVPNATLESSAGAELSFILPRESTHRFEGLFAKLEKKQKELGIASFGASITTMEEVFLRVGKLVDSSMDIQAIQLPALQYQHERRASDWAVDSNLCGAMDPSDGIGALIEEERTAVKLNTGLALHCQQFWAMFLKKAAYSWREWKMVAAQVLVPLTCVTLALLAINYSSELFDDPMLRLTLGEYGRTVVPFSVPGTSQLGQQLSEHLKDALQAEGQEPREVLGDLEEFLIFRASVEGGGFNERCLVAASFRDVGERTVVNALFNNQAYHSPATALAVVDNLLFKLLCGPHASIVVSNFPQPRSALQAAKDQFNEGRKGFDIALNLLFAMAFLASTFSILAVSERAVQAKHVQFVSGVHVASFWLSALLWDLISFLIPSLLLLVVFKAFDVRAFTRDGHMADTLLLLLLYGWAIIPLMYLMNFFFLGAATAYTRLTIFNILSGIATFLMVTIMRIPAVKLEELSKTLDHVFLVLPNHCLGMAVSSFYENYETRRYCTSSEVAAHYCKKYNIQYQENFYAWSAPGVGRFVASMAASGCAYLILLFLIETNLLQRLRGILCALRRRRTLTELYTRMPVLPEDQDVADERTRILAPSPDSLLHTPLIIKELSKVYEQRVPLLAVDRLSLAVQKGECFGLLGFNGAGKTTTFKMLTGEESLTSGDAFVGGHRISSDVGKVRQRIGYCPQFDALLDHMTGREMLVMYARLRGIPERHIGACVENTLRGLLLEPHANKLVRTYSGGNKRKLSTGIALIGEPAVIFLDEPSTGMDPVARRLLWDTVARARESGKAIIITSQKHGEGVXRALVATRGW

SEQ ID NO: 817624 - protein, 166 aa, Homo sapiens
MAVLRQLALLLWKNYTLQKRKVLVTVLELFLPLLFSGILIWLRLKIQSENVPNATIYPGQSIQELPLFFTFPPPGDTWELAYIPSHSDAAKTVTETVRRALVINMRVRGVGCSLAWGSDLCSLCLSFPICEMGTIMEPTSKGCYGNTLGGCLQSAGNAALDAVGYR

SEQ ID NO: 817625 - protein, 43 aa, Homo sapiens
MRGFPSEKDFEDYIRYDNCSSSVLAAVVFEHPFNHSKEPLPLA

SEQ ID NO: 817626 - protein, 456 aa, Homo sapiens
MNSSDEEKQLQLITSLKEQAIGEYEDLRAENQKTKEKCDKIRQERDEAVKKLEEFQKISHMVIEEVNFMQNHLEIEKTCRESAEALATKLNKENKTLKRISMLYMAKLGPDVITEEINIDDEDSTTDTDGAAETCVSVQCQKQIKELRDQIVSVQEEKKILAIELENLKSKLVEVIEEVNKVKQEKTVLNSEVLEQRKVLEKCNRVSMLAVEEYEEMQVNLELEKDLRKKAESFAQEMFIEQNKLKRQSHLLLQSSIPDQQLLKALDENAKLTQQLEEERIQHQQKVKELEEQLENETLHKEIHNLKQQLELLEEDKKELELKYQNSEEKARNLKHSVDELQKRVNQSENSVPPPPPPPPPLPPPPPNPIRSLMSMIRKRSHPSGSGAKKEKATQPETTEEVTDLKRQAVEEMMDRIKKGVHLRPVNQTARPKTKPESSKGCESAVDELKGILASQ

SEQ ID NO: 817627 - protein, 187 aa, Homo sapiens
MNSSDEEKQLQLITSLKEQAIGEYEDLRAENQKTKEKCDKIRQERDEAVKKLEEFQKISHMVIEEVNFMQNHLEIEKTCRESAEALATKLNKENKTLKRISMLYMAKLGPDVITEEINIDDEDSTTDTDGALYPYKAPRAQPQPGAAPATTGPPYKAPQDQPKVPRAEASWVRCTPSLGLSEERHPR

SEQ ID NO: 817628 - protein, 90 aa, Homo sapiens
MNSSDEEKQLQLITSLKEQAIGEYEDLRAENQKTKEKCDKIRQERDEAVKKLEEFQKIYHMVIAEVNLMPPHTHVPKCRCCINKSVDLLP

SEQ ID NO: 817629 - protein, 631 aa, Homo sapiens
MNSSDEEKQLQLITSLKEQAIGEYEDLRAENQKTKEKCDKIRQERDEAVKKLEEFQKISHMVIEEVNFMQNHLEIEKTCRESAEALATKLNKENKTLKRISMLYMAKLGPDVITEEINIDDEDSTTDTDGAAETCVSVQCQKQIKELRDQIVSVQEEKKILAIELENLKSKLVEVIEEVNKVKQEKTVLNSEVLEQRKVLEKCNRVSMLAVEEYEEMQVNLELEKDLRKKAESFAQEMFIEQNKLKRQSHLLLQSSIPDQQLLKALDENAKLTQQLEEERIQHQQKVKELEEQLENETLHKEIHNLKQQLELLEEDKKELELKYQNSEEKARNLKHSVDELQKRVNQSENSVPPPPPPPPPLPPPPPNPIRSLMSMIRKRSHPSGSGAKKEKATQPETTEEVTDLKRQAVEEMMDRIKKGVHLRPVNQTARPKTKPESSKGCESAVDELKGILGTLNKSTSSRSLKSLDPENSETELERILRRRKVTAEADSSSPTGILATSESKSMPVLGSVSSVTKTALNKKTLEAEFNSPSPPTPEPGEGPRKLEGCTSSKVTFQPPSSIGCRKKYIDGEKQAEPVVVLDPVSTHEPQTKDQVAEKDPTQHKEDEGEIQPENKEDSIENVRETDSSNC

SEQ ID NO: 817630 - protein, 664 aa, Homo sapiens
PLVINEHMLWGNRSARDEENASSAVHYQSEQSKMRKLILGEIKWFASKGPLATIGEYEDLRAENQKTKEKCDKIRQERDEAVKKLEEFQKISHMVIEEVNFMQNHLEIEKTCRESAEALATKLNKENKTLKRISMLYMAKLGPDVITEEINIDDEDSTTDTDGAAETCVSVQCQKQIKELRDQIVSVQEEKKILAIELENLKSKLVEVIEEVNKVKQEKTVLNSEVLEQRKVLEKCNRVSMLAVEEYEEMQVNLELEKDLRKKAESFAQEMFIEQNKLKRQSHLLLQSSIPDQQLLKALDENAKLTQQLEEERIQHQQKVKELEEQLENETLHKEIHNLKQQLELLEEDKKELELKYQNSEEKARNLKHSVDELQKRVNQSENSVPPPPPPPPPLPPPPPNPIRSLMSMIRKRSHPSGSGAKKEKATQPETTEEVTDLKRQAVEEMMDRIKKGVHLRPVNQTARPKTKPESSKGCESAVDELKGILGTLNKSTSSRSLKSLDPENSETELERILRRRKVTAEADSSSPTGILATSESKSMPVLGSVSSVTKTALNKKTLEAEFNSPSPPTPEPGEGPRKLEGCTSSKVTFQPPSSIGCRKKYIDGEKQAEPVVVLDPVSTHEPQTKDQVAEKDPTQHKEDEGEIQPENKEDSIENVRETDSSNC

SEQ ID NO: 817631 - protein, 571 aa, Homo sapiens
MVIEEVNFMQNHLEIEKTCRESAEALATKLNKENKTLKRISMLYMAKLGPDVITEEINIDDEDSTTDTDGAAETCVSVQCQKQIKELRDQIVSVQEEKKILAIELENLKSKLVEVIEEVNKVKQEKTVLNSEVLEQRKVLEKCNRVSMLAVEEYEEMQVNLELEKDLRKKAESFAQEMFIEQNKLKRQSHLLLQSSIPDQQLLKALDENAKLTQQLEEERIQHQQKVKELEEQLENETLHKEIHNLKQQLELLEEDKKELELKYQNSEEKARNLKHSVDELQKRVNQSENSVPPPPPPPPPLPPPPPNPIRSLMSMIRKRSHPSGSGAKKEKATQPETTEEVTDLKRQAVEEMMDRIKKGVHLRPVNQTARPKTKPESSKGCESAVDELKGILGTLNKSTSSRSLKSLDPENSETELERILRRRKVTAEADSSSPTGILATSESKSMPVLGSVSSVTKTALNKKTLEAEFNSPSPPTPEPGEGPRKLEGCTSSKVTFQPPSSIGCRKKYIDGEKQAEPVVVLDPVSTHEPQTKDQVAEKDPTQHKEDEGEIQPENKEDSIENVRETDSSNC

SEQ ID NO: 817632 - protein, 571 aa, Homo sapiens; identical to SEQ ID NO: 817631

SEQ ID NO: 817633 - protein, 631 aa, Homo sapiens; identical to SEQ ID NO: 817629

SEQ ID NO: 817634 - protein, 631 aa, Homo sapiens; identical to SEQ ID NO: 817629

SEQ ID NO: 817635 - protein, 631 aa, Homo sapiens; identical to SEQ ID NO: 817629

SEQ ID NO: 817636 - protein, 631 aa, Homo sapiens; identical to SEQ ID NO: 817629

SEQ ID NO: 817637 - protein, 631 aa, Homo sapiens; identical to SEQ ID NO: 817629

SEQ ID NO: 817638 - protein, 628 aa, Homo sapiens
MNSSDEEKQLQLITSLKEQAIGEYEDLRAENQKTKEKCDKIRQERDEAVKKLEEFQKISHMVIEEVNFMQNHLEIEKTCRESAEALATKLNKENKTLKRISMLYMAKLGPDVITEEINIDDEDSTTDTDGAAETCVSVQCQKQIKELRDQIVSVQEEKKILAIELENLKSKLVEVIEEVNKVKQEKTVLNSEVLEQRKVLEKCNRVSMLAVEEYEEMQVNLELEKDLRKKAESFAQEMFIEQNKLKRQSHLLLQSSIPDQQLLKALDENAKLTQQLEEERIQHQQKVKELEEQLENETLHKEIHNLKQQLELLEEDKKELELKYQNSEEKARNLKHSVDELQKRVNQSENSVPPPPPPPPPLPPPPPNPIRSLMSMIRKRSHPSGSGAKKEKATQPETTEEVTDLKRQAVEEMMDRIKKGVHLRPVNQTARPKTKPESSKGCESAVDELKGILGTLNKSTSSRSLKSLDPENSETELERILRRRKVTAEADSSSPTGILATSESKSMPVLGSVSSVTKTALNKKTLEAEFNSPSPPTPEPGEGPRKLEGCTSSKVTFQPPSSIGCRKKYIDGEKQAEPVVVLDPVSTHEPQTKDQVAEKDPTQHKEDEGEIQPENKEDSIENVREHHC

SEQ ID NO: 817639 - protein, 342 aa, Homo sapiens
MNSSDEEKQLQLITSLKEQAIGEYEDLRAENQKTKEKCDKIRQERDEAVKKLEEFQKISHMVIEEVNFMQNHLEIEKTCRESAEALATKLNKENKTLKRISMLYMAKLGPDVITEEINIDDEDSTTDTDGAAETCVSVQCQKQIKELRDQIVSVQEEKKILAIELENLKSKLVEVIEEVNKVKQEKTVLNSEVLEQRKVLEKCNRVSMLAVEEYEEMQVNLELEKDLRKKAESFAQEMFIEQNKLKRQSHLLLQSSIPDQQLLKALDENAKLTQQLEEERIQHQQKVKELEEQLENETLHKEIHNLKQQLELLEEDKKELELKYQNSEEKARNLKHSGKSIE

SEQ ID NO: 817640 - protein, 188 aa, Homo sapiens
MAGLSRQLCALSHPKKAAETQTAEPGGAHAVCSRHPVRVKGLEGSEMESARENIDLQPGSSDPRSQPINLNHYATKKSVAESMLDVALFMSNAMRLKAVLEQGPSSHYYTTLVTLISLSLLLQVVIGVLLVVIARLNLNEVEKQWRLNQLNNAATILVFFTVVINVFITAFGAHKTGFLAARASRNPL

SEQ ID NO: 817641 - protein, 188 aa, Homo sapiens; identical to SEQ ID NO: 817640

SEQ ID NO: 817642 - protein, 135 aa, Homo sapiens
MLDVALFMSNAMRLKAVLEQGPSSHYYTTLVTLISLSLLLQVVIGVLLVVIGEEPSLQSDLLPRHPWLAERPHVSPGPPCIGTGSFGNHTLTCSEPSANRGPKTNFHPARAGALSCLLVSHGADPPQYLLNDCAS

SEQ ID NO: 817643 - protein, 106 aa, Homo sapiens
MLDVALFMSNAMRLKAVLEQGPSSHYYTTLVTLISLSLLLQVVIGVLLVVIARLNLNEVEKQWRLNQLNNAATILVFFTVVINVFITAFGAHKTGFLAARASRNPL

SEQ ID NO: 817644 - protein, 156 aa, Homo sapiens
MSLSLSVILLYRHGIADTNSRQEKAPGSSDPRSQPINLNHYATKKSVAESMLDVALFMSNAMRLKAVLEQGPSSHYYTTLVTLISLSLLLQVVIGVLLVVIARLNLNEVEKQWRLNQLNNAATILVFFTVVINVFITAFGAHKTGFLAARASRNPL

SEQ ID NO: 817645 - protein, 134 aa, Homo sapiens
MYMPGSSDPRSQPINLNHYATKKSVAESMLDVALFMSNAMRLKAVLEQGPSSHYYTTLVTLISLSLLLQVVIGVLLVVIARLNLNEVEKQWRLNQLNNAATILVFFTVVINVFITAFGAHKTGFLAARASRNPL

SEQ ID NO: 817646 - protein, 822 aa, Homo sapiens
MLLTAVQLLYSPESSVRTKLIQLPVVYVMLMQHSLFLPTLLTSDGEESPDSQVKEALVDLMLTVVEMCPSVCESSHFAVLLGAYGATLSVLDQKILLLLRAYEQNKLSLINFRVLLWGPAAVEHHKTCRSLGRSLWQQPSVGDILRLLDRDRMMQTILHFPQNRRLLPPEDTQELIFKDKSRVDLDGLYDPCFLLQLFSELTRPEFVVDCRKFLDSNALGLTVTALSSYDPQMRAIAYHVLAAYYSHLEGARFQEQSQLLYLLDVVRNGIRTQDMRLTFTLALFIAKAALQILKPEEHMYLKVSNFLLSHEYLNMDKVPGFYQFFYSSDFEQKTEQKWVFGLLRQGIRDKQCYELCARRGIFHIILSFFHSPLCDEAAQNWILEILQNAAQVARSAYEIIRDYSLLTWILHILESKFLETPLLSNVISLLHTLWVTNLGDKAVEWESQRLCQPSSQEPAKRLALHLVNEFLYVLIVLMKHLRPTLAPVQLTNFFGTLDSVLRYRATVIQAFRDMNRFTVNETVLSTKDVLVLLHKWSLIERDLKLQEDLRAAIEKAQARELMKMLKDKNKPVMPARAKGPRGRKRRPGEAEEMADPELMASTLETCKGLLRSILTYWRPVIPGPDPTQEPVDSASPESDAPGPVYAAASLAVSWVLRSVAEHPLSRAEAAGLIGWLKSHILPHPVVVADLLKDSAVRSSIFRLYSRLCGAEGLAGPVQEVACLFNTVMLQLVAAQGRAGSPFHPAMEALSLSSLSEKDEATQASAAFLVSLYIKDIWLGAQRPDTLLTHVRMVCEAADDAPSSEEEAIVVLCKDAASAASDA

SEQ ID NO: 817647 - protein, 2248 aa, Homo sapiens
RARKEELTGVRFKAQLKDPQGPGPGLEAFVSAAKKLPREDVYDVVEGYIKISVECVEIFQLLSGEKRPESETMLIFQVFEAILLRTASDLSHFHVVGTNIVKKLMNNHMKLICESLYASGYRLARACLSLMTAMVTQGPEAARDVCSHFDLNKKTLYTLVTKRDSKGVYDVRQAYVQFALSFLIAGDDSTIVQVLEVKEFIPCIFSSGIKEDRISTINILLSTLKTKVVHNKNITKTQKVRFFTGQLLNHIASLYNWNGITDVNPENVKVSAEEAGKTMVRELVHNFLMDLCCSLKHGINFYDASLGTFGRGGNLTLLHFLLGLKTAADDDLVADLVVNILKVCPDLLNKYFKEVTFSFIPRAKSTWLNNIKLLNKIYEAQPEISRAFQTREFIPLPRLLAMVMVTTVPLVCNKSMFTQALNLDSTSVRHTALSLISVILKRALKTVDHCLNKEVWQESGVYTAVMMEEFVQLFREALSKILPDLNTVVWVWQSLKKQETKQDDKKGQKRSDGPPAACDAHQCDDAETILLKAVLLQVICLYQKVVPHVVMQYNFDFSKLLKGVISEQGLREEVPPILQHHMLKVALELPASKFLWLKAQEGPDAEIIGGERSVFYLLMKMFVTSSHLQLKSLTKLLIMKILRDTGVFEHTWKELELWLEHLENTMEEDKETVIQFLERILLTLVANPYSYTDKASDFVQEASMLQATMTKQEADDMSIPISHIDDVLDMVDVLVEGSEGLDEEIGFTLSEDMILLTFPFSAVVPAALEARNKLLLGTGNEAAENVVTYLTAVLTDLLHTQRDPLALCLLLQAYDKLEPPCLVPCCQQLSRFNRYYSLWIPEQAREAWLLQAQGSPSPPALPLASSFTALLQAAYESQALRDEHIQVQLQATMPHLSMQQVLLAAKQVLLYLRSTVENFGQLGRSVGPPLLQLFLDLLRRLVVHCEQLDAQNQQRCEAARAEADLFLDMESVASLELANDQTLEEVLVAILRHPTLEGWFLALEQQALPPHTLSPVLVKLLATHFSAGVLQLLAASAPILQNIGQLGLLARYSEAITQSVLKELQNRRAGPATSPPKTPPQLEALQELHPYMEGAQLREVTLALLSLPETHLVTQQPTKSPGKERHLNALGKTLVQLLTCSPQDQLQSGELLWSSEYVRGLGALLPTLAVDELDTVLLHTLQRDPVLAPAVGADLLDYCLARRTQAALSIAALLLQESCTHLLWFEQWCLQAGPGLGLQGDLDDFLPLIHVYLQCRTRSHFTRPAGVSSAVIPVLRKTLWRQLQSRLLSTDSPPASGLYQEILAQLVPFARAKDLSVLMDRLPSLLHTPSSHKRWIVADSISAALEGSAEELCAWRRTLLESCVKWLIVSFSGGQQDDDNTQNQEKEMLLRLNALLHALNEVDPGDWQKFVKKGLKFRYQDHTFLKMLLTAVQLLYSPESSVRTKLIQLPVVYVMLMQHSLFLPTLLTSDGEESPDSQVKEALVDLMLTVVEMCPSVCESSHFAVLLGAYGATLSVLDQKILLLLRAYEQNKLSLINFRVLLWGPAAVEHHKTCRSLGRSLWQQPSVGDILRLLDRDRMMQTILHFPQNRRLLPPEDTQELIFKDKSRVDLDGLYDPCFLLQLFSELTRPEFVVDCRKFLDSNALGLTVTALSSYDPQMRAIAYHVLAAYYSHLEGARFQEQSQLLYLLDVVRNGIRTQDMRLTFTLALFIAKAALQILKPEEHMYLKVSNFLLSHEYLNMDKVPGFYQFFYSSDFEQKTEQKWVFGLLRQGIRDKQCYELCARRGIFHIILSFFHSPLCDEAAQNWILEILQNAAQVARSAYEIIRDYSLLTWILHILESKFLETPLLSNVISLLHTLWVTNLGDKAVEWESQRLCQPSSQEPAKRLALHLVNEFLYVLIVLMKHLRPTLAPVQLTNFFGTLDSVLRYRATVIQAFRDMNRFTVNETVLSTKDVLVLLHKWSLIERDLKLQEDLRAAIEKAQARELMKMLKDKNKPVMPARAKGPRGRKRRPGEAEEMADPELMASTLETCKGLLRSILTYWRPVIPGPDPTQEPVDSASPESDAPGPVYAAASLAVSWVLRSVAEHPLSRAEAAGLIGWLKSHILPHPVVVADLLKDSAVRSSIFRLYSRLCGAEGLAGPVQEVACLFNTVMLQLVAAQGRAGSPFHPAMEALSLSSLSEKDEATQASAAFLVSLYIKDIWLGAQRPDTLLTHVRMVCEAADDAPSSEEEAIVVLCKDAASAASDA

SEQ ID NO: 817648 - protein, 796 aa, Homo sapiens
MLPGRLSPLLVFSVSAPPCHVFQGCFLAEALVDLMLTVVEMCPSVCESSHFAVLLGAYGATLSVLDQKILLLLRAYEQNKLSLINFRVLLWGPAAVEHHKTCRSLGRSLWQQPSVGDILRLLDRDRMMQTILHFPQNRRLLPPEDTQELIFKDKSRVDLDGLYDPCFLLQLFSELTRPEFVVDCRKFLDSNALGLTVTALSSYDPQMRAIAYHVLAAYYSHLEGARFQEQSQLLYLLDVVRNGIRTQDMRLTFTLALFIAKAALQILKPEEHMYLKVSNFLLSHEYLNMDKVPGFYQFFYSSDFEQKTEQKWVFGLLRQGIRDKQCYELCARRGIFHIILSFFHSPLCDEAAQNWILEILQNAAQVARSAYEIIRDYSLLTWILHILESKFLETPLLSNVISLLHTLWVTNLGDKAVEWESQRLCQPSSQEPAKRLALHLVNEFLYVLIVLMKHLRPTLAPVQLTNFFGTLDSVLRYRATVIQAFRDMNRFTVNETVLSTKDVLVLLHKWSLIERDLKLQEDLRAAIEKAQARELMKMLKDKNKPVMPARAKGPRGRKRRPGEAEEMADPELMASTLETCKGLLRSILTYWRPVIPGPDPTQEPVDSASPESDAPGPVYAAASLAVSWVLRSVAEHPLSRAEAAGLIGWLKSHILPHPVVVADLLKDSAVRSSIFRLYSRLCGAEGLAGPVQEVACLFNTVMLQLVAAQGRAGSPFHPAMEALSLSSLSEKDEATQASAAFLVSLYIKDIWLGAQRPDTLLTHVRMVCEAADDAPSSEEEAIVVLCKDAASAASDA

SEQ ID NO: 817649 - protein, 2230 aa, Homo sapiens
RARKEELTGVRFKAQLKDPQGPGPGLEAFVSAAKKLPREDVYDVVEGYIKISVECVEIFQLLSGEKRPESETMLIFQVFEAILLRTASDLSHFHVVGTNIVKKLMNNHMKLICESLYASGYRLARACLSLMTAMVTQGPEAARDVCSHFDLNKKTLYTLVTKRDSKGVYDVRQAYVQFALSFLIAGDDSTIVQVLEVKEFIPCIFSSGIKEDRISTINILLSTLKTKVVHNKNITKTQKVRFFTGQLLNHIASLYNWNGITDVNPENVKVSAEEAGKTMVRELVHNFLMDLCCSLKHGINFYDASLGTFGRGGNLTLLHFLLGLKTAADDDLVADLVVNILKVCPDLLNKYFKEVTFSFIPRAKSTWLNNIKLLNKIYEAQPEISRAFQTREFIPLPRLLAMVMVTTVPLVCNKSMFTQALNLDSTSVRHTALSLISVILKRALKTVDHCLNKEVWQESGVYTAVMMEEFVQLFREALSKILPDLNTVVWVWQSLKKQETKQDDKKGQKRSDGPPAACDAHQCDDAETILLKAVLLQVICLYQKVVPHVVMQYNFDFSKLLKGVISEQGLREEVPPILQHHMLKVALELPASKFLWLKAQEGPDAEIIGGERSVFYLLMKMFVTSSHLQLKSLTKLLIMKILRDTGVFEHTWKELELWLEHLENTMEEDKETVIQFLERILLTLVANPYSYTDKASDFVQEASMLQATMTKQEADDMSIPISHIDDVLDMVDVLVEGSEGLDEEIGFTLSEDMILLTFPFSAVVPAALEARNKLLLGTGNEAAENVVTYLTAVLTDLLHTQRDPLALCLLLQAYDKLEPPCLVPCCQQLSRFNRYYSLWIPEQAREAWLLQAQGSPSPPALPLASSFTALLQAAYESQALRDEHIQVQLQATMPHLSMQQVLLAAKQVLLYLRSTVENFGQLGRSVGPPLLQLFLDLLRRLVVHCEQLDAQNQQRCEAARAEADLFLDMESVASLELANDQTLEEVLVAILRHPTLEGWFLALEQQALPPHTLSPVLVKLLATHFSAGVLQLLAASAPILQNIGQLGLLARYSEAITQSVLKELQNRRAGPATSPPKTPPQLEALQELHPYMEGAQLREVTLALLSLPETHLVTQQPTKSPGKERHLNALGKTLVQLLTCSPQDQLQSGELLWSSEYVRGLGALLPTLAVDELDTVLLHTLQRDPVLAPAVGADLLDYCLARRTQAALSIAALLLQESCTHLLWFEQWCLQAGPGLGLQGDLDDFLPLIHVYLQCRTRSHFTRPAGVSSAVIPVLRKTLWRQLQSRLLSTDSPPASGLYQEILAQLVPFARAKDLSVLMDRLPSLLHTPSSHKRWIVADSISAALEGSAEELCAWRRTLLESCVKWLIVSFSGGQQDDDNTQNQEKEMLLRLNALLHALNEVDPGDWQKFVKKGLKFRYQDHTFLKMLLTAVQLLYSPESSVRTKLIQLPVVYVMLMQHSLFLPTLLTSDGEESPDSQVKEALVDLMLTVVEMCPSVCESSHFAVLLGAYGATLSVLDQKILLLLRAYEQNKLSLINFRVLLWGPAAVEHHKTCRSLGRSLWQQPSVGDILRLLDRDRMMQTILHFPQNRRLLPPEDTQELIFKDKSRVDLDGLYDPCFLLQLFSELTRPEFVVDCRKFLDSNALGLTVTALSSYDPQMRAIAYHVLAAYYSHLEGARFQEQSQLLYLLDVVRNGIRTQDMRLTFTLALFIAKAALQILKPEEHMYLKVSNFLLSHEYLNMDKVPGFYQFFYSSDFEQKTEQKWVFGLLRQGIRDKQCYELCARRGIFHIILSFFHSPLCDEAAQNWILEILQNAAQVARSAYEIIRDYSLLTWILHILESKFLETPLLSNVISLLHTLWVTNLGDKAVEWESQRLCQPSSQEPAKRLALHLVNEFLYVLIVLMKHLRPTLAPVQLTNFFGTLDSVLRYRATVIQAFRDMNRFTVNETVLSTKDVLVLLHKWSLIERDLKLQEDLRAAIEKAQARELMRGRKRRPGEAEEMADPELMASTLETCKGLLRSILTYWRPVIPGPDPTQEPVDSASPESDAPGPVYAAASLAVSWVLRSVAEHPLSRAEAAGLIGWLKSHILPHPVVVADLLKDSAVRSSIFRLYSRLCGAEGLAGPVQEVACLFNTVMLQLVAAQGRAGSPFHPAMEALSLSSLSEKDEATQASAAFLVSLYIKDIWLGAQRPDTLLTHVRMVCEAADDAPSSEEEAIVVLCKDAASAASDA

SEQ ID NO: 817650 - protein, 72 aa, Homo sapiens
AQACGTVHLGTWQSRCIVGRMTCFRAEQVCILMAYPLLLFSLRSIPSVSLHKGHLAGGSAAGHPLNPRPDGV

SEQ ID NO: 817651 - protein, 1846 aa, Homo sapiens
RARKEELTGVRFKAQLKDPQGPGPGLEAFVSAAKKLPREDVYDVVEGYIKISVECVEIFQLLSGEKRPESETMLIFQVFEAILLRTASDLSHFHVVGTNIVKKLMNNHMKLICESLYASGYRLARACLSLMTAMVTQGPEAARDVCSHFDLNKKTLYTLVTKRDSKGVYDVRQAYVQFALSFLIAGDDSTIVQVLEVKEFIPCIFSSGIKEDRISTINILLSTLKTKVVHNKNITKTQKVRFFTGQLLNHIASLYNWNGITDVNPENVKVSAEEAGKTMVRELVHNFLMDLCCSLKHGINFYDASLGTFGRGGNLTLLHFLLGLKTAADDDLVADLVVNILKVCPDLLNKYFKEVTFSFIPRAKSTWLNNIKLLNKIYEAQPEISRAFQTREFIPLPRLLAMVMVTTVPLVCNKSMFTQALNLDSTSVRHTALSLISVILKRALKTVDHCLNKEVWQESGVYTAVMMEEFVQLFREALSKILPDLNTVVWVWQSLKKQETKQDDKKGQKRSDGPPAACDAHQCDDAETILLKAVLLQVICLYQKVVPHVVMQYNFDFSKLLKGVISEQGLREEVPPILQHHMLKVALELPASKFLWLKAQEGPDAEIIGGERSVFYLLMKMFVTSSHLQLKSLTKLLIMKILRDTGVFEHTWKELELWLEHLENTMEEDKETVIQFLERILLTLVANPYSYTDKASDFVQEASMLQATMTKQEADDMSIPISHIDDVLDMVDVLVEGSEGLDEEIGFTLSEDMILLTFPFSAVVPAALEARNKLLLGTGNEAAENVVTYLTAVLTDLLHTQRDPLALCLLLQAYDKLEPPCLVPCCQQLSRFNRYYSLWIPEQAREAWLLQAQGSPSPPALPLASSFTALLQAAYESQALRDEHIQVQLQATMPHLSMQQVLLAAKQVLLYLRSTVENFGQLGRSVGPPLLQLFLDLLRRLVVHCEQLDAQNQQRCEAARAEADLFLDMESVASLELANDQTLEEVLVAILRHPTLEGWFLALEQQALPPHTLSPVLVKLLATHFSAGVLQLLAASAPILQNIGQLGLLARYSEAITQSVLKELQNRRAGPATSPPKTPPQLEALQELHPYMEGAQLREVTLALLSLPETHLVTQQPTKSPGKERHLNALGKTLVQLLTCSPQDQLQSGELLWSSEYVRGLGALLPTLAVDELDTVLLHTLQRDPVLAPAVGADLLDYCLARRTQAALSIAALLLQESCTHLLWFEQWCLQAGPGLGLQGDLDDFLPLIHVYLQCRTRSHFTRPAGVSSAVIPVLRKTLWRQLQSRLLSTDSPPASGLYQEILAQLVPFARAKDLSVLMDRLPSLLHTPSSHKRWIVADSISAALEGSAEELCAWRRTLLESCVKWLIVSFSGGQQDDDNTQNQEKEMLLRLNALLHALNEVDPGDWQKFVKKGLKFRYQDHTFLKMLLTAVQLLYSPESSVRTKLIQLPVVYVMLMQHSLFLPTLLTSDGEESPDSQVKEALVDLMLTVVEMCPSVCESSHFAVLLGAYGATLSVLDQKILLLLRAYEQNKLSLINFRVLLWGPAAVEHHKTCRSLGRSLWQQPSVGDILRLLDRDRMMQTILHFPQNRRLLPPEDTQELIFKDKSRVDLDGLYDPCFLLQLFSELTRPEFVVDCRKFLDSNALGLTVTALSSYDPQMRAIAYHVLAAYYSHLEGARFQEQSQLLYLLDVVRNGIRTQDMRLTFTLALFIAKAALQILKPEEHMYLKVSNFLLSHEYLNMDKVPGFYQFFYSSDFEQKTEQKWVFGLLRQGIRDKQCYELCARRGIFHIILSFFHSPLCDEAAQNWILEILQNAAQVARSAYEIIRDYSLLTWILHILESKWRLQ

SEQ ID NO: 817652 - protein, 1780 aa, Homo sapiens
RARKEELTGVRFKAQLKDPQGPGPGLEAFVSAAKKLPREDVYDVVEGYIKISVECVEIFQLLSGEKRPESETMLIFQVFEAILLRTASDLSHFHVVGTNIVKKLMNNHMKLICESLYASGYRLARACLSLMTAMVTQGPEAARDVCSHFDLNKKTLYTLVTKRDSKGVYDVRQAYVQFALSFLIAGDDSTIVQVLEVKEFIPCIFSSGIKEDRISTINILLSTLKTKVVHNKNITKTQKVRFFTGQLLNHIASLYNWNGITDVNPENVKVSAEEAGKTMVRELVHNFLMDLCCSLKHGINFYDASLGTFGRGGNLTLLHFLLGLKTAADDDLVADLVVNILKVCPDLLNKYFKEVTFSFIPRAKSTWLNNIKLLNKIYEAQPEISRAFQTREFIPLPRLLAMVMVTTVPLVCNKSMFTQALNLDSTSVRHTALSLISVILKRALKTVDHCLNKEVWQESGVYTAVMMEEFVQLFREALSKILPDLNTVVWVWQSLKKQETKQDDKKGQKRSDGPPAACDAHQCDDAETILLKAVLLQVICLYQKVVPHVVMQYNFDFSKLLKGVISEQGLREEVPPILQHHMLKVALELPASKFLWLKAQEGPDAEIIGGERSVFYLLMKMFVTSSHLQLKSLTKLLIMKILRDTGVFEHTWKELELWLEHLENTMEEDKETVIQFLERILLTLVANPYSYTDKASDFVQEASMLQATMTKQEADDMSIPISHIDDVLDMVDVLVEGSEGLDEEIGFTLSEDMILLTFPFSAVVPAALEARNKLLLGTGNEAAENVVTYLTAVLTDLLHTQRDPLALCLLLQAYDKLEPPCLVPCCQQLSRFNRYYSLWIPEQAREAWLLQAQGSPSPPALPLASSFTALLQAAYESQALRDEHIQVQLQATMPHLSMQQVLLAAKQVLLYLRSTVENFGQLGRSVGPPLLQLFLDLLRRLVVHCEQLDAQNQQRCEAARAEADLFLDMESVASLELANDQTLEEVLVAILRHPTLEGWFLALEQQALPPHTLSPVLVKLLATHFSAGVLQLLAASAPILQNIGQLGLLARYSEAITQSVLKELQNRRAGPATSPPKTPPQLEALQELHPYMEGAQLREVTLALLSLPETHLVTQQPTKSPGKERHLNALGKTLVQLLTCSPQDQLQSGELLWSSEYVRGLGALLPTLAVDELDTVLLHTLQRDPVLAPAVGADLLDYCLARRTQAALSIAALLLQESCTHLLWFEQWCLQAGPGLGLQGDLDDFLPLIHVYLQCRTRSHFTRPAGVSSAVIPVLRKTLWRQLQSRLLSTDSPPASGLYQEILAQLVPFARAKDLSVLMDRLPSLLHTPSSHKRWIVADSISAALEGSAEELCAWRRTLLESCVKWLIVSFSGGQQDDDNTQNQEKEMLLRLNALLHALNEVDPGDWQKFVKKGLKFRYQDHTFLKMLLTAVQLLYSPESSVRTKLIQLPVVYVMLMQHSLFLPTLLTSDGEESPDSQVKEALVDLMLTVVEMCPSVCESSHFAVLLGAYGATLSVLDQKILLLLRAYEQNKLSLINFRVLLWGPAAVEHHKTCRSLGRSLWQQPSVGDILRLLDRDRMMQTILHFPQNRRLLPPEDTQELIFKDKSRVDLDGLYDPCFLLQLFSELTRPEFVVDCRKFLDSNALGLTVTALSSYDPQMRAIAYHVLAAYYSHLEGARFQEQSQLLYLLDVVRNGIRTQDMRLTFTLALFIAKAALQILKPEEHMYLKVSNFLLSHEYLNMDKVPGFYQFFYSSDFEVCFQSPHGFLQAPELMMQPPLSF

SEQ ID NO: 817653 - protein, 1849 aa, Homo sapiens
RARKEELTGVRFKAQLKDPQGPGPGLEAFVSAAKKLPREDVYDVVEGYIKISVECVEIFQLLSGEKRPESETMLIFQVFEAILLRTASDLSHFHVVGTNIVKKLMNNHMKLICESLYASGYRLARACLSLMTAMVTQGPEAARDVCSHFDLNKKTLYTLVTKRDSKGVYDVRQAYVQFALSFLIAGDDSTIVQVLEVKEFIPCIFSSGIKEDRISTINILLSTLKTKVVHNKNITKTQKVRFFTGQLLNHIASLYNWNGITDVNPENVKVSAEEAGKTMVRELVHNFLMDLCCSLKHGINFYDASLGTFGRGGNLTLLHFLLGLKTAADDDLVADLVVNILKVCPDLLNKYFKEVTFSFIPRAKSTWLNNIKLLNKIYEAQPEISRAFQTREFIPLPRLLAMVMVTTVPLVCNKSMFTQALNLDSTSVRHTALSLISVILKRALKTVDHCLNKEVWQESGVYTAVMMEEFVQLFREALSKILPDLNTVVWVWQSLKKQETKQDDKKGQKRSDGPPAACDAHQCDDAETILLKAVLLQVICLYQKVVPHVVMQYNFDFSKLLKGVISEQGLREEVPPILQHHMLKVALELPASKFLWLKAQEGPDAEIIGGERSVFYLLMKMFVTSSHLQLKSLTKLLIMKILRDTGVFEHTWKELELWLEHLENTMEEDKETVIQFLERILLTLVANPYSYTDKASDFVQEASMLQATMTKQEADDMSIPISHIDDVLDMVDVLVEGSEGLDEEIGFTLSEDMILLTFPFSAVVPAALEARNKLLLGTGNEAAENVVTYLTAVLTDLLHTQRDPLALCLLLQAYDKLEPPCLVPCCQQLSRFNRYYSLWIPEQAREAWLLQAQGSPSPPALPLASSFTALLQAAYESQALRDEHIQVQLQATMPHLSMQQVLLAAKQVLLYLRSTVENFGQLGRSVGPPLLQLFLDLLRRLVVHCEQLDAQNQQRCEAARAEADLFLDMESVASLELANDQTLEEVLVAILRHPTLEGWFLALEQQALPPHTLSPVLVKLLATHFSAGVLQLLAASAPILQNIGQLGLLARYSEAITQSVLKELQNRRAGPATSPPKTPPQLEALQELHPYMEGAQLREVTLALLSLPETHLVTQQPTKSPGKERHLNALGKTLVQLLTCSPQDQLQSGELLWSSEYVRGLGALLPTLAVDELDTVLLHTLQRDPVLAPAVGADLLDYCLARRTQAALSIAALLLQESCTHLLWFEQWCLQAGPGLGLQGDLDDFLPLIHVYLQCRTRSHFTRPAGVSSAVIPVLRKTLWRQLQSRLLSTDSPPASGLYQEILAQLVPFARAKDLSVLMDRLPSLLHTPSSHKRWIVADSISAALEGSAEELCAWRRTLLESCVKWLIVSFSGGQQDDDNTQNQEKEMLLRLNALLHALNEVDPGDWQKFVKKGLKFRYQDHTFLKMLLTAVQLLYSPESSVRTKLIQLPVVYVMLMQHSLFLPTLLTSDGEESPDSQVKEALVDLMLTVVEMCPSVCESSHFAVLLGAYGATLSVLDQKILLLLRAYEQNKLSLINFRVLLWGPAAVEHHKTCRSLGRSLWQQPSVGDILRLLDRDRMMQTILHFPQNRRLLPPEDTQELIFKDKSRVDLDGLYDPCFLLQLFSELTRPEFVVDCRKFLDSNALGLTVTALSSYDPQMRAIAYHVLAAYYSHLEGARFQEQSQLLYLLDVVRNGIRTQDMRLTFTLALFIAKAALQILKPEEHMYLKVSNFLLSHEYLNMDKVPGFYQFFYSSDFEQKTEQKWVFGLLRQGIRDKQCYELCARRGIFHIILSFFHSPLCDEAAQNWILEILQNAAQVARSAYEIIRDYSLLTWILHILESNSGDSAAV

SEQ ID NO: 817654 - protein, 1650 aa, Homo sapiens
RARKEELTGVRFKAQLKDPQGPGPGLEAFVSAAKKLPREDVYDVVEGYIKISVECVEIFQLLSGEKRPESETMLIFQVFEAILLRTASDLSHFHVVGTNIVKKLMNNHMKLICESLYASGYRLARACLSLMTAMVTQGPEAARDVCSHFDLNKKTLYTLVTKRDSKGVYDVRQAYVQFALSFLIAGDDSTIVQVLEVKEFIPCIFSSGIKEDRISTINILLSTLKTKVVHNKNITKTQKVRFFTGQLLNHIASLYNWNGITDVNPENVKVSAEEAGKTMVRELVHNFLMDLCCSLKHGINFYDASLGTFGRGGNLTLLHFLLGLKTAADDDLVADLVVNILKVCPDLLNKYFKEVTFSFIPRAKSTWLNNIKLLNKIYEAQPEISRAFQTREFIPLPRLLAMVMVTTVPLVCNKSMFTQALNLDSTSVRHTALSLISVILKRALKTVDHCLNKEVWQESGVYTAVMMEEFVQLFREALSKILPDLNTVVWVWQSLKKQETKQDDKKGQKRSDGPPAACDAHQCDDAETILLKAVLLQVICLYQKVVPHVVMQYNFDFSKLLKGVISEQGLREEVPPILQHHMLKVALELPASKFLWLKAQEGPDAEIIGGERSVFYLLMKMFVTSSHLQLKSLTKLLIMKILRDTGVFEHTWKELELWLEHLENTMEEDKETVIQFLERILLTLVANPYSYTDKASDFVQEASMLQATMTKQEADDMSIPISHIDDVLDMVDVLVEGSEGLDEEIGFTLSEDMILLTFPFSAVVPAALEARNKLLLGTGNEAAENVVTYLTAVLTDLLHTQRDPLALCLLLQAYDKLEPPCLVPCCQQLSRFNRYYSLWIPEQAREAWLLQAQGSPSPPALPLASSFTALLQAAYESQALRDEHIQVQLQATMPHLSMQQVLLAAKQVLLYLRSTVENFGQLGRSVGPPLLQLFLDLLRRLVVHCEQLDAQNQQRCEAARAEADLFLDMESVASLELANDQTLEEVLVAILRHPTLEGWFLALEQQALPPHTLSPVLVKLLATHFSAGVLQLLAASAPILQNIGQLGLLARYSEAITQSVLKELQNRRAGPATSPPKTPPQLEALQELHPYMEGAQLREVTLALLSLPETHLVTQQPTKSPGKERHLNALGKTLVQLLTCSPQDQLQSGELLWSSEYVRGLGALLPTLAVDELDTVLLHTLQRDPVLAPAVGADLLDYCLARRTQAALSIAALLLQESCTHLLWFEQWCLQAGPGLGLQGDLDDFLPLIHVYLQCRTRSHFTRPAGVSSAVIPVLRKTLWRQLQSRLLSTDSPPASGLYQEILAQLVPFARAKDLSVLMDRLPSLLHTPSSHKRWIVADSISAALEGSAEELCAWRRTLLESCVKWLIVSFSGGQQDDDNTQNQEKEMLLRLNALLHALNEVDPGDWQKFVKKGLKFRYQDHTFLKMLLTAVQLLYSPESSVRTKLIQLPVVYVMLMQHSLFLPTLLTSDGEESPDSQVKEALVDLMLTVVEMCPSVCESSHFAVLLGAYGATLSVLDQKILLLLRAYEQNKLSLINFRVLLWGPAAVEHHKTCRSLGRSLWQQPSVGDILRLLDRDRMMQTILHFPQNRRLLPPEDTQELIFKDKSRVDLDGLYDPCFLLQLFSELTRPGNCSLLLGQGLLCMTSQRSG

SEQ ID NO: 817655 - protein, 1504 aa, Homo sapiens
RARKEELTGVRFKAQLKDPQGPGPGLEAFVSAAKKLPREDVYDVVEGYIKISVECVEIFQLLSGEKRPESETMLIFQVFEAILLRTASDLSHFHVVGTNIVKKLMNNHMKLICESLYASGYRLARACLSLMTAMVTQGPEAARDVCSHFDLNKKTLYTLVTKRDSKGVYDVRQAYVQFALSFLIAGDDSTIVQVLEVKEFIPCIFSSGIKEDRISTINILLSTLKTKVVHNKNITKTQKVRFFTGQLLNHIASLYNWNGITDVNPENVKVSAEEAGKTMVRELVHNFLMDLCCSLKHGINFYDASLGTFGRGGNLTLLHFLLGLKTAADDDLVADLVVNILKVCPDLLNKYFKEVTFSFIPRAKSTWLNNIKLLNKIYEAQPEISRAFQTREFIPLPRLLAMVMVTTVPLVCNKSMFTQALNLDSTSVRHTALSLISVILKRALKTVDHCLNKEVWQESGVYTAVMMEEFVQLFREALSKILPDLNTVVWVWQSLKKQETKQDDKKGQKRSDGPPAACDAHQCDDAETILLKAVLLQVICLYQKVVPHVVMQYNFDFSKLLKGVISEQGLREEVPPILQHHMLKVALELPASKFLWLKAQEGPDAEIIGGERSVFYLLMKMFVTSSHLQLKSLTKLLIMKILRDTGVFEHTWKELELWLEHLENTMEEDKETVIQFLERILLTLVANPYSYTDKASDFVQEASMLQATMTKQEADDMSIPISHIDDVLDMVDVLVEGSEGLDEEIGFTLSEDMILLTFPFSAVVPAALEARNKLLLGTGNEAAENVVTYLTAVLTDLLHTQRDPLALCLLLQAYDKLEPPCLVPCCQQLSRFNRYYSLWIPEQAREAWLLQAQGSPSPPALPLASSFTALLQAAYESQALRDEHIQVQLQATMPHLSMQQVLLAAKQVLLYLRSTVENFGQLGRSVGPPLLQLFLDLLRRLVVHCEQLDAQNQQRCEAARAEADLFLDMESVASLELANDQTLEEVLVAILRHPTLEGWFLALEQQALPPHTLSPVLVKLLATHFSAGVLQLLAASAPILQNIGQLGLLARYSEAITQSVLKELQNRRAGPATSPPKTPPQLEALQELHPYMEGAQLREVTLALLSLPETHLVTQQPTKSPGKERHLNALGKTLVQLLTCSPQDQLQSGELLWSSEYVRGLGALLPTLAVDELDTVLLHTLQRDPVLAPAVGADLLDYCLARRTQAALSIAALLLQESCTHLLWFEQWCLQAGPGLGLQGDLDDFLPLIHVYLQCRTRSHFTRPAGVSSAVIPVLRKTLWRQLQSRLLSTDSPPASGLYQEILAQLVPFARAKDLSVLMDRLPSLLHTPSSHKRWIVADSISAALEGSAEELCAWRRTLLESCVKWLIVSFSGGQQDDDNTQNQEKEMLLRLNALLHALNEVDPGDWQKFVKKGLKFRYQDHTFLKMLLTAVQLLYSPESSVRTKLIQLPVVYVMLMQHSLFLPTLLTSDGEESPDSQVKGDPSPQPFHSVSRFYLLISLHWLH

SEQ ID NO: 817656 - protein, 864 aa, Homo sapiens
RARKEELTGVRFKAQLKDPQGPGPGLEAFVSAAKKLPREDVYDVVEGYIKISVECVEIFQLLSGEKRPESETMLIFQVFEAILLRTASDLSHFHVVGTNIVKKLMNNHMKLICESLYASGYRLARACLSLMTAMVTQGPEAARDVCSHFDLNKKTLYTLVTKRDSKGVYDVRQAYVQFALSFLIAGDDSTIVQVLEVKEFIPCIFSSGIKEDRISTINILLSTLKTKVVHNKNITKTQKVRFFTGQLLNHIASLYNWNGITDVNPENVKVSAEEAGKTMVRELVHNFLMDLCCSLKHGINFYDASLGTFGRGGNLTLLHFLLGLKTAADDDLVADLVVNILKVCPDLLNKYFKEVTFSFIPRAKSTWLNNIKLLNKIYEAQPEISRAFQTREFIPLPRLLAMVMVTTVPLVCNKSMFTQALNLDSTSVRHTALSLISVILKRALKTVDHCLNKEVWQESGVYTAVMMEEFVQLFREALSKILPDLNTVVWVWQSLKKQETKQDDKKGQKRSDGPPAACDAHQCDDAETILLKAVLLQVICLYQKVVPHVVMQYNFDFSKLLKGVISEQGLREEVPPILQHHMLKVALELPASKFLWLKAQEGPDAEIIGGERSVFYLLMKMFVTSSHLQLKSLTKLLIMKILRDTGVFEHTWKELELWLEHLENTMEEDKETVIQFLERILLTLVANPYSYTDKASDFVQEASMLQATMTKQEADDMSIPISHIDDVLDMVDVLVEGSEGLDEEIGFTLSEDMILLTFPFSAVVPAALEARNKLLLGTGNEAAENVVTYLTACHTLREVKKRKLPPMFDCSWGASSTSHSQLLQRELPELTVLSYLSLFFLGWRQNMNRYSFMLSGNHLLFHLL

SEQ ID NO: 817657 - protein, 87 aa, Homo sapiens
TNEAYGRVNIASNYLSGRGAMIESIVVPLELTPWDREAKCYNELNGCTKIYDPVCGTDGNTYPNECVLCFENRKRQTSILIQKSGPC

SEQ ID NO: 817658 - protein, 79 aa, Homo sapiens
MKVTGIFLLSALALLSLSGNTGADSLGREAKCYNELNGCTKIYDPVCGTDGNTYPNECVLCFEGRKRQTSILIQKSGPC

SEQ ID NO: 817659 - protein, 79 aa, Homo sapiens; identical to SEQ ID NO: 817658

SEQ ID NO: 817660 - protein, 79 aa, Homo sapiens; identical to SEQ ID NO: 817658

SEQ ID NO: 817661 - protein, 79 aa, Homo sapiens; identical to SEQ ID NO: 817658

SEQ ID NO: 817662 - protein, 301 aa, Homo sapiens
LQNVGPNPVVQIIYSDKFRDVYDYFRAVLQRDERSERAFKLTRDAIELNAANYTVWHFRRVLLKSLQKDLHEEMNYITAIIEEQPKNYQVWHHRRVLVEWLRDPSQELEFIADILNQDAKNYHAWQHRQWVIQEFKLWDNELQYVDQLLKEDVRNNSVWNQRYFVISNTTGYNDRAVLEREVQYTLEMIKLVPHNESAWNYLKGILQDRGLSKYPNLLNQLLDLQPSHSSPYLIAFLVDIYEDMLENQCDNKEDILNKALELCEILAKEKDTIRKEYWRYIGRSLQSKHSTENDSPTNVQQ

SEQ ID NO: 817663 - protein, 301 aa, Homo sapiens; identical to SEQ ID NO: 817662

SEQ ID NO: 817664 - protein, 301 aa, Homo sapiens; identical to SEQ ID NO: 817662

SEQ ID NO: 817665 - protein, 301 aa, Homo sapiens; identical to SEQ ID NO: 817662

SEQ ID NO: 817666 - protein, 124 aa, Homo sapiens
GLFSLDLSTALFFLHKIKSLFFVVVYRILQDRGLSKYPNLLNQLLDLQPSHSSPYLIAFLVDIYEDMLENQCDNKEDILNKALELCEILAKEKDTIRKEYWRYIGRSLQSKHSTENDSPTNVQQ

SEQ ID NO: 817667 - protein, 92 aa, Homo sapiens
VGGGGRLGTSSAPRPLRPLPSLSLALFSHTPGRRLGFVRGDGVAPWPPKEEPDTCLPSPSCSPPLEERPPPRLGAFCVSRLVGKPLRRRHHE

SEQ ID NO: 817668 - protein, 148 aa, Homo sapiens
VGGGGRLGTSSAPRPLRPLPSLSLALFSHTPGRRLGFVRGDGVAPWPPKEEPDTCLPSPSCSPPLEERPPPRLGAFCVSRLVGKPLRRRHHEVRGARGGGRAGHCAAGAATPVLLGPRLPSPGPARLPWSPVCSSPLRLLSLPISLSF

SEQ ID NO: 817669 - protein, 128 aa, Homo sapiens
  misc_feature (122)..(123): Xaa can be any naturally occurring amino acid
PPPPPPPPLPNQVPPPPPPPPAPPLPASGFFLASMSEDNRPLTGLAAAIAGAKLRKVSRMEDTSFPSGGNAIGVNSASSKTDTGRGNGPLPLGGSGLMEEMSALLARRRRNFLEKGFTIGNXXKRGPR

SEQ ID NO: 817670 - protein, 102 aa, Homo sapiens
VGGGGRLGTSSAPRPLRPLPSLSLALFSHTPGRRLGFVRGDGVAPWPPKEEPDTCLPSPSCSPPLEERPPPRLGAFCVSRLVGKPLRRRHHETESDCCPGWS

SEQ ID NO: 817671 - protein, 223 aa, Homo sapiens
PPPPPPPPLPNQVPPPPPPPPAPPLPASGFFLASMSEDNRPLTGLAAAIAGAKLRKVSRMEDTSFPSGGNAIGVNSASSKTDTGRGNGPLPLGGSGLMEEMSALLARRRRIAEKGSTIETEQKEDKGEDSEPVTSKASSTSTPEPTRKPWERTNTMNGSKSPVISRPKSTPLSQPSANGVQTEGLDYDRLKQDILDEMRKELTKLKEELIDAIRQELSKSNTA

SEQ ID NO: 817672 - protein, 223 aa, Homo sapiens; identical to SEQ ID NO: 817671

SEQ ID NO: 817673 - protein, 223 aa, Homo sapiens; identical to SEQ ID NO: 817671

SEQ ID NO: 817674 - protein, 223 aa, Homo sapiens; identical to SEQ ID NO: 817671

SEQ ID NO: 817675 - protein, 223 aa, Homo sapiens; identical to SEQ ID NO: 817671

SEQ ID NO: 817676 - protein, 1029 aa, Homo sapiens
MNFKYSKICIVFIHDADFLKPTYKQSVLFLYYKVLILSSILNSDVFIRNTKIQSLYFFFDQTQIFPFPPPFSSPLLVDRVFPIFINICSHYRVTVVKFSAVFFFFFLLYPVSCSCFSSYVSQYFCLQIKSHLSFKNELSNMMNLLNLPSYNFYVSCKFIYTFSAIVKNWPFNSKYVLPYEDTVCKGMLQGLFNSCVAIIILYHHYPLNSTDYKQRKSNYIKQTSQRNSAGALNSLCSYHKIHFPEDIYSHSLPNSKPFSGSTTFVFNRKMSSICTSLQSSKEGEKDPSILKLLMFEYLCLFTKSHLIFLKSKLDIQVFIRNLHDSEENEIDVGSFGYVKDIVEDNYLKKSFLLRIVDLTKQLKSVTPQERPFIEAKNCWRSVMQVFLFPTSKAVDYLVCSPLCYLSIIFETSRFFKISYWKDETFKLKPKIDLKEKYNINAVNLGWLQILTININKWSSRINYLWNTNGQVTVRVKSFGEETHLTTAKELTKFVFLNSFLYKVTETCKRIINDCHNDLGCCKNVCHIYWLFLLKSEGIDTSENLEREIGLSPLQILCDGTQPSKRKCKYHLKHIVGLEYLQINMQKKSKMKPQLSVRTKESQSLSCTPVLCSMLNTHKEQRAGPVDASGVGHRNSRQREKIRGPSWWLRVKRIYHLSSAVLFPQFLKTYEFLVVRTSKYSVNWSEAGGLLEARSFEISLGNIARPVSLKNKEINNKVNKSNKNLVLDYCAVLLPLCRDGVGVRISMCMNGGKLWWCLLFVCFLRGGGVSSEPFWLKNNVHNFYYEIKKVKYFFFSGLTKLIDQKYIVEQHSRKNLKVNFLWSKRMDESQSITFHNICWNWNLLSSCFALNFRTRSVQYVKRLCRAIFFANNVNICTPGMGLYNLEVSLRLRILKSCFKSKVDFKHIQGCILIVTRNHLLCIQNLMYLIMEFVNYGPLPNFKGKGNWYQLVLNQHTISSCLLDSSCLKIRIKQDLIVRKHLLSLTSTFEEGNVEEKVRHETKTAGRVGSELHLIFGPKFHIGINKKEDHL

SEQ ID NO: 817677 - protein, 794 aa, Homo sapiens
MHKIHFPEDIYSHSLPNSKPFSGSTTFVFNREDEFISVHLSKALRNEKRILSILKLLMFEYLCLFTKSHLIFLKSKLDIQVFIRNLHDSEENEIDVGSFGYVKDIVEDNYLKKSFLLRIVDLTKQLKSVTPQERPFIEAKNCWRSVMQVFLFPTSKAVDYLVCSPLCYLSIIFETSRFFKISYWKDETFKLKPKIDVERKVKINAVNLGWLQILTININKWSSRINYLWNTNGQVTVRVKSFGEETHLTTAKELTKFVFLNSFLYKVTEDIVKGYINDCHNDLGCCKNVCHIYWLFLLKSEGIDTSENLEREIGLSPLQILCDGTQPSKRKCKYHLKHIVGLEYLQINMQKKSKMKPQLSVRTKESQSLSCTPVLCSMLNTHKEQRAGPVDASGVGHRNSRQREKIRGPSWWLRVKRIYHLSSAVLFPQFLKTYEFLVVRTSKYSVNWSEAGGLLEARSFEISLGNIARPVSLKNKEINNKVNKSNKNLVLDYCAVLLPLCRDGVGVRISMCMNGGKLWWCLLFVCFLRGGGVSSEPFWLKNNVHNFYYEIKKVKYFFFSGLTKLIDQKYIVEQHSRKNLKVNFLWSKRMDESQSITFHNICWNWNLLSSCFALNFRTRSVQYVKRLCRAIFFANNVNICTPGMGLYNLEVSLRLRILKSCFKSKVDFKHIQGCILIVTRNHLLCIQNLMYLIMEFVNYGPLPNFKGKGNWYQLVLNQHTISSCLLDSSCLKIRIKQDLIVRKHLLSLTSTFEEGNVEEKVRHETKTAGRVGSELHLIFGPKFHIGINKKEDHL

SEQ ID NO: 817678 - protein, 943 aa, Homo sapiens
MQPLQSYSCKIFSCFFFFFFALACLMFLLLFICTVSIFVYKLKVTCHSKMMLSNMMNLLNLPSYNFYVSCKFIYTFSAIVKNWPFNSKYVLPYEDTVCKGMLQGLFNSCVAIIILEHHYPLNSTDYKQRKSNYIKQTSQRNSAGLLIPLCSYHKIHFPEDIYSHSLPNSKPFSGSTTFVFNRKMSSICTSLQSSKEGEKDPSILKLLMFEYLCLFTKSHLIFLKSKLDIQVFIRNLHDSEENEIDVGSFGYVKDIVEDNYLKKSFLLRIVDLTKQLKSVTPQERPFIEAKNCWRSVMQVFLFPTSKAVDYLVCSPLCYLSIIFETSRFFKISYWKDETFKLKPKIDLKEKYNINAVNLGWLQILTININKWSSRINYLWNTNGQVTVRVKSFGEETHLTTAKELTKFVFLNSFLYKVTETCKRIINDCHNDLGCCKNVCHIYWLFLLKSEGIDTSENGEREIGLSPLQILCDGTQPSKRKCKYHLKHIVGLEYLQINMQKKSKMKPQLSVRTKESQSLSCTPVLCSMLNTHKEQRAGPVDASGVGHRNSRQREKIRGPSWWLRVKRIYHLSSAVLFPQFLKTYEFLVVRTSKYSVNWSEAGGLLEARSFEISLGNIARPVSLKNKEINNKSNKLNKNLVLDYCAVLLPLCRDGVGVRISMCMNGGKLWWCLLFVCFLRGGGVSSEPFWLKNNVHNFYYEIKKVKYFFFSGLTKLIDQKYIVEQHSRKNLKVNFLWSKRMDESQSITFHNICWNWNLLSSCFALNFRTRSVQYVKRLCRAIFFANNVNICTPGMGLYNLEVSLRLRILKSCFKSKVDFKHIQGCILIVTRNHLLCIQNLMYLIMEFVNYWALAEFKGKGNWYQLVLNQHTISSCLLDSSCLKIRIKQDLIVRKHLLSLTSTFEEGNVEEKVRHETKTAGRVGSELHLIFGPKFHIGINKKEDHL

SEQ ID NO: 817679 - protein, 792 aa, Homo sapiens
MHKIHFPEDIYSHSLPNSKPFSGSTTFVFNRKMSSICTSLQSSKEGEKDPSILKLLMFEYLCLFTKSHLIFLKSKLDIQVFIRNLHDSEENEIDVGSFGYVKDIVEDNYLKKSFLLRIVDLTKQLKSVTPQERPFIEAKNCWRSVMQVFLFPTSKAVDYLVCSPLCYLSIIFETSRFFKISYWKDETFKLKPKIDLKEKKNINAVNLGWLQILTININKWSSRINYLWNTNGQVTVRVKSFGEETHLTTAKELTKFVFLNSFLYKVTETCKRIINDCHNDLGCCKNVCHIYWLFLLKSEGIDTSENGEREIGLSPLQILCDGTQPSKRKCKYHLKHIVGLEYLQINMQKKSKMKPQLSVRTKESQSLSCTPVLCSMLNTHKEQRAGPVDASGVGHRNSRQREKIRGPSWWLRVKRIYHLSSAVLFPQFLKTYEFLVVRTSKYSVNWSEAGGLLEARSFEISLGNIARPVSLKNKEINNKSNKLNKNLVLDYCAVLLPLCRDGVGVRISMCMNGGKLWWCLLFVCFLRGGGVSSEPFWLKNNVHNFYYEIKKVKYFFFSGLTKLIDQKYIVEQHSRKNLKVNFLWSKRMDESQSITFHNICWNWNLLSSCFALNFRTRSVQYVKRLCRAIFFANNVNICTPGMGLYNLEVSLRLRILKSCFKSKVDFKHIQGCILIVTRNHLLCIQNLMYLIMEFVNYWALAEFKGKGNWYQLVLNQHTISSCLLDSSCLKIRIKQDLIVRKHLLSLTSTFEEGNVEEKVRHETKTAGRVGSELHLIFGPKFHIGINKKEDHL

SEQ ID NO: 817680 - protein, 1028 aa, Homo sapiens
MNFKYSKICIVFIHDADFLKPTYEAVVLFLYYKVLILSSILNSDVFIRNTKIQSLYFFFDQTQIFPFPPPFSSPLLVDRVFPIFINICSHYRVTVVKFSAVFFFFFLLYPVSCSCFSSYVSQYFCLQIKSHLSFKNELSNMMNLLNLPSYNFYVSCKFIYTFSAIVKNWPFNSKKYYPMKHSVKGMLQGLFNSCVAIIILEHHYPLNSTDYKQRKSNYIKQTSQRNSAGLLIPLCSYHKIHFPEDIYSHSLPNSKPFSGSTTFVFNRKMSSICTSLQSSKEGEKDPSILKLLMFEYLCLFTKSHLIFLKSKLDIQVFIRNLHDSEENEIDVGSFGYVKDIVEDNYLKKSFLLRIVDLTKQLKSVTPQERPFIEAKNCWRSVMQVFLFPTSKAVDYLVCSPLCYLSIIFETSRFFKISYWKDETFKLKPKIDLKEKENINAVNLGWLQILTININKWSSRINYLWNTNGQVTVRVKSFGEETHLTTAKELTKFVFLNSFLYKVTETCKRIINDCHNDLGCCKNVCHIYWLFLLKSEGIDTSENGEREIGLSPLQILCDGTQPSKRKCKYHLKHIVGLEYLQINMQKKSKMKPQLSVRTKESQSLSCTPVLCSMLNTHKEQRAGPVDASGVGHRNSRQREKIRGPSWWLRVKRIYHLSSAVLFPQFLKTYEFLVVRTSKYSVNWSEAGGLLEARSFEISLGNIARPVSLKNKLINNKSNKVNKNLVLDYCAVLLPLCRDGVGVRISMCMNGGKLWWCLFVVCFLRGGGVSSEPFWLKNNVHNFYYEILKVKYFFFSGLTKLIDQKYIVEQHSRKNLKVNFLWSKRMDKSQSITFHNICWNWNLLSSCFALNFRTRSVQYVKRLCRAIFFANNVNICTPGMGLYNLEVSLRLRILKSCFKSKVDFKHIQGCILIVTRNHLLCIQNLMYLIMEFVNYGPLPNFKGKGNWYQLVLNQHTISSCLLDSSCLKIRIKQDLIVRKHLLSLTSTFEEGNVEEKVRHETKTAGRVGSELHLIFGPKFHIGINKKEDHL

SEQ ID NO: 817681 - protein, 223 aa, Homo sapiens; identical to SEQ ID NO: 817671

SEQ ID NO: 817682 - protein, 285 aa, Homo sapiens
MSEQSICQARAAVMVYDDANKKWVPAGGSTGFSRVHIYHHTGNNTFRVVGRKIQDHQVVINCAIPKGLKYNQATQTFHQWRDARQVYGLNFGSKEDANVFASAMMHALEVLNSQETGPTLPRQNSQLPAQVQNGPSQEELEIQRRQLQEQQRQKELERERLERERMERERLERERLERERLERERLEQEQLERERQERERQERLERQERLERQERLDRERQERQERERLERLERERQERERQEQLEREQLEWERERRISSAGKKFTNSSVFLYLSLDDVSCAVMC

SEQ ID NO: 817683 - protein, 338 aa, Homo sapiens
MSEQSICQARAAVMVYDDANKKWVPAGGSTGFSRVHIYHHTGNNTFRVVGRKIQDHQVVINCAIPKGLKYNQATQTFHQWRDARQVYGLNFGSKEDANVFASAMMHALEVLNSQETGPTLPRQNSQLPAQVQNGPSQEELEIQRRQLQEQQRQKELERERLERERMERERLERERLERERLERERLEQEQLERERQERERQERLERQERLERQERLERQERLDRERQERQERERLERLERERQERERQEQLEREQLEWERERRISSAAAPASVETPLNSVLGDSSASEPGLQAASQPAETPSQQGIVLGPLAPPPPPPLPPGPAQASVALPPPPGPLH

SEQ ID NO: 817684 - protein, 234 aa, Homo sapiens
MSEQSICQARAAVMVYDDANKKWVPAGGSTGFSRVHIYHHTGNNTFRVVGRKIQDHQVVINCAIPKGLKYNQATQTFHQWRDARQVYGLNFGSKEDANVFASAMMHALEVLNSQETGPTLPRQNSQLPAQVQNGPSQEELEIQRRQLQEQQRQKELERERLERERMERERLERERLERERLERERLEQEQLERERQERERQERLERQERLERQERLERQERLDRERQERQERER

SEQ ID NO: 817685 - protein, 294 aa, Homo sapiens
MSEQSICQARAAVMVYDDANKKWVPAGGSTGFSRVHIYHHTGNNTFRVVGRKIQDHQVVINCAIPKGLKYNQATQTFHQWRDARQVYGLNFGSKEDANVFASAMMHALEVLNSQETGPTLPRQNSQLPAQVQNGPSQEELEIQRRQLQEQQRQKELERERLERERMERERLERERLERERLERERLEQEQLERERQERERQERLERQERLERQERLERQERLDRERQERQERERLERLERERQERERQEQLEREQLEWERERRISSAVNRVSVRQELLVMVYDDANKKWVPAGG

SEQ ID NO: 817686 - protein, 466 aa, Homo sapiens
MSEQSICQARAAVMVYDDANKKWVPAGGSTGFSRVHIYHHTGNNTFRVVGRKIQDHQVVINCAIPKGLKYNQATQTFHQWRDARQVYGLNFGSKEDANVFASAMMHALEVLNSQETGPTLPRQNSQLPAQVQNGPSQEELEIQRRQLQEQQRQKELERERLERERMERERLERERLERERLERERLEQEQLERERQERERQERLERQERLERQERLERQERLDRERQERQERERLERLERERQERERQEQLEREQLEWERERRISSAAPSSDSSLYNAPLPEYSSCQPPSAPPPSYAKVISAPVSDATPDYAVVTALPPTSTPPTPPLRHSATRFATSLGSAFHPVLPHYATVPRPLNKNSRPSSPVNTPSSQPPATKPCAWSTSNFSPLPPSPPIMISSPPGKATGPRPVLPVCVSSPVPQMPPSPTAPNGLVDSVTYPVSPPPTSGPAAPPPPPPLPSLASLSH

SEQ ID NO: 817687 - protein, 460 aa, Homo sapiens
MSEQSICQARAAVMVYDDANKKWVPAGGSTGFSRVHIYHHTGNNTFRVVGRKIQDHQVVINCAIPKGLKYNQATQTFHQWRDARQVYGLNFGSKEDANVFASAMMHALEVLNSQETGPTLPRQNSQLPAQVQNGPSQEELEIQRRQLQEQQRQKELERERLERERMERERLERERLERERLERERLEQEQLERERQERERQERLERQERLERQERLDRERQERQERERLERLERERQERERQEQLEREQLEWERERRISSAAPSSDSSLYNAPLPEYSSCQPPSAPPPSYAKVISAPVSDATPDYAVVTALPPTSTPPTPPLRHSATRFATSLGSAFHPVLPHYATVPRPLNKNSRPSSPVNTPSSQPPATKPCAWSTSNFSPLPPSPPIMISSPPGKATGPRPVLPVCVSSPVPQMPPSPTAPNGLVDSVTYPVSPPPTSGPAAPPPPPPLPSLASLSH

SEQ ID NO: 817688 - protein, 428 aa, Homo sapiens
MITGVFSMRLWTPVGVLTSLAYCLHQRRVALAELQEADGQCPVDRSLLKLKMVQVVFRHGARSPLKPLPLEEQVEWNPQLLEVPPQTQFDYTVTNLAGGPKPYSPYDSQYHETTLKGGMFAGQLTKVGMQQMFALGERLRKNYVEDIPFLSPTFNPQEVFIRSTNIFRNLESTRCLLAGLFQCQKEGPIIIHTDEADSEVLYPNYQSCWSLRQRTRGRRQTASLQPGISEDLKKVKDRMGIDSSDKVDFFILLDNVAAEQAHNLPSCPMLKRFARMIEQRAVDTSLYILPKEDRESLQMAVGPFLHILESNLLKAMDSATAPDKIRKLYLYAAHDVTFIPLLMTLGIFDHKWPPFAVDLTMELYQHLESKEWFVQLYYHGKEQVPRGCPDGLCPLDMFLNAMSVYTLSPEKYHALCSQTQVMEVGNEE

SEQ ID NO: 817689 - protein, 141 aa, Homo sapiens [sequence omitted]

SEQ ID NO: 817690 - protein, 119 aa, Homo sapiens
MITGVFSMRLWTPVGVLTSLAYCLHQRRVALAELQEADGQCPVDRSLLKLKMVQVVFRHGARSPLKPLPLEEQVRGRPGLGWWGEDRVPGQESRPDTHLQSFTRAERGSGWVQKKGKQQ

SEQ ID NO: 817691 - protein, 111 aa, Homo sapiens
MITGVFSMRLWTPVGVLTSLAYCLHQRRVALAELQEADGQCPVDRSLLKLKMVQVVFRHGARSPLKPLPLEEQVQVEPQYKGPNQIQVDYSYNLAGIQTFSYISNHNTVGQ

SEQ ID NO: 817692 - protein, 428 aa, Homo sapiens; identical to SEQ ID NO: 817688

SEQ ID NO: 817693 - protein, 377 aa, Homo sapiens
MVQVVFRHGARSPLKPLPLEEQVEWNPQLLEVPPQTQFDYTVTNLAGGPKPYSPYDSQYHETTLKGGMFAGQLTKVGMQQMFALGERLRKNYVEDIPFLSPTFNPQEVFIRSTNIFRNLESTRCLLAGLFQCQKEGPIIIHTDEADSEVLYPNYQSCWSLRQRTRGRRQTASLQPGISEDLKKVKDRMGIDSSDKVDFFILLDNVAAEQAHNLPSCPMLKRFARMIEQRAVDTSLYILPKEDRESLQMAVGPFLHILESNLLKAMDSATAPDKIRKLYLYAAHDVTFIPLLMTLGIFDHKWPPFAVDLTMELYQHLESKEWFVQLYYHGKEQVPRGCPDGLCPLDMFLNAMSVYTLSPEKYHALCSQTQVMEVGNEE

SEQ ID NO: 817694 - protein, 160 aa, Homo sapiens [sequence omitted]

SEQ ID NO: 817695 - protein, 148 aa, Homo sapiens
MITGVFSMRLWTPVGVLTSLAYCLHQRRVALAELQEADGQCPVDRSLLKLKMVQVVFRHGARSPLKPLPLEEQVEWNPQLLEVPPQTQFDYTVTNLAGGPKPYSPYDSQYHETTLKGGMFAGQLTKVGMQQMFALGERLRKNYVEDMA

SEQ ID NO: 817696 - protein, 643 aa, Homo sapiens
PLPLSGRPAPPHPLPRGSRGLAPYPHLKTTMATIPDWKLQLLARRRQEEASVRGREKAERERLSQMPAWKRGLLERRRAKLGLSPGEPSPVLGTVEAGPPDPDESAVLLEAIGPVHQNRFIRQERQQQQQQQQRSEELLAERKPGPLEARERRPSPGEMRDQSPKGRESREERLSPRETRERRLGIGGAQELSLRPLEARDWRQSPGEVGDRSSRLSEAWKWRLSPGETPERSLRLAESREQSPRRKEVESRLSPGESAYQKLGLTEAHKWRPDSRESQEQSLVQLEATEWRLRSGEERQDYSEECGRKEEWPVPGVAPKETAELSETLTREAQGNSSAGVEAAEQRPVEDGERGMKPTEGWKWTLNSGKAREWTPRDIEAQTQKPEPPESAEKLLESPGVEAGEGEAEKEEAGAQGRPLRALQNCCSVPSPLPPEDAGTGGLRQQEEEAVELQPPPPAPLSPPPPAPTAPQPPGDPLMSRLFYGVKAGPGVGAPRRSGHTFTVNPRRSVPPATPATPTSPATVDAAVPGAGKKRYPTAEEILVLGGYLRLSRSCLAKGSPERHHKQLKISFSETALETTYQYPSESSVLEELGPEPEVPSAPNPPAAQPDDEEDEEELLLLQPELQGGLRTKALIVDESCRR

SEQ ID NO: 817697 - protein, 274 aa, Homo sapiens
PLPLSGRPAPPHPLPRGSRGLAPYPHLKTTMATIPDWKLQLLARRRQEEASVRGREKAERERLSQMPAWKRGLLERRRAKLGLSPGEPSPVLGTVEAGPPDPDESAVLLEAIGPVHQNRFIRQERQQQQQQQQRSEELLAERKPGPLEARERRPSPPQPLQPQLMLQSRGLGRSGTQLPRRSWFWGATSVSAAAALPRGPPKDTTNSLRSPSARQPWRPRTNTPPRVRYWRSWARSLRSPVPPTLQQPNPTTKRMRKSCCCCSQSSRAGCAPRP

SEQ ID NO: 817698 - protein, 613 aa, Homo sapiens
MATIPDWKLQLLARRRQEEASVRGREKAERERLSQMPAWKRGLLERRRAKLGLSPGEPSPVLGTVEAGPPDPDESAVLLEAIGPVHQNRFIRQERQQQQQQQQRSEELLAERKPGPLEARERRPSPGEMRDQSPKGRESREERLSPRETRERRLGIGGAQELSLRPLEARDWRQSPGEVGDRSSRLSEAWKWRLSPGETPERSLRLAESREQSPRRKEVESRLSPGESAYQKLGLTEAHKWRPDSRESQEQSLVQLEATEWRLRSGEERQDYSEECGRKEEWPVPGVAPKETAELSETLTREAQGNSSAGVEAAEQRPVEDGERGMKPTEGWKWTLNSGKAREWTPRDIEAQTQKPEPPESAEKLLESPGVEAGEGEAEKEEAGAQGRPLRALQNCCSVPSPLPPEDAGTGGLRQQEEEAVELQPPPPAPLSPPPPAPTAPQPPGDPLMSRLFYGVKAGPGVGAPRRSGHTFTVNPRRSVPPATPATPTSPATVDAAVPGAGKKRYPTAEEILVLGGYLRLSRSCLAKGSPERHHKQLKISFSETALETTYQYPSESSVLEELGPEPEVPSAPNPPAAQPDDEEDEEELLLLQPELQGGLRTKALIVDESCRR

SEQ ID NO: 817699 - protein, 400 aa, Homo sapiens
MATIPDWKLQLLARRRQEEASVRGREKAERERLSQMPAWKRGLLERRRAKLGLSPGEPSPVLGTVEAGPPDPDESAVLLEAIGPVHQNRFIRQERQQQQQQQQRSEELLAERKPGPLEARERRPSPGEMRDQSPKGRESREERLSPRETRERRLGIGGAQELSLRPLEARDWRQSPGEVGDRSSRLSEAWKWRLSPGETPERSLRLAESREQSPRRKEVESRLSPGESAYQKLGLTEAHKWRPDSRESQEQSLVQLEATEWRLRSGEERQDYSEECGRKEEWPVPGVAPKETAELSETLTREAQGNSSAGVEAAEQRPVEDGERGMKPTEGWKWTLPPPLTTAWFTNSISSQPHLPKSQVYKPRLLAVSAWNSLLCPLQSPHWSDLKVWLPPLFLSITLP

SEQ ID NO: 817700 - protein, 613 aa, Homo sapiens; identical to SEQ ID NO: 817698

SEQ ID NO: 817701 - protein, 613 aa, Homo sapiens; identical to SEQ ID NO: 817698

SEQ ID NO: 817702 - protein, 613 aa, Homo sapiens; identical to SEQ ID NO: 817698

SEQ ID NO: 817703 - protein, 507 aa, Homo sapiens
MYCAYTIPGMGGNSLMYYYNGKAVYAPSASTADYNRDSPGYPSSKPATSTFPSSFFMQDGHHSSDPWSSSSGMNQPGYAGMLGNSSHIPQSSSYCSLHPHERLSYPSHSSADINSSLPPMSTFHRSGTNHYSTSSCTPPANGTDSIMANRGSGAAGSSQTGDALGKALASIYSPDHTNNSFSSNPSTPVGSPPSLSAGTAVWSRNGGQASSSPNYEGPLHSLQSRIEDRLERLDDAIHVLRNHAVGPSTAMPGGHGDMHGIIGPSHNGAMGGLGSGYGTGLLSANRHSLMVGTHREDGVALRGSHSLLPNQVPVPQLPVQSATSPDLNPPQDPYRGMPPGLQGQSVSSGSSEIKSDDEGDENLQDTKSSEDKKLDDDKKDIKSITSNNDDEDLTPEQKAEREKERRMANNARERLRVRDINEAFKELGRMVQLHLKSDKPQTKLLILHQAVAVILSLEQQVRERNLNPKAACLKRREEEKVSSEPPPLSLAGPHPGMGDASNHMGQM

SEQ ID NO: 817704 - protein, 660 aa, Homo sapiens
RQILYEMEMDIATFMAKMFSPPVSSGKNGPTSLASGHFTGSNVEDRSSSGSWGNGGHPSPSRNYGDGTPYDHMTSRDLGSHDNLSPPFVNSRIQSKTERGSYSSYGRESNLQGCHQQSLLGGDMDMGNPGTLSPTKPGSQYYQYSSNNPRRRPLHSSAMEVQTKKVRKVPPGLPSSVYAPSASTADYNRDSPGYPSSKPATSTFPSSFFMQDGHHSSDPWSSSSGMNQPGYAGMLGNSSHIPQSSSYCSLHPHERLSYPSHSSADINSSLPPMSTFHRSGTNHYSTSSCTPPANGTDSIMANRGSGAAGSSQTGDALGKALASIYSPDHTNNSFSSNPSTPVGSPPSLSAGTAVWSRNGGQASSSPNYEGPLHSLQSRIEDRLERLDDAIHVLRNHAVGPSTAMPGGHGDMHGIIGPSHNGAMGGLGSGYGTGLLSANRHSLMVGTHREDGVALRGSHSLLPNQVPVPQLPVQSATSPDLNPPQDPYRGMPPGLQGQSVSSGSSEIKSDDEGDENLQDTKSSEDKKLDDDKKDIKSITSNNDDEDLTPEQKAEREKERRMANNARERLRVRDINEAFKELGRMVQLHLKSDKPQTKLLILHQAVAVILSLEQQVRERNLNPKAACLKRREEEKVSSEPPPLSLAGPHPGMGDASNHMGQM

SEQ ID NO: 817705 - protein, 702 aa, Homo sapiens
GGSWLCVCGSVVAAAAAAAGRQQARERAQEQAAAVAAAVRHERRLGAGGARRAPSRARAMFSPPVSSGKNGPTSLASGHFTGSNVEDRSSSGSWGNGGHPSPSRNYGDGTPYDHMTSRDLGSHDNLSPPFVNSRIQSKTERGSYSSYGRESNLQGCHQQSLLGGDMDMGNPGTLSPTKPGSQYYQYSSNNPRRRPLHSSAMEVQTKKVRKVPPGLPSSVYAPSASTADYNRDSPGYPSSKPATSTFPSSFFMQDGHHSSDPWSSSSGMNQPGYAGMLGNSSHIPQSSSYCSLHPHERLSYPSHSSADINSSLPPMSTFHRSGTNHYSTSSCTPPANGTDSIMANRGSGAAGSSQTGDALGKALASIYSPDHTNNSFSSNPSTPVGSPPSLSAGTAVWSRNGGQASSSPNYEGPLHSLQSRIEDRLERLDDAIHVLRNHAVGPSTAMPGGHGDMHGIIGPSHNGAMGGLGSGYGTGLLSANRHSLMVGTHREDGVALRGSHSLLPNQVPVPQLPVQSATSPDLNPPQDPYRGMPPGLQGQSVSSGSSEIKSDDEGDENLQDTKSSEDKKLDDDKKDIKSITSNNDDEDLTPEQKAEREKERRMANNARERLRVRDINEAFKELGRMVQLHLKSDKPQTKLLILHQAVAVILSLEQQVRERNLNPKAACLKRREEEKVSSEPPPLSLAGPHPGMGDASNHMGQM

SEQ ID NO: 817706 - protein, 638 aa, Homo sapiens
MLKMFFRISQVAGSSWYSKDVEDRSSSGSWGNGGHPSPSRNYGDGTPYDHMTSRDLGSHDNLSPPFVNSRIQSKTERGSYSSYGRESNLQGCHQQSLLGGDMDMGNPGTLSPTKPGSQYYQYSSNNPRRRPLHSSAMEVQTKKVRKVPPGLPSSVYAPSASTADYNRDSPGYPSSKPATSTFPSSFFMQDGHHSSDPWSSSSGMNQPGYAGMLGNSSHIPQSSSYCSLHPHERLSYPSHSSADINSSLPPMSTFHRSGTNHYSTSSCTPPANGTDSIMANRGSGAAGSSQTGDALGKALASIYSPDHTNNSFSSNPSTPVGSPPSLSAGTAVWSRNGGQASSSPNYEGPLHSLQSRIEDRLERLDDAIHVLRNHAVGPSTAMPGGHGDMHGIIGPSHNGAMGGLGSGYGTGLLSANRHSLMVGTHREDGVALRGSHSLLPNQVPVPQLPVQSATSPDLNPPQDPYRGMPPGLQGQSVSSGSSEIKSDDEGDENLQDTKSSEDKKLDDDKKDIKSITSNNDDEDLTPEQKAEREKERRMANNARERLRVRDINEAFKELGRMVQLHLKSDKPQTKLLILHQAVAVILSLEQQVRERNLNPKAACLKRREEEKVSSEPPPLSLAGPHPGMGDASNHMGQM

SEQ ID NO: 817707 - protein, 537 aa, Homo sapiens
MDMGNPGTLSPTKPGSQYYQYSSNNPRRRPLHSSAMEVQTKKVRKVPPGLPSSVYAPSASTADYNRDSPGYPSSKPATSTFPSSFFMQDGHHSSDPWSSSSGMNQPGYAGMLGNSSHIPQSSSYCSLHPHERLSYPSHSSADINSSLPPMSTFHRSGTNHYSTSSCTPPANGTDSIMANRGSGAAGSSQTGDALGKALASIYSPDHTNNSFSSNPSTPVGSPPSLSAGTAVWSRNGGQASSSPNYEGPLHSLQSRIEDRLERLDDAIHVLRNHAVGPSTAMPGGHGDMHGIIGPSHNGAMGGLGSGYGTGLLSANRHSLMVGTHREDGVALRGSHSLLPNQVPVPQLPVQSATSPDLNPPQDPYRGMPPGLQGQSVSSGSSEIKSDDEGDENLQDTKSSEDKKLDDDKKDIKSITSNNDDEDLTPEQKAEREKERRMANNARERLRVRDINEAFKELGRMVQLHLKSDKPQTKLLILHQAVAVILSLEQQVRERNLNPKAACLKRREEEKVSSEPPPLSLAGPHPGMGDASNHMGQM

SEQ ID NO: 817708 - protein, 537 aa, Homo sapiens; identical to SEQ ID NO: 817707

SEQ ID NO: 817709 - protein, 537 aa, Homo sapiens; identical to SEQ ID NO: 817707

SEQ ID NO: 817710 - protein, 667 aa, Homo sapiens
MHHQQRMAALGTDKELSDLLDFSAMFSPPVSSGKNGPTSLASGHFTGSNVEDRSSSGSWGNGGHPSPSRNYGDGTPYDHMTSRDLGSHDNLSPPFVNSRIQSKTERGSYSSYGRESNLQGCHQQSLLGGDMDMGNPGTLSPTKPGSQYYQYSSNNPRRRPLHSSAMEVQTKKVRKVPPGLPSSVYAPSASTADYNRDSPGYPSSKPATSTFPSSFFMQDGHHSSDPWSSSSGMNQPGYAGMLGNSSHIPQSSSYCSLHPHERLSYPSHSSADINSSLPPMSTFHRSGTNHYSTSSCTPPANGTDSIMANRGSGAAGSSQTGDALGKALASIYSPDHTNNSFSSNPSTPVGSPPSLSAGTAVWSRNGGQASSSPNYEGPLHSLQSRIEDRLERLDDAIHVLRNHAVGPSTAMPGGHGDMHGIIGPSHNGAMGGLGSGYGTGLLSANRHSLMVGTHREDGVALRGSHSLLPNQVPVPQLPVQSATSPDLNPPQDPYRGMPPGLQGQSVSSGSSEIKSDDEGDENLQDTKSSEDKKLDDDKKDIKSITSNNDDEDLTPEQKAEREKERRMANNARERLRVRDINEAFKELGRMVQLHLKSDKPQTKLLILHQAVAVILSLEQQVRERNLNPKAACLKRREEEKVSSEPPPLSLAGPHPGMGDASNHMGQM

SEQ ID NO: 817711 - protein, 667 aa, Homo sapiens; identical to SEQ ID NO: 817710

SEQ ID NO: 817712 - protein, 643 aa, Homo sapiens
MFSPPVSSGKNGPTSLASGHFTGSNVEDRSSSGSWGNGGHPSPSRNYGDGTPYDHMTSRDLGSHDNLSPPFVNSRIQSKTERGSYSSYGRESNLQGCHQQSLLGGDMDMGNPGTLSPTKPGSQYYQYSSNNPRRRPLHSSAMEVQTKKVRKVPPGLPSSVYAPSASTADYNRDSPGYPSSKPATSTFPSSFFMQDGHHSSDPWSSSSGMNQPGYAGMLGNSSHIPQSSSYCSLHPHERLSYPSHSSADINSSLPPMSTFHRSGTNHYSTSSCTPPANGTDSIMANRGSGAAGSSQTGDALGKALASIYSPDHTNNSFSSNPSTPVGSPPSLSAGTAVWSRNGGQASSSPNYEGPLHSLQSRIEDRLERLDDAIHVLRNHAVGPSTAMPGGHGDMHGIIGPSHNGAMGGLGSGYGTGLLSANRHSLMVGTHREDGVALRGSHSLLPNQVPVPQLPVQSATSPDLNPPQDPYRGMPPGLQGQSVSSGSSEIKSDDEGDENLQDTKSSEDKKLDDDKKDIKSITSNNDDEDLTPEQKAEREKERRMANNARERLRVRDINEAFKELGRMVQLHLKSDKPQTKLLILHQAVAVILSLEQQVRERNLNPKAACLKRREEEKVSSEPPPLSLAGPHPGMGDASNHMGQM

SEQ ID NO: 817713 - protein, 625 aa, Homo sapiens
MEEDSRDVEDRSSSGSWGNGGHPSPSRNYGDGTPYDHMTSRDLGSHDNLSPPFVNSRIQSKTERGSYSSYGRESNLQGCHQQSLLGGDMDMGNPGTLSPTKPGSQYYQYSSNNPRRRPLHSSAMEVQTKKVRKVPPGLPSSVYAPSASTADYNRDSPGYPSSKPATSTFPSSFFMQDGHHSSDPWSSSSGMNQPGYAGMLGNSSHIPQSSSYCSLHPHERLSYPSHSSADINSSLPPMSTFHRSGTNHYSTSSCTPPANGTDSIMANRGSGAAGSSQTGDALGKALASIYSPDHTNNSFSSNPSTPVGSPPSLSAGTAVWSRNGGQASSSPNYEGPLHSLQSRIEDRLERLDDAIHVLRNHAVGPSTAMPGGHGDMHGIIGPSHNGAMGGLGSGYGTGLLSANRHSLMVGTHREDGVALRGSHSLLPNQVPVPQLPVQSATSPDLNPPQDPYRGMPPGLQGQSVSSGSSEIKSDDEGDENLQDTKSSEDKKLDDDKKDIKSITSNNDDEDLTPEQKAEREKERRMANNARERLRVRDINEAFKELGRMVQLHLKSDKPQTKLLILHQAVAVILSLEQQVRERNLNPKAACLKRREEEKVSSEPPPLSLAGPHPGMGDASNHMGQM

SEQ ID NO: 817714 - protein, 196 aa, Homo sapiens
MHHQQRMAALGTDKELSDLLDFSAMFSPPVSSGKNGPTSLASGHFTGSNVEDRSSSGSWGNGGHPSPSRNYGDGTPYDHMTSRDLGSHDNLSPPFVNSRIQSKTERGSYSSYGRESNLQGCHQQSLLGGDMDMGNPGTLSPTKPGSQYYQYSSNNPRRRPLHSSAMEVQTKKVRKVPPGLPSSINGMCWKGQQIRS

SEQ ID NO: 817715 - protein, 537 aa, Homo sapiens; identical to SEQ ID NO: 817707

SEQ ID NO: 817716 - protein, 115 aa, Homo sapiens
LSVRKGLFGKAKGSCQFKEMPPILRCPMALPCPPPLPDHGNKISFLVISSLGQREFQTRLLARLGPTLSGFTQEPWLKWTKGLPSTEEATRVIRVLDDGQAIAHTCLSSSSIWCS

SEQ ID NO: 817717 - protein, 115 aa, Homo sapiens; identical to SEQ ID NO: 817716

SEQ ID NO: 817718 - protein, 115 aa, Homo sapiens; identical to SEQ ID NO: 817716

SEQ ID NO: 817719 - protein, 115 aa, Homo sapiens; identical to SEQ ID NO: 817716

SEQ ID NO: 817720 - protein, 495 aa, Homo sapiens
MRLTRCQAALAAAITLNLLVLFYVSWLQHQPRNSRARGPRRASAAGPRVTVLVREFEAFDNAVPELVDSFLQQDPAQPVVVAADTLPYPPLALPRIPNVRLALLQPALDRPAAASRPETYVATEFVALVPDGARAEAPGLLERMVEALRAGSARLVAAPVATANPARCLALNVSLREWTARYGAAPAAPRCDALDGDAVVLLRARDLFNLSAPLARPVGTSLFLQTALRGWAVQLLDLTFAAARQPPLATAHARWKAEREGRARRAALLRALGIRLVSWEGGRLEWFGCNKETTRCFGTVVGDTPAYLYEERWTPPCCLRALRETARYVVGVLEAAGVRYWLEGGSLLGAARHGDIIPWDYDVDLGIYLEDVGNCEQLRGAEAGSVVDERGFVWEKAVEGDFFRVQYSESNHLHVDLWPFYPRNGVMTKDTWLDHRQDVEFPEHFLQPLVPLPFAGFVAQAPNNYRRFLELKFGPGVIENPQYPNPALLSLTGSG

SEQ ID NO: 817721 - protein, 495 aa, Homo sapiens; identical to SEQ ID NO: 817720

SEQ ID NO: 817722 - protein, 495 aa, Homo sapiens; identical to SEQ ID NO: 817720

SEQ ID NO: 817723 - protein, 495 aa, Homo sapiens; identical to SEQ ID NO: 817720

SEQ ID NO: 817724 - protein, 495 aa, Homo sapiens; identical to SEQ ID NO: 817720

SEQ ID NO: 817725 - protein, 495 aa, Homo sapiens; identical to SEQ ID NO: 817720

SEQ ID NO: 817726 - protein, 292 aa, Homo sapiens
QKVVELCYHAAHLTELSNHMFHGGSGGDGSNSGSYSGDASGAVTVWEVVSLLGKLLGTVVALKVVLYLLRVCLAMAWKSGGASHSELIHNLRKNGIIKTDKVFEVMLATDRSHYAKCNPYMDSPQSIGFQATISAPHMHAYALELLFDQLHEGAKALDVGSGSGILTACFARMVGCTGKVIGIDHIKELVDDSVNNVRKDDPTLLSSGRVQLVVGDGRMGYAEEAPYDAIHVGAAAPVVPQALIDQLKPGGRLILPVGPAGGNQMLEQYDKLQDGSIKMKPLMGGDIRAFNR

SEQ ID NO: 817727 - protein, 286 aa, Homo sapiens
RHRAHASPRGMPGARSGGSGGDGSNSGSYSGDASGAVTVWEVVSLLGKLLGTVVALKVVLYLLRVCLAMAWKSGGASHSELIHNLRKNGIIKTDKVFEVMLATDRSHYAKCNPYMDSPQSIGFQATISAPHMHAYALELLFDQLHEGAKALDVGSGSGILTACFARMVGCTGKVIGIDHIKELVDDSVNNVRKDDPTLLSSGRVQLVVGDGRMGYAEEAPYDAIHVGAAAPVVPQALIDQLKPGGRLILPVGPAGGNQMLEQYDKLQDGSIKMKPLMGGDIRAFNR

SEQ ID NO: 817728 - protein, 286 aa, Homo sapiens; identical to SEQ ID NO: 817727

SEQ ID NO: 817729 - protein, 286 aa, Homo sapiens; identical to SEQ ID NO: 817727

SEQ ID NO: 817730 - protein, 135 aa, Homo sapiens
RHRAHASPRGMPGARSGGSGGDGSNSGSYSGDASGAVTVWEVVSLLGKLLGTVVALKVVLYLLRVCLAMAWKSGGASHSELIHNLRKNGIIKTDKVFEVMLATDRSHYAKCNPYMDSPQSIAGFAELLSLGSGRL

SEQ ID NO: 817731 - protein, 257 aa, Homo sapiens
QKVVELCYHAAHLTELSNHMFHGGSGGDGSNSGSYSGDASGAVTVWEVVSLLGKLLGTVVALKVVLYLLRVCLAMAWKSGGASHSELIHNLRKNGIIKTDKVFEVMLATDRSHYAKCNPYMDSPQSIGFQATISAPHMVGCTGKVIGIDHIKELVDDSVNNVRKDDPTLLSSGRVQLVVGDGRMGYAEEAPYDAIHVGAAAPVVPQALIDQLKPGGRLILPVGPAGGNQMLEQYDKLQDGSIKMKPLMGGDIRAFNR

SEQ ID NO: 817732 - protein, 101 aa, Homo sapiens
QKVVELCYHAAHLTELSNHMFHGGSGGDGSNSGSYSGDASGAVTVWEVVSLLGKLLGTVVALKVVLYLLRVCLAMAWKSGGASHSELIHNLRTCICARTSI

SEQ ID NO: 817733 - protein, 268 aa, Homo sapiens
RHRAHASPRGMPGARSGGSGGDGSNSGSYSGDASGAVTVWEVVSLLGKLLGTVVALKVVLYLLRVCLAMAWKSGGASHSELIHNLRKNGIIKTDKVFEVMLATDRSHYAKCNPYMDSPQSIGFQATISAPHMHAYALELLFDQLHEGAKALDVGSGSGILTACFARMDSVNNVRKDDPTLLSSGRVQLVVGDGRMGYAEEAPYDAIHVGAAAPVVPQALIDQLKPGGRLILPVGPAGGNQMLEQYDKLQDGSIKMKPLMGGDIRAFNR

SEQ ID NO: 817734 - protein, 281 aa, Homo sapiens
RHRAHASPRGMPGARSGGSGGDGSNSGSYSGDASGAVTVWEVVSLLGKLLGTVVALKVVLYLLRVCLAMAWKSGGASHSELIHNLRKNGIIKTDKVFEVMLATDRSHYAKCNPYMDSPQSIGFQATISAPHMHAYALELLFDQLHEGAKALDVGSGSGILTACFARMVGCTGKVIGIDHIKELVDVRKDDPTLLSSGRVQLVVGDGRMGYAEEAPYDAIHVGAAAPVVPQALIDQLKPGGRLILPVGPAGGNQMLEQYDKLQDGSIKMKPLMGGDIRAFNR

SEQ ID NO: 817735 - protein, 257 aa, Homo sapiens; identical to SEQ ID NO: 817731

SEQ ID NO: 817736 - protein, 173 aa, Homo sapiens
HEGAKALDATDQIEVLAHMHAYALELLFDQLHEGAKALDVGSGSGILTACFARMVGCTGKVIGIDHIKELVDDSVNNVRKDDPTLLSSGRVQLVVGDGRMGYAEEAPYDAIHVGAAAPVVPQALIDQLKPGGRLILPVGPAGGNQMLEQYDKLQDGSIKMKPLMGGDIRAFNR

SEQ ID NO: 817737 - protein, 215 aa, Homo sapiens
RHRAHASPRGMPGARSGGSGGDGSNSGSYSGDASGAVTVWEVVSLLGKLLGTVVALKVVLYLLRVCLAMAWKSGGASHSELIHNLRKNGIIKTDKVFEVMLATDRSHYAKCNPYMDSPQSIGFQATISAPHMHAYALELLFDQLHEGAKALDVGSGSGILTACFARMVGCTGKVIGIDHIKELVDDSVNNVRKDDPTLLSSGRVQLVGGMQDGIC

SEQ ID NO: 817738 - protein, 286 aa, Homo sapiens; identical to SEQ ID NO: 817727

SEQ ID NO: 817739 - protein, 286 aa, Homo sapiens; identical to SEQ ID NO: 817727

SEQ ID NO: 817740 - protein, 286 aa, Homo sapiens; identical to SEQ ID NO: 817727

SEQ ID NO: 817741 - protein, 257 aa, Homo sapiens
QKVVELCYHAAHLTELSNHMFHGGSGGDGSNSGSYSGDASGAVTVWEVVSLLGKLLGTVVALKVVLYLLRVCLAMAWKSGGASHSELIHNLRSFQATISAPHMHAYALELLFDQLHEGAKALDVGSGSGILTACFARMVGCTGKVIGIDHIKELVDDSVNNVRKDDPTLLSSGRVQLVVGDGRMGYAEEAPYDAIHVGAAAPVVPQALIDQLKPGGRLILPVGPAGGNQMLEQYDKLQDGSIKMKPLMGGDIRAFNR

SEQ ID NO: 817742 - protein, 121 aa, Homo sapiens
IAFYGDHLNPGIAVSRLLHSASDMSVRKDDPTLLSSGRVQLVVGDGRMGYAEEAPYDAIHVGAAAPVVPQALIDQLKPGGRLILPVGPAGGNQMLEQYDKLQDGSIKMKPLMGGDIRAFNR

SEQ ID NO: 817743 - protein, 573 aa, Homo sapiens
RHRAHASPRGMPGARSGGSGGDGSNSGSYSGDASGAVTVWEVVSLLGKLLGTVVALKVVLYLLRVCLAMAWKSGGASHSELIHNLRKNGIIKTDKVFEVMLATDRSHYAKCNPYMDSPQSIGFQATISAPHMHAYALELLFDQLHEGAKALDVGSGSGILTACFARMVGCTGKVIGIDHIKELVDDSVNNVRKDDPTLLSSGRVQLVVGDGRMGYAEEAPYDAIHVGAAAPVVPQALIDQLKPGGRLILPVGPAGGNQMLEQYDKLQDGQPSTHMHSLMHAGLHHHVHFHTSITSTHSQMVPGHAHVSTSKHHSIEPSYSTLPAGICLHSSGSLKDLFCKKPNDPFNRPLQLGHFASQLRYFSSHANHAVATQNREIFIDIRFNTQGPQTAQRCVNRQRECHTIIHLRSFTSPLLKQLPPRNNAPLAKNNTDATKAAGTRTRPPTRGNDPYERRDTQQAVNAQRTRENNRRHTKKGAPATREPERNNTNANQTPGARQTSSPTTPSQRRPTMRHHRGRTQRHPSNAPPHTSDGDQQLAQTQPPRHQLSTHPGSTTPTADHTGQHRQQDRAKTT

SEQ ID NO: 817744 - protein, 2411 aa, Homo sapiens
NSESGESQRGQALGSGASTAPLIPRQGLGGNEPGEPGPEPTEPGAAEPPAPRPPPPPPPPPPPPARSLSRRGGGERSERSAAAEPREARPGGWGGQPGGLGPGAGWEGEEKTKTGPGLSADETAGIMAAQVAPAAASSLGNPPPPPPSELKKAEQQQREEAGVEAAAAAAAERGEMKAAAGQESEGPAVGPPHPLGKELLDGAESNGGGGGGGAGSGGGPGAEPDLKNSNGNAGPRPALNNNLTEPPGGGGGGSSDGVGAPPHSAAAALPPPAYGFGQPYGRSPSAVAAAAAAVFHQQHGGQQSPGLAALQSGGGGGLEPYAGPQQNSHDHGFPNHQYNSYYPNRSAYPPPAPAYALSSPRGGTPGSGAAAAAGSKPPPSSSASASSSSSSFAQQRFGAMGGGGPSAAGGGTPQPTATPTLNQLLTSPSSARGYQGYPGGDYSGGPQDGGAGKGPADMASQCWGAAAAAAAAAAASGGAQQRSHHAPMSPGSSGGGGQPLARTPQPSSPMDQMGKMRPQPYGGTNPYSQQQGPPSGPQQGHGYPGQPYGSQTPQRYPMTMQGRAQSAMGGLSYTQQIPPYGQQGPSGYGQQGQTPYYNQQSPHPQQQQPPYSQQPPSQTPHAQPSYQQQPQSQPPQLQSSQPPYSQQPSQPPHQQSPAPYPSQQSTTQQHPQSQPPYSQPQAQSPYQQQQPQQPAPSTLSQQAAYPQPQSQQSQQTAYSQQRFPPPQELSQDSFGSQASSAPSMTSSKGGQEDMNLSLQSRPSSLPDLSGSIDDLPMGTEGALSPGVSTSGISSSQGEQSNPAQSPFSPHTSPHLPGIRGPSPSPVGSPASVAQSRSGPLSPAAVPGNQMPPRPPSGQSDSIMHPSMNQSSIAQDRGYMQRNPQMPQYSSPQPGSALSPRQPSGGQIHTGMGSYQQNSMGSYGPQGGQYGPQGGYPRQPNYNALPNANYPSAGMAGGINPMGAGGQMHGQPGIPPYGTLPPGRMSHASMGNRPYGPNMANMPPQVGSGMCPPPGGMNRKTQETAVAMHVAANSIQNRPPGYPNMNQGGMMGTGPPYGQGINSMAGMINPQGPPYSMGGTMANNSAGMAASPEMMGLGDVKLTPATKMNNKADGTPKTESKSKKSSSSTTTNEKITKLYELGGEPERKMWVDRYLAFTEEKAMGMTNLPAVGRKPLDLYRLYVSVKEIGGLTQVNKNKKWRELATNLNVGTSSSAASSLKKQYIQCLYAFECKIERGEDPPPDIFAAADSKKSQPKIQPPSPAGSGSMQGPQTPQSTSSSMAEGGDLKPPTPASTPHSQIPPLPGMSRSNSVGIQDAFNDGSDSTFQKRNSMTPNPGYQPSMNTSDMMGRMSYEPNKDPYGSMRKAPGSDPFMSSGQGPNGGMGDPYSRAAGPGLGNVAMGPRQHYPYGGPYDRVRTEPGIGPEGNMSTGAPQPNLMPSNPDSGMYSPSRYPPQQQQQQQQRHDSYGNQFSTQGTPSGSPFPSQQTTMYQQQQQNYKRPMDGTYGPPAKRHEGEMYSVPYSTGQGQPQQQQLPPAQPQPASQQQAAQPSPQQDVYNQYGNAYPATATAATERRPAGGPQNQFPFQFGRDRVSAPPGTNAQQNMPPQMMGGPIQASAEVAQQGTMWQGRNDMTYNYANRQSTGSAPQGPAYHGVNRTDEMLHTDQRANHEGSWPSHGTRQPPYGPSAPVPPMTRPPPSNYQPPPSMQNHIPQVSSPAPLPRPMENRTSPSKSPFLHSGMKMQKAGPPVPASHIAPAPVQPPMIRRDITFPPGSVEATQPVLKQRRRLTMKDIGTPEAWRVMMSLKSGLLAESTWALDTINILLYDDNSIMTFNLSQLPGLLELLVEYFRRCLIEIFGILKEYEVGDPGQRTLLDPGRFSKVSSPAPMEGGEEEEELLGPKLEEEEEEEVVENDEEIAFSGKDKPASENSEEKLISKFDKLPVKIVQKNDPFVVDCSDKLGRVQEFDSGLLHWRIGGGDTTEHIQTHFESKTELLPSRPHAPCPPAPRKHVTTAEGTPGTTDQEGPPPDGPPEKRITATMDDMLSTRSSTLTEDGAKSSEAIKESSKFPFGISPAQSHRNIKILEDEPHSKDETPLCTLLDWQDSLAKRCVCVSNTIRSLSFVPGNDFEMSKHPGLLLILGKLILLHHKHPERKQAPLTYEKEEEQDQGVSCNKVEWWWDCLEMLRENTLVTLANISGQLDLSPYPESICLPVLDGLLHWAVCPSAEAQDPFSTLGPNAVLSPQRLVLETLSKLSIQDNNVDLILATPPFSRLEKLYSTMVRFLSDRKNPVCREMAVVLLANLAQGDSLAARAIAVQKGSIGNLLGFLEDSLAATQFQQSQASLLHMQNPPFEPTSVDMMRRAARALLALAKVDENHSEFTLYESRLLDISVSPLMNSLVSQVICDVLFLIGQS

SEQ ID NO: 817745 - protein, 1717 aa, Homo sapiens
NSESGESQRGQALGSGASTAPLIPRQGLGGNEPGEPGPEPTEPGAAEPPAPRPPPPPPPPPPPPARSLSRRGGGERSERSAAAEPREARPGGWGGQPGGLGPGAGWEGEEKTKTGPGLSADETAGIMAAQVAPAAASSLGNPPPPPPSELKKAEQQQREEAGVEAAAAAAAERGEMKAAAGQESEGPAVGPPHPLGKELLDGAESNGGGGGGGAGSGGGPGAEPDLKNSNGNAGPRPALNNNLTEPPGGGGGGSSDGVGAPPHSAAAALPPPAYGFGQPYGRSPSAVAAAAAAVFHQQHGGQQSPGLAALQSGGGGGLEPYAGPQQNSHDHGFPNHQYNSYYPNRSAYPPPAPAYALSSPRGGTPGSGAAAAAGSKPPPSSSASASSSSSSFAQQRFGAMGGGGPSAAGGGTPQPTATPTLNQLLTSPSSARGYQGYPGGDYSGGPQDGGAGKGPADMASQCWGAAAAAAAAAAASGGAQQRSHHAPMSPGSSGGGGQPLARTPQPSSPMDQMGKMRPQPYGGTNPYSQQQGPPSGPQQGHGYPGQPYGSQTPQRYPMTMQGRAQSAMGGLSYTQQIPPYGQQGPSGYGQQGQTPYYNQQSPHPQQQQPPYSQQPPSQTPHAQPSYQQQPQSQPPQLQSSQPPYSQQPSQPPHQQSPAPYPSQQSTTQQHPQSQPPYSQPQAQSPYQQQQPQQPAPSTLSQQAAYPQPQSQQSQQTAYSQQRFPPPQELSQDSFGSQASSAPSMTSSKGGQEDMNLSLQSRPSSLPDLSGSIDDLPMGTEGALSPGVSTSGISSSQGEQSNPAQSPFSPHTSPHLPGIRGPSPSPVGSPASVAQSRSGPLSPAAVPGNQMPPRPPSGQSDSIMHPSMNQSSIAQDRGYMQRNPQMPQYSSPQPGSALSPRQPSGGQIHTGMGSYQQNSMGSYGPQGGQYGPQGGYPRQPNYNALPNANYPSAGMAGGINPMGAGGQMHGQPGIPPYGTLPPGRMSHASMGNRPYGPNMANMPPQVGSGMCPPPGGMNRKTQETAVAMHVAANSIQNRPPGYPNMNQGGMMGTGPPYGQGINSMAGMINPQGPPYSMGGTMANNSAGMAASPEMMGLGDVKLTPATKMNNKADGTPKTESKSKKSSSSTTTNEKITKLYELGGEPERKMWVDRYLAFTEEKAMGMTNLPAVGRKPLDLYRLYVSVKEIGGLTQVNKNKKWRELATNLNVGTSSSAASSLKKQYIQCLYAFECKIERGEDPPPDIFAAADSKKSQPKIQPPSPAGSGSMQGPQTPQSTSSSMAEGGDLKPPTPASTPHSQIPPLPGMSRSNSVGIQDAFNDGSDSTFQKRNSMTPNPGYQPSMNTSDMMGRMSYEPNKDPYGSMRKAPGSDPFMSSGQGPNGGMGDPYSRAAGPGLGNVAMGPRQHYPYGGPYDRVRTEPGIGPEGNMSTGAPQPNLMPSNPDSGMYSPSRYPPQQQQQQQQRHDSYGNQFSTQGTPSGSPFPSQQTTMYQQQQQNYKRPMDGTYGPPAKRHEGEMYSVPYSTGQGQPQQQQLPPAQPQPASQQQAAQPSPQQDVYNQYGNAYPATATAATERRPAGGPQNQFPFQFGRDRVSAPPGTNAQQNMPPQMMGGPIQASAEVAQQGTMWQGRNDMTYNYANRQSTGSAPQGPAYHGVNRTDEMLHTDQRANHEGSWPSHGTRQPPYGPSAPVPPMTRPPPSNYQPPPKHMYYNVCIHSGTIS

SEQ ID NO: 817746 - protein, 508 aa, Homo sapiens
NSESGESQRGQALGSGASTAPLIPRQGLGGNEPGEPGPEPTEPGAAEPPAPRPPPPPPPPPPPPARSLSRRGGGERSERSAAAEPREARPGGWGGQPGGLGPGGGVGGGEKTKTGPGLSADETAGIMAAQVAPAAASSLGNPPPPPPSELKKAEQQQREEAGVEAAAAAAAERGEMKAAAGQESEGPAVGPPHPLGKELLDGAESNGGGGGGGAGSGGGPGAEPDLKNSNGNAGPRPALNNNLTEPPGGGGGGSSDGVGAPPHSAAAALPPPAYGFGQPYGRSPSAVAAAAAAVFHQQHGGQQSPGLAALQSGGGGGLEPYAGPQQNSHDHGFPNHQYNSYYPNRSAYPPPAPAYALSSPRGGTPGSGAAAAAGSKPPPSSSASASSSSSSFAQQRFGAMGGGGPSAAGGGTPQPTATPTLNQLLTSPSSARGYQGYPGGDYSGGPQDGGAGKGPADMASQCWGAAAAAAAAAAASGGAQQRSHHAPMSPGSSGGGGQPLARTPQVHS

SEQ ID NO: 817747 - protein, 108 aa, Homo sapiens
MIHLWWTAQISLGVCRSLTVACCTGGLVGGTPLSISRPTSRARQQTGFQEPVFDEARTEEQASKRASPRQAWPHLRPCLGWGMWPGVLLCSPSLGAFFWKNKIASLLK

SEQ ID NO: 817748 - protein, 2411 aa, Homo sapiens; identical to SEQ ID NO: 817744

SEQ ID NO: 817749 - protein, 1902 aa, Homo sapiens
MDQMGKMRPQPYGGTNPYSQQQGPPSGPQQGHGYPGQPYGSQTPQRYPMTMQGRAQSAMGGLSYTQQIPPYGQQGPSGYGQQGQTPYYNQQSPHPQQQQPPYSQQPPSQTPHAQPSYQQQPQSQPPQLQSSQPPYSQQPSQPPHQQSPAPYPSQQSTTQQHPQSQPPYSQPQAQSPYQQQQPQQPAPSTLSQQAAYPQPQSQQSQQTAYSQQRFPPPQELSQDSFGSQASSAPSMTSSKGGQEDMNLSLQSRPSSLPDLSGSIDDLPMGTEGALSPGVSTSGISSSQGEQSNPAQSPFSPHTSPHLPGIRGPSPSPVGSPASVAQSRSGPLSPAAVPGNQMPPRPPSGQSDSIMHPSMNQSSIAQDRGYMQRNPQMPQYSSPQPGSALSPRQPSGGQIHTGMGSYQQNSMGSYGPQGGQYGPQGGYPRQPNYNALPNANYPSAGMAGGINPMGAGGQMHGQPGIPPYGTLPPGRMSHASMGNRPYGPNMANMPPQVGSGMCPPPGGMNRKTQETAVAMHVAANSIQNRPPGYPNMNQGGMMGTGPPYGQGINSMAGMINPQGPPYSMGGTMANNSAGMAASPEMMGLGDVKLTPATKMNNKADGTPKTESKSKKSSSSTTTNEKITKLYELGGEPERKMWVDRYLAFTEEKAMGMTNLPAVGRKPLDLYRLYVSVKEIGGLTQVNKNKKWRELATNLNVGTSSSAASSLKKQYIQCLYAFECKIERGEDPPPDIFAAADSKKSQPKIQPPSPAGSGSMQGPQTPQSTSSSMAEGGDLKPPTPASTPHSQIPPLPGMSRSNSVGIQDAFNDGSDSTFQKRNSMTPNPGYQPSMNTSDMMGRMSYEPNKDPYGSMRKAPGSDPFMSSGQGPNGGMGDPYSRAAGPGLGNVAMGPRQHYPYGGPYDRVRTEPGIGPEGNMSTGAPQPNLMPSNPDSGMYSPSRYPPQQQQQQQQRHDSYGNQFSTQGTPSGSPFPSQQTTMYQQQQQNYKRPMDGTYGPPAKRHEGEMYSVPYSTGQGQPQQQQLPPAQPQPASQQQAAQPSPQQDVYNQYGNAYPATATAATERRPAGGPQNQFPFQFGRDRVSAPPGTNAQQNMPPQMMGGPIQASAEVAQQGTMWQGRNDMTYNYANRQSTGSAPQGPAYHGVNRTDEMLHTDQRANHEGSWPSHGTRQPPYGPSAPVPPMTRPPPSNYQPPPSMQNHIPQVSSPAPLPRPMENRTSPSKSPFLHSGMKMQKAGPPVPASHIAPAPVQPPMIRRDITFPPGSVEATQPVLKQRRRLTMKDIGTPEAWRVMMSLKSGLLAESTWALDTINILLYDDNSIMTFNLSQLPGLLELLVEYFRRCLIEIFGILKEYEVGDPGQRTLLDPGRFSKVSSPAPMEGGEEEEELLGPKLEEEEEEEVVENDEEIAFSGKDKPASENSEEKLISKFDKLPVKIVQKNDPFVVDCSDKLGRVQEFDSGLLHWRIGGGDTTEHIQTHFESKTELLPSRPHAPCPPAPRKHVTTAEGTPGTTDQEGPPPDGPPEKRITATMDDMLSTRSSTLTEDGAKSSEAIKESSKFPFGISPAQSHRNIKILEDEPHSKDETPLCTLLDWQDSLAKRCVCVSNTIRSLSFVPGNDFEMSKHPGLLLILGKLILLHHKHPERKQAPLTYEKEEEQDQGVSCNKVEWWWDCLEMLRENTLVTLANISGQLDLSPYPESICLPVLDGLLHWAVCPSAEAQDPFSTLGPNAVLSPQRLVLETLSKLSIQDNNVDLILATPPFSRLEKLYSTMVRFLSDRKNPVCREMAVVLLANLAQGDSLAARAIAVQKGSIGNLLGFLEDSLAATQFQQSQASLLHMQNPPFEPTSVDMMRRAARALLALAKVDENHSEFTLYESRLLDISVSPLMNSLVSQVICDVLFLIGQS

SEQ ID NO: 817750 - protein, 2411 aa, Homo sapiens; identical to SEQ ID NO: 817744

SEQ ID NO: 817751 - protein, 2411 aa, Homo sapiens; identical to SEQ ID NO: 817744

SEQ ID NO: 817752 - protein, 1726 aa, Homo sapiens
SVLVGLEDDRVICVERVVSLVIFELAEEGGGVNQPQQSMLTHLKMGKMRPQPYGGTNPYSQQQGPPSGPQQGHGYPGQPYGSQTPQRYPMTMQGRAQSAMGGLSYTQQIPPYGQQGPSGYGQQGQTPYYNQQSPHPQQQQPPYSQQPPSQTPHAQPSYQQQPQSQPPQLQSSQPPYSQQPSQPPHQQSPAPYPSQQSTTQQHPQSQPPYSQPQAQSPYQQQQPQQPAPSTLSQQAAYPQPQSQQSQQTAYSQQRFPPPQELSQDSFGSQASSAPSMTSSKGGQEDMNLSLQSRPSSLPDLSGSIDDLPMGTEGALSPGVSTSGISSSQGEQSNPAQSPFSPHTSPHLPGIRGPSPSPVGSPASVAQSRSGPLSPAAVPGNQMPPRPPSGQSDSIMHPSMNQSSIAQDRGYMQRNPQMPQYSSPQPGSALSPRQPSGGQIHTGMGSYQQNSMGSYGPQGGQYGPQGGYPRQPNYNALPNANYPSAGMAGGINPMGAGGQMHGQPGIPPYGTLPPGRMSHASMGNRPYGPNMANMPPQVGSGMCPPPGGMNRKTQETAVAMHVAANSIQNRPPGYPNMNQGGMMGTGPPYGQGINSMAGMINPQGPPYSMGGTMANNSAGMAASPEMMGLGDVKLTPATKMNNKADGTPKTESKSKKSSSSTTTNEKITKLYELGGEPERKMWVDRYLAFTEEKAMGMTNLPAVGRKPLDLYRLYVSVKEIGGLTQVNKNKKWRELATNLNVGTSSSAASSLKKQYIQCLYAFECKIERGEDPPPDIFAAADSKKSQPKIQPPSPAGSGSMQGPQTPQSTSSSMAEGGDLKPPTPASTPHSQIPPLPGMSRSNSVGIQDAFNDGSDSTFQKRNSMTPNPGYQPSMNTSDMMGRMSYEPNKDPYGSMRKAPGSDPFMSSGQGPNGGMGDPYSRAAGPGLGNVAMGPRQHYPYGGPYDRVRTEPGIGPEGNMSTGAPQPNLMPSNPDSGMYSPSRYPPQQQQQQQQRHDSYGNQFSTQGTPSGSPFPSQQTTMYQQQQQVSSPAPLPRPMENRTSPSKSPFLHSGMKMQKAGPPVPASHIAPAPVQPPMIRRDITFPPGSVEATQPVLKQRRRLTMKDIGTPEAWRVMMSLKSGLLAESTWALDTINILLYDDNSIMTFNLSQLPGLLELLVEYFRRCLIEIFGILKEYEVGDPGQRTLLDPGRFSKVSSPAPMEGGEEEEELLGPKLEEEEEEEVVENDEEIAFSGKDKPASENSEEKLISKFDKLPVKIVQKNDPFVVDCSDKLGRVQEFDSGLLHWRIGGGDTTEHIQTHFESKTELLPSRPHAPCPPAPRKHVTTAEGTPGTTDQEGPPPDGPPEKRITATMDDMLSTRSSTLTEDGAKSSEAIKESSKFPFGISPAQSHRNIKILEDEPHSKDETPLCTLLDWQDSLAKRCVCVSNTIRSLSFVPGNDFEMSKHPGLLLILGKLILLHHKHPERKQAPLTYEKEEEQDQGVSCNKVEWWWDCLEMLRENTLVTLANISGQLDLSPYPESICLPVLDGLLHWAVCPSAEAQDPFSTLGPNAVLSPQRLVLETLSKLSIQDNNVDLILATPPFSRLEKLYSTMVRFLSDRKNPVCREMAVVLLANLAQGDSLAARAIAVQKGSIGNLLGFLEDSLAATQFQQSQASLLHMQNPPFEPTSVDMMRRAARALLALAKVDENHSEFTLYESRLLDISVSPLMNSLVSQVICDVLFLIGQS

SEQ ID NO: 817753 - protein, 1500 aa, Homo sapiens
NSESGESQRGQALGSGASTAPLIPRQGLGGNEPGEPGPEPTEPGAAEPPAPRPPPPPPPPPPPPARSLSRRGGGERSERSAAAEPREARPGGWGGQPGGLGPGGGVGGGEKTKTGPGLSADETAGIMAAQVAPAAASSLGNPPPPPPSELKKAEQQQREEAGVEAAAAAAAERGEMKAAAGQESEGPAVGPPHPLGKELLDGAESNGGGGGGGAGSGGGPGAEPDLKNSNGNAGPRPALNNNLTEPPGGGGGGSSDGVGAPPHSAAAALPPPAYGFGQPYGRSPSAVAAAAAAVFHQQHGGQQSPGLAALQSGGGGGLEPYAGPQQNSHDHGFPNHQYNSYYPNRSAYPPPAPAYALSSPRGGTPGSGAAAAAGSKPPPSSSASASSSSSSFAQQRFGAMGGGGPSAAGGGTPQPTATPTLNQLLTSPSSARGYQGYPGGDYSGGPQDGGAGKGPADMASQCWGAAAAAAAAAAASGGAQQRSHHAPMSPGSSGGGGQPLARTPQPSSPMDQMGKMRPQPYGGTNPYSQQQGPPSGPQQGHGYPGQPYGSQTPQRYPMTMQGRAQSAMGGLSYTQQIPPYGQQGPSGYGQQGQTPYYNQQSPHPQQQQPPYSQQPPSQTPHAQPSYQQQPQSQPPQLQSSQPPYSQQPSQPPHQQSPAPYPSQQSTTQQHPQSQPPYSQPQAQSPYQQQQPQQPAPSTLSQQAAYPQPQSQQSQQTAYSQQRFPPPQELSQDSFGSQASSAPSMTSSKGGQEDMNLSLQSRPSSLPDLSGSIDDLPMGTEGALSPGVSTSGISSSQGEQSNPAQSPFSPHTSPHLPGIRGPSPSPVGSPASVAQSRSGPLSPAAVPGNQMPPRPPSGQSDSIMHPSMNQSSIAQDRGYMQRNPQMPQYSSPQPGSALSPRQPSGGQIHTGMGSYQQNSMGSYGPQGGQYGPQGGYPRQPNYNALPNANYPSAGMAGGINPMGAGGQMHGQPGIPPYGTLPPGRMSHASMGNRPYGPNMANMPPQVGSGMCPPPGGMNRKTQETAVAMHVAANSIQNRPPGYPNMNQGGMMGTGPPYGQGINSMAGMINPQGPPYSMGGTMANNSAGMAASPEMMGLGDVKLTPATKMNNKADGTPKTESKSKKSSSSTTTNEKITKLYELGGEPERKMWVDRYLAFTEEKAMGMTNLPAVGRKPLDLYRLYVSVKEIGGLTQVNKNKKWRELATNLNVGTSSSAASSLKKQYIQCLYAFECKIERGEDPPPDIFAAADSKKSQPKIQPPSPAGSGSMQGPQTPQSTSSSMAEGGDLKPPTPASTPHSQIPPLPGMSRSNSVGIQDAFNDGSDSTFQKRNSMTPNPGYQPSMNTSDMMGRMSYEPNKDPYGSMRKAPGSDPFMSSGQGPNGGMGDPYSRAAGPGLGNVAMGPRQHYPYGGPYDRVRTEPGIGPEGNMSTGAPQPNLMPSNPDSGMYSPSRYPPQQQQQQQQRHDSYGNQFSTQGTPSGSPFPSQQTTMYQQQQQEPRRHGG

SEQ ID NO: 817754 - protein, 2411 aa, Homo sapiens; identical to SEQ ID NO: 817744

SEQ ID NO: 817755 - protein, 1530 aa, Homo sapiens
NSESGESQRGQALGSGASTAPLIPRQGLGGNEPGEPGPEPTEPGAAEPPAPRPPPPPPPPPPPPARSLSRRGGGERSERSAAAEPREARPGGWGGQPGGLGPGGGVGGGEKTKTGPGLSADETAGIMAAQVAPAAASSLGNPPPPPPSELKKAEQQQREEAGVEAAAAAAAERGEMKAAAGQESEGPAVGPPHPLGKELLDGAESNGGGGGGGAGSGGGPGAEPDLKNSNGNAGPRPALNNNLTEPPGGGGGGSSDGVGAPPHSAAAALPPPAYGFGQPYGRSPSAVAAAAAAVFHQQHGGQQSPGLAALQSGGGGGLEPYAGPQQNSHDHGFPNHQYNSYYPNRSAYPPPAPAYALSSPRGGTPGSGAAAAAGSKPPPSSSASASSSSSSFAQQRFGAMGGGGPSAAGGGTPQPTATPTLNQLLTSPSSARGYQGYPGGDYSGGPQDGGAGKGPADMASQCWGAAAAAAAAAAASGGAQQRSHHAPMSPGSSGGGGQPLARTPQPSSPMDQMGKMRPQPYGGTNPYSQQQGPPSGPQQGHGYPGQPYGSQTPQRYPMTMQGRAQSAMGGLSYTQQIPPYGQQGPSGYGQQGQTPYYNQQSPHPQQQQPPYSQQPPSQTPHAQPSYQQQPQSQPPQLQSSQPPYSQQPSQPPHQQSPAPYPSQQSTTQQHPQSQPPYSQPQAQSPYQQQQPQQPAPSTLSQQAAYPQPQSQQSQQTAYSQQRFPPPQELSQDSFGSQASSAPSMTSSKGGQEDMNLSLQSRPSSLPDLSGSIDDLPMGTEGALSPGVSTSGISSSQGEQSNPAQSPFSPHTSPHLPGIRGPSPSPVGSPASVAQSRSGPLSPAAVPGNQMPPRPPSGQSDSIMHPSMNQSSIAQDRGYMQRNPQMPQYSSPQPGSALSPRQPSGGQIHTGMGSYQQNSMGSYGPQGGQYGPQGGYPRQPNYNALPNANYPSAGMAGGINPMGAGGQMHGQPGIPPYGTLPPGRMSHASMGNRPYGPNMANMPPQVGSGMCPPPGGMNRKTQETAVAMHVAANSIQNRPPGYPNMNQGGMMGTGPPYGQGINSMAGMINPQGPPYSMGGTMANNSAGKCKSFSLGISSRVTSQLNLLDLRIFFSFTGMAASPEMMGLGDVKLTPATKMNNKADGTPKTESKSKKSSSSTTTNEKITKLYELGGEPERKMWVDRYLAFTEEKAMGMTNLPAVGRKPLDLYRLYVSVKEIGGLTQVNKNKKWRELATNLNVGTSSSAASSLKKQYIQCLYAFECKIERGEDPPPDIFAAADSKKSQPKIQPPSPAGSGSMQGPQTPQSTSSSMAEGGDLKPPTPASTPHSQIPPLPGMSRSNSVGIQDAFNDGSDSTFQKRNSMTPNPGYQPSMNTSDMMGRMSYEPNKDPYGSMRKAPGSDPFMSSGQGPNGGMGDPYSRAAGPGLGNVAMGPRQHYPYGGPYDRVRTEPGIGPEGNMSTGAPQPNLMPSNPDSGMYSPSRYPPQQQQQQQQRHDSYGNQFSTQGTPSGSPFPSQQTTMYQQQQQEPRRHGG

SEQ ID NO: 817756 - protein, 2411 aa, Homo sapiens; identical to SEQ ID NO: 817744

SEQ ID NO: 817757 - protein, 991 aa, Homo sapiens
MDQMGKMRPQPYGGTNPYSQQQGPPSGPQQGHGYPGQPYGSQTPQRYPMTMQGRAQSAMGGLSYTQQIPPYGQQGPSGYGQQGQTPYYNQQSPHPQQQQPPYSQQPPSQTPHAQPSYQQQPQSQPPQLQSSQPPYSQQPSQPPHQQSPAPYPSQQSTTQQHPQSQPPYSQPQAQSPYQQQQPQQPAPSTLSQQAAYPQPQSQQSQQTAYSQQRFPPPQELSQDSFGSQASSAPSMTSSKGGQEDMNLSLQSRPSSLPDLSGSIDDLPMGTEGALSPGVSTSGISSSQGEQSNPAQSPFSPHTSPHLPGIRGPSPSPVGSPASVAQSRSGPLSPAAVPGNQMPPRPPSGQSDSIMHPSMNQSSIAQDRGYMQRNPQMPQYSSPQPGSALSPRQPSGGQIHTGMGSYQQNSMGSYGPQGGQYGPQGGYPRQPNYNALPNANYPSAGMAGGINPMGAGGQMHGQPGIPPYGTLPPGRMSHASMGNRPYGPNMANMPPQVGSGMCPPPGGMNRKTQETAVAMHVAANSIQNRPPGYPNMNQGGMMGTGPPYGQGINSMAGMINPQGPPYSMGGTMANNSAGMAASPEMMGLGDVKLTPATKMNNKADGTPKTESKSKKSSSSTTTNEKITKLYELGGEPERKMWVDRYLAFTEEKAMGMTNLPAVGRKPLDLYRLYVSVKEIGGLTQVNKNKKWRELATNLNVGTSSSAASSLKKQYIQCLYAFECKIERGEDPPPDIFAAADSKKSQPKIQPPSPAGSGSMQGPQTPQSTSSSMAEGGDLKPPTPASTPHSQIPPLPGMSRSNSVGIQDAFNDGSDSTFQKRNSMTPNPGYQPSMNTSDMMGRMSYEPNKDPYGSMRKAPGSDPFMSSGQGPNGGMGDPYSRAAGPGLGNVAMGPRQHYPYGGPYDRVRTEPGIGPEGNMSTGAPQPNLMPSNPDSGMYSPSRYPPQQQQQQQQRHDSYGNQFSTQGTPSGSPFPSQQTTMYQQQQQEPRRHGG

SEQ ID NO: 817758 - protein, 757 aa, Homo sapiens
MTSSKGGQEDMNLSLQSRPSSLPDLSGSIDDLPMGTEGALSPGVSTSGISSSQGEQSNPAQSPFSPHTSPHLPGIRGPSPSPVGSPASVAQSRSGPLSPAAVPGNQMPPRPPSGQSDSIMHPSMNQSSIAQDRGYMQRNPQMPQYSSPQPGSALSPRQPSGGQIHTGMGSYQQNSMGSYGPQGGQYGPQGGYPRQPNYNALPNANYPSAGMAGGINPMGAGGQMHGQPGIPPYGTLPPGRMSHASMGNRPYGPNMANMPPQVGSGMCPPPGGMNRKTQETAVAMHVAANSIQNRPPGYPNMNQGGMMGTGPPYGQGINSMAGMINPQGPPYSMGGTMANNSAGMAASPEMMGLGDVKLTPATKMNNKADGTPKTESKSKKSSSSTTTNEKITKLYELGGEPERKMWVDRYLAFTEEKAMGMTNLPAVGRKPLDLYRLYVSVKEIGGLTQVNKNKKWRELATNLNVGTSSSAASSLKKQYIQCLYAFECKIERGEDPPPDIFAAADSKKSQPKIQPPSPAGSGSMQGPQTPQSTSSSMAEGGDLKPPTPASTPHSQIPPLPGMSRSNSVGIQDAFNDGSDSTFQKRNSMTPNPGYQPSMNTSDMMGRMSYEPNKDPYGSMRKAPGSDPFMSSGQGPNGGMGDPYSRAAGPGLGNVAMGPRQHYPYGGPYDRVRTEPGIGPEGNMSTGAPQPNLMPSNPDSGMYSPSRYPPQQQQQQQQRHDSYGNQFSTQGTPSGSPFPSQQTTMYQQQQQEPRRHGG

SEQ ID NO: 817759 - protein, 903 aa, Homo sapiens
QINAILTSTPISGLSYKQEIQTPHAQPSYQQQPQSQPPQLQSSQPPYSQQPSQPPHQQSPAPYPSQQSTTQQHPQSQPPYSQPQAQSPYQQQQPQQPAPSTLSQQAAYPQPQSQQSQQTAYSQQRFPPPQELSQDSFGSQASSAPSMTSSKGGQEDMNLSLQSRPSSLPDLSGSIDDLPMGTEGALSPGVSTSGISSSQGEQSNPAQSPFSPHTSPHLPGIRGPSPSPVGSPASVAQSRSGPLSPAAVPGNQMPPRPPSGQSDSIMHPSMNQSSIAQDRGYMQRNPQMPQYSSPQPGSALSPRQPSGGQIHTGMGSYQQNSMGSYGPQGGQYGPQGGYPRQPNYNALPNANYPSAGMAGGINPMGAGGQMHGQPGIPPYGTLPPGRMSHASMGNRPYGPNMANMPPQVGSGMCPPPGGMNRKTQETAVAMHVAANSIQNRPPGYPNMNQGGMMGTGPPYGQGINSMAGMINPQGPPYSMGGTMANNSAGMAASPEMMGLGDVKLTPATKMNNKADGTPKTESKSKKSSSSTTTNEKITKLYELGGEPERKMWVDRYLAFTEEKAMGMTNLPAVGRKPLDLYRLYVSVKEIGGLTQVNKNKKWRELATNLNVGTSSSAASSLKKQYIQCLYAFECKIERGEDPPPDIFAAADSKKSQPKIQPPSPAGSGSMQGPQTPQSTSSSMAEGGDLKPPTPASTPHSQIPPLPGMSRSNSVGIQDAFNDGSDSTFQKRNSMTPNPGYQPSMNTSDMMGRMSYEPNKDPYGSMRKAPGSDPFMSSGQGPNGGMGDPYSRAAGPGLGNVAMGPRQHYPYGGPYDRVRTEPGIGPEGNMSTGAPQPNLMPSNPDSGMYSPSRYPPQQQQQQQQRHDSYGNQFSTQGTPSGSPFPSQQTTMYQQQQQEPRRHGG

SEQ ID NO: 817760 - protein, 613 aa, Homo sapiens
MMSLKSGLLAESTWALDTINILLYDDNSIMTFNLSQLPGLLELLVEYFRRCLIEIFGILKEYEVGDPGQRTLLDPGRFSKVSSPAPMEGGEEEEELLGPKLEEEEEEEVVENDEEIAFSGKDKPASENSEEKLISKFDKLPVKIVQKNDPFVVDCSDKLGRVQEFDSGLLHWRIGGGDTTEHIQTHFESKTELLPSRPHAPCPPAPRKHVTTAEGTPGTTDQEGPPPDGPPEKRITATMDDMLSTRSSTLTEDGAKSSEAIKESSKFPFGISPAQSHRNIKILEDEPHSKDETPLCTLLDWQDSLAKRCVCVSNTIRSLSFVPGNDFEMSKHPGLLLILGKLILLHHKHPERKQAPLTYEKEEEQDQGVSCNKVEWWWDCLEMLRENTLVTLANISGQLDLSPYPESICLPVLDGLLHWAVCPSAEAQDPFSTLGPNAVLSPQRLVLETLSKLSIQDNNVDLILATPPFSRLEKLYSTMVRFLSDRKNPVCREMAVVLLANLAQGDSLAARAIAVQKGSIGNLLGFLEDSLAATQFQQSQASLLHMQNPPFEPTSVDMMRRAARALLALAKVDENHSEFTLYESRLLDISVSPLMNSLVSQVICDVLFLIGQS

SEQ ID NO: 817761 - protein, 842 aa, Homo sapiens
RGRGTIWGLACAMGRPRAFVVGPLICVQHFICSVHEMMGGPIQASAEVAQQGTMWQGRNDMTYNYANRQSTGSAPQGPAYHGVNRTDEMLHTDQRANHEGSWPSHGTRQPPYGPSAPVPPMTRPPPSNYQPPPSMQNHIPQVSSPAPLPRPMENRTSPSKSPFLHSGMKMQKAGPPVPASHIAPAPVQPPMIRRDITFPPGSVEATQPVLKQRRRLTMKDIGTPEAWRVMMSLKSGLLAESTWALDTINILLYDDNSIMTFNLSQLPGLLELLVEYFRRCLIEIFGILKEYEVGDPGQRTLLDPGRFSKVSSPAPMEGGEEEEELLGPKLEEEEEEEVVENDEEIAFSGKDKPASENSEEKLISKFDKLPVKIVQKNDPFVVDCSDKLGRVQEFDSGLLHWRIGGGDTTEHIQTHFESKTELLPSRPHAPCPPAPRKHVTTAEGTPGTTDQEGPPPDGPPEKRITATMDDMLSTRSSTLTEDGAKSSEAIKESSKFPFGISPAQSHRNIKILEDEPHSKDETPLCTLLDWQDSLAKRCVCVSNTIRSLSFVPGNDFEMSKHPGLLLILGKLILLHHKHPERKQAPLTYEKEEEQDQGVSCNKVEWWWDCLEMLRENTLVTLANISGQLDLSPYPESICLPVLDGLLHWAVCPSAEAQDPFSTLGPNAVLSPQRLVLETLSKLSIQDNNVDLILATPPFSRLEKLYSTMVRFLSDRKNPVCREMAVVLLANLAQGDSLAARAIAVQKGSIGNLLGFLEDSLAATQFQQSQASLLHMQNPPFEPTSVDMMRRAARALLALAKVDENHSEFTLYESRLLDISVSPLMNSLVSQVICDVLFLIGQS

SEQ ID NO: 817762 - protein, 775 aa, Homo sapiens
NSESGESQRGQALGSGASTAPLIPRQGLGGNEPGEPGPEPTEPGAAEPPAPRPPPPPPPPPPPPARSLSRRGGGERSERSAAAEPREARPGGWGGQPGGLGPGGGVGGGEKTKTGPGLSADETAGIMAAQVAPAAASSLGNPPPPPPSELKKAEQQQREEAGVEAAAAAAAERGEMKAAAGQESEGPAVGPPHPLGKELLDGAESNGGGGGGGAGSGGGPGAEPDLKNSNGNAGPRPALNNNLTEPPGGGGGGSSDGVGAPPHSAAAALPPPAYGFGQPYGRSPSAVAAAAAAVFHQQHGGQQSPGLAALQSGGGGGLEPYAGPQQNSHDHGFPNHQYNSYYPNRSAYPPPAPAYALSSPRGGTPGSGAAAAAGSKPPPSSSASASSSSSSFAQQRFGAMGGGGPSAAGGGTPQPTATPTLNQLLTSPSSARGYQGYPGGDYSGGPQDGGAGKGPADMASQCWGAAAAAAAAAAASGGAQQRSHHAPMSPGSSGGGGQPLARTPQPSSPMDQMGKMRPQPYGGTNPYSQQQGPPSGPQQGHGYPGQPYGSQTPQRYPMTMQGRAQSAMGGLSYTQQIPPYGQQGPSGYGQQGQTPYYNQQSPHPQQQQPPYSQQPPSQTPHAQPSYQQQPQSQPPQLQSSQPPYSQQPSQPPHQQSPAPYPSQQSTTQQHPQSQPPYSQPQAQSPYQQQQPQQPAPSTLSQQAAYPQPQSQQSQQTAYSQQRFPPPQELSQDSFGSQASSAPSMTSSKGGQEDMNLSLQSRPSSLPVSISAPSER

SEQ ID NO: 817763 - protein, 864 aa, Homo sapiens
NSESGESQRGQALGSGASTAPLIPRQGLGGNEPGEPGPEPTEPGAAEPPAPRPPPPPPPPPPPPARSLSRRGGGERSERSAAAEPREARPGGWGGQPGGLGPGGGVGGGEKTKTGPGLSADETAGIMAAQVAPAAASSLGNPPPPPPSELKKAEQQQREEAGVEAAAAAAAERGEMKAAAGQESEGPAVGPPHPLGKELLDGAESNGGGGGGGAGSGGGPGAEPDLKNSNGNAGPRPALNNNLTEPPGGGGGGSSDGVGAPPHSAAAALPPPAYGFGQPYGRSPSAVAAAAAAVFHQQHGGQQSPGLAALQSGGGGGLEPYAGPQQNSHDHGFPNHQYNSYYPNRSAYPPPAPAYALSSPRGGTPGSGAAAAAGSKPPPSSSASASSSSSSFAQQRFGAMGGGGPSAAGGGTPQPTATPTLNQLLTSPSSARGYQGYPGGDYSGGPQDGGAGKGPADMASQCWGAAAAAAAAAAASGGAQQRSHHAPMSPGSSGGGGQPLARTPQPSSPMDQMGKMRPQPYGGTNPYSQQQGPPSGPQQGHGYPGQPYGSQTPQRYPMTMQGRAQSAMGGLSYTQQIPPYGQQGPSGYGQQGQTPYYNQQSPHPQQQQPPYSQQPPSQTPHAQPSYQQQPQSQPPQLQSSQPPYSQQPSQPPHQQSPAPYPSQQSTTQQHPQSQPPYSQPQAQSPYQQQQPQQPAPSTLSQQAAYPQPQSQQSQQTAYSQQRFPPPQELSQDSFGSQASSAPSMTSSKGGQEDMNLSLQSRPSSLPDLSGSIDDLPMGTEGALSPGVSTSGISSSQGEQSNPAQSPFSPHTSPHLPGIRGPSPSPVGSPASVAQSRSGPLSPAAVPATDAPGTSGIDTYDILEP

SEQ ID NO: 817764 - protein, 785 aa, Homo sapiens
NSESGESQRGQALGSGASTAPLIPRQGLGGNEPGEPGPEPTEPGAAEPPAPRPPPPPPPPPPPPARSLSRRGGGERSERSAAAEPREARPGGWGGQPGGLGPGGGVGGGEKTKTGPGLSADETAGIMAAQVAPAAASSLGNPPPPPPSELKKAEQQQREEAGVEAAAAAAAERGEMKAAAGQESEGPAVGPPHPLGKELLDGAESNGGGGGGGAGSGGGPGAEPDLKNSNGNAGPRPALNNNLTEPPGGGGGGSSDGVGAPPHSAAAALPPPAYGFGQPYGRSPSAVAAAAAAVFHQQHGGQQSPGLAALQSGGGGGLEPYAGPQQNSHDHGFPNHQYNSYYPNRSAYPPPAPAYALSSPRGGTPGSGAAAAAGSKPPPSSSASASSSSSSFAQQRFGAMGGGGPSAAGGGTPQPTATPTLNQLLTSPSSARGYQGYPGGDYSGGPQDGGAGKGPADMASQCWGAAAAAAAAAAASGGAQQRSHHAPMSPGSSGGGGQPLARTPQPSSPMDQMGKMRPQPYGGTNPYSQQQGPPSGPQQGHGYPGQPYGSQTPQRYPMTMQGRAQSAMGGLSYTQQIPPYGQQGPSGYGQQGQTPYYNQQSPHPQQQQPPYSQQPPSQTPHAQPSYQQQPQSQPPQLQSSQPPYSQQPSQPPHQQSPAPYPSQQSTTQQHPQSQPPYSQPQAQSPYQQQQPQQPAPSTLSQQAAYPQPQSQQSQQTAYSQQRFPPPQELSQDSFGSQASSAPSMTSSKGGQEDMNLSLQSRPSSLPPSSPMDQMGKMRPQPYGGT

SEQ ID NO: 817765 - protein, 681 aa, Homo sapiens
NSESGESQRGQALGSGASTAPLIPRQGLGGNEPGEPGPEPTEPGAAEPPAPRPPPPPPPPPPPPARSLSRRGGGERSERSAAAEPREARPGGWGGQPGGLGPGGGVGGGEKTKTGPGLSADETAGIMAAQVAPAAASSLGNPPPPPPSELKKAEQQQREEAGVEAAAAAAAERGEMKAAAGQESEGPAVGPPHPLGKELLDGAESNGGGGGGGAGSGGGPGAEPDLKNSNGNAGPRPALNNNLTEPPGGGGGGSSDGVGAPPHSAAAALPPPAYGFGQPYGRSPSAVAAAAAAVFHQQHGGQQSPGLAALQSGGGGGLEPYAGPQQNSHDHGFPNHQYNSYYPNRSAYPPPAPAYALSSPRGGTPGSGAAAAAGSKPPPSSSASASSSSSSFAQQRFGAMGGGGPSAAGGGTPQPTATPTLNQLLTSPSSARGYQGYPGGDYSGGPQDGGAGKGPADMASQCWGAAAAAAAAAAASGGAQQRSHHAPMSPGSSGGGGQPLARTPQPSSPMDQMGKMRPQPYGGTNPYSQQQGPPSGPQQGHGYPGQPYGSQTPQRYPMTMQGRAQSAMGGLSYTQQIPPYGQQGPSGYGQQGQTPYYNQQSPHPQQQQPPYSQQPPSQTPHAQPSYQQQPQSQPPQLQSSQPPYSQQPSQPPHQQSPAPYPSQHKLSTAHTRAYSISRYRL

SEQ ID NO: 817766 - protein, 648 aa, Homo sapiens
NSESGESQRGQALGSGASTAPLIPRQGLGGNEPGEPGPEPTEPGAAEPPAPRPPPPPPPPPPPPARSLSRRGGGERSERSAAAEPREARPGGWGGQPGGLGPGAGWEGEEKTKTGPGLSADETAGIMAAQVAPAAASSLGNPPPPPPSELKKAEQQQREEAGVEAAAAAAAERGEMKAAAGQESEGPAVGPPHPLGKELLDGAESNGGGGGGGAGSGGGPGAEPDLKNSNGNAGPRPALNNNLTEPPGGGGGGSSDGVGAPPHSAAAALPPPAYGFGQPYGRSPSAVAAAAAAVFHQQHGGQQSPGLAALQSGGGGGLEPYAGPQQNSHDHGFPNHQYNSYYPNRSAYPPPAPAYALSSPRGGTPGSGAAAAAGSKPPPSSSASASSSSSSFAQQRFGAMGGGGPSAAGGGTPQPTATPTLNQLLTSPSSARGYQGYPGGDYSGGPQDGGAGKGPADMASQCWGAAAAAAAAAAASGGAQQRSHHAPMSPGSSGGGGQPLARTPQPSSPMDQMGKMRPQPYGGTNPYSQQQGPPSGPQQGHGYPGQPYGSQTPQRYPMTMQGRAQSAMGGLSYTQQIPPYGQQGPSGYGQQGQTPYYNQQSPHPQQQQPPYSQQPPSMRPTSFCSLSTCYPASQHPGPNFHCLEFPWL

SEQ ID NO: 817767 - protein, 109 aa, Homo sapiens
MRPCMLAFYTHHQCIASHKTLHLSSCRRVSAKSIFSFPTDSSLWTTRPQRVWSTGPDSILQPAKSSPSAAAATLLPATTVPDPSCPTFVSAAATVSTTTAPVLSASILP

SEQ ID NO: 817768 - protein, 498 aa, Homo sapiens
AWVAHPAPGGTGRQLPSAPVTCLELEEVGIPLPTPGTGGAAPRGFQDLSSGSWTRSDRGRASWRREARRRPREAQLLGATGMARAMAAAWPLLLVALLVLSWPPPGTGDVVVQAPTQVPGFLGDSVTLPCYLQVPNMEVTHVSQLTWARHGESGSMAVFHQTQGPSYSESKRLEFVAARLGAELRNASLRMFGLRVEDEGNYTCLFVTFPQGSRSVDIWLRVLAKPQNTAEVQKVQLTGEPVPMARCVSTGGRPPAQITWHSDLGGMPNTSQVPGFLSGTVTVTSLWILVPSSQVDGKNVTCKVEHESFEKPQLLTVNLTVYYPPEVSISGYDNNWYLGQNEATLTCDARSNPEPTGYNWSTTMGPLPPFAVAQGAQLLIRPVDKPINTTLICNVTNALGARQAELTVQVKEGPPSEHSGMSRNAIIFLVLGILVFLILLGIGIYFYWSKCSREVLWHCHLCPSSTEHASASANGHVSYSAVSRENSSSQDPQTEGTR

SEQ ID NO: 817769 - protein, 473 aa, Homo sapiens
AWVAHPAPGGTGRQLPSAPVTCLELEEVGIPLPTPGTGGAAPRGFQDLSSGSWTRSDRGRASWRREARRRPREAQLLGATGMARAMAAAWPLLLVALLVLSWPPPGTGDVVVQAPTQVPGFLGDSVTLPCYLQVPNMEVTHVSQLTWARHGESGSMAVFHQTQGPSYSESKRLEFVAARLGAELRNASLRMFGLRVEDEGNYTCLFVTFPQGSRSVDIWLRVLAKPQNTAEVQKVQLTGEPVPMARCVSTGGRPPAQITWHSDLGGMPNTSQVPGFLSGTVTVTSLWILVPSSQVDGKNVTCKVEHESFEKPQLLTVNLTVYYPPEVSISGYDNNWYLGQNEATLTCDARSNPEPTGYNWSTTMGPLPPFAVAQGAQLLIRPVDKPINTTLICNVTNALGARQAELTVQVKEGPPSEHSGMSRNAIIFLVLGILVFLILLGIGIYFYWSKCSREVLWHCHLCPSSEHHQSCRN

SEQ ID NO: 817770 - protein, 498 aa, Homo sapiens; identical to SEQ ID NO: 817768

SEQ ID NO: 817771 - protein, 498 aa, Homo sapiens; identical to SEQ ID NO: 817768

SEQ ID NO: 817772 - protein, 498 aa, Homo sapiens; identical to SEQ ID NO: 817768

SEQ ID NO: 817773 - protein, 445 aa, Homo sapiens
AWVAHPAPGGTGRQLPSAPVTCLELEEVGIPLPTPGTGGAAPRGFQDLSSGSWTRSDRGRASWRREARRRPREAQLLGATGMARAMAAAWPLLLVALLVLSWPPPGTGDVVVQAPTQVPGFLGDSVTLPCYLQVPNMEVTHVSQLTWARHGESGSMAVFHQTQGPSYSESKRLEFVAARLGAELRNASLRMFGLRVEDEGNYTCLFVTFPQGSRSVDIWLRVLAKPQNTAEVQKVQLTGEPVPMARCVSTGGRPPAQITWHSDLGGMPNTSQVPGFLSGTVTVTSLWILVPSSQVDGKNVTCKVEHESFEKPQLLTVNLTVYYPPEVSISGYDNNWYLGQNEATLTCDARSNPEPTGYNWSTTMGPLPPFAVAQGAQLLIRPVDKPINTTLICNVTNALGARQAELTVQVKGTEHASASANGHVSYSAVSRENSSSQDPQTEGTR

SEQ ID NO: 817774 - protein, 498 aa, Homo sapiens; identical to SEQ ID NO: 817768

SEQ ID NO: 817775 - protein, 370 aa, Homo sapiens
AWVAHPAPGGTGRQLPSAPVTCLELEEVGIPLPTPGTGGAAPRGFQDLSSGSWTRSDRGRASWRREARRRPREAQLLGATGMARAMAAAWPLLLVALLVLSWPPPGTGDVVVQAPTQVPGFLGDSVTLPCYLQVPNMEVTHVSQLTWARHGESGSMAVFHQTQGPSYSESKRLEFVAARLGAELRNASLRMFGLRVEDEGNYTCLFVTFPQGSRSVDIWLRVLAKPQNTAEVQKVQLTGEPVPMARCVSTGGRPPAQITWHSDLGGMPNTSQVPGFLSGTVTVTSLWILVPSSQVDGKNVTCKVEHESFEKPQLLTVNLTVYYPPEVSISGYDNNWYLGQNEATLTCDARSNPEPTGYNWSTYRACQRLS

SEQ ID NO: 817776 - protein, 135 aa, Homo sapiens [sequence omitted]

SEQ ID NO: 817777 - protein, 498 aa, Homo sapiens; identical to SEQ ID NO: 817768

SEQ ID NO: 817778 - protein, 498 aa, Homo sapiens; identical to SEQ ID NO: 817768

SEQ ID NO: 817779 - protein, 498 aa, Homo sapiens; identical to SEQ ID NO: 817768

SEQ ID NO: 817780 - protein, 498 aa, Homo sapiens; identical to SEQ ID NO: 817768

SEQ ID NO: 817781 - protein, 71 aa, Homo sapiens
KVEHESFEKPQLLTVNLTVYCECAQVSDGKNPCRAAPTTVYTDSPRHCRHCFHHLHRLPRLLSTRPTPIVC

SEQ ID NO: 817782 - protein, 126 aa, Homo sapiens
WDYRREPPRPATMPSCTLNECPLLPRRGSLNDLLLLFLFPAKPQNTAEVQKVQLTGEPVPMARCVSTGGRPPAQITWHSDLGGMPNTSQVPGFLSGTVTVTSLWILVPSSQVDGKNVTCKVEHESF

SEQ ID NO: 817783 - protein, 260 aa, Homo sapiens [sequence omitted]

SEQ ID NO: 817784 - protein, 260 aa, Homo sapiens [sequence omitted]

SEQ ID NO: 817785 - protein, 242 aa, Homo sapiens
MATPPKRSCPSFSASSEGTRIKKISIEGNIAAGKSTFVNILKQLCEDWEVVPEPVARWCNVQSTQDEFEKPERWSFTFQTYACLSRIRAQLASLNGKLKDAEKPVLFFERSVYSDRYIFASNLYESECMNETEWTIYQDWHDWMNNQFGQSLELDGIIYLQATPETCLHRIYLRGRNEEQGIPLEYLEKLHYKHESWLLHRTLKTNFDYLQEVPILTLDVNEDFKDKYESLVEKVKEFLSTL

SEQ ID NO: 817786 - protein, 1464 aa, Homo sapiens [sequence omitted]

SEQ ID NO: 817787 - protein, 1124 aa, Homo sapiens
MLKIMQDYDWHVFSLVTTIFPGYREFISFVKTTVDNSFVGWDMQNVITLDTSFEDAKTQVQLKKIHSSVILLYCSKDEAVLILSEARSLGLTGYDFFWIVPSLVSGNTELIPKEFPSGLISVSYDDWDYSLEARVRDGIGILTTAASSMLEKFSYIPEAKASCYGQMERPEVPMHTLHPFMVNVTWDGKDLSFTEEGYQVHPRLVVIVLNKDREWEKVGKWENHTLSLRHAVWPRYKSFSDCEPDDNHLSIVTLEEAPFVIVEDIDPLTETCVRNTVPCRKFVKINNSTNEGMNVKKCCKGFCIDILKKLSRTVKFTYDLYLVTNGKHGKKVNNVWNGMIGEVVYQRAVMAVGSLTINEERSEVVDFSVPFVETGISVMVSRSNGTVSPSAFLEPFSASVWVMMFVMLLIVSAIAVFVFEYFSPVGYNRNLAKGKAPHGPSFTIGKAIWLLWGLVFNNSVPVQNPKGTTSKIMVSVWAFFAVIFLASYTANLAAFMIQEEFVDQVTGLSDKKFQRPHDYSPPFRFGTVPNGSTERNIRNNYPYMHQYMTKFNQKGVEDALVSLKTGKLDAFIYDAAVLNYKAGRDEGCKLVTIGSGYIFATTGYGIALQKGSPWKRQIDLALLQFVGDGEMEELETLWLTGICHNEKNEVMSSQLDIDNMAGVFYMLAAAMALSLITFIWEHLFYWKLRFCFTGVCSDRPGLLFSISRGIYSCIHGVHIEEKKKSPDFNLTGSQSNMLKLLRSAKNISSMSNMNSSRMDSPKRAADFIQRGSLIMDMVSDKGNLMYSDNRSFQGKESIFGDNMNELQTFVANRQKDNLNNYVFQGQHPLTLNESNPNTVEVAVSTESKANSRPRQLWKKSVDSIRQDSLSQNPVSQRDEATAENRTHSLKSPRYLPEEMAHSDISETSNRATCHREPDNSKNHKTKDNFKRSVASKYPKDCSEVERTYLKTKSSSPRDKIYTIDGEKEPGFHLDPPQFVENVTLPENVDFPDPYQDPSENFRKGDSTLPMNRNPLHNEEGLSNNDQYKLYSKHFTLKDKGSPHSETSERYRQNSTHCRSCLSNMPTYSGHFTMRSPFKCDACLRMGNLYDIDEDQMLQETGMTNAWLLGDAPRTLTNTRCHPRR

SEQ ID NO: 817788 - protein, 510 aa, Homo sapiens
MFWSSLPVNVVICPGEMEELETLWLTGICHNEKNEVMSSQLDIDNMAGVFYMLAAAMALSLITFIWEHLFYWKLRFCFTGVCSDRPGLLFSISRGIYSCIHGVHIEEKKKSPDFNLTGSQSNMLKLLRSAKNISSMSNMNSSRMDSPKRAADFIQRGSLIMDMVSDKGNLMYSDNRSFQGKESIFGDNMNELQTFVANRQKDNLNNYVFQGQHPLTLNESNPNTVEVAVSTESKANSRPRQLWKKSVDSIRQDSLSQNPVSQRDEATAENRTHSLKSPRYLPEEMAHSDISETSNRATCHREPDNSKNHKTKDNFKRSVASKYPKDCSEVERTYLKTKSSSPRDKIYTIDGEKEPGFHLDPPQFVENVTLPENVDFPDPYQDPSENFRKGDSTLPMNRNPLHNEEGLSNNDQYKLYSKHFTLKDKGSPHSETSERYRQNSTHCRSCLSNMPTYSGHFTMRSPFKCDACLRMGNLYDIDEDQMLQETGMTNAWLLGDAPRTLTNTRCHPRR

SEQ ID NO: 817789 - protein, 271 aa, Homo sapiens
MLKIMQDYDWHVFSLVTTIFPGYREFISFVKTTVDNSFVGWDMQNVITLDTSFEDAKTQVQLKKIHSSVILLYCSKDEAVLILSEARSLGLTGYDFFWIVPSLVSGNTELIPKEFPSGLISVSYDDWDYSLEARVRDGIGILTTAASSMLEKFSYIPEAKASCYGQMERPEVPMHTLHPFMVNVTWDGKDLSFTEEGYQVHPRLVVIVLNKDREWEKVSILLCAECRGGKKAWAIKGLTVLLSPTHFLLSCSRSHLTAKSTSFLQQGRLNL

SEQ ID NO: 817790 - protein, 198 aa, Homo sapiens
DPTSTFFQFGASIQQQATVMLKIMQDYDWHVFSLVTTIFPGYREFISFVKTTVDNSFVGWDMQNVITLDTSFEDAKTQVQLKKIHSSVILLYCSKDEAVLILSEARSLGLTGYDFFWIVPSLVSGNTELIPKEFPSGLISVSYDDWDYSLEARVRDGIGILTTAASSMLEKFSYIPEAKASCYGQMERPEVPMHTLHP

SEQ ID NO: 817791 - protein, 926 aa, Homo sapiens
MSRRRKHDDSPSPKKTPHKTVAAEECGSVVEPGRRRLRSARGSWPCGAREGPPGPVRQREQPPTAALCSKSNPEERYETPKRALKMDSLSSSFSSPNDPDGQNDIFWDQNSPLTKQLGKGRKKQIYTTDSDEISHIVNRIAPQDEKPTTNSMLDMWIGETAIPCTPSVAKGKSRAKISCTKLKTQSQEEELMKLAKQFDKNMEELDVIQEQNKRNYDFTQMISETEILSNYKDNIQMWSLHNIVPEIDNATKKPIKGNTKISVANNQNSSQKPFDQIAEAAFNAIFDGSTQKCSGQLSQELPEAFWSTSNTTFVKTNALKEEKIITNETLVIEKLSNKTPRSLSSQVDTPIMTKSCVTSCTKEPETSNKYIDAFTTSDFEDDWENLLGSEPFAMQNIDMPELFPSKTAHVTDQKEICTFNSKTVKNTSRANTSPDARLGDSKVLQDLSSKTYDRELIDAEYRFSPNSNKSNKLSTGNKMKFENSSNKIVIQDEIQNCIVTSNLTKIKEDILTNSTEASERKSALNTRYSNEQKNKCILNQSIKAPVNTDLFGSANLGSKTSVSNPNQTSASKVGSFFDDWNDPSFANEIIKACHQLDNTWEADDVDDDLLYQACDDIERLTQQQDIRKDSKTSESICEINNNSEHGAKLTQQQDIRKDSKTSESICEINNNSEHGAKNMFAISKQGSNLVQSKHLNPGSISVQTSLTNSSQIDKPMKMEKGEMYGNSPRFLGATNLTMYSKISNCQINNLHVSYTNTDVPIQVNSSKLVLPGSSSLNVTSDHMNTEITTYKKKLSTNQPCHKTVTDEAQSNLNTTVGFSKFTFTRMKNSQILSQFNQNCITGSMSDTKITQGVEKKKGVNPLLEEAVGQQSLVKLSESLKQSSKEEEEKNRKCSPEEIQRKRQEALVRRMAKARASSVNAAPTSFL

SEQ ID NO: 817792 - protein, 179 aa, Homo sapiens
MSRRRKHDDSPSPKKTPHKTVAAEECGSVVEPGRRRLRSARGSWPCGAREGPPGPVRQREQPPTAALCSKSNPEGETSAARPALASAPHPHIPACNREIWGGGGVWSVYSVSGIPLNHRESKNNPIPLPDGAFVPELQHYPVRFDHPFASATGIGNVVYLFAGGRLLSRLLLQSAAVVE

SEQ ID NO: 817793 - protein, 841 aa, Homo sapiens
MDSLSSSFSSPNDPDGQNDIFWDQNSPLTKQLGKGRKKQIYTTDSDEISHIVNRIAPQDEKPTTNSMLDMWIGETAIPCTPSVAKGKSRAKISCTKLKTQSQEEELMKLAKQFDKNMEELDVIQEQNKRNYDFTQMISETEILSNYKDNIQMWSLHNIVPEIDNATKKPIKGNTKISVANNQNSSQKPFDQIAEAAFNAIFDGSTQKCSGQLSQELPEAFWSTSNTTFVKTNALKEEKIITNETLVIEKLSNKTPRSLSSQVDTPIMTKSCVTSCTKEPETSNKYIDAFTTSDFEDDWENLLGSEPFAMQNIDMPELFPSKTAHVTDQKEICTFNSKTVKNTSRANTSPDARLGDSKVLQDLSSKTYDRELIDAEYRFSPNSNKSNKLSTGNKMKFENSSNKIVIQDEIQNCIVTSNLTKIKEDILTNSTEASERKSALNTRYSNEQKNKCILNQSIKAPVNTDLFGSANLGSKTSVSNPNQTSASKVGSFFDDWNDPSFANEIIKACHQLDNTWEADDVDDDLLYQACDDIERLTQQQDIRKDSKTSESICEINNNSEHGAKLTQQQDIRKDSKTSESICEINNNSEHGAKNMFAISKQGSNLVQSKHLNPGSISVQTSLTNSSQIDKPMKMEKGEMYGNSPRFLGATNLTMYSKISNCQINNLHVSYTNTDVPIQVNSSKLVLPGSSSLNVTSDHMNTEITTYKKKLSTNQPCHKTVTDEAQSNLNTTVGFSKFTFTRMKNSQILSQFNQNCITGSMSDTKITQGVEKKKGVNPLLEEAVGQQSLVKLSESLKQSSKEEEEKNRKCSPEEIQRKRQEALVRRMAKARASSVNAAPTSFL

SEQ ID NO: 817794 - protein, 823 aa, Homo sapiens
MDSLSSSFSSPNDPDGQNDIFWDQNSPLTKQLGKGRKKQIYTTDSDEISHIVNRIAPQDEKPTTNSMLDMWIGETAIPCTPSVAKGKSRAKISCTKLKTQSQEEELMKLAKQFDKNMEELDVIQEQNKRNYDFTQMISETEILSNYKDNIQMWSLHNIVPEIDNATKKPIKGNTKISVANNQNSSQKPFDQIAEAAFNAIFDGSTQKCSGQLSQELPEAFWSTSNTTFVKTNALKEEKIITNETLVIEKLSNKTPRSLSSQVDTPIMTKSCVTSCTKEPETSNKYIDAFTTSDFEDDWENLLGSEPFAMQNIDMPELFPSKTAHVTDQKEICTFNSKTVKNTSRANTSPDARLGDSKVLQDLSSKTYDRELIDAEYRFSPNSNKSNKLSTGNKMKFENSSNKIVIQDEIQNCIVTSNLTKIKEDILTNSTEASERKSALNTRYSNEQKNKCILNQSIKAPVNTDLFGSANLGSKTSVSNPNQTSASKVGSFFDDWNDPSFANEIIKACHQLDNTWEADDVDDDLLYQACDDIERLTQQQDIRKDSKTSESICEINNNSEHGAKLTQQQDIRKDSKTSESICEINNNSEHGAMNPGSISVQTSLTNSSQIDKPMKMEKGEMYGNSPRFLGATNLTMYSKISNCQINNLHVSYTNTDVPIQVNSSKLVLPGSSSLNVTSDHMNTEITTYKKKLSTNQPCHKTVTDEAQSNLNTTVGFSKFTFTRMKNSQILSQFNQNCITGSMSDTKITQGVEKKKGVNPLLEEAVGQQSLVKLSESLKQSSKEEEEKNRKCSPEEIQRKRQEALVRRMAKARASSVNAAPTSFL

SEQ ID NO: 817795 - protein, 144 aa, Homo sapiens [sequence omitted]

SEQ ID NO: 817796 - protein, 841 aa, Homo sapiens; identical to SEQ ID NO: 817793

SEQ ID NO: 817797 - protein, 761 aa, Homo sapiens
MDSLSSSFSSPNDPDGQNDIFWDQNSPLTKQLGKGRKKQIYTTDSDEISHIVNRIAPQDEKPTTNSMLDMWIGETAIPCTPSVAKGKSRAKISCTKLKTQSQEEELMKLAKQFDKNMEELDVIQEQNKRNYDFTQMISETEILSNYKDNIQMWSLHNIVPEIDNATKKPIKGNTKISVANNQNSSQKPFDQIAEAAFNAIFDGSTQKCSGQLSQELPEAFWSTSNTTFVKTNALKEEKIITNETLVIEKLSNKTPRSLSSQVDTPIMTKSCVTSCTKEPETSNKYIDAFTTSDFEDDWENLLGSEPFAMQNIDMPELFPSKTAHVTDQKEICTFNSKTVKNTSRANTSPDARLGDSKVLQDLSSKTYDRELIDAEYRFSPNSNKSNKLSTGNKMKFENSSNKIVIQDEIQNCIVTSNLTKIKEDILTNSTEASERKSALNTRYSNEQKNKCILNQSIKAPVNTDLFGSANLGSKTSVSNPNQTSASKVGSFFDDWNDPSFANEIIKACHQLDNTWEADDVDDDLLYQACDDIERLTQQQDIRKDSKTSESICEINNNSEHGAKLTQQQDIRKDSKTSESICEINNNSEHGAMNPGSISVQTSLTNSSQIDKPMKMEKGEMYGNSPRFLGATNLTMYSKISNCQINNLHVSYTNTDVPIQVNSSKLVLPGSSSLNVTSDHMNTEITTYKKKLSTNQPCHKTVTDEAQSNLNTTVGFSKFTFTRMKNSQILSQFNQNCITGSMSDTAVPQHSLLKLSELLNQS

SEQ ID NO: 817798 - protein, 87 aa, Homo sapiens
MLEIKRGRRTHKHDGSNTNTTATQGGRGSQQHKSRRRSNKHGGVGRDTETNKHTYGAEKQHRKATTTHQEESRPQRGGKQKPTVRAV

SEQ ID NO: 817799 - protein, 73 aa, Homo sapiens
MDRTLTQQQRRAGGDHSNTKADGEATNTEAEDATRKRTNTHTGRRSNTARQPPPTKRKVDHREAENKNPPYEQ

SEQ ID NO: 817800 - protein, 331 aa, Homo sapiens
MGGEQEEERFDGMLLAMAQQHEGGVQELVNTFFSFLRRKTDFFIGGEEGMAEKLITQTFSHHNQLAQKTRREKRARQEAERREKAERAARLAKEAKSETSGPQIKELTDEEAERLQLEIDQKKDAENHEAQLKNGSLDSPGKQDTEEDEEEDEKDKGKLKPNLGNGADLPNYRWTQTLSELDLAVPFCVNFRLKGKDMVVDIQRRHLRVGLKGQPAIIDGELYNEVKVEESSWLIEDGKVVTVHLEKINKMEWWSRLVSSDPEINTKKINPENSKLSDLDSETRSMVEKMMYDQRQKSMGLPTSDEQKKQEILKKFMDQHPEMDFSKAKFN

SEQ ID NO: 817801 - protein, 331 aa, Homo sapiens; identical to SEQ ID NO: 817800

SEQ ID NO: 817802 - protein, 282 aa, Homo sapiens
MGGEQEEERFDGMLLAMAQQHEGGVQELVNTFFSFLRRKTDFFIGGEEGMAEKLITQTFSHHNQLAQKTRREKRARQEAERREKAERAARLAKEAKSETSGPQIKELTDEEAERLQLEIDQKKDAENHEAQLKNGSLDSPGKQDTEEDEEEDEKDKGKLKPNLGNGADLPNYRWTQTLSELDLAVPFCVNFRLKGKDMVVDIQRRHLRVGLKGQPAIIDGELYNEVKVEESSWLIEDGKVVTVHLEKPPEEWGAVVSMNLINRKLPKSMCRRNPCGKFFPNL

SEQ ID NO: 817803 - protein, 71 aa, Homo sapiens
GCESDEEKINPENSKLSDLDSETRSMVEKMMYDQRQKSMGLPTSDEQKKQEILKKFMDQHPEMDFSKAKFN

SEQ ID NO: 817804 - protein, 71 aa, Homo sapiens; identical to SEQ ID NO: 817803

SEQ ID NO: 817805 - protein, 62 aa, Homo sapiens
MGGEQEEERFDGMLLAMAQQHEGGVQELVNTFFSFLRRKTDFFIGGEEGMAEKVSVGNHCPL

SEQ ID NO: 817806 - protein, 331 aa, Homo sapiens; identical to SEQ ID NO: 817800

SEQ ID NO: 817807 - protein, 331 aa, Homo sapiens; identical to SEQ ID NO: 817800

SEQ ID NO: 817808 - protein, 315 aa, Homo sapiens
MGGEQEEERFDGMLLAMAQQHEGGVQELVNTFFSFLRRKTDFFIGGEEGMAEKLITQTFSHHNQLAQKTRREKRARQEAERREKAERAARLAKEAKSETSGPQIKELTDEEAERLQLEIDQKKDAENHEAQLKNGSLDSPGKQDTEEDEEEDEKDKGKLKPNLGNGADLPNYRWTQTLSELDLAVPFCVNFRLKGKDMVVDIQRRHLRVGLKGQPAIIDGELYNEVKVEESSWLIEDGKVVTVHLEKINKMEWWSRLVSSDPEINTKKINPENSKLSDLDSETRSMVEKMMYDQRQKSMGLPTSDEQKKQEILKK

SEQ ID NO: 817809 - protein, 312 aa, Homo sapiens
MGGEQEEERFDGMLLAMAQQHEGGVQELVNTFFSFLRRKTDFFIGGEEGMAEKLITQTFSHHNQLAQKTRREKRARQEAERREKAERAARLAKEAKSETSGPQIKELTDEEAERLQLEIDQKKDAENHEAQLKNGSLDSPGKQDTEEDEEEDEKDKGKLKPNLGNGADLPNYRWTQTLSELDLAVPFCVNFRLKGKDMVVDIQRRHLRVGLKGQPAIIDGELYNEVKVEESSWLIEDGKVVTVHLEKINKMEWWSRLVSSDPEINTKKINPENSKVSPGWLGELQQEGEGPRCFQSFTDSCHCLPSAVRPGQ

SEQ ID NO: 817810 - protein, 312 aa, Homo sapiens; identical to SEQ ID NO: 817809

SEQ ID NO: 817811 - protein, 331 aa, Homo sapiens; identical to SEQ ID NO: 817800

SEQ ID NO: 817812 - protein, 388 aa, Homo sapiens
MGGEQEEERFDGMLLAMAQQHEGGVQELVNTFFSFLRRKTDFFIGGEEGMAEKIGRRENECQQKKCQTLIKPSDLVRTHSYHENSMGETILVIQLPPPGTAFDMWELQFKLITQTFSHHNQLAQKTRREKRARQEAERREKAERAARLAKEAKSETSGPQIKELTDEEAERLQLEIDQKKDAENHEAQLKNGSLDSPGKQDTEEDEEEDEKDKGKLKPNLGNGADLPNYRWTQTLSELDLAVPFCVNFRLKGKDMVVDIQRRHLRVGLKGQPAIIDGELYNEVKVEESSWLIEDGKVVTVHLEKINKMEWWSRLVSSDPEINTKKINPENSKLSDLDSETRSMVEKMMYDQRQKSMGLPTSDEQKKQEILKKFMDQHPEMDFSKAKFN

SEQ ID NO: 817813 - protein, 362 aa, Homo sapiens
MGGEQEEERFDGMLLAMAQQHEGGVQELVNTFFSFLRRKTDFFIGGEEGMAEKLITQTFSHHNQLAQKTRREKRARQEAERREKAERAARLAKEAKSETSGPQIKELTDEEAERLQLEIDQKKDAENHEAQLKNGSLDSPGKQDTEEDEEEDEKDKGKLKPNLGNGADLPNYRWTQTLSELDVSVRDQRKSLGGSLGYQQHLVASSDCLCPMQLAVPFCVNFRLKGKDMVVDIQRRHLRVGLKGQPAIIDGELYNEVKVEESSWLIEDGKVVTVHLEKINKMEWWSRLVSSDPEINTKKINPENSKLSDLDSETRSMVEKMMYDQRQKSMGLPTSDEQKKQEILKKFMDQHPEMDFSKAKFN

SEQ ID NO: 817814 - protein, 309 aa, Homo sapiens
MGGEQEEERFDGMLLAMAQQHEGGVQELVNTFFSFLRRKTDFFIGGEEGMAEKLITQTFSHHNQLAQKTRREKRARQEAERREKAERAARLAKEAKSETSGPQIKELTDEEAERLQLEIDQDTEEDEEEDEKDKGKLKPNLGNGADLPNYRWTQTLSELDLAVPFCVNFRLKGKDMVVDIQRRHLRVGLKGQPAIIDGELYNEVKVEESSWLIEDGKVVTVHLEKINKMEWWSRLVSSDPEINTKKINPENSKLSDLDSETRSMVEKMMYDQRQKSMGLPTSDEQKKQEILKKFMDQHPEMDFSKAKFN

SEQ ID NO: 817815 - protein, 182 aa, Homo sapiens
AGTLDDPVWREANPSNGADLPNYRWTQTLSELDLAVPFCVNFRLKGKDMVVDIQRRHLRVGLKGQPAIIDGELYNEVKVEESSWLIEDGKVVTVHLEKINKMEWWSRLVSSDPEINTKKINPENSKLSDLDSETRSMVEKMMYDQRQKSMGLPTSDEQKKQEILKKFMDQHPEMDFSKAKFN

SEQ ID NO: 817816 - protein, 136 aa, Homo sapiens
WCRNPPPPPPGGPPDALRKTRLRIGELYNEVKVEESSWLIEDGKVVTVHLEKINKMEWWSRLVSSDPEINTKKINPENSKLSDLDSETRSMVEKMMYDQRQKSMGLPTSDEQKKQEILKKFMDQHPEMDFSKAKFN

SEQ ID NO: 817817 - protein, 120 aa, Homo sapiens
PSTSDGVALQVTLAVVRGPRGVPFVRHGRDWASPSQINKMEWWSRLVSSDPEINTKKINPENSKLSDLDSETRSMVEKMMYDQRQKSMGLPTSDEQKKQEILKKFMDQHPEMDFSKAKFN

SEQ ID NO: 817818 - protein, 388 aa, Homo sapiens
MRARRGLLRLPRRSLLAALFFFSLSSSLLYFVYVAPGIVNTYLFMMQAQGILIRDNVRTIGAQVYEQVLRSAYAKRNSSVNDSDYPLDLNHSETFLQTTTFLPEDFTYFANHTCPERLPSMKGPIDINMSEIGMDYIHELFSKDPTIKLGGHWKPSDCMPRWKVAILIPFRNRHEHLPVLFRHLLPMLQRQRLQFAFYVVEQVGTQPFNRAMLFNVGFQEAMKDLDWDCLIFHDVDHIPESDRNYYGCGQMPRHFATKLDKYMYLLPYTEFFGGVSGLTVEQFRKINGFPNAFWGWGGEDDDLWNRVQNAGYSVSRPEGDTGKYKSIPHHHRGEVQFLGRYALLRKSKERQGLDGLNNLNYFANITYDALYKNITVNLTPELAQVNEY

SEQ ID NO: 817819 - protein, 388 aa, Homo sapiens; identical to SEQ ID NO: 817818

SEQ ID NO: 817820 - protein, 388 aa, Homo sapiens; identical to SEQ ID NO: 817818

SEQ ID NO: 817821 - protein, 83 aa, Homo sapiens
AAVGDRHRACESRRVDPGKLHADGSGPFSVQSKEIKQAGSNTRRGGAPSFRKVSRPDRPSSGSLTGKPHAQTPSLDQPLELRE

SEQ ID NO: 817822 - protein, 388 aa, Homo sapiens; identical to SEQ ID NO: 817818

SEQ ID NO: 817823 - protein, 388 aa, Homo sapiens; identical to SEQ ID NO: 817818

SEQ ID NO: 817824 - protein, 388 aa, Homo sapiens; identical to SEQ ID NO: 817818

SEQ ID NO: 817825 - protein, 1244 aa, Homo sapiens
DVGGDRPWDSGNTQLPPRNPVKANAMFGAGDEDDTDFLSPSGGARLASLFGLDQAAAGHGNEFFQYTAPKQPKKGQGTAATGNQATPKTAPATMSTPTILVATAVHAYRYTNGQYVKQGKFGAAVLGNHTAREYRILLYISQQQPVTVARIHVNFELMVRPNNYSTFYDDQRQNWSIMFESEKAAVEFNKQVCIAKCNSTSSLDAVLSQDLIVADGPAVEVGDSLEVAYTGWLFQNHVLGQVFDSTANKDKLLRLKLGSGKVIKGWEDGMLGMKKGGKRLLIVPPACAVGSEGVIGWTQATDSILVFEVEVRRVKFARDSGSDGHSVSSRDSAAPSPIPGADNLSADPVVSPPTSIPFKSGEPALRTKSNSLSEQLAINTSPDAVKAKLISRMAKMGQPMLPILPPQLDSNDSEIEDVNTLQGGGQPVVTPSVQPSLHPAHPALPQMTSQAPQPSVTGLQAPSAALMQVSSLDSHSAVSGNAQSFQPYAGMQAYAYPQASAVTSQLQPVRPLYPAPLSQPPHFQGSGDMASFLMTEARQHNTEIRMAVSKVADKMDHLMTKVEELQKHSAGNSMLIPSMSVTMETSMIMSNIQRIIQENERLKQEILEKSNRIEEQNDKISELIERNQRYVEQSNLMMEKRNNSLQTATENTQARVLHAEQEKAKVTEELAAATAQVSHLQLKMTAHQKKETELQMQLTESLKETDLLRGQLTKVQAKLSELQETSEQAQSKFKSEKQNRKQLELKVTSLEEELTDLRVEKESLEKNLSERKKKSAQERSQAEEEIDEIRKSYQEELDKLRQLLKKTRVSTDQAAAEQLSLVQAELQTQWEAKCEHLLASAKDEHLQQYQEVCAQRDAYQQKLVQLQEKCLALQAQITALTKQNEQHIKELEKNKSQMSGVEAAASDPSEKVKKIMNQVFQSLRREFELEESYNGRTILGTIMNTIKMVTLQLLNQQEQEKEESSSEEEEEKAEERPRRPSQEQSASASSGQPQAPLNRERPESPMVPSEQVVEEAVPLPPQALTTSQDGHRRKGDSEAEALSEIKDGSLPPELSCIPSHRVLGPPTSIPPEPLGPVSMDSECEESLAASPMAAKPDNPSGKVCVREVAPDGPLQESSTRLSLTSDPEEGDPLALGPESPGEPQPPQLKKDDVTSSTGPHKELSSTEAGSTVAGAALRPSHHSQRSSLSGDEEDELFKGATLKALRPKAQPEEEDEDEVSMKGRPPPTPLFGDDDDDDDIDWLG

SEQ ID NO: 817826 - protein, 798 aa, Homo sapiens
MTSQAPQPSVTGLQAPSAALMQVSSLDSHSAVSGNAQSFQPYAGMQAYAYPQASAVTSQLQPVRPLYPAPLSQPPHFQGSGDMASFLMTEARQHNTEIRMAVSKVADKMDHLMTKVEELQKHSAGNSMLIPSMSVTMETSMIMSNIQRIIQENERLKQEILEKSNRIEEQNDKISELIERNQRYVEQSNLMMEKRNNSLQTATENTQARVLHAEQEKAKVTEELAAATAQVSHLQLKMTAHQKKETELQMQLTESLKETDLLRGQLTKVQAKLSELQETSEQAQSKFKSEKQNRKQLELKVTSLEEELTDLRVEKESLEKNLSERKKKSAQERSQAEEEIDEIRKSYQEELDKLRQLLKKTRVSTDQAAAEQLSLVQAELQTQWEAKCEHLLASAKDEHLQQYQEVCAQRDAYQQKLVQLQEKCLALQAQITALTKQNEQHIKELEKNKSQMSGVEAAASDPSEKVKKIMNQVFQSLRREFELEESYNGRTILGTIMNTIKMVTLQLLNQQEQEKEESSSEEEEEKAEERPRRPSQEQSASASSGQPQAPLNRERPESPMVPSEQVVEEAVPLPPQALTTSQDGHRRKGDSEAEALSEIKDGSLPPELSCIPSHRVLGPPTSIPPEPLGPVSMDSECEESLAASPMAAKPDNPSGKVCVREVAPDGPLQESSTRLSLTSDPEEGDPLALGPESPGEPQPPQLKKDDVTSSTGPHKELSSTEAGSTVAGAALRPSHHSQRSSLSGDEEDELFKGATLKALRPKAQPEEEDEDEVSMKGRPPPTPLFGDDDDDDDIDWLG

SEQ ID NO: 817827 - protein, 690 aa, Homo sapiens
MDHLMTKVEELQKHSAGNSMLIPSMSVTMETSMIMSNIQRIIQENERLKQEILEKSNRIEEQNDKISELIERNQRYVEQSNLMMEKRNNSLQTATENTQARVLHAEQEKAKVTEELAAATAQVSHLQLKMTAHQKKETELQMQLTESLKETDLLRGQLTKVQAKLSELQETSEQAQSKFKSEKQNRKQLELKVTSLEEELTDLRVEKESLEKNLSERKKKSAQERSQAEEEIDEIRKSYQEELDKLRQLLKKTRVSTDQAAAEQLSLVQAELQTQWEAKCEHLLASAKDEHLQQYQEVCAQRDAYQQKLVQLQEKCLALQAQITALTKQNEQHIKELEKNKSQMSGVEAAASDPSEKVKKIMNQVFQSLRREFELEESYNGRTILGTIMNTIKMVTLQLLNQQEQEKEESSSEEEEEKAEERPRRPSQEQSASASSGQPQAPLNRERPESPMVPSEQVVEEAVPLPPQALTTSQDGHRRKGDSEAEALSEIKDGSLPPELSCIPSHRVLGPPTSIPPEPLGPVSMDSECEESLAASPMAAKPDNPSGKVCVREVAPDGPLQESSTRLSLTSDPEEGDPLALGPESPGEPQPPQLKKDDVTSSTGPHKELSSTEAGSTVAGAALRPSHHSQRSSLSGDEEDELFKGATLKALRPKAQPEEEDEDEVSMKGRPPPTPLFGDDDDDDDIDWLG

SEQ ID NO: 817828 - protein, 624 aa, Homo sapiens
MQVEGSHNSLFTSSVYIELCEVGSSPAWRTPMFKVTSYFVIIQAKVTEELAAATAQVSHLQLKMTAHQKKETELQMQLTESLKETDLLRGQLTKVQAKLSELQETSEQAQSKFKSEKQNRKQLELKVTSLEEELTDLRVEKESLEKNLSERKKKSAQERSQAEEEIDEIRKSYQEELDKLRQLLKKTRVSTDQAAAEQLSLVQAELQTQWEAKCEHLLASAKDEHLQQYQEVCAQRDAYQQKLVQLQEKCLALQAQITALTKQNEQHIKELEKNKSQMSGVEAAASDPSEKVKKIMNQVFQSLRREFELEESYNGRTILGTIMNTIKMVTLQLLNQQEQEKEESSSEEEEEKAEERPRRPSQEQSASASSGQPQAPLNRERPESPMVPSEQVVEEAVPLPPQALTTSQDGHRRKGDSEAEALSEIKDGSLPPELSCIPSHRVLGPPTSIPPEPLGPVSMDSECEESLAASPMAAKPDNPSGKVCVREVAPDGPLQESSTRLSLTSDPEEGDPLALGPESPGEPQPPQLKKDDVTSSTGPHKELSSTEAGSTVAGAALRPSHHSQRSSLSGDEEDELFKGATLKALRPKAQPEEEDEDEVSMKGRPPPTPLFGDDDDDDDIDWLG

SEQ ID NO: 817829 - protein, 1244 aa, Homo sapiens; identical to SEQ ID NO: 817825

SEQ ID NO: 817830 - protein, 1270 aa, Homo sapiens
DVGGDRPWDSGNTQLPPRNPVKANAMFGAGDEDDTDFLSPSGGARLASLFGLDQAAAGHGNEFFQYTAPKQPKKGQGTAATGNQATPKTAPATMSTPTILVATAVHAYRYTNGQYVKQGKFGAAVLGNHTAREYRILLYISQQQPVTVARIHVNFELMVRPNNYSTFYDDQRQNWSIMFESEKAAVEFNKQVCIAKCNSTSSLDAVLSQDLIVADGPAVEVGDSLEVAYTGWLFQNHVLGQVFDSTANKDKLLRLKLGSGKVIKGWEDGMLGMKKGGKRLLIVPPACAVGSEGVIGWTQATDSILVFEVEVRRVKFARDSGSDGHSVSSRDSAAPSPIPGADNLSADPVVSPPTSIPFKSGEPALRTKSNSLSEQLAINTSPDAVKAKLISRMAKMGQPMLPILPPQLDSNDSEIEDVNTLQGGGQPVVTPSVQPSLHPAHPALPQMTSQAPQPSVTGLQAPSAALMQVSSLDSHSAVSGNAQSFQPYAGMQAYAYPQASAVTSQLQPVRPLYPAPLSQPPHFQGSGDMASFLMTEARQHNTEIRMAVSKVADKMDHLMTKVEELQKHSAGNSMLIPSMSVTMETSMIMSNIQRIIQENERLKQEILEKSNRIEEQNDKISELIERNQRYVEQSNLMMEKRNNSLQTATENTQARVLHAEQEKAKVTEELAAATAQVSHLQLKMTAHQKKETELQMQLTESLKETDLLRGQLTKVQAKLSELQETSEQAQSKFKSEKQNRKQLELKVTSLEEELTDLRVEKESLEKNLSERKKKSAQERSQAEEEIDEIRKSYQEELDKLRQLLKKTRVSTDQAAAEQLSLVQAELQTQWEAKCEHLLASAKDEHLQQYQEVCAQRDAYQQKLVQLQEKCLALQAQITALTKQNEQHIKELEKNKSQMSGVEAAASDPSEKVKKIMNQVFQSLRREFELEESYNGRTILGTIMNTIKMVTLQLLNQQEQEKEESSSEEEEEKAEERPRRPSQEQSASASSGQPQAPLNRERPESPMVPSEQVVEEAVPLPPQALTTSQDGHRRKGDSEAEALSEIKDGSLPPELSCIPSHRVLGPPTSIPPEPLGPVSMDSECEESLAASPMAAKPDNPSGKVCVREVAPDGPLQESSTRLSLTSDPEEGDPLALGPESPGEPQPPQLKKDDVTSSTGPHKELSSTEAGSTVAGAALRPSHHSQRSSLSGDEEDELFKGATLKALRPKAQQTVVIVVCVSFLVFMIILGVFRIRAAIGGPVRDQDTGKENEMELGDSAMTISVNIHGGTE

SEQ ID NO: 817831 - protein, 851 aa, Homo sapiens
DVGGDRPWDSGNTQLPPRNPVKANAMFGAGDEDDTDFLSPSGGARLASLFGLDQAAAGHGNEFFQYTAPKQPKKGQGTAATGNQATPKTAPATMSTPTILVATAVHAYRYTNGQYVKQGKFGAAVLGNHTAREYRILLYISQQQPVTVARIHVNFELMVRPNNYSTFYDDQRQNWSIMFESEKAAVEFNKQVCIAKCNSTSSLDAVLSQDLIVADGPAVEVGDSLEVAYTGWLFQNHVLGQVFDSTANKDKLLRLKLGSGKVIKGWEDGMLGMKKGGKRLLIVPPACAVGSEGVIGWTQATDSILVFEVEVRRVKFARDSGSDGHSVSSRDSAAPSPIPGADNLSADPVVSPPTSIPFKSGEPALRTKSNSLSEQLAINTSPDAVKAKLISRMAKMGQPMLPILPPQLDSNDSEIEDVNTLQGGGQPVVTPSVQPSLHPAHPALPQMTSQAPQPSVTGLQAPSAALMQVSSLDSHSAVSGNAQSFQPYAGMQAYAYPQASAVTSQLQPVRPLYPAPLSQPPHFQGSGDMASFLMTEARQHNTEIRMAVSKVADKMDHLMTKVEELQKHSAGNSMLIPSMSVTMETSMIMSNIQRIIQENERLKQEILEKSNRIEEQNDKISELIERNQRYVEQSNLMMEKRNNSLQTATENTQARVLHAEQEKAKVTEELAAATAQVSHLQLKMTAHQKKETELQMQLTESLKETDLLRGQLTKVQAKLSELQETSEQAQSKFKSEKQNRKQLELKVTSLEEELTDLRVEKESLEKNLSERKKKSAQERSQAEEEIDEIRKSYQEELDKLRQLLKKTRVSTDQAAAEQLSLVQAELQTQWEAKCEHLLASAKDEHLPVPAS

SEQ ID NO: 817832 - protein, 166 aa, Homo sapiens
DVGGDRPWDSGNTQLPPRNPVKANAMFGAGDEDDTDFLSPSGGARLASLFGLDQAAAGHGNEFFQYTAPKQPKKGQGTAATGNQATPKTAPATMSTPTILVATAVHAYRYTNGQYVKQGKFGAAVLGNHTAREVRVLPHLMYIQMSQIIPMSWLLSGLPDVLFIRR

SEQ ID NO: 817833 - protein, 234 aa, Homo sapiens
DVGGDRPWDSGNTQLPPRNPVKANAMFGAGDEDDTDFLSPSGGARLASLFGLDQAAAGHGNEFFQYTAPKQPKKGQGTAATGNQATPKTAPATMSTPTILVATAVHAYRYTNGQYVKQGKFGAAVLGNHTAREYRILLYISQQQPVTVARIHVNFELMVRPNNYSTFYDDQRQNWSIMFESEKAAVEFNKQVCIAKCNSTGLSLALSFVACRRNWSFIFKAPYSPSPQRYLLPV

SEQ ID NO: 817834 - protein, 67 aa, Homo sapiens
ALIIAVEQDQLGQGPSVTPAVSPGCANGLSCQNSQNISNSTETSQEKCSTNFRLKKHHWLLTRIPAP

SEQ ID NO: 817835 - protein, 67 aa, Homo sapiens; identical to SEQ ID NO: 817834

SEQ ID NO: 817836 - protein, 153 aa, Homo sapiens
RGGRQSRRSSPRFWSVIVTMSLMVSAGRGLGAVWSPTHVQVTVLQARGLRAKGPGGTSDAYAVIQVGKEKYATSVSERSLGAPVWREEATFELPSLLSSGPAAAATLQLTVLHRALLGLDKFLGRAEVDLRDCTPAWARVFLRLLKKEPGQFF

SEQ ID NO: 817837 - protein, 342 aa, Homo sapiens
RGGRQSRRSSPRFWSVIVTMSLMVSAGRGLGAVWSPTHVQVTVLQARGLRAKGPGGTSDAYAVIQVGKEKYATSVSERSLGAPVWREEATFELPSLLSSGPAAAATLQLTVLHRALLGLDKFLGRAEVDLRDLHRDQGRRRRMEGENPLTVPGREKEGMLMGVKPGEDASGPAEDLVRRSEKDTAAVVSRQGSSLNLFEDVQITEPEAEPESKSEPRPPISSPRAPQTRAVKPRLHPVKPMNATATKVANCSLGTATIISENLNNEVMMKKYSPSDPAFAYAQLTHDELIQLVLKQKETISKKEFQVRELEDYIDNLLVRVMEETPNILRIPTQVGKKAGKM

SEQ ID NO: 817838 - protein, 122 aa, Homo sapiens
MTGGSKDPFPLLFRLHPVKPMNATATKVANCSLGTATIISENLNNEVMMKKYSPSDPAFAYAQLTHDELIQLVLKQKETISKKEFQVRELEDYIDNLLVRVMEETPNILRIPTQVGKKAGKM

SEQ ID NO: 817839 - protein, 667 aa, Homo sapiens
WRPPVAAIFSSLLECYRHHVPNGLGWPGPGGRVVPNPRAGDGAAGAGPAGQGPRGHERRVRGDPGGQGEVRHLRVGAQPGRARVARGGHLRAAIAAVLRTRGRRHPAAHRAAPRAARPRQVPGPRRGGPAGSAPRPGPQKTQWYKLKSKPGKKDKERGEIEVDIQFMRNNMTASMFDLSMKDKSRNPFGKLKDKIKGKNKDSGSDTASAIIPSTTPSVDSDDESVVKDKKKKSKIKTLLSKSNLQKTPLSQSMSVLPTSKPEKVLLRPGDFQSQWDEDDNEDESSSASDVMSHKRTASTDLKQLNQVNFTLPKKEGLSFLGGLRSKNDVLSRSNVCINGNHVYLEQPEAKGEIKDSSPSSSPSPKGFRKKHLFSSTENLAAGSWKEPAEGGGLSSDRQLSESSTKDSLKSMTLPSYRPAPLVSGDLRENMAPANSEATKEAKESKKPESRRSSLLSLMTGKKDVAKGSEGENPLTVPGREKEGMLMGVKPGEDASGPAEDLVRRSEKDTAAVVSRQGSSLNLFEDVQITEPEAEPESKSEPRPPISSPRAPQTRAVKPRLHPVKPMNATATKVANCSLGTATIISENLNNEVMMKKYSPSDPAFAYAQLTHDELIQLVLKQKETISKKEFQVRELEDYIDNLLVRVMEETPNILRIPTQVGKKAGKM

SEQ ID NO: 817840 - protein, 90 aa, Homo sapiens
GENPLTVPGREKEGMLMGVKPGEDASGPAEDLVRRSEKDTAAVVSRQGSSLNLFEDVQITEPEAEPESKSEPRPPISSPRAPQTRAVKPR

SEQ ID NO: 817841 - protein, 667 aa, Homo sapiens; identical to SEQ ID NO: 817839

SEQ ID NO: 817842 - protein, 667 aa, Homo sapiens; identical to SEQ ID NO: 817839

SEQ ID NO: 817843 - protein, 605 aa, Homo sapiens
WRPPVAAIFSSLLECYRHHVPNGLGWPGPGGRVVPNPRAGDGAAGAGPAGQGPRGHERRVRGDPGGQGEVRHLRVGAQPGRARVARGGHLRAAIAAVLRTRGRRHPAAHRAAPRAARPRQVPGPRRGGPAGSAPRPGPQKTQWYKLKSKPGKKDKERGEIEVDIQFMRNNMTASMFDLSMKDKSRNPFGKLKDKIKGKNKDSGSDTASAIIPSTTPSVDSDDESVVKDKKKKSKIKTLLSKSNLQKTPLSQSMSVLPTSKPEKVLLRPGDFQSQWDEDDNEDESSSASDVMSHKRTASTDLKQLNQVNFTLPKKEGLSFLGGLRSKNDVLSRSNVCINGNHVYLEQPEAKGEIKDSSPSSSPSPKGFRKKHLFSSTENLAAGSWKEPAEGGGLSSDRQLSESSTKDSLKSMTLPSYRPAPLVSGDLRENMAPANSEATKEAKESKKPESRRSSLLSLMTGKKDVAKGSEGENPLTVPGREKEGMLMGVKPGEDASGPAEDLVRRSEKDTAAVVSRQGSSLNLFEDVQITEPEAEPESKSEPRPPISSPRAPQTRAVKPRLHPVKPMNATATKVANCSLGTATIISENLNNEVMMKVCPLRSWCVR

SEQ ID NO: 817844 - protein, 54 aa, Homo sapiens
MFDLSMKDKSRNPFGKLKDKIKGKNKDSGSDTASAIIPSTTPSVDSDDESVVKD

SEQ ID NO: 817845 - protein, 113 aa, Homo sapiens
MVGLPGILYRFKIRMRTELFIACRGAFSHWASCVYCGQRRPSSTLAMRPSSTLANVLPCGHHCPEGTIVCCLEEKGYNSCACLGRRTPGRPVAKLALGHIKGNYATRLSPTDP

SEQ ID NO: 817846 - protein, 113 aa, Homo sapiens; identical to SEQ ID NO: 817845

SEQ ID NO: 817847 - protein, 113 aa, Homo sapiens; identical to SEQ ID NO: 817845

SEQ ID NO: 817848 - protein, 113 aa, Homo sapiens; identical to SEQ ID NO: 817845

SEQ ID NO: 817849 - protein, 113 aa, Homo sapiens; identical to SEQ ID NO: 817845

SEQ ID NO: 817850 - protein, 113 aa, Homo sapiens
MDGLPGILYRFKIRMRTELFIACRGAFSHWASCVYCGQRRPSSTLAMRPSSTLANVLPCGHHCPEGTIVCCLEEKGYNSCACLGRRTPGRPVAKLALGHIKGNYATRLSPTDP

SEQ ID NO: 817851 - protein, 113 aa, Homo sapiens; identical to SEQ ID NO: 817850

SEQ ID NO: 817852 - protein, 91 aa, Homo sapiens
  misc_feature (85)..(85): Xaa can be any naturally occurring amino acid
MDVWLALEVAELTARGGRKFDKKPNSLQRAWPGLLPHQNYTRAKRNCWPPKLRGAVGPLNSLLAAIPFSGKVGQTKPSTHFRAKXPSQPIP

SEQ ID NO: 817853 - protein, 113 aa, Homo sapiens
MGGLPGILYRFKIRMRTELFIACRGAFSHWASCVYCGQRRPSSTLAMRPSSTLANVLPCGHHCPEGTIVCCLEEKGYNSCACLGRRTPGRPVAKLALGHIKGNYATRLSPTDP

SEQ ID NO: 817854 - protein, 81 aa, Homo sapiens
AALAALVKGPAQHWQMCSLVGTIALRVQSCAAWRRRGTIRVLALGGERLGDLWQSWPGGISGETMPPGYLPQTLETKEDPC

SEQ ID NO: 817855 - protein, 113 aa, Homo sapiens; identical to SEQ ID NO: 817845

SEQ ID NO: 817856 - protein, 73 aa, Homo sapiens
REQVYTASNYFRRPRVYVISHKTLRPRRPVLKALPSGLPKEGLSPFSQNRACGYGCLAGLGGGRIDSTWWPKI

SEQ ID NO: 817857 - protein, 103 aa, Homo sapiens
  misc_feature (7)..(7): Xaa can be any naturally occurring amino acid
HASDPRXRPRVRTHAVDPRVRGRVGAGEPGRPVAKLALGHIKGNYATRLSPTTLRPRRPVLKALPSGLPKEGLSPFSQNRACGYGCLAGLGGGRIDSTWWPKF

SEQ ID NO: 817858 - protein, 113 aa, Homo sapiens; identical to SEQ ID NO: 817850

SEQ ID NO: 817859 - protein, 143 aa, Homo sapiens
PRVADAWVDPRVRNKNADGAVHCLPRGIFTLGQLCVLRAKKAQLNIGNVLPCGHHCPEGTIVCCLEEKPGRPVAKLALGHIKGNYATRLSPTTLRPRRPVLKALPSGLPKEGLSPFSQNRACGYGCLAGLGGGRIDSTWWPKI

SEQ ID NO: 817860 - protein, 113 aa, Homo sapiens; identical to SEQ ID NO: 817850

SEQ ID NO: 817861 - protein, 118 aa, Homo sapiens
  misc_feature (99)..(99): Xaa can be any naturally occurring amino acid
EEDRRHGELSDLMYKMNDPYVCSARAVQPVNTLSAYAAENFYDYYCYVKGIVSDVISQELGPARSPSYSGGSPAISRIGSKVDGAVIAARAFTGPVVYXRLRRPSSTIGNVAPCGHHA

SEQ ID NO: 817862 - protein, 125 aa, Homo sapiens
MKAQLNIGNVLPVGTMPEGTTRVLALGGERLGDLWQSWPWGIFQKKGYLPSAKTELVDMDVWVALEVAELTARGGRKFDKKPNSLQRAWPGLLPHQNYTRAKRNCWPHEGTLLGPPESTGGCCAH

SEQ ID NO: 817863 - protein, 108 aa, Homo sapiens
MDVWVALEVAELTARGGRKFDKKPNSLQRAWPGLLPHQNYTRAKRNCWPRVRGVAMNPVEHPFGGGNHQHIRKPSTGFMATPRTTNLGKEELLATSTGCGHESCGASF

SEQ ID NO: 817864 - protein, 113 aa, Homo sapiens; identical to SEQ ID NO: 817845

SEQ ID NO: 817865 - protein, 113 aa, Homo sapiens; identical to SEQ ID NO: 817845

SEQ ID NO: 817866 - protein, 113 aa, Homo sapiens; identical to SEQ ID NO: 817845

SEQ ID NO: 817867 - protein, 113 aa, Homo sapiens; identical to SEQ ID NO: 817845

SEQ ID NO: 817868 - protein, 113 aa, Homo sapiens; identical to SEQ ID NO: 817845

SEQ ID NO: 817869 - protein, 113 aa, Homo sapiens; identical to SEQ ID NO: 817845

SEQ ID NO: 817870 - protein, 113 aa, Homo sapiens; identical to SEQ ID NO: 817845

SEQ ID NO: 817871 - protein, 113 aa, Homo sapiens; identical to SEQ ID NO: 817845

SEQ ID NO: 817872 - protein, 113 aa, Homo sapiens; identical to SEQ ID NO: 817845

SEQ ID NO: 817873 - protein, 113 aa, Homo sapiens; identical to SEQ ID NO: 817845

SEQ ID NO: 817874 - protein, 113 aa, Homo sapiens; identical to SEQ ID NO: 817845

SEQ ID NO: 817875 - protein, 113 aa, Homo sapiens; identical to SEQ ID NO: 817845

SEQ ID NO: 817876 - protein, 118 aa, Homo sapiens
MRQKISLAAAHKADATTFVEEKATKEKRDQPDTRRARTQREHEEETHGGMRNNNTARAHGTTTSNDEEKTECWSTAFCAAKAGRNSRRKTRRQTEQQQETISERRKQARPHQTPVRHR

SEQ ID NO: 817877 - protein, 113 aa, Homo sapiens; identical to SEQ ID NO: 817845

SEQ ID NO: 817878 - protein, 113 aa, Homo sapiens; identical to SEQ ID NO: 817845

SEQ ID NO: 817879 - protein, 113 aa, Homo sapiens; identical to SEQ ID NO: 817845

SEQ ID NO: 817880 - protein, 113 aa, Homo sapiens; identical to SEQ ID NO: 817845

SEQ ID NO: 817881 - protein, 113 aa, Homo sapiens; identical to SEQ ID NO: 817845

SEQ ID NO: 817882 - protein, 113 aa, Homo sapiens; identical to SEQ ID NO: 817845

SEQ ID NO: 817883 - protein, 113 aa, Homo sapiens; identical to SEQ ID NO: 817845

SEQ ID NO: 817884 - protein, 113 aa, Homo sapiens; identical to SEQ ID NO: 817845

SEQ ID NO: 817885 - protein, 113 aa, Homo sapiens; identical to SEQ ID NO: 817845

SEQ ID NO: 817886 - protein, 113 aa, Homo sapiens; identical to SEQ ID NO: 817845

SEQ ID NO: 817887 - protein, 113 aa, Homo sapiens; identical to SEQ ID NO: 817845

SEQ ID NO: 817888 - protein, 113 aa, Homo sapiens; identical to SEQ ID NO: 817845

SEQ ID NO: 817889 - protein, 286 aa, Homo sapiens
MTGGATRTPPRGPHPPPPPLPGQKGAPRGGPPHTKQRHTGAHTSKTAHQRGNHAKQGKPRTKHPTTRGSAPHKSGAQQNPTQESPLKRPQHGETPQRINTRAQTWLPPPQHRQKPSTPDQPTLGQIRGINIPPPGHHLLPPGAYTVNTPAEPNRRSNNTEQPTPCQARAAPHSPQNRMPHTTQQPKPQKEQRASLHPTAPGSQNRTNEQKRDRAEEGDDGRTGRDHRSGTERRQPPTDERHARHRGEKQQQRNRAERGWSRTSSRESKGAETDDNGRRMTTNAGCN

SEQ ID NO: 817890 - protein, 113 aa, Homo sapiens; identical to SEQ ID NO: 817845

SEQ ID NO: 817891 - protein, 113 aa, Homo sapiens; identical to SEQ ID NO: 817845

SEQ ID NO: 817892 - protein, 113 aa, Homo sapiens; identical to SEQ ID NO: 817845

SEQ ID NO: 817893 - protein, 114 aa, Homo sapiens
MAEIPTFLADKGAPKEGSESIKSTRRQRPGVNTVARGRKPLVTARHFGEEPPPTIRGGGTKYGGHNPPTHKDSTTPTGDIIKHFEPRLNRAYTHAVKSPPPENLRPRTTGSEHF

SEQ ID NO: 817894 - protein, 113 aa, Homo sapiens; identical to SEQ ID NO: 817845

SEQ ID NO: 817895 - protein, 113 aa, Homo sapiens; identical to SEQ ID NO: 817845

SEQ ID NO: 817896 - protein, 125 aa, Homo sapiens
MPKKNKKNNLGHQVPSLFGKSGGPLWTWPGAATRGRGGMTASGTLEHPCRGRTIAPKINGGATTERAPKELRNPCGESPSRETGSCPWEPSPGTRHLRSRQRYLPTFTRQHHTPTHNRHAEQGKP

SEQ ID NO: 817897 - protein, 113 aa, Homo sapiens; identical to SEQ ID NO: 817845

SEQ ID NO: 817898 - protein, 113 aa, Homo sapiens; identical to SEQ ID NO: 817845

SEQ ID NO: 817899 - protein, 113 aa, Homo sapiens; identical to SEQ ID NO: 817845

SEQ ID NO: 817900 - protein, 113 aa, Homo sapiens; identical to SEQ ID NO: 817845

SEQ ID NO: 817901 - protein, 60 aa, Homo sapiens
MPLLAAKWVSLLPAGLDVLPSDGNGAATSAVGTCIAGTCGIQRLRSLRCGEGQHRQHRAG

SEQ ID NO: 817902 - protein, 113 aa, Homo sapiens; identical to SEQ ID NO: 817845

SEQ ID NO: 817903 - protein, 113 aa, Homo sapiens; identical to SEQ ID NO: 817845

SEQ ID NO: 817904 - protein, 113 aa, Homo sapiens; identical to SEQ ID NO: 817845

SEQ ID NO: 817905 - protein, 165 aa, Homo sapiens
MPLLAAKWVSLLPAGLDVSGEPRLCRRKRTSAEGLNKVCVYAKKNKKNNLGHQVPSLFGKSGGPLWTWPGAATRGRGGMTASGTLEHPCRGRTIAPKINGGATTERAPKELRNPCGESPSRETGSCPWEPSPGTRHLRSRQRYLPTFTRQHHTPTHNRHAEQGKP

SEQ ID NO: 817906 - protein, 113 aa, Homo sapiens; identical to SEQ ID NO: 817845

SEQ ID NO: 817907 - protein, 113 aa, Homo sapiens; identical to SEQ ID NO: 817845

SEQ ID NO: 817908 - protein, 113 aa, Homo sapiens; identical to SEQ ID NO: 817845

SEQ ID NO: 817909 - protein, 113 aa, Homo sapiens; identical to SEQ ID NO: 817845

SEQ ID NO: 817910 - protein, 114 aa, Homo sapiens
MAEIPTFLADKGAPKEGSESIKSTRRQRPGENTVARGRKPLVTARHFGEEPPPTIRGGGTKVGGHNPPTHKDSTTPTGDIIKHFEPRLNRAYTHAVKSPPPENLRPRTTGSEHF

SEQ ID NO: 817911 - protein, 113 aa, Homo sapiens; identical to SEQ ID NO: 817845

SEQ ID NO: 817912 - protein, 151 aa, Homo sapiens
MVGLPGILYRFKIRMRTELFIACRGAFSHWASCVYCGQRRPSSTLAMRPSSTLANVLPCGHHCPEGTIVCCLEEKGYNSCACLGRRTPGRPVAKLALGHKTLRPRRPVLKALPSGLPKEGLSPFSQNRACGYGCLAGLGGGRIDSTWWPQF

SEQ ID NO: 817913 - protein, 150 aa, Homo sapiens
MVGLPGILYRFKIRMRTELFIACRGAFSHWASCVYCGQRRPSSTLAMRPSSTLANVLPCGHHCPEGTIVCCLEEKPGRPVAKLALGHIKGNYATRLSPTTLRPRRPVLKALPSGLPKEGLSPFSQNRACGYGCLAGLGGGRIDSTWWPKI

SEQ ID NO: 817914 - protein, 221 aa, Homo sapiens
MPKKKTTQTPPHTPTHTHPPNHTHTTNNRGAANNISSRARQQLPANPPPSRIDQARPPQQREPSHTQPTPARRHTPPPPTQPHNRATGHPTSNTPPTRVRRHNLRDETTTPLSPPATTHPRRYSSAPHHLLAAATTPPRPLSPHLPPDLPLTPPPHSPPPSRPRPPALPPSRRRLRIHAPHLTSSTPAHRRLDLLTLPTTHPLHSARPYYPRTRRSLPRTT

SEQ ID NO: 817915 - protein, 194 aa, Homo sapiens
MVGLPGILYRFKIRMRTELFIACRGAFSHWASCVYCGQRRPSSTLAMRPSSTLANVLPCGHHCPEGTIVCCLEEKGYNSCACLGRRTPGRPVAKLALGHIKGNYATRLSPTFQKKGYLPSAKTELVDMDVWVALEVAELTARGGRKFDKKPNSLQRAWPGLLPHQNYTRAKRNCWPHEGTLLGPPESTGGCCAH

SEQ ID NO: 817916 - protein, 194 aa, Homo sapiens; identical to SEQ ID NO: 817915

SEQ ID NO: 817917 - protein, 184 aa, Homo sapiens
MVGLPGILYRFKIRMRTELFIACRGAFSHWASCVYCGQRRPSSTLAMRPSSTLANVLPCGHHCPEGTIVCCLEEKGYNSCACLGRRTPGRPVAKLALGHIKGNYATRLSPTNSLVGKQFLFFWQEVGNPAKANNIRGQSPSHQIPAEDLPPLSWGRKKWGLILACPAGTWEPSPGNQDCAEKEN

SEQ ID NO: 817918 - protein, 162 aa, Homo sapiens
MVGLPGILYRFKIRMRTELFIACRGAFSHWASCVYCGQRRPSSTLAMRPSSTLANVLPCGHHCPEGTIVCCLEEKGYNSCACLGRRTPGRPVAKLALGHIKGNYATRLSPTTLRPRRPVLKALPSGLPKEGLSPFSQNRACGYGCLAGLGGGRIDSTWWPKI

SEQ ID NO: 817919 - protein, 173 aa, Homo sapiens
MVGLPGILYRFKIRMRTELFIACRGAFSHWASCVYCGQRRPSSTLAMRPSSTLANVLPCGHHCPEGTIVCCLEEKGYNSCACLGRRTPGRPVAKLALGHIKGNYATRLSPTTLRPRRPVLKALPSGLPKEGLSPFSQNRACGYGCLAGLGGGRIDKPILKRWSAADLGILFES

SEQ ID NO: 817920 - protein, 153 aa, Homo sapiens
MVGLPGILYRFKIRMRTELFIACRGAFSHWASCVYCGQRRPSSTLAMRPSSTLANVLPCGHHCPEGTIVCCLEEKGYNSCACLGRRTPGRPVAKLALGHARGGRKFDKKPNSLQRAWPGLLPHQNYTRAKRNCWPHEGTLLGPPESTGGCCAH

SEQ ID NO: 817921 - protein, 118 aa, Homo sapiens
SLQRAWPGLLPHQNYTRAKRNCWPRVRGVAMNVSNPEMQGWVLKLQWPHCWVGKSHPQVSLQEGDLRWEEQQVVVCSHGTVDPAPALLKEVGSPSFTVSPQETEAGRGSGGLSWKESA

SEQ ID NO: 817922 - protein, 358 aa, Homo sapiens
RNQERLNPRDVEYGTIEGLITTNVGDSTLADLLDHSCTSGSGSGLPFLVQRTVARQITLLECVGKGRYGEVWRGSWQGENVAVKIFSSRDEKSWFRETELYNTVMLRHENILGFIASDMTSRHSSTQLWLITHYHEMGSLYDYLQLTTLDTVSCLRIVLSIASGLAHLHIEIFGTQGKPAIAHRDLKSKNILVKKNGQCCIADLGLAVMHSQSTNQLDVGNNPRVGTKRYMAPEVLDETIQVDCFDSYKRVDIWAFGLVLWEVARRMVSNGIVEDYKPPFYDVVPNDPSFEDMRKVVCVDQQRPNIPNRWFSDPTLTSLAKLMKECWYQNPSARLTALRIKKTLTKIDNSLDKLKTDC

SEQ ID NO: 817923 - protein, 358 aa, Homo sapiens; identical to SEQ ID NO: 817922

SEQ ID NO: 817924 - protein, 358 aa, Homo sapiens; identical to SEQ ID NO: 817922

SEQ ID NO: 817925 - protein, 180 aa, Homo sapiens
MGQQISDQTQLVINKLPEKVAKHVTLVRESGSLTYEEFLGRVAELNDVTAKVASGQEKHLLFEVQPGSDSSAFWKVVVRVVCTKINKSSGIVEASRIMNLYQFIQLYKDITSQAAGVLAQSSTSEEPDENSSSVTSCQASLWMGRVKQLTDEEECCICMDGRADLILPCAHSFCQKCIDK

SEQ ID NO: 817926 - protein, 230 aa, Homo sapiens
MGQQISDQTQLVINKLPEKVAKHVTLVRESGSLTYEEFLGRVAELNDVTAKVASGQEKHLLFEVQPGSDSSAFWKVVVRVVCTKINKSSGIVEASRIMNLYQFIQLYKDITSQAAGVLAQSSTSEEPDENSSSVTSCQASLWMGRVKQLTDEEECCICMDGRADLILPCAHSFCQKCIDKWSDRHRNCPICRLQMTGANESWVVSDAPTEDDMANYILNMADEAGQPHRP

SEQ ID NO: 817927 - protein, 181 aa, Homo sapiens
MGQQISDQTQLVINKLPEKVAKHVTLVRESGSLTYEEFLGRVAELNDVTAKVASGQEKHLLFEVQPGSDSSAFWKVVVRVVCTKINKSSGIVEASRIMNLYQFIQLYKDITSQAAGVLAQSSTSEEPDENSSSVTSCQASLWMGRVKQLTDEEECCICMDGRADLILPCAHSFCQKCIDKW

SEQ ID NO: 817928 - protein, 166 aa, Homo sapiens
MGQQISDQTQLVINKLPEKVAKHVTLVRESGSLTYEEFLGRVAELNDVTAKVASGQEKHLLFEVQPGSDSSAFWKVVVRVVCTKINKSSGIVEASRIMNLYQFIQLYKDITSQAAGVLPHHLTSFILVNPILRHRPSGLFLGGKGPPPDPEGVSLFWSLVQLHQKN

SEQ ID NO: 817929 - protein, 230 aa, Homo sapiens; identical to SEQ ID NO: 817926

SEQ ID NO: 817930 - protein, 230 aa, Homo sapiens; identical to SEQ ID NO: 817926

SEQ ID NO: 817931 - protein, 230 aa, Homo sapiens; identical to SEQ ID NO: 817926

SEQ ID NO: 817932 - protein, 230 aa, Homo sapiens; identical to SEQ ID NO: 817926

SEQ ID NO: 817933 - protein, 231 aa, Homo sapiens
MGQNWHFRRAVISENCRIKPIQDEAWQLENRAGNWQRLNYFHRRLCFLRTAKVASGQEKHLLFEVQPGSDSSAFWKVVVRVVCTKINKSSGIVEASRIMNLYQFIQLYKDITSQAAGVLAQSSTSEEPDENSSSVTSCQASLWMGRVKQLTDEEECCICMDGRADLILPCAHSFCQKCIDKWSDRHRNCPICRLQMTGANESWVVSDAPTEDDMANYILNMADEAGQPHRP

SEQ ID NO: 817934 - protein, 87 aa, Homo sapiens
AGLVGKVVYGHTCFLERILVNDYSLCHIRRIHMNAPSIDCSFCHRDPYGNCWSITRILLTRSVSQRLLDYQLIALRALDLLSLIQIT

SEQ ID NO: 817935 - protein, 157 aa, Homo sapiens
MGQQISDQTQLVINKLPEKVAKHVTLVRESGSLTYEEFLGRVAELNDVTAKVASGQEKHLLFEVQPGSDSSAFWKVVVRVVCTKINKSSGIVEASRIMNLYQFIQLYKDITSQAAGVLAQSSTSEEPDENSSSVTSCQASLWMGRYIMHKYCISLIF

SEQ ID NO: 817936 - protein, 369 aa, Homo sapiens
MEPPGRRECPFPSWRFPGLLLAAMVLLLYSFSDACEEPPTFEAMELIGKPKPYYEIGERVDYKCKKGYFYIPPLATHTICDRNHTWLPVSDDACYRETCPYIRDPLNGQAVPANGTYEFGYQMHFICNEGYYLIGEEILYCELKGSVAIWSGKPPICEKVLCTPPPKIKNGKHTFSEVEVFEYLDAVTYSCDPAPGPDPFSLIGESTIYCGDNSVWSRAAPECKVVKCRFPVVENGKQISGFGKKFYYKATVMFECDKGFYLDGSDTIVCDSNSTWDPPVPKCLKGPRPTYKPPVSNYPGYPKPEEGILDSLDVWVIAVIVIAIVVGVAVICVVPYRYLQRRKKKGKADGGAEYATYQTKSTTPAEQRG

SEQ ID NO: 817937 - protein, 384 aa, Homo sapiens
MEPPGRRECPFPSWRFPGLLLAAMVLLLYSFSDACEEPPTFEAMELIGKPKPYYEIGERVDYKCKKGYFYIPPLATHTICDRNHTWLPVSDDACYRETCPYIRDPLNGQAVPANGTYEFGYQMHFICNEGYYLIGEEILYCELKGSVAIWSGKPPICEKVLCTPPPKIKNGKHTFSEVEVFEYLDAVTYSCDPAPGPDPFSLIGESTIYCGDNSVWSRAAPECKVVKCRFPVVENGKQISGFGKKFYYKATVMFECDKGFYLDGSDTIVCDSNSTWDPPVPKCLKVSTSSTTKSPASSASGPRPTYKPPVSNYPGYPKPEEGILDSLDVWVIAVIVIAIVVGVAVICVVPYRYLQRRKKKGKADGGAEYATYQTKSTTPAEQRG

SEQ ID NO: 817938 - protein, 369 aa, Homo sapiens; identical to SEQ ID NO: 817936

SEQ ID NO: 817939 - protein, 377 aa, Homo sapiens
MEPPGRRECPFPSWRFPGLLLAAMVLLLYSFSDACEEPPTFEAMELIGKPKPYYEIGERVDYKCKKGYFYIPPLATHTICDRNHTWLPVSDDACYRETCPYIRDPLNGQAVPANGTYEFGYQMHFICNEGYYLIGEEILYCELKGSVAIWSGKPPICEKVLCTPPPKIKNGKHTFSEVEVFEYLDAVTYSCDPAPGPDPFSLIGESTIYCGDNSVWSRAAPECKVVKCRFPVVENGKQISGFGKKFYYKATVMFECDKGFYLDGSDTIVCDSNSTWDPPVPKCLKVSTSSTTKSPASSASGPRPTYKPPVSNYPGYPKPEEGILDSLDVWVIAVIVIAIVVGVAVICVVPYRYLQRRKKKGTYLTDETHREVKFTSL

SEQ ID NO: 817940 - protein, 399 aa, Homo sapiens
MEPPGRRECPFPSWRFPGLLLAAMVLLLYSFSDACEEPPTFEAMELIGKPKPYYEIGERVDYKCKKGYFYIPPLATHTICDRNHTWLPVSDDACYRETCPYIRDPLNGQAVPANGTYEFGYQMHFICNEGYYLIGEEILYCELKGSVAIWSGKPPICEKVLCTPPPKIKNGKHTFSEVEVFEYLDAVTYSCDPAPGPDPFSLIGESTIYCGDNSVWSRAAPECKVVKCRFPVVENGKQISGFGKKFYYKATVMFECDKGFYLDGSDTIVCDSNSTWDPPVPKCLKVLPPSSTKPPALSHSVSTSSTTKSPASSASGPRPTYKPPVSNYPGYPKPEEGILDSLDVWVIAVIVIAIVVGVAVICVVPYRYLQRRKKKGKADGGAEYATYQTKSTTPAEQRG

SEQ ID NO: 817941 - protein, 362 aa, Homo sapiens
MEPPGRRECPFPSWRFPGLLLAAMVLLLYSFSDACEEPPTFEAMELIGKPKPYYEIGERVDYKCKKGYFYIPPLATHTICDRNHTWLPVSDDACYRETCPYIRDPLNGQAVPANGTYEFGYQMHFICNEGYYLIGEEILYCELKGSVAIWSGKPPICEKVLCTPPPKIKNGKHTFSEVEVFEYLDAVTYSCDPAPGPDPFSLIGESTIYCGDNSVWSRAAPECKVVKCRFPVVENGKQISGFGKKFYYKATVMFECDKGFYLDGSDTIVCDSNSTWDPPVPKCLKGPRPTYKPPVSNYPGYPKPEEGILDSLDVWVIAVIVIAIVVGVAVICVVPYRYLQRRKKKGTYLTDETHREVKFTSL

SEQ ID NO: 817942 - protein, 369 aa, Homo sapiens
MVLLLYSFSDACEEPPTFEAMELIGKPKPYYEIGERVDYKCKKGYFYIPPLATHTICDRNHTWLPVSDDACYRETCPYIRDPLNGQAVPANGTYEFGYQMHFICNEGYYLIGEEILYCELKGSVAIWSGKPPICEKVLCTPPPKIKNGKHTFSEVEVFEYLDAVTYSCDPAPGPDPFSLIGESTIYCGDNSVWSRAAPECKVVKCRFPVVENGKQISGFGKKFYYKATVMFECDKGFYLDGSDTIVCDSNSTWDPPVPKCLKVLPPSSTKPPALSHSVSTSSTTKSPASSASGPRPTYKPPVSNYPGYPKPEEGILDSLDVWVIAVIVIAIVVGVAVICVVPYRYLQRRKKKGTYLTDETHREVKFTSL

SEQ ID NO: 817943 - protein, 324 aa, Homo sapiens [sequence omitted]

SEQ ID NO: 817944 - protein, 369 aa, Homo sapiens; identical to SEQ ID NO: 817936

SEQ ID NO: 817945 - protein, 324 aa, Homo sapiens [sequence omitted]

SEQ ID NO: 817946 - protein, 349 aa, Homo sapiens
MEPPGRRECPFPSWRFPGLLLAAMVLLLYSFSDACEEPPTFEAMELIGKPKPYYEIGERVDYKCKKGYFYIPPLATHTICDRNHTWLPVSDDACYRETCPYIRDPLNGQAVPANGTYEFGYQMHFICNEGYYLIGEEILYCELKGSVAIWSGKPPICEKVLCTPPPKIKNGKHTFSEVEVFEYLDAVTYSCDPAPGPDPFSLIGESTIYCGDNSVWSRAAPECKVVKCRFPVVENGKQISGFGKKFYYKATVMFECDKGFYLDGSDTIVCDSNSTWDPPVPKCLKGPRPTYKPPVSNYPGYPKPEEGILDSLDVWVIAVIVIAIGKQMVELNMPLTRLNQPLQQSREAE

SEQ ID NO: 817947 - protein, 136 aa, Homo sapiens
AVRKVLRYSHAERVTNIYTDTHEEQGHAHLSCSTGCFVSWGLLRPISGPRRDFPARLALGFSAFLRRNNSVFRAAHGASRPPRVSLSFLALSWVASGGHGVAAVLLLRPASASHSAGITGVSHHTHPHITFMMVIF

SEQ ID NO: 817948 - protein, 369 aa, Homo sapiens; identical to SEQ ID NO: 817936

SEQ ID NO: 817949 - protein, 369 aa, Homo sapiens; identical to SEQ ID NO: 817936

SEQ ID NO: 817950 - protein, 369 aa, Homo sapiens; identical to SEQ ID NO: 817936

SEQ ID NO: 817951 - protein, 369 aa, Homo sapiens; identical to SEQ ID NO: 817936

SEQ ID NO: 817952 - protein, 369 aa, Homo sapiens; identical to SEQ ID NO: 817936

SEQ ID NO: 817953 - protein, 369 aa, Homo sapiens; identical to SEQ ID NO: 817936

SEQ ID NO: 817954 - protein, 369 aa, Homo sapiens; identical to SEQ ID NO: 817936

SEQ ID NO: 817955 - protein, 324 aa, Homo sapiens [sequence omitted]

SEQ ID NO: 817956 - protein, 369 aa, Homo sapiens; identical to SEQ ID NO: 817936

SEQ ID NO: 817957 - protein, 324 aa, Homo sapiens [sequence omitted]

SEQ ID NO: 817958 - protein, 302 aa, Homo sapiens
MEPPGRRECPFPSWRFPGLLLAAMVLLLYSFSDACEEPPTFEAMELIGKPKPYYEIGERVDYKCKKGYFYIPPLATHTICDRNHTWLPVSDDACYRETCPYIRDPLNGQAVPANGTYEFGYQMHFICNEGYYLIGEEILYCELKGSVAIWSGKPPICEKVLCTPPPKIKNGKHTFSEVEVFEYLDAVTYSCDPAPGPDPFSLIGESTIYCGDNSVWSRAAPECKVVKCRFPVVENGKQISGFGKKFYYKATVMFECDKGFYLDGSDTIVCDSNSTWDPPVPKCLKGPRPTYKPPVSNYPDIL

SEQ ID NO: 817959 - protein, 235 aa, Homo sapiens [sequence omitted]

SEQ ID NO: 817960 - protein, 160 aa, Homo sapiens
MEPPGRRECPFPSWRFPGLLLAAMVLLLYSFSDACEEPPTFEAMELIGKPKPYYEIGERVDYKCKKGYFYIPPLATHTICDRNHTWLPVSDDACYRETCPYIRDPLNGQAVPANGTYEFGYQMHFICNEGYYLIGEEILYCELKGSVAIWSGKPPICERI

SEQ ID NO: 817961 - protein, 138 aa, Homo sapiens
MEPPGRRECPFPSWRFPGLLLAAMVLLLYSFSDACEEPPTFEAMELIGKPKPYYEIGERVDYKCKKGYFYIPPLATHTICDRNHTWLPVSDDACYRETCPYIRDPLNGQAVPANGTYEFGYQMHFICNEGYYLIVRGN

SEQ ID NO: 817962 - protein, 142 aa, Homo sapiens
AVRKVLRYSHAERVTNIYTDTHEAGPRPPVLQHWMLYACEEPPTFEAMELIGKPKPYYEIGERVDYKCKKGYFYIPPLATHTICDRNHTWLPVSDDACYRETCPYIRDPLNGQAVPANGTYEFGYQMHFICNEGYYLIVRGN

SEQ ID NO: 817963 - protein, 214 aa, Homo sapiens
MQLKQSTCERVMILRSRFLDARRKRRNFNKQATEILNEEVRSIIMLQEKAQDRERLLLKFIKIMKHLRKLNNFNSYLAILSALDSAPIRRLEWQKQTSEGLAEYCTLIDSSSSFRAYREKLTEDEVERVITIMQNPRQYKIPDWFLNRQKDVKDGKYSQVLANGLDNKLREDLERLKKIRAHRGLRHFWGLRVRGQHTKTTGRRGRTVGVSKKK

SEQ ID NO: 817964 - protein, 1077 aa, Homo sapiens
MDTDSQRSHLSSFTMKLMDKFHSPKIKRTPSKKGKPAEVSVKIPEKPVNKEATDRFLPEGYPLPLDLEQQAVEFMSTSAVASRSQRQKNLSWLEEKEKEVVSALRYFKTIVDKMAIDKKVLEMLPGSASKVLEAILPLVQNDPRIQHSSALSSCYSRVYQSLANLIRWSDQVMLEGVNSEDKEMVTTVKGVIKAVLDGVKELVRLTIEKQGRPSPTSPVKPSSPASKPDGPAELPLTDREVEILNKTTGMSQSTELLPDATDEEVAPPKPPLPGIRVVDNSPPPALPPKKRQSAPSPTRVAVVAPMSRATSGSSLPVGINRQDFDVDCYAQRRLSGGSHSYGGESPRLSPCSSIGKLSKSDEQLSSLDRDSGQCSRNTSCETLDHYDPDYEFLQQDLSNADQIPQQTAWNLSPLPESLGESGSPFLGPPFQLPLGGHPQPDGPLAPGQQTDTPPALPEKKRRSAASQTADGSGCRVSYERHPSQYDNISGEDLQSTAPIPSVPYAPFAAILPFQHGGSSAPVEFVGDFTAPESTGDPEKPPPLPEKKNKHMLAYMQLLEDYSEPQPSMFYQTPQNEHIYQQKNKLLMEVYGFSDSFSGVDSVQELAPPPALPPKQRQLEPPAGKDGHPRDPSAVSGVPGKDSRDGSERAPKSPDALESAQSEEEVDELSLIDHNEIMSRLTLKQEGDDGPDVRGGSGDILLVHATETDRKDLVLYCEAFLTTYRTFISPEELIKKLQYRYEKFSPFADTFKKRVSKNTFFVLVRVVDELCLVELTEEILKLLMELVFRLVCNGELSLARVLRKNILDKVDQKKLLRCATSSQPLAARGVAARPGTLHDFHSHEIAEQLTLLDAELFYKIEIPEVLLWAKEQNEEKSPNLTQFTEHFNNMSYWVRSIIMLQEKAQDRERLLLKFIKIMKHLRKLNNFNSYLAILSALDSAPIRRLEWQKQTSEGLAEYCTLIDSSSSFRAYRAALSEVEPPCIPYLGLILQDLTFVHLGNPDYIDGKVNFSKRWQQFNILDSMRCFQQAHYDMRRNDDIINFFNDFSDHLAEEALWELSLKIKPRNITRRKTDREEKT

SEQ ID NO: 817965 - protein, 1077 aa, Homo sapiens; identical to SEQ ID NO: 817964

SEQ ID NO: 817966 - protein, 1077 aa, Homo sapiens; identical to SEQ ID NO: 817964

SEQ ID NO: 817967 - protein, 1095 aa, Homo sapiens
MGNAIEKQKPLKRSHLYPWKQDSQRSHLSSFTMKLMDKFHSPKIKRTPSKKGKPAEVSVKIPEKPVNKEATDRFLPEGYPLPLDLEQQAVEFMSTSAVASRSQRQKNLSWLEEKEKEVVSALRYFKTIVDKMAIDKKVLEMLPGSASKVLEAILPLVQNDPRIQHSSALSSCYSRVYQSLANLIRWSDQVMLEGVNSEDKEMVTTVKGVIKAVLDGVKELVRLTIEKQGRPSPTSPVKPSSPASKPDGPAELPLTDREVEILNKTTGMSQSTELLPDATDEEVAPPKPPLPGIRVVDNSPPPALPPKKRQSAPSPTRVAVVAPMSRATSGSSLPVGINRQDFDVDCYAQRRLSGGSHSYGGESPRLSPCSSIGKLSKSDEQLSSLDRDSGQCSRNTSCETLDHYDPDYEFLQQDLSNADQIPQQTAWNLSPLPESLGESGSPFLGPPFQLPLGGHPQPDGPLAPGQQTDTPPALPEKKRRSAASQTADGSGCRVSYERHPSQYDNISGEDLQSTAPIPSVPYAPFAAILPFQHGGSSAPVEFVGDFTAPESTGDPEKPPPLPEKKNKHMLAYMQLLEDYSEPQPSMFYQTPQNEHIYQQKNKLLMEVYGFSDSFSGVDSVQELAPPPALPPKQRQLEPPAGKDGHPRDPSAVSGVPGKDSRDGSERAPKSPDALESAQSEEEVDELSLIDHNEIMSRLTLKQEGDDGPDVRGGSGDILLVHATETDRKDLVLYCEAFLTTYRTFISPEELIKKLQYRYEKFSPFADTFKKRVSKNTFFVLVRVVDELCLVELTEEILKLLMELVFRLVCNGELSLARVLRKNILDKVDQKKLLRCATSSQPLAARGVAARPGTLHDFHSHEIAEQLTLLDAELFYKIEIPEVLLWAKEQNEEKSPNLTQFTEHFNNMSYWVRSIIMLQEKAQDRERLLLKFIKIMKHLRKLNNFNSYLAILSALDSAPIRRLEWQKQTSEGLAEYCTLIDSSSSFRAYRAALSEVEPPCIPYLGLILQDLTFVHLGNPDYIDGKVNFSKRWQQFNILDSMRCFQQAHYDMRRNDDIINFFNDFSDHLAEEALWELSLKIKPRNITRRKTDREEKT

SEQ ID NO: 817968 - protein, 1077 aa, Homo sapiens; identical to SEQ ID NO: 817964

SEQ ID NO: 817969 - protein, 1132 aa, Homo sapiens
AAARSPPCRRGSEAWRARAEASGGRAAPVAPRRPGPGPMSGGLGLRRSPEMSGKIEKADSQRSHLSSFTMKLMDKFHSPKIKRTPSKKGKPAEVSVKIPEKPVNKEATDRFLPEGYPLPLDLEQQAVEFMSTSAVASRSQRQKNLSWLEEKEKEVVSALRYFKTIVDKMAIDKKVLEMLPGSASKVLEAILPLVQNDPRIQHSSALSSCYSRVYQSLANLIRWSDQVMLEGVNSEDKEMVTTVKGVIKAVLDGVKELVRLTIEKQGRPSPTSPVKPSSPASKPDGPAELPLTDREVEILNKTTGMSQSTELLPDATDEEVAPPKPPLPGIRVVDNSPPPALPPKKRQSAPSPTRVAVVAPMSRATSGSSLPVGINRQDFDVDCYAQRRLSGGSHSYGGESPRLSPCSSIGKLSKSDEQLSSLDRDSGQCSRNTSCETLDHYDPDYEFLQQDLSNADQIPQQTAWNLSPLPESLGESGSPFLGPPFQLPLGGHPQPDGPLAPGQQTDTPPALPEKKRRSAASQTADGSGCRVSYERHPSQYDNISGEDLQSTAPIPSVPYAPFAAILPFQHGGSSAPVEFVGDFTAPESTGDPEKPPPLPEKKNKHMLAYMQLLEDYSEPQPSMFYQTPQNEHIYQQKNKLLMEVYGFSDSFSGVDSVQELAPPPALPPKQRQLEPPAGKDGHPRDPSAVSGVPGKDSRDGSERAPKSPDALESAQSEEEVDELSLIDHNEIMSRLTLKQEGDDGPDVRGGSGDILLVHATETDRKDLVLYCEAFLTTYRTFISPEELIKKLQYRYEKFSPFADTFKKRVSKNTFFVLVRVVDELCLVELTEEILKLLMELVFRLVCNGELSLARVLRKNILDKVDQKKLLRCATSSQPLAARGVAARPGTLHDFHSHEIAEQLTLLDAELFYKIEIPEVLLWAKEQNEEKSPNLTQFTEHFNNMSYWVRSIIMLQEKAQDRERLLLKFIKIMKHLRKLNNFNSYLAILSALDSAPIRRLEWQKQTSEGLAEYCTLIDSSSSFRAYRAALSEVEPPCIPYLGLILQDLTFVHLGNPDYIDGKVNFSKRWQQFNILDSMRCFQQAHYDMRRNDDIINFFNDFSDHLAEEALWELSLKIKPRNITRRKTDREEKT

SEQ ID NO: 817970 - protein, 1094 aa, Homo sapiens
AAARSPPCRRGSEAWRARAEASGGRAAPVAPRRPGPGPMSGGLGLRRSPEMSGKIEKADSQRSHLSSFTMKLMDKFHSPKIKRTPSKKGKPAEVSVKIPEKPVNKNLSWLEEKEKEVVSALRYFKTIVDKMAIDKKVLEMLPGSASKVLEAILPLVQNDPRIQHSSALSSCYSRVYQSLANLIRWSDQVMLEGVNSEDKEMVTTVKGVIKAVLDGVKELVRLTIEKQGRPSPTSPVKPSSPASKPDGPAELPLTDREVEILNKTTGMSQSTELLPDATDEEVAPPKPPLPGIRVVDNSPPPALPPKKRQSAPSPTRVAVVAPMSRATSGSSLPVGINRQDFDVDCYAQRRLSGGSHSYGGESPRLSPCSSIGKLSKSDEQLSSLDRDSGQCSRNTSCETLDHYDPDYEFLQQDLSNADQIPQQTAWNLSPLPESLGESGSPFLGPPFQLPLGGHPQPDGPLAPGQQTDTPPALPEKKRRSAASQTADGSGCRVSYERHPSQYDNISGEDLQSTAPIPSVPYAPFAAILPFQHGGSSAPVEFVGDFTAPESTGDPEKPPPLPEKKNKHMLAYMQLLEDYSEPQPSMFYQTPQNEHIYQQKNKLLMEVYGFSDSFSGVDSVQELAPPPALPPKQRQLEPPAGKDGHPRDPSAVSGVPGKDSRDGSERAPKSPDALESAQSEEEVDELSLIDHNEIMSRLTLKQEGDDGPDVRGGSGDILLVHATETDRKDLVLYCEAFLTTYRTFISPEELIKKLQYRYEKFSPFADTFKKRVSKNTFFVLVRVVDELCLVELTEEILKLLMELVFRLVCNGELSLARVLRKNILDKVDQKKLLRCATSSQPLAARGVAARPGTLHDFHSHEIAEQLTLLDAELFYKIEIPEVLLWAKEQNEEKSPNLTQFTEHFNNMSYWVRSIIMLQEKAQDRERLLLKFIKIMKHLRKLNNFNSYLAILSALDSAPIRRLEWQKQTSEGLAEYCTLIDSSSSFRAYRAALSEVEPPCIPYLGLILQDLTFVHLGNPDYIDGKVNFSKRWQQFNILDSMRCFQQAHYDMRRNDDIINFFNDFSDHLAEEALWELSLKIKPRNITRRKTDREEKT

SEQ ID NO: 817971 - protein, 828 aa, Homo sapiens [sequence omitted]

SEQ ID NO: 817972 - protein, 539 aa, Homo sapiens
APDPPRTSGRSSPSCLSVSLDIISLWSMRDSSLTSFSSVSHCVQQTKVAFTPEDGSAAQGLSVSVSNSFLSRHGSLPVPSEPPAGKDGHPRDPSAVSGVPGKDSRDGSERAPKSPDALESAQSEEEVDELSLIDHNEIMSRLTLKQEGDDGPDVRGGSGDILLVHATETDRKDLVLYCEAFLTTYRTFISPEELIKKLQYRYEKFSPFADTFKKRVSKNTFFVLVRVVDELCLVELTEEILKLLMELVFRLVCNGELSLARVLRKNILDKVDQKKLLRCATSSQPLAARGVAARPGTLHDFHSHEIAEQLTLLDAELFYKIEIPEVLLWAKEQNEEKSPNLTQFTEHFNNMSYWVRSIIMLQEKAQDRERLLLKFIKIMKHLRKLNNFNSYLAILSALDSAPIRRLEWQKQTSEGLAEYCTLIDSSSSFRAYRAALSEVEPPCIPYLGLILQDLTFVHLGNPDYIDGKVNFSKRWQQFNILDSMRCFQQAHYDMRRNDDIINFFNDFSDHLAEEALWELSLKIKPRNITRRKTDREEKT

SEQ ID NO: 817973 - protein, 1077 aa, Homo sapiens; identical to SEQ ID NO: 817964

SEQ ID NO: 817974 - protein, 1095 aa, Homo sapiens; identical to SEQ ID NO: 817967

SEQ ID NO: 817975 - protein, 476 aa, Homo sapiens
GTRVGLSSHSTVLQAAPSSVESAHEIKPFPVSPLLSAVSFERWTERTCDFSGTCRRRHQRGFPSPRLPRPSHSPCHLPCLSQSKDSNPPWLPPPSTLHPDKQFALFFPLDLVLYCEAFLTTYRTFISPEELIKKLQYRYEKFSPFADTFKKRVSKNTFFVLVRVVDELCLVELTEEILKLLMELVFRLVCNGELSLARVLRKNILDKVDQKKLLRCATSSQPLAARGVAARPGTLHDFHSHEIAEQLTLLDAELFYKIEIPEVLLWAKEQNEEKSPNLTQFTEHFNNMSYWVRSIIMLQEKAQDRERLLLKFIKIMKHLRKLNNFNSYLAILSALDSAPIRRLEWQKQTSEGLAEYCTLIDSSSSFRAYRAALSEVEPPCIPYLGLILQDLTFVHLGNPDYIDGKVNFSKRWQQFNILDSMRCFQQAHYDMRRNDDIINFFNDFSDHLAEEALWELSLKIKPRNITRRKTDREEKT

SEQ ID NO: 817976 - protein, 401 aa, Homo sapiens
MAQCSPASPTKLSWLLAMMHPQRPVDLGPFFQKPDLVLYCEAFLTTYRTFISPEELIKKLQYRYEKFSPFADTFKKRVSKNTFFVLVRVVDELCLVELTEEILKLLMELVFRLVCNGELSLARVLRKNILDKVDQKKLLRCATSSQPLAARGVAARPGTLHDFHSHEIAEQLTLLDAELFYKIEIPEVLLWAKEQNEEKSPNLTQFTEHFNNMSYWVRSIIMLQEKAQDRERLLLKFIKIMKHLRKLNNFNSYLAILSALDSAPIRRLEWQKQTSEGLAEYCTLIDSSSSFRAYRAALSEVEPPCIPYLGLILQDLTFVHLGNPDYIDGKVNFSKRWQQFNILDSMRCFQQAHYDMRRNDDIINFFNDFSDHLAEEALWELSLKIKPRNITRRKTDREEKT

SEQ ID NO: 817977 - protein, 296 aa, Homo sapiens
AIYSMAVKVCNGELSLARVLRKNILDKVDQKKLLRCATSSQPLAARGVAARPGTLHDFHSHEIAEQLTLLDAELFYKIEIPEVLLWAKEQNEEKSPNLTQFTEHFNNMSYWVRSIIMLQEKAQDRERLLLKFIKIMKHLRKLNNFNSYLAILSALDSAPIRRLEWQKQTSEGLAEYCTLIDSSSSFRAYRAALSEVEPPCIPYLGLILQDLTFVHLGNPDYIDGKVNFSKRWQQFNILDSMRCFQQAHYDMRRNDDIINFFNDFSDHLAEEALWELSLKIKPRNITRRKTDREEKT

SEQ ID NO: 817978 - protein, 795 aa, Homo sapiens
MGNAIEKQKPLKRSHLYPWKQDSQRSHLSSFTMKLMDKFHSPKIKRTPSKKGKPAEVSVKIPEKPVNKEATDRFLPEGYPLPLDLEQQAVEFMSTSAVASRSQRQKNLSWLEEKEKEVVSALRYFKTIVDKMAIDKKVLEMLPGSASKVLEAILPLVQNDPRIQHSSALSSCYSRVYQSLANLIRWSDQVMLEGVNSEDKEMVTTVKGVIKAVLDGVKELVRLTIEKQGRPSPTSPVKPSSPASKPDGPAELPLTDREVEILNKTTGMSQSTELLPDATDEEVAPPKPPLPGIRVVDNSPPPALPPKKRQSAPSPTRVAVVAPMSRATSGSSLPVGINRQDFDVDCYAQRRLSGGSHSYGGESPRLSPCSSIGKLSKSDEQLSSLDRDSGQCSRNTSCETLDHYDPDYEFLQQDLSNADQIPQQTAWNLSPLPESLGESGSPFLGPPFQLPLGGHPQPDGPLAPGQQTDTPPALPEKKRRSAASQTADGSGCRVSYERHPSQYDNISGEDLQSTAPIPSVPYAPFAAILPFQHGGSSAPVEFVGDFTAPESTGDPEKPPPLPEKKNKHMLAYMQLLEDYSEPQPSMFYQTPQNEHIYQQKNKLLMEVYGFSDSFSGVDSVQELAPPPALPPKQRQLEPPAGKDGHPRDPSAVSGVPGKDSRDGSERAPKSPDALESAQSEEEVDELSLIDHNEIMSRLTLKQEGDDGPDVRGGSGDILLVHATETDRKDLVLYCEAFLTTYRTFISPEELIKKLQYRYPFLPDPGPLHHGHFGERGTLLPFSPRGGSRAAYWVAV

SEQ ID NO: 817979 - protein, 105 aa, Homo sapiens
ASPRWKATCIPYLGLILQDLTFVHLGNPDYIDGKVNFSKRWQQFNILDSMRCFQQAHYDMRRNDDIINFFNDFSDHLAEEALWELSLKIKPRNITRRKTDREEKT

SEQ ID NO: 817980 - protein, 171 aa, Homo sapiens [sequence omitted]

SEQ ID NO: 817981 - protein, 795 aa, Homo sapiens; identical to SEQ ID NO: 817978

SEQ ID NO: 817982 - protein, 1095 aa, Homo sapiens; identical to SEQ ID NO: 817967

SEQ ID NO: 817983 - protein, 1060 aa, Homo sapiens
MGNAIEKQKPLKRSHLYPWKQDSQRSHLSSFTMKLMDKFHSPKIKRTPSKKGKPAEVSVKIPEKPVNKEATDRFLPEGYPLPLDLEQQAVEFMSTSAVASRSQRQKNLSWLEEKEKEVVSALRYFKTIVDKMAIDKKVLEMLPGSASKVLEAILPLVQNDPRIQHSSALSSCYSRVYQSLANLIRWSDQVMLEGVNSEDKEMVTTVKGVIKAVLDGVKELVRLTIEKQGRPSPTSPVKPSSPASKPDGPAELPLTDREVEILNKTTGMSQSTELLPDATDEEVAPPKPPLPGIRVVDNSPPPALPPKKRQSAPSPTRVAVVAPMSRATSGSSLPVGINRQDFDVDCYAQRRLSGGSHSYGGESPRLSPCSSIGKLSKSDEQLSSLDRDSGQCSRNTSCETLDHYDPDYEFLQQDLSNADQIPQQTAWNLSPLPESLGESGSPFLGPPFQLPLGGHPQPDGPLAPGQQTDTPPALPEKKRRSAASQTADGSGCRVSYERHPSQYDNISGEDLQSTAPIPSVPYAPFAAILPFQHGGSSAPVEFVGDFTAPESTGDPEKPPPLPEKKNKHMLAYMQLLEDYSEPQPSMFYQTPQNEHIYQQKNKLLMEVYGFSDSFSGVDSVQELAPPPALPPKQRQLEPPAGKDGHPRDPSAVSGVPGKDSRDGSERAPKSPDALESAQSEEEVDELSLIDHNEIMSRLTLKQEGDDGPDVRGGSGDILLVHATETDRKDLVLYCEAFLTTYRTFISPEELIKKLQYRYEKFSPFADTFKKRVSKNTFFVLVRVVDELCLVELTEEILKLLMELVFRLVCNGELSLARVLRKNILDKVDQKKLLRCATSSQPLAARGVAARPGTLHDFHSHEIAEQLTLLDAELFYKIEIPEVLLWAKEQNEEKSPNLTQFTEHFNNMSYWVRSIIMLQEKAQDRERLLLKFIKIMKHLRKLNNFNSYLAILSALDSAPIRRLEWQKQTSEGLAEYCTLIDSSSSFRAYRAALSEVEPPCIPYLGLILQDLTFVHLGNPDYTYLSLGFYFDRDDVALEGVSHFFRELAEEKREGYERLLKM

SEQ ID NO: 817984 - protein, 848 aa, Homo sapiens
MGNAIEKQKPLKRSHLYPWKQDSQRSHLSSFTMKLMDKFHSPKIKRTPSKKGKPAEVSVKIPEKPVNKEATDRFLPEGYPLPLDLEQQAVEFMSTSAVASRSQRQKNLSWLEEKEKEVVSALRYFKTIVDKMAIDKKVLEMLPGSASKVLEAILPLVQNDPRIQHSSALSSCYSRVYQSLANLIRWSDQVMLEGVNSEDKEMVTTVKGVIKAVLDGVKELVRLTIEKQGRPSPTSPVKPSSPASKPDGPAELPLTDREVEILNKTTGMSQSTELLPDATDEEVAPPKPPLPGIRVVDNSPPPALPPKKRQSAPSPTRVAVVAPMSRATSGSSLPVGINRQDFDVDCYAQRRLSGGSHSYGGESPRLSPCSSIGKLSKSDEQLSSLDRDSGQCSRNTSCETLDHYDPDYEFLQQDLSNADQIPQQTAWNLSPLPESLGESGSPFLGPPFQLPLGGHPQPDGPLAPGQQTDTPPALPEKKRRSAASQTADGSGCRVSYERHPSQYDNISGEDLQSTAPIPSVPYAPFAAILPFQHGGSSAPVEFVGDFTAPESTGDPEKPPPLPEKKNKHMLAYMQLLEDYSEPQPSMFYQTPQNEHIYQQKNKLLMEVYGFSDSFSGVDSVQELAPPPALPPKQRQLEPPAGKDGHPRDPSAVSGVPGKDSRDGSERAPKSPDALESAQSEEEVDELSLIDHNEIMSRLTLKQEGDDGPDVRGGSGDILLVHATETDRKDLVLYCEAFLTTYRTFISPEELIKKLQYRYEKFSPFADTFKKRVSKNTFFVLVRVVDELCLVELTEEILKLKSMEAEMIQLQEELAPRSSAKQQAQQERDELADEIAISSGKVPGGREEE

SEQ ID NO: 817985 - protein, 768 aa, Homo sapiens
MGNAIEKQKPLKRSHLYPWKQDSQRSHLSSFTMKLMDKFHSPKIKRTPSKKGKPAEVSVKIPEKPVNKEATDRFLPEGYPLPLDLEQQAVEFMSTSAVASRSQRQKNLSWLEEKEKEVVSALRYFKTIVDKMAIDKKVLEMLPGSASKVLEAILPLVQNDPRIQHSSALSSCYSRVYQSLANLIRWSDQVMLEGVNSEDKEMVTTVKGVIKAVLDGVKELVRLTIEKQGRPSPTSPVKPSSPASKPDGPAELPLTDREVEILNKTTGMSQSTELLPDATDEEVAPPKPPLPGIRVVDNSPPPALPPKKRQSAPSPTRVAVVAPMSRATSGSSLPVGINRQDFDVDCYAQRRLSGGSHSYGGESPRLSPCSSIGKLSKSDEQLSSLDRDSGQCSRNTSCETLDHYDPDYEFLQQDLSNADQIPQQTAWNLSPLPESLGESGSPFLGPPFQLPLGGHPQPDGPLAPGQQTDTPPALPEKKRRSAASQTADGSGCRVSYERHPSQYDNISGEDLQSTAPIPSVPYAPFAAILPFQHGGSSAPVEFVGDFTAPESTGDPEKPPPLPEKKNKHMLAYMQLLEDYSEPQPSMFYQTPQNEHIYQQKNKLLMEVYGFSDSFSGVDSVQELAPPPALPPKQRQLEPPAGKDGHPRDPSAVSGVPGKDSRDGSERAPKSPDALESAQSEEEVDELSLIDHNEIMSRLTLKQEVRTSRAGALQPGPTEESRWGREECDLVISRTTLGGLETKSFNAPGEPLGCGLWRGRLQGKCAVSF

SEQ ID NO: 817986 - protein, 37 aa, Homo sapiens
MRRNDDIINFFNDFSDHLAEEALWELSLKIKPRNITR

SEQ ID NO: 817987 - protein, 1010 aa, Homo sapiens
ASPQERERRGGRSRRRAPPWARTRPRQLPGRLGCLLEEGLCGASEACVNDGVFGRCQKVPAMDFYRYEVSPVALQRLRVALQKLSGTGFTWQDDYTQYVMDQELADLPKTYLRRPEASSPARPSKHSVGSERRYSREGGAALANALRRHLPFLEALSQAPASDVLARTHTAQDRPPAEGDDRFSESILTYVAHTSALTYPPGPRTQLREDLLPRTLGQLQPDELSPKVDSGVDRHHLMAALSAYAAQRPPAPPGEGSLEPQYLLRAPSRMPRPLLAPAAPQKWPSPLGDSEDPSSTGDGARIHTLLKDLQRQPAEVRGLSGLELDGMAELMAGLMQGVDHGVARGSPGRAALGESGEQADGPKATLRGDSFPDDGVQDDDDRLYQEVHRLSATLGGLLQDHGSRLLPGALPFARPLDMERKKSEHPESSLSSEEETAGVENVKSQTYSKDLLGQQPHSEPGAAAFGELQNQMPGPSKEEQSLPAGAQEALSDGLQLEVQPSEEEARGYIVTDRDPLRPEEGRRLVEDVARLLQVPSSAFADVEVLGPAVTFKVSANVQNVTTEDVEKATVDNKDKLEETSGLKILQTGVGSKSKLKFLPPQAEQEDSTKFIALTLVSLACILGVLLASGLIYCLRHSSQHRLKEKLSGLGGDPGADATAAYQELCRQRMATRPPDRPEGPHTSRISSVSSQFSDGPIPSPSARSSASSWSEEPVQSNMDISTGHMILSYMEDHLKNKNRLEKEWEALCAYQAEPNSSFVAQREENVPKNRSLAVLTYDHSRVLLKAENSHSHSDYINASPIMDHDPRNPAYIATQGPLPATVADFWQMVWESGCVVIVMLTPLAENGVRQCYHYWPDEGSNLYHIYEVNLVSEHIWCEDFLVRSFYLKNLQTNETRTVTQFHFLSWYDRGVPSSSRSLLDFRRKVNKCYRGRSCPIIVHCSDGAGRSGTYVLIDMVLNKMAKGAKEIDIAATLEHLRDQRPGMVQTKEQFEFALTAVAEEVNAILKALPQ

SEQ ID NO: 817988 - protein, 89 aa, Homo sapiens
LWVGLPCGRQHFHFSPSVGSDGAGRSGTYVLIDMVLNKMAKGAKEIDIAATLEHLRDQRPGMVQTKEQFEFALTAVAEEVNAILKALPQ

SEQ ID NO: 817989 - protein, 135 aa, Homo sapiens
VRIAAPRSARGERPRVPAHCGGAAGRRPGVPSGPLRSETRGLRDKRQFRLPRVQVCSSTAAGLGRRFWHVPGRPVSGEGPCVWETEAAGSAGEPGKERGGLLPREEAQAGLALRLSEEPALPASEDAPRTLLSWA

SEQ ID NO: 817990 - protein, 143 aa, Homo sapiens
GVAAGAREARREEPAARASLGPDSAASRRLPRGHGLSAAGQAAGMGPPLPLLLLLLLLLPPRVLPAAPSSVPRGRQLPGRLGCLLEEGLCGASEACVNGGAESHKGTWNPAEWARAACHGPSCPEHLLRGGGGVTLIPSWTPQ

SEQ ID NO: 817991 - protein, 133 aa, Homo sapiens
APSSVRVPASAAPACPFSLLPFIVFSLKAERSQSPHGGPLAIPTAPSALHCLSCCWKLSPLRPEEGRRLVEDVARLLQVPSSAFADVDSIQTTQRVRKNLHDLYIRQKTNIQTLQRTHISKKQTVPSNNGLKT

SEQ ID NO: 817992 - protein, 1059 aa, Homo sapiens
GVAAGAREARREEPAARASLGPDSAASRRLPRGHGLSAAGQAAGMGPPLPLLLLLLLLLPPRVLPAAPSSVPRGRQLPGRLGCLLEEGLCGASEACVNDGVFGRCQKVPAMDFYRYEVSPVALQRLRVALQKLSGTGFTWQDDYTQYVMDQELADLPKTYLRRPEASSPARPSKHSVGSERRYSREGGAALANALRRHLPFLEALSQAPASDVLARTHTAQDRPPAEGDDRFSESILTYVAHTSALTYPPGPRTQLREDLLPRTLGQLQPDELSPKVDSGVDRHHLMAALSAYAAQRPPAPPGEGSLEPQYLLRAPSRMPRPLLAPAAPQKWPSPLGDSEDPSSTGDGARIHTLLKDLQRQPAEVRGLSGLELDGMAELMAGLMQGVDHGVARGSPGRAALGESGEQADGPKATLRGDSFPDDGVQDDDDRLYQEVHRLSATLGGLLQDHGSRLLPGALPFARPLDMERKKSEHPESSLSSEEETAGVENVKSQTYSKDLLGQQPHSEPGAAAFGELQNQMPGPSKEEQSLPAGAQEALSDGLQLEVQPSEEEARGYIVTDRDPLRPEEGRRLVEDVARLLQVPSSAFADVEVLGPAVTFKVSANVQNVTTEDVEKATVDNKDKLEETSGLKILQTGVGSKSKLKFLPPQAEQEDSTKFIALTLVSLACILGVLLASGLIYCLRHSSQHRLKEKLSGLGGDPGADATAAYQELCRQRMATRPPDRPEGPHTSRISSVSSQFSDGPIPSPSARSSASSWSEEPVQSNMDISTGHMILSYMEDHLKNKNRLEKEWEALCAYQAEPNSSFVAQREENVPKNRSLAVLTYDHSRVLLKAENSHSHSDYINASPIMDHDPRNPAYIATQGPLPATVADFWQMVWESGCVVIVMLTPLAENGVRQCYHYWPDEGSNLYHIYEVNLVSEHIWCEDFLVRSFYLKNLQTNETRTVTQFHFLSWYDRGVPSSSRSLLDFRRKVNKCYRGRSCPIIVHCSDGAGRSGTYVLIDMVLNKMAKGAKEIDIAATLEHLRDQRPGMVQTKEQFEFALTAVAEEVNAILKALPQ

SEQ ID NO: 817993 - protein, 1042 aa, Homo sapiens
GVAAGAREARREEPAARASLGPDSAASRRLPRGHGLSAAGQAAGMGPPLPLLLLLLLLLPPRVLPAAPSSVPRGRQLPGRLDGVFGRCQKVPAMDFYRYEVSPVALQRLRVALQKLSGTGFTWQDDYTQYVMDQELADLPKTYLRRPEASSPARPSKHSVGSERRYSREGGAALANALRRHLPFLEALSQAPASDVLARTHTAQDRPPAEGDDRFSESILTYVAHTSALTYPPGPRTQLREDLLPRTLGQLQPDELSPKVDSGVDRHHLMAALSAYAAQRPPAPPGEGSLEPQYLLRAPSRMPRPLLAPAAPQKWPSPLGDSEDPSSTGDGARIHTLLKDLQRQPAEVRGLSGLELDGMAELMAGLMQGVDHGVARGSPGRAALGESGEQADGPKATLRGDSFPDDGVQDDDDRLYQEVHRLSATLGGLLQDHGSRLLPGALPFARPLDMERKKSEHPESSLSSEEETAGVENVKSQTYSKDLLGQQPHSEPGAAAFGELQNQMPGPSKEEQSLPAGAQEALSDGLQLEVQPSEEEARGYIVTDRDPLRPEEGRRLVEDVARLLQVPSSAFADVEVLGPAVTFKVSANVQNVTTEDVEKATVDNKDKLEETSGLKILQTGVGSKSKLKFLPPQAEQEDSTKFIALTLVSLACILGVLLASGLIYCLRHSSQHRLKEKLSGLGGDPGADATAAYQELCRQRMATRPPDRPEGPHTSRISSVSSQFSDGPIPSPSARSSASSWSEEPVQSNMDISTGHMILSYMEDHLKNKNRLEKEWEALCAYQAEPNSSFVAQREENVPKNRSLAVLTYDHSRVLLKAENSHSHSDYINASPIMDHDPRNPAYIATQGPLPATVADFWQMVWESGCVVIVMLTPLAENGVRQCYHYWPDEGSNLYHIYEVNLVSEHIWCEDFLVRSFYLKNLQTNETRTVTQFHFLSWYDRGVPSSSRSLLDFRRKVNKCYRGRSCPIIVHCSDGAGRSGTYVLIDMVLNKMAKGAKEIDIAATLEHLRDQRPGMVQTKEQFEFALTAVAEEVNAILKALPQ

SEQ ID NO: 817994 - protein, 1030 aa, Homo sapiens
GVAAGAREARREEPAARASLGPDSAASRRLPRGHGLSAAGQAAGMGPPLPLLLLLLLLLPPRVLPAAPSSVPRGRQLPGRLGCLLEEGLCGASEACVNDGVFGRCQKVPAMDFYRYEVSPVALQRLRVALQKLSGTGFTWQDDYTQYVMDQELADLPKTYLRRPEASSPARPSKHSVGSERRYSREGGAALANALRRHLPFLEALSQAPASDVLARTHTAQDRPPAEGDDRFSESILTYVAHTSALTYPPGPRTQLREDLLPRTLGQLQPDELSPKVDSGVDRHHLMAALSAYAAQRPPAPPGEGSLEPQYLLRAPSRMPRPLLAPAAPQKWPSPLGDSEDPSSTGDGARIHTLLKDLQRQPAEVRGLSGLELDGMAELMAGLMQGVDHGVARGSPGRAALGESGEQADGPKATLRGDSFPDDGVQDDDDRLYQEVHRLSATLGGLLQDHGSRLLPGALPFARPLDMERKKSEHPESSLSSEEETAGVENVKSQTYSKDLLGQQPHSEPGAAAFGELQNQMPGPSKEEQSLPAGAQEALSDGLQLEVQPSEEEARGYIVTDREVLGPAVTFKVSANVQNVTTEDVEKATVDNKDKLEETSGLKILQTGVGSKSKLKFLPPQAEQEDSTKFIALTLVSLACILGVLLASGLIYCLRHSSQHRLKEKLSGLGGDPGADATAAYQELCRQRMATRPPDRPEGPHTSRISSVSSQFSDGPIPSPSARSSASSWSEEPVQSNMDISTGHMILSYMEDHLKNKNRLEKEWEALCAYQAEPNSSFVAQREENVPKNRSLAVLTYDHSRVLLKAENSHSHSDYINASPIMDHDPRNPAYIATQGPLPATVADFWQMVWESGCVVIVMLTPLAENGVRQCYHYWPDEGSNLYHIYEVNLVSEHIWCEDFLVRSFYLKNLQTNETRTVTQFHFLSWYDRGVPSSSRSLLDFRRKVNKCYRGRSCPIIVHCSDGAGRSGTYVLIDMVLNKMAKGAKEIDIAATLEHLRDQRPGMVQTKEQFEFALTAVAEEVNAILKALPQ

SEQ ID NO: 817995 - protein, 1021 aa, Homo sapiens
GVAAGAREARREEPAARASLGPDSAASRRLPRGHGLSAAGQAAGMGPPLPLLLLLLLLLPPRVLPAAPSSVPRGRQLPGRLGCLLEEGLCGASEACVNGFTWQDDYTQYVMDQELADLPKTYLRRPEASSPARPSKHSVGSERRYSREGGAALANALRRHLPFLEALSQAPASDVLARTHTAQDRPPAEGDDRFSESILTYVAHTSALTYPPGPRTQLREDLLPRTLGQLQPDELSPKVDSGVDRHHLMAALSAYAAQRPPAPPGEGSLEPQYLLRAPSRMPRPLLAPAAPQKWPSPLGDSEDPSSTGDGARIHTLLKDLQRQPAEVRGLSGLELDGMAELMAGLMQGVDHGVARGSPGRAALGESGEQADGPKATLRGDSFPDDGVQDDDDRLYQEVHRLSATLGGLLQDHGSRLLPGALPFARPLDMERKKSEHPESSLSSEEETAGVENVKSQTYSKDLLGQQPHSEPGAAAFGELQNQMPGPSKEEQSLPAGAQEALSDGLQLEVQPSEEEARGYIVTDRDPLRPEEGRRLVEDVARLLQVPSSAFADVEVLGPAVTFKVSANVQNVTTEDVEKATVDNKDKLEETSGLKILQTGVGSKSKLKFLPPQAEQEDSTKFIALTLVSLACILGVLLASGLIYCLRHSSQHRLKEKLSGLGGDPGADATAAYQELCRQRMATRPPDRPEGPHTSRISSVSSQFSDGPIPSPSARSSASSWSEEPVQSNMDISTGHMILSYMEDHLKNKNRLEKEWEALCAYQAEPNSSFVAQREENVPKNRSLAVLTYDHSRVLLKAENSHSHSDYINASPIMDHDPRNPAYIATQGPLPATVADFWQMVWESGCVVIVMLTPLAENGVRQCYHYWPDEGSNLYHIYEVNLVSEHIWCEDFLVRSFYLKNLQTNETRTVTQFHFLSWYDRGVPSSSRSLLDFRRKVNKCYRGRSCPIIVHCSDGAGRSGTYVLIDMVLNKMAKGAKEIDIAATLEHLRDQRPGMVQTKEQFEFALTAVAEEVNAILKALPQ

SEQ ID NO: 817996 - protein, 680 aa, Homo sapiens
MAGLMQGVDHGVARGSPGRAALGESGEQADGPKATLRGDSFPDDGVQDDDDRLYQEVHRLSATLGGLLQDHGSRLLPGALPFARPLDMERKKSEHPESSLSSEEETAGVENVKSQTYSKDLLGQQPHSEPGAAAFGELQNQMPGPSKEEQSLPAGAQEALSDGLQLEVQPSEEEARGYIVTDRDPLRPEEGRRLVEDVARLLQVPSSAFADVEVLGPAVTFKVSANVQNVTTEDVEKATVDNKDKLEETSGLKILQTGVGSKSKLKFLPPQAEQEDSTKFIALTLVSLACILGVLLASGLIYCLRHSSQHRLKEKLSGLGGDPGADATAAYQELCRQRMATRPPDRPEGPHTSRISSVSSQFSDGPIPSPSARSSASSWSEEPVQSNMDISTGHMILSYMEDHLKNKNRLEKEWEALCAYQAEPNSSFVAQREENVPKNRSLAVLTYDHSRVLLKAENSHSHSDYINASPIMDHDPRNPAYIATQGPLPATVADFWQMVWESGCVVIVMLTPLAENGVRQCYHYWPDEGSNLYHIYEVNLVSEHIWCEDFLVRSFYLKNLQTNETRTVTQFHFLSWYDRGVPSSSRSLLDFRRKVNKCYRGRSCPIIVHCSDGAGRSGTYVLIDMVLNKMAKGAKEIDIAATLEHLRDQRPGMVQTKEQFEFALTAVAEEVNAILKALPQ

SEQ ID NO: 817997 - protein, 649 aa, Homo sapiens
GTPESPLLNTGRLGCSDDDDRLYQEVHRLSATLGGLLQDHGSRLLPGALPFARPLDMERKKSEHPESSLSSEEETAGVENVKSQTYSKDLLGQQPHSEPGAAAFGELQNQMPGPSKEEQSLPAGAQEALSDGLQLEVQPSEEEARGYIVTDRDPLRPEEGRRLVEDVARLLQVPSSAFADVEVLGPAVTFKVSANVQNVTTEDVEKATVDNKDKLEETSGLKILQTGVGSKSKLKFLPPQAEQEDSTKFIALTLVSLACILGVLLASGLIYCLRHSSQHRLKEKLSGLGGDPGADATAAYQELCRQRMATRPPDRPEGPHTSRISSVSSQFSDGPIPSPSARSSASSWSEEPVQSNMDISTGHMILSYMEDHLKNKNRLEKEWEALCAYQAEPNSSFVAQREENVPKNRSLAVLTYDHSRVLLKAENSHSHSDYINASPIMDHDPRNPAYIATQGPLPATVADFWQMVWESGCVVIVMLTPLAENGVRQCYHYWPDEGSNLYHIYEVNLVSEHIWCEDFLVRSFYLKNLQTNETRTVTQFHFLSWYDRGVPSSSRSLLDFRRKVNKCYRGRSCPIIVHCSDGAGRSGTYVLIDMVLNKMAKGAKEIDIAATLEHLRDQRPGMVQTKEQFEFALTAVAEEVNAILKALPQ

SEQ ID NO: 817998 - protein, 485 aa, Homo sapiens
VRIAAPRSARGERPRVPAHCGGAAGRRPGVPSGPLRSETRGLRDKRQFRLPRVQVCSSTAAGLGRRFWHVPGRPVSGEGPCVWETEAAGSAGEPGKERGGLLPREEAQAGLALRLSEEPALPASEDAPRTLLSWAWGDTFCLIEAPRFAEVSGRSRGRRNTLRLRDVGPARTRLRPCLPAAVSARTIGRDRNCWFCVCEKSSTGNKSPAELTAETKDKRSRLAPSLLSPENGLVSALDLFADRFRSWRNHRDDHSRVLLKAENSHSHSDYINASPIMDHDPRNPAYIATQGPLPATVADFWQMVWESGCVVIVMLTPLAENGVRQCYHYWPDEGSNLYHIYEVNLVSEHIWCEDFLVRSFYLKNLQTNETRTVTQFHFLSWYDRGVPSSSRSLLDFRRKVNKCYRGRSCPIIVHCSDGAGRSGTYVLIDMVLNKMAKGAKEIDIAATLEHLRDQRPGMVQTKEQFEFALTAVAEEVNAILKALPQ

SEQ ID NO: 817999 - protein, 1006 aa, Homo sapiens
GVAAGAREARREEPAARASLGPDSAASRRLPRGHGLSAAGQAAGMGPPLPLLLLLLLLLPPRVLPAAPSSVPRGRQLPGRLGCLLEEGLCGASEACVNGFTWQDDYTQYVMDQELADLPKTYLRRPEASSPARPSKHSVGSERRYSREGGAALANALRRHLPFLEALSQAPASDVLARTHTAQDRPPAEGDDRFSESILTYVAHTSALTYPPGPRTQLREDLLPRTLGQLQPDELSPKVDSGVDRHHLMAALSAYAAQRPPAPPGEGSLEPQYLLRAPSRMPRPLLAPAAPQKWPSPLGDSEDPSSTGDGARIHTLLKDLQRQPAEVRGLSGLELDGMAELMAGLMQGVDHGVARGSPGRAALGESGEQADGPKATLRGDSFPDDGVQDDDDRLYQEVHRLSATLGGLLQDHGSRLLPGALPFARPLDMERKKSEHPESSLSSEEETAGVENVKSQTYSKDLLGQQPHSEPGAAAFGELQNQMPGPSKEEQSLPAGAQEALSDGLQLEVQPSEEEARGYIVTDRDPLRPEEGRRLVEDVARLLQVPSSAFADVEVLGPAVTFKVSANVQNVTTEDVEKATVDNKDKLEETSGLKILQTGVGSKSKLKFLPPQAEQEDSTKFIALTLVSLACILGVLLASGLIYCLRHSSQHRLKEKLSGLGGDPGADATAAYQELCRQRMATRPPDRPEGPHTSRISSVSSQFSDGPIPSPSARSSASSWSEEPVQSNMDISTGHMILSYMEDHLKNKNRLEKEWEALCAYQAEPNSSFVAQREENVPKNRSLAVLTYDHSRVLLKAENSHSHSDYINASPIMDHDPRNPAYIATQGPLPATVADFWQMVWESGCVVIVMLTPLAENGVRQCYHYWPDEGSNLYHIYEVNLVSEHIWCEDFLVRSFYLKNLQTNETRTVTQFHFLSWYDRGVPSSSRSLLDFRRKVNKCYRGRSCPIIVHCSDGAGRSGTYVLIDMVLNKMAKGAKEIDIAATLEHLGERHPQGPSPGADTCAPHE

SEQ ID NO: 818000 - protein, 89 aa, Homo sapiens; identical to SEQ ID NO: 817988

SEQ ID NO: 818001 - protein, 151 aa, Homo sapiens
NSDTVKRFSSFCSGKIYHIFGQRGGNKQEGVTSEHSSSSHKLQAAQRLEAPRGLPSPLTWILPARVLPPPLTSAILSSRRPPDGAGRSGTYVLIDMVLNKMAKGAKEIDIAATLEHLRDQRPGMVQTKEQFEFALTAVAEEVNAILKALPQ

SEQ ID NO: 818002 - protein, 1030 aa, Homo sapiens; identical to SEQ ID NO: 817994

SEQ ID NO: 818003 - protein, 993 aa, Homo sapiens
GVAAGAREARREEPAARASLGPDSAASRRLPRGHGLSAAGQAAGMGPPLPLLLLLLLLLPPRVLPAAPSSVPRGRQLPGRLGCLLEEGLCGASEACVNGFTWQDDYTQYVMDQELADLPKTYLRRPEASSPARPSKHSVGSERRYSREGGAALANALRRHLPFLEALSQAPASDVLARTHTAQDRPPAEGDDRFSESILTYVAHTSALTYPPGPRTQLREDLLPRTLGQLQPDELSPKVDSGVDRHHLMAALSAYAAQRPPAPPGEGSLEPQYLLRAPSRMPRPLLAPAAPQKWPSPLGDSEDPSSTGDGARIHTLLKDLQRQPAEVRGLSGLELDGMAELMAGLMQGVDHGVARGSPGRAALGESGEQADGPKATLRGDSFPDDGVQDDDDRLYQEVHRLSATLGGLLQDHGSRLLPGALPFARPLDMERKKSEHPESSLSSEEETAGVENVKSQTYSKDLLGQQPHSEPGAAAFGELQNQMPGPSKEEQSLPAGAQEALSDGLQLEVQPSEEEARGYIVTDRDPLRPEEGRRLVEDVARLLQVPSSAFADVEVLGPAVTFKVSANVQNVTTEDVEKATVDNKDKLEETSGLKILQTGVGSKSKLKFLPPQAEQEDSTKFIALTLVSLACILGVLLASGLIYCLRHSSQHRLKEKLSGLGGDPGADATAAYQELCRQRMATRPPDRPEGPHTSRISSVSSQFSDGPIPSPSARSSASSWSEEPVQSNMDISTGHMILSYMEDHLKNKNRLEKEWEALCAYQAEPNSSFVAQREENVPKNRSLAVLTYDHSRVLLKAENSHSHSDYINASPIMDHDPRNPAYIATQGPLPATVADFWQMVWESGCVVIVMLTPLAENGVRQCYHYWPDEGSNLYHIYEVNLVSEHIWCEDFLVRSFYLKNLQTNETRTVTQFHFLSWYDRGVPSSSRSLLDFRRKVNKCYRGRSCPIIVHCSDGAGRSGTYVLIDMVLNKMAKGAKEIDIAATLEHLSSLSSR

SEQ ID NO: 818004 - protein, 1030 aa, Homo sapiens; identical to SEQ ID NO: 817994

SEQ ID NO: 818005 - protein, 1059 aa, Homo sapiens; identical to SEQ ID NO: 817992

SEQ ID NO: 818006 - protein, 854 aa, Homo sapiens
GVAAGAREARREEPAARASLGPDSAASRRLPRGHGLSAAGQAAGMGPPLPLLLLLLLLLPPRVLPAAPSSVPRGRQLPGRLGCLLEEGLCGASEACVNGFTWQDDYTQYVMDQELADLPKTYLRRPEASSPARPSKHSVGSERRYSREGGAALANALRRHLPFLEALSQAPASDVLARTHTAQDRPPAEGDDRFSESILTYVAHTSALTYPPGPRTQLREDLLPRTLGQLQPDELSPKVDSGVDRHHLMAALSAYAAQRPPAPPGEGSLEPQYLLRAPSRMPRPLLAPAAPQKWPSPLGDSEDPSSTGDGARIHTLLKDLQRQPAEVRGLSGLELDGMAELMAGLMQGVDHGVARGSPGRAALGESGEQADGPKATLRGDSFPDDGVQDDDDRLYQEVHRLSATLGGLLQDHGSRLLPGALPFARPLDMERKKSEHPESSLSSEEETAGVENVKSQTYSKDLLGQQPHSEPGAAAFGELQNQMPGPSKEEQSLPAGAQEALSDGLQLEVQPSEEEARGYIVTDRDPLRPEEGRRLVEDVARLLQVPSSAFADVEVLGPAVTFKVSANVQNVTTEDVEKATVDNKDKLEETSGLKILQTGVGSKSKLKFLPPQAEQEDSTKFIALTLVSLACILGVLLASGLIYCLRHSSQHRLKEKLSGLGGDPGADATAAYQELCRQRMATRPPDRPEGPHTSRISSVSSQFSDGPIPSPSARSSASSWSEEPVQSNMDISTGHMILSYMEDHLKNKNRLEKEWEALCAYQAEPNSSFVAQREENVPKNRSLAVLTYDHSRVLLKAENSHSHSDYINASPIMDHDPRNPAYIATQGPLPATVADFWQVNIFKLKSLFLKRRSQ

SEQ ID NO: 818007 - protein, 155 aa, Homo sapiens
FVLAKFTTSLAKEGGTSKRESHLSTAAHPTSYKLLRGSKPPGASLLPSLGFSQPASFLPLSHPPSFPLAGPRKQEGNELSLALLWVGLPCGRQHFHFSPSVGSDGAGRSGTYVLIDMVLNKMAKGETQTLPLCCGSELGWRRYGNVGCRVHGRPW

SEQ ID NO: 818008 - protein, 107 aa, Homo sapiens
MATRPPDRPEGPHTSRISSVSSQFSDGPIPSPSARSSASSWSEEPVQSNMDISTGHMILVSPVFALPATQTPGPSFLGPCNTQHLRPLTLGDWAMMAAPCPLQRLTG

SEQ ID NO: 818009 - protein, 574 aa, Homo sapiens
MALARGSRQLGALVWGACLCVLVHGQQAQPGQGSDPARWRQLIQWENNGQVYSLLNSGSEYVPAGPQRSESSSRVLLAGAPQAQQRRSHGSPRRRQAPSLPLPGRVGSDTVRGQARHPFGFGQVPDNWREVAVGDSTGMARARTSVSQQRHGGSASSVSASAFASTYRQQPSYPQQFPYPQAPFVSQYENYDPASRTYDQGFVYYRPAGGGVGAGAAAVASAGVIYPYQPRARYEEYGGGEELPEYPPQGFYPAPERPYVPPPPPPPDGLDRRYSHSLYSEGTPGFEQAYPDPGPEAAQAHGGDPRLGWYPPYANPPPEAYGPPRALEPPYLPVRSSDTPPPGGERNGAQQGRLSVGSVYRPNQNGRGLPDLVPDPNYVQASTYVQRAHLYSLRCAAEEKCLASTAYAPEATDYDVRVLLRFPQRVKNQGTADFLPNRPRHTWEWHSCHQHYHSMDEFSHYDLLDAATGKKVAEGHKASFCLEDSTCDFGNLKRYACTSHTQGLSPGCYDTYNADIDCQWIDITDVQPGNYILKVHVNPKYIVLESDFTNNVVRCNIHYTGRYVSATNCKIVQS

SEQ ID NO: 818010 - protein, 396 aa, Homo sapiens
MALARGSRQLGALVWGACLCVLVHGQQAQPGQGSDPARWRQLIQWENNGQVYSLLNSGSEYVPAGPQRSESSSRVLLAGAPQAQQRRSHGSPRRRQAPSLPLPGRVGSDTVRGQARHPFGFGQVPDNWREVAVGDSTGMARARTSVSQQRHGGSASSVSASAFASTYRQQPSYPQQFPYPQAPFVSQYENYDPASRTYDQGFVYYRPAGGGVGAGAAAVASAGVIYPYQPRARYEEYGGGEELPEYPPQGFYPAPERPYVPPPPPPPDGLDRRYSHSLYSEGTPGFEQAYPDPGPEAAQAHGGDPRLGWYPPYANPPPEAYGPPRALEPPYLPVRSSDTPPPGGERNGAQQGRLSVGSVYRPNQNGRVTPAQTPACPGRKVEGQEQDGQAPGSGTS

SEQ ID NO: 818011 - protein, 223 aa, Homo sapiens
FFCCFDLKTTHFIISSFCGSGIQVWFSQVFWLKVSYKGKSKGSAKALVSSEGSTGEGFASKFPHMAAGSMWFLTSCWTVGLSSWLAVGQPPPSVLCHMGFPYRWLTTQQLPIPTSGLTFPPLSETGNLTAGPGSRSSPEGDKVLTGEGPTAPEQRGYLAEWGTKSSPPLHPGRQELLPVRSSDTPPPGGERNGAQQGRLSVGSVYRPNQNGRGEYGPGAPPAA

SEQ ID NO: 818012 - protein, 276 aa, Homo sapiens
MGNPVSPLRNREGILRSGGQSLDLLFIQAEQELLPVRSSDTPPPGGERNGAQQGRLSVGSVYRPNQNGRGLPDLVPDPNYVQASTYVQRAHLYSLRCAAEEKCLASTAYAPEATDYDVRVLLRFPQRVKNQGTADFLPNRPRHTWEWHSCHQHYHSMDEFSHYDLLDAATGKKVAEGHKASFCLEDSTCDFGNLKRYACTSHTQGLSPGCYDTYNADIDCQWIDITDVQPGNYILKVHVNPKYIVLESDFTNNVVRCNIHYTGRYVSATNCKIVQS

SEQ ID NO: 818013 - protein, 609 aa, Homo sapiens
MALARGSRQLGALVWGACLCVLVHGQQAQPGQGSDPARWRQLIQWENNGQVYSLLNSGSEYVPAGPQRSESSSRVLLAGAPQAQQRRSHGSPRRRQAPSLPLPGRVGSDTVRGQARHPFGFGQVPDNWREVAVGDSTGMARARTSVSQQRHGGSASSVSASAFASTYRQQPSYPQQFPYPQAPFVSQYENYDPASRTYDQGFVYYRPAGGGVGAGAAAVASAGVIYPYQPRARYEEYGGGEELPEYPPQGFYPAPERPYVPPPPPPPDGLDRRYSHSLYSEGTPGFEQAYPDPGPEAAQAHGGDPRLGWYPPYANPPPEAYGPPRALEPPYLPVRSSDTPPPGGERNGAQQGRLSVGSVYRPNQNGRGLPDLVPDPNYVQASTYVQRAHLYSLRCAAEEKCLASTAYAPEATDYDVRVLLRFPQRVKNQGTADFLPNRPRHTWEWHSCHQHYHSMDEFSHYDLLDAATGKKVAEGHKASFCLEDSTCDFGNLKRYACTSHTQGLSPGCYDTYNADIDCQWIDITDVQPGNYILKVHVNPKYIVLESDFTNNVVRCNIHYTGRYVSATNCKIVQQAAGPACTGSWTERSQKGHGTDACGFPSCFWRKKEA

SEQ ID NO: 818014 - protein, 574 aa, Homo sapiens; identical to SEQ ID NO: 818009

SEQ ID NO: 818015 - protein, 425 aa, Homo sapiens
MALARGSRQLGALVWGACLCVLVHGQQAQPGQGSDPARWRQLIQWENNGQVYSLLNSGSEYVPAGPQRSESSSRVLLAGAPQAQQRRSHGSPRRRQAPSLPLPGRVGSDTVRGQARHPFGFGQVPDNWREVAVGDSTGMARARTSVSQQRHGGSASSVSASAFASTYRQQPSYPQQFPYPQAPFVSQYENYDPASRTYDQGFVYYRPAGGGVGAGAAAVASAGVIYPYQPRARYEEYGGGEELPEYPPQGFYPAPERPYVPPPPPPPDGLDRRYSHSLYSEGTPGFEQAYPDPGPEAAQAHGGDPRLGWYPPYANPPPEATGRRARWSRPTCRCAAPTRPRRVGSGTARSRAASAWAACTGPTRTAAVSLTWSQTPTMCKHPLMCREPTCTPCAVLRRRSVWPAQPMPLRPPTTMCGCYCASPSA

SEQ ID NO: 818016 - protein, 110 aa, Homo sapiens
QGQGRNPGEGGPETPEGGRGVALGNKQHHSRFLLSLSQGLSPGCYDTYNADIDCQWIDITDVQPGNYILKVHVNPKYIVLESDFTNNVVRCNIHYTGRYVSATNCKIVQS

SEQ ID NO: 818017 - protein, 146 aa, Homo sapiens
KIVHSIVSSFAVGIFGVFLILLDVALIFADLIFTDSKVYIPLEYHSISLAIALFFLMDVLLRVFVEGRQHYFSDLLNILDTAVTVIILLVDVVYIFFDVKFLKDIPRWTRLFRLLRLIILIRVFHLAHLKRQLGKLIRRLVSGNKR

SEQ ID NO: 818018 - protein, 132 aa, Homo sapiens
RPETEESAGDVFGMGTHCYSCAPGWLCVSAVLVESRCFYLLAPFPATLCPVEARRHQRLQFCYSLLGMERSGTAVQRSWPRRSSGIPVPRAVHSVILRLPGVEGITCWVLESIALHLRKEKSQKDKMTCPRS

SEQ ID NO: 818019 - protein, 97 aa, Homo sapiens
RPETEESAGDVFGMGTHCYSCAPGWLCVSAVLVESRCFYLLAPFPATLCPVEARRHQRLQFCYSLLGMERSGQKIISKDILALTALSVARKLSSVNC

SEQ ID NO: 818020 - protein, 88 aa, Homo sapiens
PPALLLPCSLISDCCASNQRDSVGVGPSKPGERAYDPKHFHNRVSRIMIDDHNVPTLREMVAFSKEVLEWMAQDSENIVVIHCKGGKE

SEQ ID NO: 818021 - protein, 97 aa, Homo sapiens; identical to SEQ ID NO: 818019

SEQ ID NO: 818022 - protein, 97 aa, Homo sapiens; identical to SEQ ID NO: 818019

SEQ ID NO: 818023 - protein, 593 aa, Homo sapiens
VSTPTESGVPSAEEVFGSSQPERISPESGLAKAMLTIAITATPSLTVDEKEELLTSTNFQPIVEEITETTKGFLKYMDNQSFATESQEGVGLGHSPSSYVNTKEMLTTNPKTEKFEADTDHRTTSFPGAESTAGSEPGSLTPDKEKPSQMTADNTQAAATKQPLETSEYTLSVEPETDSLLGAPEVTVSVSTAVPAASALSDEWDDTKLESVSRIRTPKLGDNEETQVRTEMSQTAQVSHEGMEGGQPWTEAAQVALGLPEGETHTGTALLIAHGNERSPAFTDQSSFTPTSLMEDMKVSIVNLLQSTGDFTESTKENDALFFLETTVSVSVYESEADQLLGNTMKDIITQEMTTAVQEPDATLSMVTQEQVATLELIRDSGKTEEEKEDPSPVSDVPGVTQLSRRWEPLATTISTTVVPLSFEVTPTVEEQMDTVTGPNEEFTPVLGSPVTPPGIMVGEPSISPALPALEASSERRTVVPSITRVNTAASYGLDQLESEEGQEDEDEEDEEDEDEEEEDEEEDEEDKDADSLDEGLDGDTELPGFTLPGITSQEPGLEEGNMDLLEGATYQVPDALEWEQQNQGLGKSHVYF

SEQ ID NO: 818024 - protein, 664 aa, Homo sapiens
VSTPTESGVPSAEEVFGSSQPERISPESGLAKAMLTIAITATPSLTVDEKEELLTSTNFQPIVEEITETTKGFLKYMDNQSFATESQEGVGLGHSPSSYVNTKEMLTTNPKTEKFEADTDHRTTSFPGAESTAGSEPGSLTPDKEKPSQMTADNTQAAATKQPLETSEYTLSVEPETDSLLGAPEVTVSVSTAVPAASALSDEWDDTKLESVSRIRTPKLGDNEETQVRTEMSQTAQVSHEGMEGGQPWTEAAQVALGLPEGETHTGTALLIAHGNERSPAFTDQSSFTPTSLMEDMKVSIVNLLQSTGDFTESTKENDALFFLETTVSVSVYESEADQLLGNTMKDIITQEMTTAVQEPDATLSMVTQEQVATLELIRDSGKTEEEKEDPSPVSDVPGVTQLSRRWEPLATTISTTVVPLSFEVTPTVEEQMDTVTGPNEEFTPVLGSPVTPPGIMVGEPSISPALPALEASSERRTVVPSITRVNTAASYGLDQLESEEGQEDEDEEDEEDEDEEEEDEEEDEEDKDADSLDEGLDGDTELPGFTLPGITSQEPGLEEGNMDLLEGATYQVPDALEWEQQNQGLVRSWMEKLKDKAGYMSGMLVPVGVGIAGALFILGALYSIKVMNRRRRNGFKRHKRKQREFNSMQDRVMLLADSSEDEF

SEQ ID NO: 818025 - protein, 513 aa, Homo sapiens
VSTPTESGVPSAEEVFGSSQPERISPESGLAKAMLTIAITATPSLTVDEKEELLTSTNFQPIVEEITETTKGFLKYMDNQSFATESQEGVGLGHSPSSYVNTKEMLTTNPKTEKFEADTDHRTTSFPGAESTAGSEPGSLTPDKEKPSQMTADNTQAAATKQPLETSEYTLSVEPETDSLLGAPEVTVSVSTAVPAASALSDEWDDTKLESVSRIRTPKLGDNEETQVRTEMSQTAQVSHEGMEGGQPWTEAAQVALGLPEGETHTGTALLIAHGNERSPAFTDQSSFTPTSLMEDMKVSIVNLLQSTGDFTESTKENDALFFLETTVSVSVYESEADQLLGNTMKDIITQEMTTAVQEPDATLSMVTQEQVATLELIRDSGKTEEEKEDPSPVSDVPGVTQLSRRWEPLATTISTTVVPLSFEVTPTVEEQMDTVTGPNEEFTPVLGSPVTPPGIMVGEPSISPALPALEASSERRTVVPSITRVNTAASYGLDQLESEGIHALKGIFSRTG

SEQ ID NO: 818026 - protein, 112 aa, Homo sapiens
MAAALARLGLRPVKQVRVQFCPFEKNVESTRTFLQTVSSEKVRSTNLNCSVIADVRHDGSEPCVDVLFGDGHRLIMRGAHLTALEMLTAFASHIRARDAAGSGDKPGADTGR

SEQ ID NO: 818027 - protein, 112 aa, Homo sapiens; identical to SEQ ID NO: 818026

SEQ ID NO: 818028 - protein, 112 aa, Homo sapiens; identical to SEQ ID NO: 818026

SEQ ID NO: 818029 - protein, 523 aa, Homo sapiens
QDIRLDFQTHCPGEERSGPRTPACPGLASCTCCPLTPGKMAGPWTFTLLCGLLAATLIQATLSPTAVLILGPKVIKEKLTQELKDHNATSILQQLPLLSAMREKPAGGIPVLGSLVNTVLKHIIWLKVITANILQLQVKPSANDQELLVKIPLDMVAGFNTPLVKTIVEFHMTTEAQATIRMDTSASGPTRLVLSDCATSHGSLRIQLLHKLSFLVNALAKQVMNLLVPSLPNLVKNQLCPVIEASFNGMYADLLQLVKVPISLSIDRLEFDLLYPAIKGDTIQLYLGAKLLDSQGKVTKWFNNSAASLTMPTLDNIPFSLIVSQDVVKAAVAAVLSPEEFMVLLDSVLPESAHRLKSSIGLINEKAADKLGSTQIVKILTQDTPEFFIDQGHAKVAQLIVLEVFPSSEALRPLFTLGIEASSEAQFYTKGDQLILNLNNISSDRIQLMNSGIGWFQPDVLKNIITEIIHSILLPNQNGKLRSGVPVSLVKALGFEAAESSLTKDALVLTPASLWKPTSPVSQ

SEQ ID NO: 818030 - protein, 218 aa, Homo sapiens
  misc_feature (210)..(210): Xaa can be any naturally occurring amino acid
QDIRLDFQTHCPGEERSGPRTPACPGLASCTCCPLTPGKMAGPWTFTLLCGLLAATLIQATLSPTAVLILGPKVIKEKLTQELKDHNATSILQQLPLLSAMREKPAGGIPVLGSLVNTVLKHIIWLKVITANILQLQVKPSANDQELLVKIPLDMVAGFNTPLVKTIVEFHMTTEAQATIRMDTSASGPTRLVLSDCATSHGTWHQCDKXLLGRLLQV

SEQ ID NO: 818031 - protein, 523 aa, Homo sapiens; identical to SEQ ID NO: 818029

SEQ ID NO: 818032 - protein, 516 aa, Homo sapiens
QDIRLDFQTHCPGEERSGPRTPACPGLASCTCCPLTPGKMAGPWTFTLLCGLLAATLIQATLSPTAVLILGPKVIKEKLTQELKDHNATSILQQLPLLSAMREKPAGGIPVLGSLVNTVLKHIIWLKVITANILQLQVKPSANDQELLVKIPLDMVAGFNTPLVKTIVEFHMTTEAQATIRMDTSASGPTRLVLSDCATSHGSLRIQLLHKLSFLVNALAKQVMNLLVPSLPNLVKNQLCPVIEASFNGMYADLLQLVKVPISLSIDRLEFDLLYPAIKGDTIQLYLGAKLLDSQGKVTKWFNNSAASLTMPTLDNIPFSLIVSQDVVKAAVAAVLSPEEFMVLLDSVLPESAHRLKSSIGLINEKAADKLGSTQIVKILTQDTPEFFIDQGHAKVAQLIVLEVFPSSEALRPLFTLGIEASSEAQFYTKGDQLILNLNNISSDRIQLMNSGIGWFQPDVLKNIITEIIHSILLPNQNGKLRSGVPVSLVKALGFEAAESSLTKASHASECLRPPK

SEQ ID NO: 818033 - protein, 476 aa, Homo sapiens
QDIRLDFQTHCPGEERSGPRTPACPGLASCTCCPLTPGKMAGPWTFTLLCGLLAATLIQATLSPTAVLILGPKVIKEKLTQELKDHNATSILQQLPLLSAMREKPAGGIPVLGSLVNTVLKHIIWLKVITANILQLQVKPSANDQELLVKIPLDMVAGFNTPLVKTIVEFHMTTEAQATIRMDTSASGPTRLVLSDCATSHGSLRIQLLHKLSFLVNALAKQVMNLLVPSLPNLVKNQLCPVIEASFNGMYADLLQLVKVPISLSIDRLEFDLLYPAIKGDTIQLYLGAKLLDSQGKVTKWFNNSAASLTMPTLDNIPFSLIVSQDVVKAAVAAVLSPEEFMVLLDSVLPESAHRLKSSIGLINEKAADKLGSTQIVKILTQDTPEFFIDQGHAKVAQLIVLEVFPSSEALRPLFTLGIEASSEAQFYTKGDQLILNLNNISSDRIQLMNSGIGWFQPDVLKASSRRLTRRLTSWA

SEQ ID NO: 818034 - protein, 213 aa, Homo sapiens
MPTLDNIPFSLIVSQDVVKAAVAAVLSPEEFMVLLDSVLPESAHRLKSSIGLINEKAADKLGSTQIVKILTQDTPEFFIDQGHAKVAQLIVLEVFPSSEALRPLFTLGIEASSEAQFYTKGDQLILNLNNISSDRIQLMNSGIGWFQPDVLKNIITEIIHSILLPNQNGKLRSGVPVSLVKALGFEAAESSLTKDALVLTPASLWKPTSPVSQ

SEQ ID NO: 818035 - protein, 484 aa, Homo sapiens [sequence omitted]

SEQ ID NO: 818036 - protein, 494 aa, Homo sapiens
QDIRLDFQTHCPGEERSGPRTPACPGLASCTCCPLTPGKMAGPWTFTLLCGLLAATLIQATLSPTAVLILGPKVIKEKLTQELKDHNATSILQQLPLLSAMREKPAGGIPVLGSLVNTVLKHIIWLKVITANILQLQVKPSANDQELLVKIPLDMVAGFNTRLVLSDCATSHGSLRIQLLHKLSFLVNALAKQVMNLLVPSLPNLVKNQLCPVIEASFNGMYADLLQLVKVPISLSIDRLEFDLLYPAIKGDTIQLYLGAKLLDSQGKVTKWFNNSAASLTMPTLDNIPFSLIVSQDVVKAAVAAVLSPEEFMVLLDSVLPESAHRLKSSIGLINEKAADKLGSTQIVKILTQDTPEFFIDQGHAKVAQLIVLEVFPSSEALRPLFTLGIEASSEAQFYTKGDQLILNLNNISSDRIQLMNSGIGWFQPDVLKNIITEIIHSILLPNQNGKLRSGVPVSLVKALGFEAAESSLTKDALVLTPASLWKPTSPVSQ

SEQ ID NO: 818037 - protein, 463 aa, Homo sapiens
MGKEKTHINIVVIGHVDSGKSTTTGHLIYKCGGIDKRTIEKFEKEAAEMGKGSFKYAWVLDKLKAERERGITIDISLWKFETTKYYITIIDAPGHRDFIKNMITGTSQADCAVLIVAAGVGEFEAGISKNGQTREHALLAYTLGVKQLIVGVNKMDSTEPAYSEKRYDEIVKEVSAYIKKIGYNPATVPFVPISGWHGDNMLEPSPNMPWFKGWKVERKEGNASGVSLLEALDTILPPTRPTDKPLRLPLQDVYKIGGIGTVPVGRVETGILRPGMVVTFAPVNITTEVKSVEMHHEALSEALPGDNVGFNVKNVSVKDIRRGNVCGDSKSDPPQEAAQFTSQVIILNHPGQISAGYSPVIDCHTAHIACKFAELKEKIDRRSGKKLEDNPKSLKSGDAAIVEMVPGKPMCVESFSQYPPLGRFAVRDMRQTVAVGVIKNVEKKSGGAGKVTKSAQKAQKAGK

SEQ ID NO: 818038 - protein, 133 aa, Homo sapiens
PLIYITGGVSEHIGRAFSADCAVLIVAAGVGEFEAGISKNGQTREHALLAYTLGVKQLIVGVNKMDSTEPAYSEKRYDEIVKEVSACFNEWNEGKRKRKEQKYEKENKTTKNARRHSTKKTSKRNKGEKRGKQ

SEQ ID NO: 818039 - protein, 644 aa, Homo sapiens
MSRQFSSRSGYRSGGGFSSGSAGIINYQRRTTSSSTRRSGGGGGRFSSCGGGGGSFGAGGGFGSRSLVNLGGSKSISISVARGGGRGSGFGGGYGGGGFGGGGFGGGGFGGGGIGGGGFGGFGSGGGGFGGGGFGGGGYGGGYGPVCPPGGIQEVTINQSLLQPLNVEIDPEIQKVKSREREQIKSLNNQFASFIDKVRFLEQQNQVLQTKWELLQQVDTSTRTHNLEPYFESFINNLRRRVDQLKSDQSRLDSELKNMQDMVEDYRNKYEDEINKRTNAENEFVTIKKDVDGAYMTKVDLQAKLDNLQQEIDFLTALYQAELSQMQTQISETNVILSMDNNRSLDLDSIIAEVKAQYEDIAQKSKAEAESLYQSKYEELQITAGRHGDSVRNSKIEISELNRVIQRLRSEIDNVKKQISNLQQSISDAEQRGENALKDAKNKLNDLEDALQQAKEDLARLLRDYQELMNTKLALDLEIATYRTLLEGEESRMSGECAPNVSVSVSTSHTTISGGGSRGGGGGGYGSGGSSYGSGGGSYGSGGGGGGGRGSYGSGGSSYGSGGGSYGSGGGGGGHGSYGSGSSSGGYRGGSGGGGGGSSGGRGSGGGSSGGSIGGRGSSSGGVKSSGGSSSVKFVSTTYSGVTR

SEQ ID NO: 818040 - protein, 637 aa, Homo sapiens
MSRQFSSRSGYRSGGGFSSGSAGIINYQRRTTSSSTRRSGGGGGRFSSCGGGGGSFGAGGGFGSRSLVNLGGSKSISISVARGGGRGSGFGGGYGGGGFGGGGFGGGGFGGGGIGGGGFGGFGSGGGGFGGGGFGGGGYGGGYGPVCPPGGIQEVTINQSLLQPLNVEIDPEIQKVKSREREQIKSLNNQFASFIDKVRFLEQQNQVLQTKWELLQQVDTSTRTHNLEPYFESFINNLRRRVDQLKSDQSRLDSELKNMQDMVEDYRNKYEDEINKRTNAENEFVTIKKDVDGAYMTKVDLQAKLDNLQQEIDFLTALYQAELSQMQTQISETNVILSMDNNRSLDLDSIIAEVKAQYEDIAQKSKAEAESLYQSKYEELQITAGRHGDSVRNSKIEISELNRVIQRLRSEIDNVKKQISNLQQSISDAEQRGENALKDAKNKLNDLEDALQQAKEDLARLLRDYQELMNTKLALDLEIATYRTLLEGEESRMSGECAPNVSVSVSTSHTTISGGGSRGGGGGGYGSGGSSYGSGGGSYGSGGGGGGGRGSYGSGGGSYGSGGGGGGHGSYGSGSSSGGYRGGSGGGGGGSSGGRGSGGGSSGGSIGGRGSSSGGVKSSGGSSSVKFVSTTYSGVTR

SEQ ID NO: 818041 - protein, 420 aa, Homo sapiens
MSRQFSSRSGYRSGGGFSSGSAGIINYQRRTTSSSTRRSGGGGGRFSSCGGGGGSFGAGGGFGSRSLVNLGGSKSISISVARGGGRGSGFGGGYGGGGFGGGGFGGGGFGGGGIGGGGFGGFGSGGGGFGGGGFGGGGYGGGYGPVCPPGGIQEVTINQSLLQPLNVEIDPEIQKVKSREREQIKSLNNQFASFIDKVRFLEQQNQVLQTKWELLQQVDTSTRTHNLEPYFESFINNLRRRVDQLKSDQSRLDSELKNMQDMVEDYRNKYARLKSQHTTDNMHADMTFGTIKTDVLMVRYMTKVGTFRATTRTNLASRDTRSEPINRHLIPKDSSRIYKNGRPPQSSRTLNEVQYQHTNRERTKRRKSTDTREHDMTIGMEGVKRGPKNTDGTTQAPRTQEHTAEETRRATRNRTAGKRI

SEQ ID NO: 818042 - protein, 155 aa, Homo sapiens
FVLLLRKNDRMSGECAPNVSVSVSTSHTTISGGGSRGGGGGGYGSGGSSYGSGGGSYGSGGGGGGGRGSYGSGGGSYGSGGGGGGHGSYGSGSSSGGYRGGSGGGGGGSSGGRGSGGGSSGGSIGGRGSSSGGVKSSGGSSSVKFVSTTYSGVTR

SEQ ID NO: 818043 - protein, 208 aa, Homo sapiens
MIRYCSLGPGDHLPGAVDILTKQASGSSFGSYPIEIPQSPGHCHWVSQDEGGGLAASILPCLLVCLGLSEEGGGPAFHLNTSLQGLRVSEGNPDSWGHFLMVLKAKQLCFCLCFQAHPFPLSSGLGMGAFLSGCERKDRNIFLWLTKTKGEVRKQEEVMVGAGVDSPGAKPIQLTRAPWGWSQLAHDAELESFFVFVFVLWLLQDIGT

SEQ ID NO: 818044 - protein, 208 aa, Homo sapiens; identical to SEQ ID NO: 818043

SEQ ID NO: 818045 - protein, 208 aa, Homo sapiens; identical to SEQ ID NO: 818043

SEQ ID NO: 818046 - protein, 190 aa, Homo sapiens
MLTKQASGSSFGSYPIEIPQSPGHCHWVSQDEGGGLAASILPCLLVAWVCLRKEGVPPSTSTHPFSDSESQKETLTPGAISYMVTVSQAALFCLCFQAHPFPLSSGLGMGAFLSGCERKDRNIFLWLTKTKGEVRKQEEVMVGAGVDSPGAKPIQLTRAPWGWSQLAHDAELESFFVFVFVLWLLQDIGT

SEQ ID NO: 818047 - protein, 208 aa, Homo sapiens; identical to SEQ ID NO: 818043

SEQ ID NO: 818048 - protein, 292 aa, Homo sapiens
MLGAWAVEGTAVALLRLLLLLLPPAIRGPGLGVAGVAGAAGAGLPESVIWAVNAGGEAHVDVHGIHFRKDPLEGRVGRASDYGMKLPILRSNPEDQILYQTERYNEETFGYEVPIKEEGDYVLVLKFAEVYFAQSQQKVFDVRLNGHVVVKDLDIFDRVGHSTAHDEIIPMSIRKGKLSVQGEVSTFTGKLYIEFVKGYYDNPKVCALYIMAGTVDDVPKLQPHPGLEKKEEEEEEEEYDEGSNLKKQTNKNRVQSGPRTPNPYASDNSSLMFPILVAFGVFIPTLFCLCRL

SEQ ID NO: 818049 - protein, 208 aa, Homo sapiens; identical to SEQ ID NO: 818043

SEQ ID NO: 818050 - protein, 292 aa, Homo sapiens; identical to SEQ ID NO: 818048

SEQ ID NO: 818051 - protein, 138 aa, Homo sapiens
MEGVPPSTSTHPFSDSESQKETLTPGAISYWYCKPSSFGFCLCFQAHPFPLSSGLGMGAFLSGCERKDRNIFLWLTKTKGEVRKQEEVMVGAGVDSPGAKPIQLTRAPWGWSQLAHDAELESFFVFVFVLWLLQDIGT

SEQ ID NO: 818052 - protein, 208 aa, Homo sapiens; identical to SEQ ID NO: 818043

SEQ ID NO: 818053 - protein, 292 aa, Homo sapiens; identical to SEQ ID NO: 818048

SEQ ID NO: 818054 - protein, 358 aa, Homo sapiens
MLGAWAVEGTAVALLRLLLLLLPPAIRGPGLGVAGVAGAAGAGLPESVIWAVNAGGEAHVDVHGIHFRKDPLEGRVGRASDYGMKLPILRSNPEDQILYQTERYNEETFGYEVPIKEEGDYVLVLKFAEVYFAQSQQKVFDVRLNGHVVVKDLDIFDRVGHSTAHDEIIPMSIRKGKLSVQGEVSTFTGKLYIEFVKGYYDNPKVCALYIMAGTVDDVPKLQPHPGLEKKEEEEEEEEYDEGSNLKKQTNKNRVQSGPRTPNPYASDNSSLMFPILVAFGVFIPTLFCLCRLAGWVCFGLSPSVAPEEGETEARQSDSTLKQNRKHPGTVQKSQKKSASLRWKDIINDQRALSSFSPN

SEQ ID NO: 818055 - protein, 113 aa, Homo sapiens
VTANCLLKHKAMDSEKHPDFVLFGGSGVGHGRGRVRWRQPRRKASSIHPYSFPGQPGSKPISYISLCRCQCMLWKGGLGFLTSQVRPIMVEEAALGSEWAAGPCLGELCGRKR

SEQ ID NO: 818056 - protein, 366 aa, Homo sapiens
MWPLWLCWALWVLPLAGPGAALTEEQLLGSLLRQLQLSEVPVLDRADMEKLVIPAHVRAQYVVLLRRSHGDRSRGKRFSQSFREVAGRFLASEASTHLLVFGMEQRLPPNSELVQAVLRLFQEPVPKAALHRHGRLSPRSAQARVTVEWLRVRDDGSNRTSLIDSRLVSVHESGWKAFDVTEAVNFWQQLSRPRQPLLLQVSVQREHLGPLASGAHKLVRFASQGAPAGLGEPQLELHTLDLRDYGAQGDCDPEAPMTEGTRCCRQEMYIDLQGMKWAKNWVLEPPGFLAYECVGTCQQPPEALAFNWPFLGPRQCIASETASLPMIVSIKEGGRTRPQVVSLPNMRVQKCSCASDGALVPRRLQP

SEQ ID NO: 818057 - protein, 366 aa, Homo sapiens; identical to SEQ ID NO: 818056

SEQ ID NO: 818058 - protein, 105 aa, Homo sapiens
MSQKMKWLLTWNLLRICMNCIKKFLQMSSSWAGTLRAMTSQSTLCWIHEYYSREAPNPIHLTVDTSLQNGRMSIKAYVSTLMGVPGRTMGSDVHASDSEIRVLRH

SEQ ID NO: 818059 - protein, 124 aa, Homo sapiens
GPVGAQEVSVGSKAQAQEQLGPREPIGARVAECRRNLGASKSQGWAFSRVSQAPSRAQATAQTPAPALPGPALPGPFPGGRVVRLHPVILASIVDSYERRLQTQVFKLGLAQVHPPRSRADPPA

SEQ ID NO: 818060 - protein, 259 aa, Homo sapiens
IPFERLKVKLLSRQDGHTGGTSKCSSGHANPSPRRRPQPQFQRQRQHRLRLRFPLRLQPHPQTLRQQRLQLRLLARPRPQRKLQRRPQRPLCLVLLFQGPSPAAAWSGCTQSFWPPLWTATRDATRVLPELSGPCWELSTNTQWRSPIAFQCRTMSQKMKWLLTWNLLRICMNCIKKFLQMSSSWAGTLRAMTSQSTLCWIHEYYSREAPNPIHLTVDTSLQNGRMSIKAYVSTLMGVPGRTMGSDVHASDSEIRVLRH

SEQ ID NO: 818061 - protein, 105 aa, Homo sapiens; identical to SEQ ID NO: 818058

SEQ ID NO: 818062 - protein, 105 aa, Homo sapiens; identical to SEQ ID NO: 818058

SEQ ID NO: 818063 - protein, 251 aa, Homo sapiens
TQNKLGSRAVLMERHGDSKSPPARQPSPGGAQFQRQRQHRLRLRFPLRLQPHPQTLRQQRLQLRLLARPRPQRKLQRRPQRPLCLVLLFQGPSPAAAWSGCTQSFWPPLWTATRDATRVLPELSGPCWELSTNTQWRSPIAFQCRTMSQKMKWLLTWNLLRICMNCIKKFLQMSSSWAGTLRAMTSQSTLCWIHEYYSREAPNPIHLTVDTSLQNGRMSIKAYVSTLMGVPGRTMGSDVHASDSEIRVLRH

SEQ ID NO: 818064 - protein, 105 aa, Homo sapiens; identical to SEQ ID NO: 818058

SEQ ID NO: 818065 - protein, 105 aa, Homo sapiens; identical to SEQ ID NO: 818058

SEQ ID NO: 818066 - protein, 105 aa, Homo sapiens; identical to SEQ ID NO: 818058

SEQ ID NO: 818067 - protein, 105 aa, Homo sapiens; identical to SEQ ID NO: 818058

SEQ ID NO: 818068 - protein, 105 aa, Homo sapiens; identical to SEQ ID NO: 818058

SEQ ID NO: 818069 - protein, 105 aa, Homo sapiens; identical to SEQ ID NO: 818058

SEQ ID NO: 818070 - protein, 105 aa, Homo sapiens; identical to SEQ ID NO: 818058

SEQ ID NO: 818071 - protein, 155 aa, Homo sapiens
NYRLGTRLVGIRPRQMATPAVPVSAPPATPTPVPGGGPSLSSSANASTGCGSGSRCGSSLILRPCGSSGCNCGSWPDPGLSASSSADPSARSAWSCSSRALPRRPRGQAAPSHFGLHCGQLRETQRGCCPSYRDPVGNCRQTLSGGHQLLFSAAQ

SEQ ID NO: 818072 - protein, 155 aa, Homo sapiens; identical to SEQ ID NO: 818071

SEQ ID NO: 818073 - protein, 155 aa, Homo sapiens; identical to SEQ ID NO: 818071

SEQ ID NO: 818074 - protein, 155 aa, Homo sapiens; identical to SEQ ID NO: 818071

SEQ ID NO: 818075 - protein, 70 aa, Homo sapiens
RAMTSQSTLCWIHEYYSREAPNPIHLTVDTSLQNGRMSIKAYVSTLMGVPGRTMGSDVHASDSEIRVLRH

SEQ ID NO: 818076 - protein, 351 aa, Homo sapiens
MSFPCKFVASFLLIFNVSSKGAVSKEITNALETWGALGQDINLDIPSFQMSDDIDDIKWEKTSDKKKIAQFRKEKETFKEKDTYKLFKNGTLKIKHLKTDDQDIYKVSIYDTKGKNVLEKIFDLKIQERVSKPKISWTCINTTLTCEVMNGTDPELNLYQDGKHLKLSQRVITHKWTTSLSAKFKCTAGNKVSKESSVEPVSCPEKGLDIYLIIGICGGGSLLMVFVALLVFYITKRKKQRSRRNDEELETRAHRVATEERGRKPHQIPASTPQNPATSQHPPPPPGHRSQAPSHRPPPPGHRVQHQPQKRPPAPSGTQVHQQKGPPLPRPRVQPKPPHGAAENSLSPSSN

SEQ ID NO: 818077 - protein, 128 aa, Homo sapiens
MVFVALLVFYITKRKKQRSRRNDEELETRAHRVATEERGRKPHQIPASTPQNPATSQHPPPPPGHRSQAPSHRPPPPGHRVQHQPQKRPPAPSGTQVHQQKGPPLPRPRVQPKPPHGAAENSLSPSSN

SEQ ID NO: 818078 - protein, 310 aa, Homo sapiens
SDLEDPVCYPQHIDDIKWEKTSDKKKIAQFRKEKETFKEKDTYKLFKNGTLKIKHLKTDDQDIYKVSIYDTKGKNVLEKIFDLKIQERVSKPKISWTCINTTLTCEVMNGTDPELNLYQDGKHLKLSQRVITHKWTTSLSAKFKCTAGNKVSKESSVEPVSCPEKGLDIYLIIGICGGGSLLMVFVALLVFYITKRKKQRSRRNDEELETRAHRVATEERGRKPHQIPASTPQNPATSQHPPPPPGHRSQAPSHRPPPPGHRVQHQPQKRPPAPSGTQVHQQKGPPLPRPRVQPKPPHGAAENSLSPSSN

SEQ ID NO: 818079 - protein, 392 aa, Homo sapiens
LSQPPGEAMNATGTPVAPESCQQLAAGGHSRLIVLHYNHSGRLAGRGGPEDGGLGALRGLSVAASCLVVLENLLVLAAITSHMRSRRWVYYCLVNITLSDLLTGAAYLANVLLSGARTFRLAPAQWFLREGLLFTALAASTFSLLFTAGERFATMVRPVAESGATKTSRVYGFIGLCWLLAALLGMLPLLGWNCLCAFDRCSSLLPLYSKRYILFCLVIFAGVLATIMGLYGAIFRLVQASGQKAPRPAARRKARRLLKTVLMILLAFLVCWGPLFGLLLADVFGSNLWAQEYLRGMDWILALAVLNSAVNPIIYSFRSREVCRAVLSFLCCGCLRLGMRGPGDCLARAVEAHSGASTTDSSLRPRDSFRGSRSLSFRMREPLSSISSVRSI

SEQ ID NO: 818080 - protein, 365 aa, Homo sapiens
MNVIYPLAVPKGRRLCCEVCEAPAERVCAACTVTYYCGVVHQKADWDSIHEKICQLLIPLRTSMPFYNSEEERQHGLQQLQQRQKYLIEFCYTIAQKYLFEGKHEDAVPAALQSLRFRVKLYGLSSVELVPAYLLLAEASLGLGRIVQAEEYLFQAQWTVLKSTDCSNATHSLLHRNLGLLYIAKKNYEEARYHLANDIYFASCAFGTEDIRTSGGYFHLANIFYDLKKLDLADTLYTKVSEIWHAYLNNHYQVLSQAHIQQMDLLGKLFENDTGLDEAQEAEAIRILTSILNIRESTSDKAPQKTIFVLKILVMLYYLMMNSSKAQEYGMRALSLAKEQQLDVHEQSTIQELLSLISTEDHPIT

SEQ ID NO: 818081 - protein, 365 aa, Homo sapiens; identical to SEQ ID NO: 818080

SEQ ID NO: 818082 - protein, 255 aa, Homo sapiens
MSALDSTAHFHALLQFRGRTAAWPAAAAAAAGLGRIVQAEEYLFQAQWTVLKSTDCSNATHSLLHRNLGLLYIAKKNYEEARYHLANDIYFASCAFGTEDIRTSGGYFHLANIFYDLKKLDLADTLYTKVSEIWHAYLNNHYQVLSQAHIQQMDLLGKLFENDTGLDEAQEAEAIRILTSILNIRESTSDKAPQKTIFVLKILVMLYYLMMNSSKAQEYGMRALSLAKEQQLDVHEQSTIQELLSLISTEDHPIT

SEQ ID NO: 818083 - protein, 103 aa, Homo sapiens [sequence omitted]

SEQ ID NO: 818084 - protein, 214 aa, Homo sapiens
MNVIYPLAVPKGRRLCCEVCEAPAERVCAACTVTYYCGVVHQKADWDSIHEKICQLLIPLRTSMPFYNSEEERQHGLQQLQQRQKYLIEFCYTIAQKYLFEGKHEDAVPAALQSLRFRVKLYGLSSVELVPAYLLLAEASLGLGRIVQAEEYLFQAQWTVLKSTDCSNATHSLLHRNLGLLYIAKKNYEEARYHLANDVNKLSYNTCIFPKSKL

SEQ ID NO: 818085 - protein, 202 aa, Homo sapiens
MAVPAALILRESPSMKKAVSLINAIDTGRFPRLLTRILQKLHLKAESSFSEEEEEKLQAAFSLEKQDLHLVLETISFILEQAVYHNVKPAALQQQLENIHLRQDKAEAFVNTWSSMGQETVEKFRQRILAPCKLETVGWQLNLQMAHSAQAKLKSPQAVLQLGVNNEDSKSLEKVLVEFSHKELFDFYNKLETIQAQLDSLT

SEQ ID NO: 818086 - protein, 202 aa, Homo sapiens; identical to SEQ ID NO: 818085

SEQ ID NO: 818087 - protein, 202 aa, Homo sapiens; identical to SEQ ID NO: 818085

SEQ ID NO: 818088 - protein, 202 aa, Homo sapiens; identical to SEQ ID NO: 818085

SEQ ID NO: 818089 - protein, 188 aa, Homo sapiens
MKKAVSLINAIDTGRFPRLLTRILQKLHLKAESSFSEEEEEKLQAAFSLEKQDLHLVLETISFILEQAVYHNVKPAALQQQLENIHLRQDKAEAFVNTWSSMGQETVEKFRQRILAPCKLETVGWQLNLQMAHSAQAKLKSPQAVLQLGVNNEDSKSLEKVLVEFSHKELFDFYNKLETIQAQLDSLT

SEQ ID NO: 818090 - protein, 184 aa, Homo sapiens
MAVPAALILRESPSMKKAVSLINAIDTGRFPRLLTRILQKLHLKAESSFSEEEEEKLQAAFSLEKQDLHLVLETISFILEQAVYHNVKPAALQQQLENIHLRQDKAEAFVNTWSSMGQETVELNLQMAHSAQAKLKSPQAVLQLGVNNEDSKSLEKVLVEFSHKELFDFYNKLETIQAQLDSLT

SEQ ID NO: 818091 - protein, 165 aa, Homo sapiens
MAVPAALILRESPSMKKAVSLINAIDTGRFPRLLTRILQKLHLKAESSFSEEEEEKLQAAFSLEKQDLHLVLETISFILEQAVYHNVKPAALQQQLENIHLRQDKAEAFVNTWSSMGQETVEKFRQRILAPCKLETVGWQLNLQMAHSAQEPGESSCGIQSQGVV

SEQ ID NO: 818092 - protein, 165 aa, Homo sapiens
MAVPAALILRESPSMKKAVSLINAIDTGRFPRLLTRILQKLHLKAESSFSEEEEEKLQAAFSLEKQDLHLVLETISFILEQAVYHNVKPAALQQQLENIHLRQDKAEAFVNTWSSMGQETVEKFRQRILAPCKSLEKVLVEFSHKELFDFYNKLETIQAQLDSLT

SEQ ID NO: 818093 - protein, 208 aa, Homo sapiens
MAVPAALILRESPSMKKAVSLINAIDTGRFPRLLTRILQKLHLKAESSFSEEEEEKLQAAFSLEKQDLHLVLETISFILEQAVYHNVKPAALQQQLENIHLRQDKAEAFVNTWSSMGQETVEKFRQRILAPCKLETVGWQLNLQMAHSAQAKLKSPQAVLQLGVNNEDSKRALGEKFLVEIQSPRELVGFPINTALRTFQTPTVDFPF

SEQ ID NO: 818094 - protein, 184 aa, Homo sapiens
MAVPAALILRESPSMKKAVSLINAIDTGRFPRLLTRILQKLHLKAESSFSEEEEEKLQAAFSLEKQDLHLVLETISFILEQAVYHNVKPAALQQQLENIHLRQDKAEAFVNTWSSMGQETVEKFRQRILAPCKLETVGWQLNLQMAHSAQAKLKSPQAVLQLGVNNEDSKGKKWYPIKRMYFVC

SEQ ID NO: 818095 - protein, 71 aa, Homo sapiens
GGRGRHVPPLSANAEPRAEVTCLCLALLCAPGSVGAQSVVRRLGLSRTFLIPVDCAEYTACRLSSIHHGFF

SEQ ID NO: 818096 - protein, 100 aa, Homo sapiens
DAWVLDAWVGGSEGAGLSLSQLIVQNTLPVACLLFTMASSDIQVKELEKRASGQAFELILSPRSKESVPEFPLSPPKKKDLSLEEIQKKLEAAEERRKSP

SEQ ID NO: 818097 - protein, 82 aa, Homo sapiens
GKKYTTGSTVFNGARAYELSMQDIQVKELEKRASGQAFELILSPRSKESVPEFPLSPPKKKDLSLEEIQKKLEAAEERRKSP

SEQ ID NO: 818098 - protein, 71 aa, Homo sapiens; identical to SEQ ID NO: 818095

SEQ ID NO: 818099 - protein, 112 aa, Homo sapiens
MASSDIQVKELEKRASGQAFELILSPRSKESVPEFPLSPPKKKDLSLEEIQKKLEAAEERRKVNEAIHRKQDINLCNGQINFISITGRKQNCSYTVIITYASDWKEIPVLIY

SEQ ID NO: 818100 - protein, 89 aa, Homo sapiens
MFAGHLFSSYQMQEVRRKMVDRTRRWSVRTRGTECSLQKRPKHSDVYKQQPGRQARGRTLEDEGQTTSLNATNATQDQTQTGKETHSHD

SEQ ID NO: 818101 - protein, 69 aa, Homo sapiens
RARYPSYIVYIQVKELEKRASGQAFELILSPRSKESVPEFPLSPPKKKDLSLEEIQKKLEAAEERRKSP

SEQ ID NO: 818102 - protein, 83 aa, Homo sapiens
MEANTRETEKAQMDAKLERLREKDKHIEEVRKNKESKDPADETEADYLSDHLTFSTIPYLNIQRLYWARGQKNKKPTDKTVEA

SEQ ID NO: 818103 - protein, 69 aa, Homo sapiens; identical to SEQ ID NO: 818101

SEQ ID NO: 818104 - protein, 38 aa, Homo sapiens
MAAKLATFAREDKHIEEVRKNSPRINLVDQPESCAHPS

SEQ ID NO: 818105 - protein, 949 aa, Homo sapiens
MTDSKYFTTTKKGEIFELKAELNSDKKEKKKEAVKKVIASMTVGKDVSALFPDVVNCMQTDNLELKKLVYLYLMNYAKSQPDMAIMAVNTFVKDCEDPNPLIRALAVRTMGCIRVDKITEYLCEPLRKCLKDEDPYVRKTAAVCVAKLHDINAQLVEDQGFLDTLKDLISDSNPMVVANAVAALSEIAESHPSSNLLDLNPQSINKLLTALNECTEWGQIFILDCLANYMPKDDREAQSICERVTPRLSHANSAVVLSAVKVLMKFMEMLSKDLDYYGTLLKKLAPPLVTLLSAEPELQYVALRNINLIVQKRPEILKHEMKVFFVKYNDPIYVKLEKLDIMIRLASQANIAQVLAELKEYATEVDVDFVRKAVRAIGRCAIKVEQSAERCVSTLLDLIQTKVNYVVQEAIVVIKDIFRKYPNKYESVIATLCENLDSLDEPEARAAMIWIVGEYAERIDNADELLESFLEGFHDESTQVQLQLLTAIVKLFLKKPTETQELVQQVLSLATQDSDNPDLRDRGYIYWRLLSTDPVAAKEVVLAEKPLISEETDLIEPTLLDELICYIGTLASVYHKPPSAFVEGGRGVVHKSLPPRTASSESAESPETAPTGAPPGEQPDVIPAQGDLLGDLLNLDLGPPVSGPPLATSSVQMGAVDLLGGGLDSLMGDEPEGIGGTNFVAPPTAAVPANLGAPIGSGLSDLFDLTSGVGTLSGSYVAPKAVWLPAMKAKGLEISGTFTRQVGSISMDLQLTNKALQVMTDFAIQFNRNSFGLAPAAPLQVHAPLSPNQTVEISLPLSTVGSVMKMEPLNNLQVAVKNNIDVFYFSTLYPLHILFVEDGKMDRQMFLATWKDIPNENEAQFQIRDCPLNAEAASSKLQSSNIFTVAKRNVEGQDMLYQSLKLTNGIWVLAELRIQPGNPSCTDLELSLKCRAPEVSQHVYQAYETILKN

SEQ ID NO: 818106 - protein, 942 aa, Homo sapiens
MTDSKYFTTTKKGEIFELKAELNSDKKEKKKEAVKKVIASMTVGKDVSALFPDVVNCMQTDNLELKKLVYLYLMNYAKSQPDMAIMAVNTFVKDCEDPNPLIRALAVRTMGCIRVDKITEYLCEPLRKCLKDEDPYVRKTAAVCVAKLHDINAQLVEDQGFLDTLKDLISDSNPMVVANAVAALSEIAESHPSSNLLDLNPQSINKLLTALNECTEWGQIFILDCLANYMPKDDREAQSICERVTPRLSHANSAVVLSAVKVLMKFMEMLSKDLDYYGTLLKKLAPPLVTLLSAEPELQYVALRNINLIVQKRPEILKHEMKVFFVKYNDPIYVKLEKLDIMIRLASQANIAQVLAELKEYATEVDVDFVRKAVRAIGRCAIKVEQSAERCVSTLLDLIQTKVNYVVQEAIVVIKDIFRKYPNKYESVIATLCENLDSLDEPEARAAMIWIVGEYAERIDNADELLESFLEGFHDESTQVQLQLLTAIVKLFLKKPTETQELVQQVLSLATQDSDNPDLRDRGYIYWRLLSTDPVAAKEVVLAEKPLISEETDLIEPTLLDELICYIGTLASVYHKPPSAFVEGGRGVVHKSLPPRTASSESAESPETAPTGAPPGEQPDVIPAQGDLLGDLLNLDLGPPVSGPPLATSSVQMGAVDLLGGGLDSLIGGTNFVAPPTAAVPANLGAPIGSGLSDLFDLTSGVGTLSGSYVAPKAVWLPAMKAKGLEISGTFTRQVGSISMDLQLTNKALQVMTDFAIQFNRNSFGLAPAAPLQVHAPLSPNQTVEISLPLSTVGSVMKMEPLNNLQVAVKNNIDVFYFSTLYPLHILFVEDGKMDRQMFLATWKDIPNENEAQFQIRDCPLNAEAASSKLQSSNIFTVAKRNVEGQDMLYQSLKLTNGIWVLAELRIQPGNPSCTDLELSLKCRAPEVSQHVYQAYETILKN

SEQ ID NO: 818107 - protein, 880 aa, Homo sapiens
MTDSKYFTTTKKGEIFELKAELNSDKKEKKKEAVKKVIASMTVGKDVSALFPDVVNCMQTDNLELKKLVYLYLMNYAKSQPDMAIMAVNTFVKDCEDPNPLIRALAVRTMGCIRVDKITEYLCEPLRKCLKDEDPYVRKTAAVCVAKLHDINAQLVEDQGFLDTLKDLISDSNPMVVANAVAALSEIAESHPSSNLLDLNPQSINKLLTALNECTEWGQIFILDCLANYMPKDDREAQSICERVTPRLSHANSAVVLSAVKVLMKFMEMLSKDLDYYGTLLKKLAPPLVTLLSAEPELQYVALRNINLIVQKRPEILKHEMKVFFVKYNDPIYVKLEKLDIMIRLASQANIAQVLAELKEYATEVDVDFVRKAVRAIGRCAIKVEQSAERCVSTLLDLIQTKVNYVVQEAIVVIKDIFRKYPNKYESVIATLCENLDSLDEPEARAAMIWIVGEYAERIDNADELLESFLEGFHDESTQVQLQLLTAIVKLFLKKPTETQELVQQVLSLATQDSDNPDLRDRGYIYWRLLSTDPVAAKEVVLAEKPLISEETDLIEPTLLDELICYIGTLASVYHKPPSERPPLATSSVQMGAVDLLGGGLDSLIGGTNFVAPPTAAVPANLGAPIGSGLSDLFDLTSGVGTLSGSYVAPKAVWLPAMKAKGLEISGTFTRQVGSISMDLQLTNKALQVMTDFAIQFNRNSFGLAPAAPLQVHAPLSPNQTVEISLPLSTVGSVMKMEPLNNLQVAVKNNIDVFYFSTLYPLHILFVEDGKMDRQMFLATWKDIPNENEAQFQIRDCPLNAEAASSKLQSSNIFTVAKRNVEGQDMLYQSLKLTNGIWVLAELRIQPGNPSCTDLELSLKCRAPEVSQHVYQAYETILKN

SEQ ID NO: 818108 - protein, 993 aa, Homo sapiens
MTDSKYFTTTKKGEIFELKAELNSDKKEKKKEAVKKVIASMTVGKDVSALFPDVVNCMQTDNLELKKLVYLYLMNYAKSQPDMAIMAVNTFVKDCEDPNPLIRALAVRTMGCIRVDKITEYLCEPLRKCLKDEDPYVRKTAAVCVAKLHDINAQLVEDQGFLDTLKDLISDSNPMVVANAVAALSEIAESHPSSNLLDLNPQSINKLLTALNECTEWGQIFILDCLANYMPKDDREAQSICERVTPRLSHANSAVVLSAVKVLMKFMEMLSKDLDYYGTLLKKLAPPLVTLLSAEPELQYVALRNINLIVQKRPEILKHEMKVFFVKYNDPIYVKLEKLDIMIRLASQANIAQAPASSLPWAFYLEQEAESHSPRESVYIHCPGVFQQIAPSGAPAPSFLFEATVLAELKEYATEVDVDFVRKAVRAIGRCAIKVEQSAERCVSTLLDLIQTKVNYVVQEAIVVIKDIFRKYPNKYESVIATLCENLDSLDEPEARAAMIWIVGEYAERIDNADELLESFLEGFHDESTQVQLQLLTAIVKLFLKKPTETQELVQQVLSLATQDSDNPDLRDRGYIYWRLLSTDPVAAKEVVLAEKPLISEETDLIEPTLLDELICYIGTLASVYHKPPSAFVEGGRGVVHKSLPPRTASSESAESPETAPTGAPPGEQPDVIPAQGDLLGDLLNLDLGPPVSGPPLATSSVQMGAVDLLGGGLDSLIGGTNFVAPPTAAVPANLGAPIGSGLSDLFDLTSGVGTLSGSYVAPKAVWLPAMKAKGLEISGTFTRQVGSISMDLQLTNKALQVMTDFAIQFNRNSFGLAPAAPLQVHAPLSPNQTVEISLPLSTVGSVMKMEPLNNLQVAVKNNIDVFYFSTLYPLHILFVEDGKMDRQMFLATWKDIPNENEAQFQIRDCPLNAEAASSKLQSSNIFTVAKRNVEGQDMLYQSLKLTNGIWVLAELRIQPGNPSCTDLELSLKCRAPEVSQHVYQAYETILKN

SEQ ID NO: 818109 - protein, 721 aa, Homo sapiens
AGDLEDPISEQDDREAQSICERVTPRLSHANSAVVLSAVKVLMKFMEMLSKDLDYYGTLLKKLAPPLVTLLSAEPELQYVALRNINLIVQKRPEILKHEMKVFFVKYNDPIYVKLEKLDIMIRLASQANIAQVLAELKEYATEVDVDFVRKAVRAIGRCAIKVEQSAERCVSTLLDLIQTKVNYVVQEAIVVIKDIFRKYPNKYESVIATLCENLDSLDEPEARAAMIWIVGEYAERIDNADELLESFLEGFHDESTQVQLQLLTAIVKLFLKKPTETQELVQQVLSLATQDSDNPDLRDRGYIYWRLLSTDPVAAKEVVLAEKPLISEETDLIEPTLLDELICYIGTLASVYHKPPSAFVEGGRGVVHKSLPPRTASSESAESPETAPTGAPPGEQPDVIPAQGDLLGDLLNLDLGPPVSGPPLATSSVQMGAVDLLGGGLDSLIGGTNFVAPPTAAVPANLGAPIGSGLSDLFDLTSGVGTLSGSYVAPKAVWLPAMKAKGLEISGTFTRQVGSISMDLQLTNKALQVMTDFAIQFNRNSFGLAPAAPLQVHAPLSPNQTVEISLPLSTVGSVMKMEPLNNLQVAVKNNIDVFYFSTLYPLHILFVEDGKMDRQMFLATWKDIPNENEAQFQIRDCPLNAEAASSKLQSSNIFTVAKRNVEGQDMLYQSLKLTNGIWVLAELRIQPGNPSCTDLELSLKCRAPEVSQHVYQAYETILKN

SEQ ID NO: 818110 - protein, 924 aa, Homo sapiens
MTDSKYFTTTKKGEIFELKAELNSDKKEKKKEAVKKVIASMTVGKDVSALFPDVVNCMQTDNLELKKLVYLYLMNYAKSQPDMAIMAVNTFVKDCEDPNPLIRALAVRTMGCIRVDKITEYLCEPLRKCLKDEDPYVRKTAAVCVAKLHDINAQLVEDQGFLDTLKDLISDSNPMVVANAVAALSEIAESHPSSNLLDLNPQSINKLLTALNECTEWGQIFILDCLANYMPKDDREAQSICERVTPRLSHANSAVVLSAVKVLMKFMEMLSKDLDYYGTLLKKLAPPLVTLLSAEPELQYVALRNINLIVQKRPEILKHEMKVFFVKYNDPIYVKLEKLDIMIRLASQANIAQVLAELKEYATEVDVDFVRKAVRAIGRCAIKVEQSAERCVSTLLDLIQTKVNYVVQEAIVVIKDIFRKYPNKYESVIATLCENLDSLDEPEARAAMIWIVGEYAERIDNADELLESFLEGFHDESTQVQLQLLTAIVKLFLKKPTETQELVQQVLSLATQDSDNPDLRDRGYIYWRLLSTDPVAAKEVVLAEKPLISEETDLIEPTLLDELICYIGTLASVYHKPPSAFVEGGRGVVHKSLPPRTASSESAESPETAPTGAPPGEQPDVIPAQGDLLGDLLNLDLGPPVSGPPLATSSVQMGAVDLLGGGLDSLIGGTNFVAPPTAAVPANLGAPIGSGLSDLFDLTSGVGTLSGSYVAPKAVWLPAMKAKGLEISGTFTRQVGSISMDLQLTNKALQVMTDFAIQFNRNSFGLAPAAPLQVHAPLSPNQTVEISLPLSTVGSVMKMEPLNNLQVAVKNNIDVFYFSTLYPLHILFVEDGKMDRQMFLATWKDIPNENEAQFQIRDCPLNAEAASSKLQSSNIFTVAKRNVEGQDMLYQSLKLTNGIWVLAELRIQPGNPSCTDLAGVRADV

SEQ ID NO: 818111 - protein, 461 aa, Homo sapiens
VLTDIVYFSLNEYSMLRPRMLLQQVLSLFLSDSDNPDLRDRGYIYWRLLSTDPVAAKEVVLAEKPLISEETDLIEPTLLDELICYIGTLASVYHKPPSAFVEGGRGVVHKSLPPRTASSESAESPETAPTGAPPGEQPDVIPAQGDLLGDLLNLDLGPPVSGPPLATSSVQMGAVDLLGGGLDSLIGGTNFVAPPTAAVPANLGAPIGSGLSDLFDLTSGVGTLSGSYVAPKAVWLPAMKAKGLEISGTFTRQVGSISMDLQLTNKALQVMTDFAIQFNRNSFGLAPAAPLQVHAPLSPNQTVEISLPLSTVGSVMKMEPLNNLQVAVKNNIDVFYFSTLYPLHILFVEDGKMDRQMFLATWKDIPNENEAQFQIRDCPLNAEAASSKLQSSNIFTVAKRNVEGQDMLYQSLKLTNGIWVLAELRIQPGNPSCTDLELSLKCRAPEVSQHVYQAYETILKN

SEQ ID NO: 818112 - protein, 355 aa, Homo sapiens
TKKPVQKALMYLFTHPCDCAIPFLPLFLGEKGKWLFCALAQFGRNPAAQLSPPVSGPPLATSSVQMGAVDLLGGGLDSLIGGTNFVAPPTAAVPANLGAPIGSGLSDLFDLTSGVGTLSGSYVAPKAVWLPAMKAKGLEISGTFTRQVGSISMDLQLTNKALQVMTDFAIQFNRNSFGLAPAAPLQVHAPLSPNQTVEISLPLSTVGSVMKMEPLNNLQVAVKNNIDVFYFSTLYPLHILFVEDGKMDRQMFLATWKDIPNENEAQFQIRDCPLNAEAASSKLQSSNIFTVAKRNVEGQDMLYQSLKLTNGIWVLAELRIQPGNPSCTDLELSLKCRAPEVSQHVYQAYETILKN

SEQ ID NO: 818113 - protein, 226 aa, Homo sapiens
MTDSKYFTTTKKGEIFELKAELNSDKKEKKKEAVKKVIASMTVGKDVSALFPDVVNCMQTDNLELKKLVYLYLMNYAKSQPDMAIMAVNTFVKDCEDPNPLIRALAVRTMGCIRVDKITEYLCEPLRKCLKDEDPYVRKTAAVCVAKLHDINAQLVEDQGFLDTLKDLISDSNPMNTAFGLLGMGPEGQPLGRRVASGPSPGEGISPQSAQAPQAPGDNHVVPVLR

SEQ ID NO: 818114 - protein, 78 aa, Homo sapiens
ALRLPSGDVLRHTGAVTALLRPVAGPSTQELAAMAVTLPSQTSGSTSDPRNVPANVEGIFSQGLSLVFCSPGILPHHQ

SEQ ID NO: 818115 - protein, 75 aa, Homo sapiens
MDLLWEWEWGRSGAVWTALSGTVRRLSACPGGQLCLEAGVSLTFLRHPDASTLLLCPGRSESAESPETAPTGAPP

SEQ ID NO: 818116 - protein, 45 aa, Homo sapiens
MLKYRFPAGTMALSSVAQWSSSEDAKIHEKTSRTSGRIFNGKSLG

SEQ ID NO: 818117 - protein, 133 aa, Homo sapiens
MRPAPHTEHRSTQDAEGHSRDTDADPEYNSTRRKRQEGNAAEQKSHTEHERKRVEKHQIRRRAKKQKAQSETKRKERKKKEGGSKEGPHSSDHNNMNRETQSMKRDLRPNEKEKKQDHKRQQQRTKPKQQTEN

SEQ ID NO: 818118 - protein, 45 aa, Homo sapiens; identical to SEQ ID NO: 818116

SEQ ID NO: 818119 - protein, 45 aa, Homo sapiens; identical to SEQ ID NO: 818116

SEQ ID NO: 818120 - protein, 45 aa, Homo sapiens; identical to SEQ ID NO: 818116

SEQ ID NO: 818121 - protein, 133 aa, Homo sapiens; identical to SEQ ID NO: 818117

SEQ ID NO: 818122 - protein, 133 aa, Homo sapiens
MRPAPHTEHRSTQDAEGHSRELDADPEYNSTRRKRQEGNAAEQKSHTEHERKRVEETSNQTKSEEAESTERDKAKRKEEERRRKQRRTTQQRPQHMNRETQSMKRDLRPNEKEKKQDHKRQQQRTKPKQQTEN

SEQ ID NO: 818123 - protein, 114 aa, Homo sapiens
MRLLILALLGICSLTAYIVEGVGSEVSDKRTCVSLTTQRLPVSRIKTYTITEGSLRAVIFITKRGLKVCADPQATWVRDVVRSMDRKSNTRNNMIQTKPTGTQQSTNTAVTLTG

SEQ ID NO: 818124 - protein, 1192 aa, Homo sapiens
ARAQRKHGGGWHPSVRRCRAGVVGCHGRWRRHRPRVSLSGTAGGASALSRAMDDSGELGGLETMETLTELGDELTLGDIDEMLQFVSNQVGEFPDLFSEQLCSSFPGSGGSGSSSGSSGSSSSSSNGRGSSSGAVDPSVQRSFTQVTLPSFSPSAASPQAPTLQVKVSPTSVPTTPRATPILQPRPQPQPQPQTQLQQQTVMITPTFSTTPQTRIIQQPLIYQNAATSFQVLQPQVQSLVTSSQVQPVTIQQQVQTVQAQRVLTQTANGTLQTLAPATVQTVAAPQVQQVPVLVQPQIIKTDSLVLTTLKTDGSPVMAAVQNPALTALTTPIQTAALQVPTLVGSSGTILTTMPVMMGQEKVPIKQVPGGVKQLEPPKEGERRTTHNIIEKRYRSSINDKIIELKDLVMGTDAKMHKSGVLRKAIDYIKYLQQVNHKLRQENMVLKLANQKNKLLKGIDLGSLVDNEVDLKIEDFNQNVLLMSPPASDSGSQAGFSPYSIDSEPGSPLLDDAKVKDEPDSPPVALGMVDRSRILLCVLTFLCLSFNPLTSLLQWGGAHDSDQHPHSGSGRSVLSFESGSGGWFDWMMPTLLLWLVNGVIVLSVFVKLLVHGEPVIRPHSRSSVTFWRHRKQADLDLARGDFAAAAGNLQTCLAVLGRALPTSRLDLACSLSWNVIRYSLQKLRLVRWLLKKVFQCRRATPATEAGFEDEAKTSARDAALAYHRLHQLHITGKLPAGSACSDVHMALCAVNLAECAEEKIPPSTLVEIHLTAAMGLKTRCGGKLGFLASYFLSRAQSLCGPEHSAVPDSLRWLCHPLGQKFFMERSWSVKSAAKESLYCAQRNPADPIAQVHQAFCKNLLERAIESLVKPQAKKKAGDQEEESCEFSSALEYLKLLHSFVDSVGVMSPPLSRSSVLKSALGPDIICRWWTSAITVAISWLQGDDAAVRSHFTKVERIPKALEVTESPLVKAIFHACRAMHASLPGKADGQQSSFCHCERASGHLWSSLNVSGATSDPALNHVVQLLTCDLLLSLRTALWQKQASASQAVGETYHASGAELAGFQRDLGSLRRLAHSFRPAYRKVFLHEATVRLMAGASPTRTHQLLEHSLRRRTTQSTKHGEVDAWPGQRERATAILLACRHLPLSFLSSPGQRAVLLAEAARTLEKVGDRRSCNDCQQMIVKLGGGTAIAAS

SEQ ID NO: 818125 - protein, 1192 aa, Homo sapiens; identical to SEQ ID NO: 818124

SEQ ID NO: 818126 - protein, 1192 aa, Homo sapiens; identical to SEQ ID NO: 818124

SEQ ID NO: 818127 - protein, 1192 aa, Homo sapiens; identical to SEQ ID NO: 818124

SEQ ID NO: 818128 - protein, 1192 aa, Homo sapiens; identical to SEQ ID NO: 818124

SEQ ID NO: 818129 - protein, 1158 aa, Homo sapiens
SGAYVVLAEFELYGGAEGEKEGNVTGRMTVALKGPQLRCSALQLLLQMLQFVSNQVGEFPDLFSEQLCSSFPGSGGSGSSSGSSGSSSSSSNGRGSSSGAVDPSVQRSFTQVTLPSFSPSAASPQAPTLQVKVSPTSVPTTPRATPILQPRPQPQPQPQTQLQQQTVMITPTFSTTPQTRIIQQPLIYQNAATSFQVLQPQVQSLVTSSQVQPVTIQQQVQTVQAQRVLTQTANGTLQTLAPATVQTVAAPQVQQVPVLVQPQIIKTDSLVLTTLKTDGSPVMAAVQNPALTALTTPIQTAALQVPTLVGSSGTILTTMPVMMGQEKVPIKQVPGGVKQLEPPKEGERRTTHNIIEKRYRSSINDKIIELKDLVMGTDAKMHKSGVLRKAIDYIKYLQQVNHKLRQENMVLKLANQKNKLLKGIDLGSLVDNEVDLKIEDFNQNVLLMSPPASDSGSQAGFSPYSIDSEPGSPLLDDAKVKDEPDSPPVALGMVDRSRILLCVLTFLCLSFNPLTSLLQWGGAHDSDQHPHSGSGRSVLSFESGSGGWFDWMMPTLLLWLVNGVIVLSVFVKLLVHGEPVIRPHSRSSVTFWRHRKQADLDLARGDFAAAAGNLQTCLAVLGRALPTSRLDLACSLSWNVIRYSLQKLRLVRWLLKKVFQCRRATPATEAGFEDEAKTSARDAALAYHRLHQLHITGKLPAGSACSDVHMALCAVNLAECAEEKIPPSTLVEIHLTAAMGLKTRCGGKLGFLASYFLSRAQSLCGPEHSAVPDSLRWLCHPLGQKFFMERSWSVKSAAKESLYCAQRNPADPIAQVHQAFCKNLLERAIESLVKPQAKKKAGDQEEESCEFSSALEYLKLLHSFVDSVGVMSPPLSRSSVLKSALGPDIICRWWTSAITVAISWLQGDDAAVRSHFTKVERIPKALEVTESPLVKAIFHACRAMHASLPGKADGQQSSFCHCERASGHLWSSLNVSGATSDPALNHVVQLLTCDLLLSLRTALWQKQASASQAVGETYHASGAELAGFQRDLGSLRRLAHSFRPAYRKVFLHEATVRLMAGASPTRTHQLLEHSLRRRTTQSTKHGEVDAWPGQRERATAILLACRHLPLSFLSSPGQRAVLLAEAARTLEKVGDRRSCNDCQQMIVKLGGGTAIAAS

SEQ ID NO: 818130 - protein, 1013 aa, Homo sapiens
VLVFDVINGLPQYPRLVHLGVCPHDQVFQFDDFVIDGGAISFLNDIMGCPPFSFFGGLKLLRSSQVQPVTIQQQVQTVQAQRVLTQTANGTLQTLAPATVQTVAAPQVQQVPVLVQPQIIKTDSLVLTTLKTDGSPVMAAVQNPALTALTTPIQTAALQVPTLVGSSGTILTTMPVMMGQEKVPIKQVPGGVKQLEPPKEGERRTTHNIIEKRYRSSINDKIIELKDLVMGTDAKMHKSGVLRKAIDYIKYLQQVNHKLRQENMVLKLANQKNKLLKGIDLGSLVDNEVDLKIEDFNQNVLLMSPPASDSGSQAGFSPYSIDSEPGSPLLDDAKVKDEPDSPPVALGMVDRSRILLCVLTFLCLSFNPLTSLLQWGGAHDSDQHPHSGSGRSVLSFESGSGGWFDWMMPTLLLWLVNGVIVLSVFVKLLVHGEPVIRPHSRSSVTFWRHRKQADLDLARGDFAAAAGNLQTCLAVLGRALPTSRLDLACSLSWNVIRYSLQKLRLVRWLLKKVFQCRRATPATEAGFEDEAKTSARDAALAYHRLHQLHITGKLPAGSACSDVHMALCAVNLAECAEEKIPPSTLVEIHLTAAMGLKTRCGGKLGFLASYFLSRAQSLCGPEHSAVPDSLRWLCHPLGQKFFMERSWSVKSAAKESLYCAQRNPADPIAQVHQAFCKNLLERAIESLVKPQAKKKAGDQEEESCEFSSALEYLKLLHSFVDSVGVMSPPLSRSSVLKSALGPDIICRWWTSAITVAISWLQGDDAAVRSHFTKVERIPKALEVTESPLVKAIFHACRAMHASLPGKADGQQSSFCHCERASGHLWSSLNVSGATSDPALNHVVQLLTCDLLLSLRTALWQKQASASQAVGETYHASGAELAGFQRDLGSLRRLAHSFRPAYRKVFLHEATVRLMAGASPTRTHQLLEHSLRRRTTQSTKHGEVDAWPGQRERATAILLACRHLPLSFLSSPGQRAVLLAEAARTLEKVGDRRSCNDCQQMIVKLGGGTAIAAS

SEQ ID NO: 818131 - protein, 1076 aa, Homo sapiens
  misc_feature (25)..(25): Xaa can be any naturally occurring amino acid
MRGYEGEAGIRGDEEEVGIVTNDSXIRNLNAEGQRFDGGSHTQSLSANSLSSAPCCALAIVNKSDVNAPHTLTYLSCLLWPPQPSTSSLNPSSAEPTPSHINTELHLNQLHVSWVLQPQVQSLVTSSQVQPVTIQQQVQTVQAQRVLTQTANGTLQTLAPATVQTVAAPQVQQVPVLVQPQIIKTDSLVLTTLKTDGSPVMAAVQNPALTALTTPIQTAALQVPTLVGSSGTILTTMPVMMGQEKVPIKQVPGGVKQLEPPKEGERRTTHNIIEKRYRSSINDKIIELKDLVMGTDAKMHKSGVLRKAIDYIKYLQQVNHKLRQENMVLKLANQKNKLLKGIDLGSLVDNEVDLKIEDFNQNVLLMSPPASDSGSQAGFSPYSIDSEPGSPLLDDAKVKDEPDSPPVALGMVDRSRILLCVLTFLCLSFNPLTSLLQWGGAHDSDQHPHSGSGRSVLSFESGSGGWFDWMMPTLLLWLVNGVIVLSVFVKLLVHGEPVIRPHSRSSVTFWRHRKQADLDLARGDFAAAAGNLQTCLAVLGRALPTSRLDLACSLSWNVIRYSLQKLRLVRWLLKKVFQCRRATPATEAGFEDEAKTSARDAALAYHRLHQLHITGKLPAGSACSDVHMALCAVNLAECAEEKIPPSTLVEIHLTAAMGLKTRCGGKLGFLASYFLSRAQSLCGPEHSAVPDSLRWLCHPLGQKFFMERSWSVKSAAKESLYCAQRNPADPIAQVHQAFCKNLLERAIESLVKPQAKKKAGDQEEESCEFSSALEYLKLLHSFVDSVGVMSPPLSRSSVLKSALGPDIICRWWTSAITVAISWLQGDDAAVRSHFTKVERIPKALEVTESPLVKAIFHACRAMHASLPGKADGQQSSFCHCERASGHLWSSLNVSGATSDPALNHVVQLLTCDLLLSLRTALWQKQASASQAVGETYHASGAELAGFQRDLGSLRRLAHSFRPAYRKVFLHEATVRLMAGASPTRTHQLLEHSLRRRTTQSTKHGEVDAWPGQRERATAILLACRHLPLSFLSSPGQRAVLLAEAARTLEKVGDRRSCNDCQQMIVKLGGGTAIAAS

SEQ ID NO: 818132 - protein, 1225 aa, Homo sapiens
ARAQRKHGGGWHPSVRRCRAGVVGCHGRWRRHRPRVSLSGTAGGASALSRAMDDSGELGGLETMETLTELGDELTLGDIDEMLQFVSNQVGEFPDLFSEQLCSSFPGSGGSGSSSGSSGSSSSSSNGRGSSSGAVDPSVQRSFTQVTLPSFSPSAASPQAPTLQVKVSPTSVPTTPRATPILQPRPQPQPQPQTQLQQQTVMITPTFSTTPQTRIIQQPLIYQNAATSFQVLQPQVQSLVTSSQVQPVTIQQQVQTVQAQRVLTQTANGTLQTLAPATVQTVAAPQVQQVPVLVQPQIIKTDSLVLTTLKTDGSPVMAAVQNPALTALTTPIQTAALQVPTLVGSSGTILTTMPVMMGQEKVPIKQVPGGVKQLEPPKEGERRTTHNIIEKRYRSSINDKIIELKDLVMGTDAKMHKSGVLRKAIDYIKYLQQVNHKLRQENMVLKLANQKNKLLKGIDLGSLVDNEVDLKIEDFNQNVLLMSPPASDSGSQAGFSPYSIDSEPGSPLLDDAKVKDEPDSPPVALGMVDRSRILLCVLTFLCLSFNPLTSLLQWGGAHDSDQHPHSGSGRSVLSFESGSGGWFDWMMPTLLLWLVNGVIVLSVFVKLLVHGEPVIRPHSRSSVTFWRHRKQADLDLARGVYGKKSGATHSIEEELNIHISRGKEPEHSSAAGDFAAAAGNLQTCLAVLGRALPTSRLDLACSLSWNVIRYSLQKLRLVRWLLKKVFQCRRATPATEAGFEDEAKTSARDAALAYHRLHQLHITGKLPAGSACSDVHMALCAVNLAECAEEKIPPSTLVEIHLTAAMGLKTRCGGKLGFLASYFLSRAQSLCGPEHSAVPDSLRWLCHPLGQKFFMERSWSVKSAAKESLYCAQRNPADPIAQVHQAFCKNLLERAIESLVKPQAKKKAGDQEEESCEFSSALEYLKLLHSFVDSVGVMSPPLSRSSVLKSALGPDIICRWWTSAITVAISWLQGDDAAVRSHFTKVERIPKALEVTESPLVKAIFHACRAMHASLPGKADGQQSSFCHCERASGHLWSSLNVSGATSDPALNHVVQLLTCDLLLSLRTALWQKQASASQAVGETYHASGAELAGFQRDLGSLRRLAHSFRPAYRKVFLHEATVRLMAGASPTRTHQLLEHSLRRRTTQSTKHGEVDAWPGQRERATAILLACRHLPLSFLSSPGQRAVLLAEAARTLEKVGDRRSCNDCQQMIVKLGGGTAIAAS

SEQ ID NO: 818133 - protein, 1222 aa, Homo sapiens
ARAQRKHGGGWHPSVRRCRAGVVGCHGRWRRHRPRVSLSGTAGGASALSRAMDDSGELGGLETMETLTELGDELTLGDIDEMLQFVSNQVGEFPDLFSEQLCSSFPGSGGSGSSSGSSGSSSSSSNGRGSSSGAVDPSVQRSFTQVTLPSFSPSAASPQAPTLQVKVSPTSVPTTPRATPILQPRPQPQPQPQTQLQQQTVMITPTFSTTPQTRIIQQPLIYQNAATSFQVLQPQVQSLVTSSQVQPVTIQQQVQTVQAQRVLTQTANGTLQTLAPATVQTVAAPQVQQVPVLVQPQIIKTDSLVLTTLKTDGSPVMAAVQNPALTALTTPIQTAALQVPTLVGSSGTILTTMPVMMGQEKVPIKQVPGGVKQLEPPKEGERRTTHNIIEKRYRSSINDKIIELKDLVMGTDAKMHKSGVLRKAIDYIKYLQQVNHKLRQENMVLKLANQKNSKCAEKRLVSPGPGGALKSRSFSPGGVFFAELLKGIDLGSLVDNEVDLKIEDFNQNVLLMSPPASDSGSQAGFSPYSIDSEPGSPLLDDAKVKDEPDSPPVALGMVDRSRILLCVLTFLCLSFNPLTSLLQWGGAHDSDQHPHSGSGRSVLSFESGSGGWFDWMMPTLLLWLVNGVIVLSVFVKLLVHGEPVIRPHSRSSVTFWRHRKQADLDLARGDFAAAAGNLQTCLAVLGRALPTSRLDLACSLSWNVIRYSLQKLRLVRWLLKKVFQCRRATPATEAGFEDEAKTSARDAALAYHRLHQLHITGKLPAGSACSDVHMALCAVNLAECAEEKIPPSTLVEIHLTAAMGLKTRCGGKLGFLASYFLSRAQSLCGPEHSAVPDSLRWLCHPLGQKFFMERSWSVKSAAKESLYCAQRNPADPIAQVHQAFCKNLLERAIESLVKPQAKKKAGDQEEESCEFSSALEYLKLLHSFVDSVGVMSPPLSRSSVLKSALGPDIICRWWTSAITVAISWLQGDDAAVRSHFTKVERIPKALEVTESPLVKAIFHACRAMHASLPGKADGQQSSFCHCERASGHLWSSLNVSGATSDPALNHVVQLLTCDLLLSLRTALWQKQASASQAVGETYHASGAELAGFQRDLGSLRRLAHSFRPAYRKVFLHEATVRLMAGASPTRTHQLLEHSLRRRTTQSTKHGEVDAWPGQRERATAILLACRHLPLSFLSSPGQRAVLLAEAARTLEKVGDRRSCNDCQQMIVKLGGGTAIAAS

SEQ ID NO: 818134 - protein, 1170 aa, Homo sapiens
ARAQRKHGGGWHPSVRRCRAGVVGCHGRWRRHRPRVSLSGTAGGASALSRAMDDSGELGGLETMETLTELGDELTLGDIDEMLQFVSNQVGEFPDLFSEQLCSSFPGSGGSGSSSGSSGSSSSSSNGRGSSSGAVDPSVQRSFTQVTLPSFSPSAASPQAPTLQVKVSPTSVPTTPRATPILQPRPQPQPQPQTQLQQQTVMITPTFSTTPQTRIIQQPLIYQNAATSFQVLQPQVQSLVTSSQVQPVTIQQQVQTVQAQRVLTQTANGTLQTLAPATVQTVAAPQVQQVPVLVQPQIIKTDSLVLTTLKTDGSPVMAAVQNPALTALTTPIQTAALQVPTLVGSSGTILTTMPVMMGQEKVPIKQVPGGVKQLEPPKEGERRTTHNIIEKRYRSSINDKIIELKDLVMGTDAKMHKSGVLRKAIDYIKYLQQVNHKLRQENMVLKLANQKNKLLKGIDLGSLVDNEVDLKIEDFNQNVLLMSPPASDSGSQAGFSPYSIDSEPGSPLLDDAKVKDEPDSPPVALGMVDRSRILLCVLTFLCLSFNPLTSLLQWGGAHDSDQHPHSGSGRSVLSFESGSGGWFDWMMPTLLLWLVNGVIVLSVFVKLLVHGEPVIRPHSRSSVTFWRHRKQADLDLARGDFAAAAGNLQTCLAVLGRALPTSRLDLACSLSWNVIRYSLQKLRLVRWLLKKVFQCRRATPATEAGFEDEAKTSARDAALAYHRLHQLHITGKLPAGSACSDVHMALCAVNLAECAEEKIPPSTLVEIHLTAAMGLKTRCGGKLGFLASYFLSRAQSLCGPEHSAVPDSLRWLCHPLGQKFFMERSWSVKSAAKESLYCAQRNPADPIAQVHQAFCKNLLERAIESLVKPQAKKKAGDQEEESCEFSSALEYLKLLHSFVDSVGVMSPPLSRSSVLKSALGPDIICRWWTSAITVAISWLQGDDAAVRSHFTKVERIPKALEVTESPLVKAIFHACRAMHASLPGKADGQQSSFCHCERASGHLWSSLNVSGATSDPALNHVVQLLTCDLLLSLRTALWQKQASASQAVGETYHASGAELAGFQRDLGSLRRLAHSFRPAYRKVFLHEATVRLMAGASPTRTHQLLEHSLRRRTTQSTKHGEVDAWPGQRERATAILLACRHLPLSFLSSPKLPAPWRRWATGAPATTASR

SEQ ID NO: 818135 - protein, 720 aa, Homo sapiens
FNEGDGDLIVTLDGPVVPYTLGFSPYSIDSEPGSPLLDDAKVKDEPDSPPVALGMVDRSRILLCVLTFLCLSFNPLTSLLQWGGAHDSDQHPHSGSGRSVLSFESGSGGWFDWMMPTLLLWLVNGVIVLSVFVKLLVHGEPVIRPHSRSSVTFWRHRKQADLDLARGDFAAAAGNLQTCLAVLGRALPTSRLDLACSLSWNVIRYSLQKLRLVRWLLKKVFQCRRATPATEAGFEDEAKTSARDAALAYHRLHQLHITGKLPAGSACSDVHMALCAVNLAECAEEKIPPSTLVEIHLTAAMGLKTRCGGKLGFLASYFLSRAQSLCGPEHSAVPDSLRWLCHPLGQKFFMERSWSVKSAAKESLYCAQRNPADPIAQVHQAFCKNLLERAIESLVKPQAKKKAGDQEEESCEFSSALEYLKLLHSFVDSVGVMSPPLSRSSVLKSALGPDIICRWWTSAITVAISWLQGDDAAVRSHFTKVERIPKALEVTESPLVKAIFHACRAMHASLPGKADGQQSSFCHCERASGHLWSSLNVSGATSDPALNHVVQLLTCDLLLSLRTALWQKQASASQAVGETYHASGAELAGFQRDLGSLRRLAHSFRPAYRKVFLHEATVRLMAGASPTRTHQLLEHSLRRRTTQSTKHGEVDAWPGQRERATAILLACRHLPLSFLSSPGQRAVLLAEAARTLEKVGDRRSCNDCQQMIVKLGGGTAIAAS

SEQ ID NO: 818136 - protein, 722 aa, Homo sapiens
ISVLGPGCKFYINWSVRPLTLKMGFSPYSIDSEPGSPLLDDAKVKDEPDSPPVALGMVDRSRILLCVLTFLCLSFNPLTSLLQWGGAHDSDQHPHSGSGRSVLSFESGSGGWFDWMMPTLLLWLVNGVIVLSVFVKLLVHGEPVIRPHSRSSVTFWRHRKQADLDLARGDFAAAAGNLQTCLAVLGRALPTSRLDLACSLSWNVIRYSLQKLRLVRWLLKKVFQCRRATPATEAGFEDEAKTSARDAALAYHRLHQLHITGKLPAGSACSDVHMALCAVNLAECAEEKIPPSTLVEIHLTAAMGLKTRCGGKLGFLASYFLSRAQSLCGPEHSAVPDSLRWLCHPLGQKFFMERSWSVKSAAKESLYCAQRNPADPIAQVHQAFCKNLLERAIESLVKPQAKKKAGDQEEESCEFSSALEYLKLLHSFVDSVGVMSPPLSRSSVLKSALGPDIICRWWTSAITVAISWLQGDDAAVRSHFTKVERIPKALEVTESPLVKAIFHACRAMHASLPGKADGQQSSFCHCERASGHLWSSLNVSGATSDPALNHVVQLLTCDLLLSLRTALWQKQASASQAVGETYHASGAELAGFQRDLGSLRRLAHSFRPAYRKVFLHEATVRLMAGASPTRTHQLLEHSLRRRTTQSTKHGEVDAWPGQRERATAILLACRHLPLSFLSSPGQRAVLLAEAARTLEKVGDRRSCNDCQQMIVKLGGGTAIAAS

SEQ ID NO: 818137 - protein, 1192 aa, Homo sapiens; identical to SEQ ID NO: 818124

SEQ ID NO: 818138 - protein, 606 aa, Homo sapiens [sequence omitted]

SEQ ID NO: 818139 - protein, 556 aa, Homo sapiens
MQGDFAAAAGNLQTCLAVLGRALPTSRLDLACSLSWNVIRYSLQKLRLVRWLLKKVFQCRRATPATEAGFEDEAKTSARDAALAYHRLHQLHITGKLPAGSACSDVHMALCAVNLAECAEEKIPPSTLVEIHLTAAMGLKTRCGGKLGFLASYFLSRAQSLCGPEHSAVPDSLRWLCHPLGQKFFMERSWSVKSAAKESLYCAQRNPADPIAQVHQAFCKNLLERAIESLVKPQAKKKAGDQEEESCEFSSALEYLKLLHSFVDSVGVMSPPLSRSSVLKSALGPDIICRWWTSAITVAISWLQGDDAAVRSHFTKVERIPKALEVTESPLVKAIFHACRAMHASLPGKADGQQSSFCHCERASGHLWSSLNVSGATSDPALNHVVQLLTCDLLLSLRTALWQKQASASQAVGETYHASGAELAGFQRDLGSLRRLAHSFRPAYRKVFLHEATVRLMAGASPTRTHQLLEHSLRRRTTQSTKHGEVDAWPGQRERATAILLACRHLPLSFLSSPGQRAVLLAEAARTLEKVGDRRSCNDCQQMIVKLGGGTAIAAS

SEQ ID NO: 818140 - protein, 1315 aa, Homo sapiens
ARAQRKHGGGWHPSVRRCRAGVVGCHGRWRRHRPRVSLSGTAGGASALSRAMDDSGELGGLETMETLTELGDELTLGDIDEMLQFVSNQVGEFPDLFSEQLCSSFPGSGGSGSSSGSSGSSSSSSNGRGSSSGAVDPSVQRSFTQVTLPSFSPSAASPQAPTLQVKVSPTSVPTTPRATPILQPRPQPQPQPQTQLQQQTVMITPTFSTTPQTRIIQQPLIYQNAATSFQVLQPQVQSLVTSSQVQPVTIQQQVQTVQAQRVLTQTANGTLQTLAPATVQTVAAPQVQQVPVLVQPQIIKTDSLVLTTLKTDGSPVMAAVQNPALTALTTPIQTAALQVPTLVGSSGTILTTMPVMMGQEKVPIKQVPGGVKQLEPPKEGERRTTHNIIEKRYRSSINDKIIELKDLVMGTDAKMHKSGVLRKAIDYIKYLQQVNHKLRQENMVLKLANQKNKLLKGIDLGSLVDNEVDLKIEDFNQNVLLMSPPASDSGSQAGFSPYSIDSEPGSPLLDDAKVKDEPDSPPVALGMVDRSRILLCVLTFLCLSFNPLTSLLQWGGAHDSDQHPHSGSGRSVLSFESGSGGWFDWMMPTLLLWLVNGVIVLSVFVKLLVHGEPVIRPHSRSSVTFWRHRKQADLDLARGDFAAAAGNLQTCLAVLGRALPTSRLDLACSLSWNVIRYSLQKLRLVRWLLKKVFQCRRATPATEAGFEDEAKTSARDAALAYHRLHQLHITGKLPAGSACSDVHMALCAVNLAECAEEKIPPSTLVEIHLTAAMGLKTRCGGKLGFLASYFLSRAQSLCGPEHSAVPDSLRWLCHPLGQKFFMERSWSVKSAAKESLYCAQRNPADPIAQVHQAFCKNLLERAIESLVKPQAKKKAGDQEEESCEFSSALEYLKLLHSFVDSVGVMSPPLSRSSVLKSALGPDIICRWWTSAITVAISWLQGDDAAVRSHFTKVERIPKALEVTDHLHPHHQPWQLCPVTKIAFSTWHNRRAFDIPLLEIHVCVLGAFGTSDGQPCLLTPRLFLIGSEYSKRNCKMLQDRKAPRGPILRAKAVAFPIKQTLNRRQEGAEKTADVMVKPVSLTSSIERRSPLVKAIFHACRAMHASLPGKADGQQSSFCHCERASGHLWSSLNVSGATSDPALNHVVQLLTCDLLLSLRTALWQKQASASQAVGETYHASGAELAGFQRDLGSLRRLAHSFRPAYRKVFLHEATVRLMAGASPTRTHQLLEHSLRRRTTQSTKHGEVDAWPGQRERATAILLACRHLPLSFLSSPGQRAVLLAEAARTLEKVGDRRSCNDCQQMIVKLGGGTAIAAS

SEQ ID NO: 818141 - protein, 1082 aa, Homo sapiens
ARAQRKHGGGWHPSVRRCRAGVVGCHGRWRRHRPRVSLSGTAGGASALSRAMDDSGELGGLETMETLTELGDELTLGDIDEMLQFVSNQVGEFPDLFSEQLCSSFPGSGGSGSSSGSSGSSSSSSNGRGSSSGAVDPSVQRSFTQVTLPSFSPSAASPQAPTLQVKVSPTSVPTTPRATPILQPRPQPQPQPQTQLQQQTVMITPTFSTTPQTRIIQQPLIYQNAATSFQVLQPQVQSLVTSSQVQPVTIQQQVQTVQAQRVLTQTANGTLQTLAPATVQTVAAPQVQQVPVLVQPQIIKTDSLVLTTLKTDGSPVMAAVQNPALTALTTPIQTAALQVPTLVGSSGTILTTMPVMMGQEKVPIKQVPGGVKQLEPPKEGERRTTHNIIEKRYRSSINDKIIELKDLVMGTDAKMHKSGVLRKAIDYIKYLQQVNHKLRQENMVLKLANQKNKLLKGIDLGSLVDNEVDLKIEDFNQNVLLMSPPASDSGSQAGFSPYSIDSEPGSPLLDDAKVKDEPDSPPVALGMVDRSRILLCVLTFLCLSFNPLTSLLQWGGAHDSDQHPHSGSGRSVLSFESGSGGWFDWMMPTLLLWLVNGVIVLSVFVKLLVHGEPVIRPHSRSSVTFWRHRKQADLDLARGDFAAAAGNLQTCLAVLGRALPTSRLDLACSLSWNVIRYSLQKLRLVRWLLKKVFQCRRATPATEAGFEDEAKTSARDAALAYHRLHQLHITGKLPAGSACSDVHMALCAVNLAECAEEKIPPSTLVEIHLTAAMGLKTRCGGKLGFLASYFLSRAQSLCGPEHSAVPDSLRWLCHPLGQKFFMERSWSVKSAAKESLYCAQRNPADPIAQVHQAFCKNLLERAIESLVKPQAKKKAGDQEEESCEFSSALEYLKLLHSFVDSVGVMSPPLSRSSVLKSALGPDIICRWWTSAITVAISWLQGDDAAVRSHFTKVERIPKALEVTEPAEPCMPHSLGKQMGSRVPSAIARGPVATYGAASTSVGPPLTLPSTTWSSCSPVTCYCRYGQRSGKNRPVPARLWGRPTTRQALNWRASNGTWAACAGWHTASAQHTARCSCMKPPCA

SEQ ID NO: 818142 - protein, 1072 aa, Homo sapiens
ARAQRKHGGGWHPSVRRCRAGVVGCHGRWRRHRPRVSLSGTAGGASALSRAMDDSGELGGLETMETLTELGDELTLGDIDEMLQFVSNQVGEFPDLFSEQLCSSFPGSGGSGSSSGSSGSSSSSSNGRGSSSGAVDPSVQRSFTQVTLPSFSPSAASPQAPTLQVKVSPTSVPTTPRATPILQPRPQPQPQPQTQLQQQTVMITPTFSTTPQTRIIQQPLIYQNAATSFQVLQPQVQSLVTSSQVQPVTIQQQVQTVQAQRVLTQTANGTLQTLAPATVQTVAAPQVQQVPVLVQPQIIKTDSLVLTTLKTDGSPVMAAVQNPALTALTTPIQTAALQVPTLVGSSGTILTTMPVMMGQEKVPIKQVPGGVKQLEPPKEGERRTTHNIIEKRYRSSINDKIIELKDLVMGTDAKMHKSGVLRKAIDYIKYLQQVNHKLRQENMVLKLANQKNKLLKGIDLGSLVDNEVDLKIEDFNQNVLLMSPPASDSGSQAGFSPYSIDSEPGSPLLDDAKVKDEPDSPPVALGMVDRSRILLCVLTFLCLSFNPLTSLLQWGGAHDSDQHPHSGSGRSVLSFESGSGGWFDWMMPTLLLWLVNGVIVLSVFVKLLVHGEPVIRPHSRSSVTFWRHRKQADLDLARGDFAAAAGNLQTCLAVLGRALPTSRLDLACSLSWNVIRYSLQKLRLVRWLLKKVFQCRRATPATEAGFEDEAKTSARDAALAYHRLHQLHITGKLPAGSACSDVHMALCAVNLAECAEEKIPPSTLVEIHLTAAMGLKTRCGGKLGFLASYFLSRAQSLCGPEHSAVPDSLRWLCHPLGQKFFMERSWSVKSAAKESLYCAQRNPADPIAQVHQAFCKNLLERAIESLVKPQAKKKAGDQEEESCEFSSALEYLKLLHSFVDSVGVMSPPLSRSSVLKSALGPDIICRWWTSAITVAISWLQGDDAAVRSHFTKVERIPKALEVTESPLVKAIFHACRAMHASLPGKADGQQSSFCHCERASGHLWSSLNVSGATSDPALNHVVQLLTCDLLLSLRTALWQKQASASQAVGETYHASGAELAGFQCSCMKPPCA

SEQ ID NO: 818143 - protein, 274 aa, Homo sapiens
TDIISRSRCISSRGSCWHFWLQGDDAAVRSHFTKVERIPKALEVTESPLVKAIFHACRAMHASLPGKADGQQSSFCHCERASGHLWSSLNVSGATSDPALNHVVQLLTCDLLLSLRTALWQKQASASQAVGETYHASGAELAGFQRDLGSLRRLAHSFRPAYRKVFLHEATVRLMAGASPTRTHQLLEHSLRRRTTQSTKHGEVDAWPGQRERATAILLACRHLPLSFLSSPGQRAVLLAEAARTLEKVGDRRSCNDCQQMIVKLGGGTAIAAS

SEQ ID NO: 818144 - protein, 1122 aa, Homo sapiens
ARAQRKHGGGWHPSVRRCRAGVVGCHGRWRRHRPRVSLSGTAGGASALSRAMDDSGELGGLETMETLTELGDELTLGDIDEMLQFVSNQVGEFPDLFSEQLCSSFPGSGGSGSSSGSSGSSSSSSNGRGSSSGAVDPSVQRSFTQVTLPSFSPSAASPQAPTLQVKVSPTSVPTTPRATPILQPRPQPQPQPQTQLQQQTVMITPTFSTTPQTRIIQQPLIYQNAATSFQVLQPQVQSLVTSSQVQPVTIQQQVQTVQAQRVLTQTANGTLQTLAPATVQTVAAPQVQQVPVLVQPQIIKTDSLVLTTLKTDGSPVMAAVQNPALTALTTPIQTAALQVPTLVGSSGTILTTMPVMMGQEKVPIKQVPGGVKQLEPPKEGERRTTHNIIEKRYRSSINDKIIELKDLVMGTDAKMHKSGVLRKAIDYIKYLQQVNHKLRQENMVLKLANQKNKLLKGIDLGSLVDNEVDLKIEDFNQNVLLMSPPASDSGSQAGFSPYSIDSEPGSPLLDDAKVKDEPDSPPVALGMVDRSRILLCVLTFLCLSFNPLTSLLQWGGAHDSDQHPHSGSGRSVLSFESGSGGWFDWMMPTLLLWLVNGVIVLSVFVKLLVHGEPVIRPHSRSSVTFWRHRKQADLDLARGDFAAAAGNLQTCLAVLGRALPTSRLDLACSLSWNVIRYSLQKLRLVRWLLKKVFQCRRATPATEAGFEDEAKTSARDAALAYHRLHQLHITGKLPAGSACSDVHMALCAVNLAECAEEKIPPSTLVEIHLTAAMGLKTRCGGKLGFLASYFLSRAQSLCGPEHSAVPDSLRWLCHPLGQKFFMERSWSVKSAAKESLYCAQRNPADPIAQVHQAFCKNLLERAIESLVKPQAKKKAGDQEEESCEFSSALEYLKLLHSFVDSVGVMSPPLSRSSVLKSALGPDIICRWWTSAITVAISWLQGDDAAVRSHFTKVERIPKALEVTESPLVKAIFHACRAMHASLPGKADGQQSSFCHCERASGHLWSSLNVSGATSDPALNHVVQLLTCDLLLSLRTALWQKQASASQAVGETYHASGAELAGFQRDLGSLRRLAHSFRPAYRKVFLHEATVRLMAGASPTRTHQLSCCSVLILSLGLRSLPWA

SEQ ID NO: 818145 - protein, 990 aa, Homo sapiens
ARAQRKHGGGWHPSVRRCRAGVVGCHGRWRRHRPRVSLSGTAGGASALSRAMDDSGELGGLETMETLTELGDELTLGDIDEMLQFVSNQVGEFPDLFSEQLCSSFPGSGGSGSSSGSSGSSSSSSNGRGSSSGAVDPSVQRSFTQVTLPSFSPSAASPQAPTLQVKVSPTSVPTTPRATPILQPRPQPQPQPQTQLQQQTVMITPTFSTTPQTRIIQQPLIYQNAATSFQVLQPQVQSLVTSSQVQPVTIQQQVQTVQAQRVLTQTANGTLQTLAPATVQTVAAPQVQQVPVLVQPQIIKTDSLVLTTLKTDGSPVMAAVQNPALTALTTPIQTAALQVPTLVGSSGTILTTMPVMMGQEKVPIKQVPGGVKQLEPPKEGERRTTHNIIEKRYRSSINDKIIELKDLVMGTDAKMHKSGVLRKAIDYIKYLQQVNHKLRQENMVLKLANQKNKLLKGIDLGSLVDNEVDLKIEDFNQNVLLMSPPASDSGSQAGFSPYSIDSEPGSPLLDDAKVKDEPDSPPVALGMVDRSRILLCVLTFLCLSFNPLTSLLQWGGAHDSDQHPHSGSGRSVLSFESGSGGWFDWMMPTLLLWLVNGVIVLSVFVKLLVHGEPVIRPHSRSSVTFWRHRKQADLDLARGDFAAAAGNLQTCLAVLGRALPTSRLDLACSLSWNVIRYSLQKLRLVRWLLKKVFQCRRATPATEAGFEDEAKTSARDAALAYHRLHQLHITGKLPAGSACSDVHMALCAVNLAECAEEKIPPSTLVEIHLTAAMGLKTRCGGKLGFLASYFLSRAQSLCGPEHSAVPDSLRWLCHPLGQKFFMERSWSVKSAAKESLYCAQRNPADPIAQVHQAFCKNLLERAIESLVKPQAKKKAGDQEEESCEFSSALEYLKLLHSFVDSVGVMSPPLSRSSVLKSALGPDIICRWWTSAITVAISWLQGDDAAVRSHFTKVERIPKALEVTESPLVKAIFHLFASSVFIRLSLGDSSL

SEQ ID NO: 818146 - protein, 238 aa, Homo sapiens
ASSSMTATRSLVKQFFRLHKSCCACCHVCELSSRKYSSFCHCERASGHLWSSLNVSGATSDPALNHVVQLLTCDLLLSLRTALWQKQASASQAVGETYHASGAELAGFQRDLGSLRRLAHSFRPAYRKVFLHEATVRLMAGASPTRTHQLLEHSLRRRTTQSTKHGEVDAWPGQRERATAILLACRHLPLSFLSSPGQRAVLLAEAARTLEKVGDRRSCNDCQQMIVKLGGGTAIAAS

SEQ ID NO: 818147 - protein, 342 aa, Homo sapiens
CTRCSAVVTTNLLCCFRGCVYYCVIFFLCLTEACSPSKYLCGWLSSGFFSLSVGFLPVVFLSATKCSLSPSFRTVARVHKKHLWPKRHRNICPLRTSSSDFIVNPPGHCSHVCRPGKRDLIQALINPHGGVSYPGTGSDGFLGIQPCAHARNALGCAVCPSVLRGHTSLAVVQLLTCDLLLSLRTALWQKQASASQAVGETYHASGAELAGFQRDLGSLRRLAHSFRPAYRKVFLHEATVRLMAGASPTRTHQLLEHSLRRRTTQSTKHGEVDAWPGQRERATAILLACRHLPLSFLSSPGQRAVLLAEAARTLEKVGDRRSCNDCQQMIVKLGGGTAIAAS

SEQ ID NO: 818148 - protein, 1028 aa, Homo sapiens
ARAQRKHGGGWHPSVRRCRAGVVGCHGRWRRHRPRVSLSGTAGGASALSRAMDDSGELGGLETMETLTELGDELTLGDIDEMLQFVSNQVGEFPDLFSEQLCSSFPGSGGSGSSSGSSGSSSSSSNGRGSSSGAVDPSVQRSFTQVTLPSFSPSAASPQAPTLQVKVSPTSVPTTPRATPILQPRPQPQPQPQTQLQQQTVMITPTFSTTPQTRIIQQPLIYQNAATSFQVLQPQVQSLVTSSQVQPVTIQQQVQTVQAQRVLTQTANGTLQTLAPATVQTVAAPQVQQVPVLVQPQIIKTDSLVLTTLKTDGSPVMAAVQNPALTALTTPIQTAALQVPTLVGSSGTILTTMPVMMGQEKVPIKQVPGGVKQLEPPKEGERRTTHNIIEKRYRSSINDKIIELKDLVMGTDAKMHKSGVLRKAIDYIKYLQQVNHKLRQENMVLKLANQKNKLLKGIDLGSLVDNEVDLKIEDFNQNVLLMSPPASDSGSQAGFSPYSIDSEPGSPLLDDAKVKDEPDSPPVALGMVDRSRILLCVLTFLCLSFNPLTSLLQWGGAHDSDQHPHSGSGRSVLSFESGSGGWFDWMMPTLLLWLVNGVIVLSVFVKLLVHGEPVIRPHSRSSVTFWRHRKQADLDLARGDFAAAAGNLQTCLAVLGRALPTSRLDLACSLSWNVIRYSLQKLRLVRWLLKKVFQCRRATPATEAGFEDEAKTSARDAALAYHRLHQLHITGKLPAGSACSDVHMALCAVNLAECAEEKIPPSTLVEIHLTAAMGLKTRCGGKLGFLASYFLSRAQSLCGPEHSAVPDSLRWLCHPLGQKFFMERSWSVKSAAKESLYCAQRNPADPIAQVHQAFCKNLLERAIESLVKPQAKKKAGDQEEESCEFSSALEYLKLLHSFVDSVGVMSPPLSRSSVLKSALGPDIICRWWTSAITVAISWLQGDDAAVRSHFTKVERIPKALEVTESPLVKAIFHACRAMHASLPGKADGQQSSFCHCERASGHLWSSLNVSGATSDPALNHVAAANKKH

SEQ ID NO: 818149 - protein, 981 aa, Homo sapiens
ARAQRKHGGGWHPSVRRCRAGVVGCHGRWRRHRPRVSLSGTAGGASALSRAMDDSGELGGLETMETLTELGDELTLGDIDEMLQFVSNQVGEFPDLFSEQLCSSFPGSGGSGSSSGSSGSSSSSSNGRGSSSGAVDPSVQRSFTQVTLPSFSPSAASPQAPTLQVKVSPTSVPTTPRATPILQPRPQPQPQPQTQLQQQTVMITPTFSTTPQTRIIQQPLIYQNAATSFQVLQPQVQSLVTSSQVQPVTIQQQVQTVQAQRVLTQTANGTLQTLAPATVQTVAAPQVQQVPVLVQPQIIKTDSLVLTTLKTDGSPVMAAVQNPALTALTTPIQTAALQVPTLVGSSGTILTTMPVMMGQEKVPIKQVPGGVKQLEPPKEGERRTTHNIIEKRYRSSINDKIIELKDLVMGTDAKMHKSGVLRKAIDYIKYLQQVNHKLRQENMVLKLANQKNKLLKGIDLGSLVDNEVDLKIEDFNQNVLLMSPPASDSGSQAGFSPYSIDSEPGSPLLDDAKVKDEPDSPPVALGMVDRSRILLCVLTFLCLSFNPLTSLLQWGGAHDSDQHPHSGSGRSVLSFESGSGGWFDWMMPTLLLWLVNGVIVLSVFVKLLVHGEPVIRPHSRSSVTFWRHRKQADLDLARGDFAAAAGNLQTCLAVLGRALPTSRLDLACSLSWNVIRYSLQKLRLVRWLLKKVFQCRRATPATEAGFEDEAKTSARDAALAYHRLHQLHITGKLPAGSACSDVHMALCAVNLAECAEEKIPPSTLVEIHLTAAMGLKTRCGGKLGFLASYFLSRAQSLCGPEHSAVPDSLRWLCHPLGQKFFMERSWSVKSAAKESLYCAQRNPADPIAQVHQAFCKNLLERAIESLVKPQAKKKAGDQEEESCEFSSALEYLKLLHSFVDSVGVMSPPLSRSSVLKSALGPDIICRWWTSAITVAISWLQGDDAAVRSHFTKVERIPKALEVTECVTLLGHSLASLQGNLV

SEQ ID NO: 818150 - protein, 1016 aa, Homo sapiens
ARAQRKHGGGWHPSVRRCRAGVVGCHGRWRRHRPRVSLSGTAGGASALSRAMDDSGELGGLETMETLTELGDELTLGDIDEMLQFVSNQVGEFPDLFSEQLCSSFPGSGGSGSSSGSSGSSSSSSNGRGSSSGAVDPSVQRSFTQVTLPSFSPSAASPQAPTLQVKVSPTSVPTTPRATPILQPRPQPQPQPQTQLQQQTVMITPTFSTTPQTRIIQQPLIYQNAATSFQVLQPQVQSLVTSSQVQPVTIQQQVQTVQAQRVLTQTANGTLQTLAPATVQTVAAPQVQQVPVLVQPQIIKTDSLVLTTLKTDGSPVMAAVQNPALTALTTPIQTAALQVPTLVGSSGTILTTMPVMMGQEKVPIKQVPGGVKQLEPPKEGERRTTHNIIEKRYRSSINDKIIELKDLVMGTDAKMHKSGVLRKAIDYIKYLQQVNHKLRQENMVLKLANQKNKLLKGIDLGSLVDNEVDLKIEDFNQNVLLMSPPASDSGSQAGFSPYSIDSEPGSPLLDDAKVKDEPDSPPVALGMVDRSRILLCVLTFLCLSFNPLTSLLQWGGAHDSDQHPHSGSGRSVLSFESGSGGWFDWMMPTLLLWLVNGVIVLSVFVKLLVHGEPVIRPHSRSSVTFWRHRKQADLDLARGDFAAAAGNLQTCLAVLGRALPTSRLDLACSLSWNVIRYSLQKLRLVRWLLKKVFQCRRATPATEAGFEDEAKTSARDAALAYHRLHQLHITGKLPAGSACSDVHMALCAVNLAECAEEKIPPSTLVEIHLTAAMGLKTRCGGKLGFLASYFLSRAQSLCGPEHSAVPDSLRWLCHPLGQKFFMERSWSVKSAAKESLYCAQRNPADPIAQVHQAFCKNLLERAIESLVKPQAKKKAGDQEEESCEFSSALEYLKLLHSFVDSVGVMSPPLSRSSVLKSALGPDIICRWWTSAITVAISWLQGDDAAVRSHFTKVERIPKALEVTDHLHPHHQPWQLCPVTKIAFSTWHNRRAFDIPLWRFMSASWGHSALVMGSPAC

SEQ ID NO: 818151 - protein, 799 aa, Homo sapiens
ARAQRKHGGGWHPSVRRCRAGVVGCHGRWRRHRPRVSLSGTAGGASALSRAMDDSGELGGLETMETLTELGDELTLGDIDEMLQFVSNQVGEFPDLFSEQLCSSFPGSGGSGSSSGSSGSSSSSSNGRGSSSGAVDPSVQRSFTQVTLPSFSPSAASPQAPTLQVKVSPTSVPTTPRATPILQPRPQPQPQPQTQLQQQTVMITPTFSTTPQTRIIQQPLIYQNAATSFQVLQPQVQSLVTSSQVQPVTIQQQVQTVQAQRVLTQTANGTLQTLAPATVQTVAAPQVQQVPVLVQPQIIKTDSLVLTTLKTDGSPVMAAVQNPALTALTTPIQTAALQVPTLVGSSGTILTTMPVMMGQEKVPIKQVPGGVKQLEPPKEGERRTTHNIIEKRYRSSINDKIIELKDLVMGTDAKMHKSGVLRKAIDYIKYLQQVNHKLRQENMVLKLANQKNKLLKGIDLGSLVDNEVDLKIEDFNQNVLLMSPPASDSGSQAGFSPYSIDSEPGSPLLDDAKVKDEPDSPPVALGMVDRSRILLCVLTFLCLSFNPLTSLLQWGGAHDSDQHPHSGSGRSVLSFESGSGGWFDWMMPTLLLWLVNGVIVLSVFVKLLVHGEPVIRPHSRSSVTFWRHRKQADLDLARGDFAAAAGNLQTCLAVLGRALPTSRLDLACSLSWNVIRYSLQKLRLVRWLLKKVFQCRRATPATEAGFEDEAKTSARDAALAYHRLHQLHITGKLPAGSACSDVHMALCAVNLAECAEEKIPPSTLVEIHLTAAMGLKTRCGGKLGFLAVSTLRFPSVNLP

SEQ ID NO: 818152 - protein, 584 aa, Homo sapiens
ARAQRKHGGGWHPSVRRCRAGVVGCHGRWRRHRPRVSLSGTAGGASALSRAMDDSGELGGLETMETLTELGDELTLGDIDEMLQFVSNQVGEFPDLFSEQLCSSFPGSGGSGSSSGSSGSSSSSSNGRGSSSGAVDPSVQRSFTQVTLPSFSPSAASPQAPTLQVKVSPTSVPTTPRATPILQPRPQPQPQPQTQLQQQTVMITPTFSTTPQTRIIQQPLIYQNAATSFQVLQPQVQSLVTSSQVQPVTIQQQVQTVQAQRVLTQTANGTLQTLAPATVQTVAAPQVQQVPVLVQPQIIKTDSLVLTTLKTDGSPVMAAVQNPALTALTTPIQTAALQVPTLVGSSGTILTTMPVMMGQEKVPIKQVPGGVKQLEPPKEGERRTTHNIIEKRYRSSINDKIIELKDLVMGTDAKMHKSGVLRKAIDYIKYLQQVNHKLRQENMVLKLANQKNKLLKGIDLGSLVDNEVDLKIEDFNQNVLLMSPPASDSGSQAGFSPYSIDSEPGSPLLDDAKVKDEPDSPPVALGMVDRSRILLCVLTFLCLSFNPLTSLLQWGGAHDSDQHPHSGSGRSVLSFESGRWRPLA

SEQ ID NO: 818153 - protein, 349 aa, Homo sapiens
ARAQRKHGGGWHPSVRRCRAGVVGCHGRWRRHRPRVSLSGTAGGASALSRAMDDSGELGGLETMETLTELGDELTLGDIDEMLQFVSNQVGEFPDLFSEQLCSSFPGSGGSGSSSGSSGSSSSSSNGRGSSSGAVDPSVQRSFTQVTLPSFSPSAASPQAPTLQVKVSPTSVPTTPRATPILQPRPQPQPQPQTQLQQQTVMITPTFSTTPQTRIIQQPLIYQNAATSFQVLQPQVQSLVTSSQVQPVTIQQQVQTVQAQRVLTQTANGTLQTLAPATVQTVAAPQVQQVPVLVQPQIIKTDSLVLTTLKTDGSPVMAAVQNPALTASPPLSRRLPFKYQPWWAAVGPF

SEQ ID NO: 818154 - protein, 437 aa, Homo sapiens
ARAQRKHGGGWHPSVRRCRAGVVGCHGRWRRHRPRVSLSGTAGGASALSRAMDDSGELGGLETMETLTELGDELTLGDIDEMLQFVSNQVGEFPDLFSEQLCSSFPGSGGSGSSSGSSGSSSSSSNGRGSSSGAVDPSVQRSFTQVTLPSFSPSAASPQAPTLQVKVSPTSVPTTPRATPILQPRPQPQPQPQTQLQQQTVMITPTFSTTPQTRIIQQPLIYQNAATSFQVLQPQVQSLVTSSQVQPVTIQQQVQTVQAQRVLTQTANGTLQTLAPATVQTVAAPQVQQVPVLVQPQIIKTDSLVLTTLKTDGSPVMAAVQNPALTALTTPIQTAALQVPTLVGSSGTILTTMPVMMGQEKVPIKQVPGGVKQLEPPKEGERRTTHNIIEKRYRSSINDKIIELKDLVMGTDAKVGAKQNCVLCSTISPLPVFASGA

SEQ ID NO: 818155 - protein, 437 aa, Homo sapiens; identical to SEQ ID NO: 818154

SEQ ID NO: 818156 - protein, 849 aa, Homo sapiens
MAAAAPAAAAASSEAPAASATAEPEAGDQDSREVRVLQSLRGKICEAKNLLPYLGPHKMRDCFCTINLDQEEVYRTQVVEKSLSPFFSEEFYFEIPRTFQYLSFYVYDKNVLQRDLRIGKVAIKKEDLCNHSGKETWFSLQPVDSNSEVQGKVHLELKLNELITENGTVCQQLVVHIKACHGLPLINGQSCDPYATVSLVGPSRNDQKKTKVKKKTSNPQFNEIFYFEVTRSSSYTRKSQFQVEEEDIEKLEIRIDLWNNGNLVQDVFLGEIKVPVNVLRTDSSHQAWYLLQPRDNGNKSSKTDDLGSLRLNICYTEDYVLPSEYYGPLKTLLLKSPDVQPISASAAYILSEICRDKNDAVLPLVRLLLHHDKLVPFATAVAELDLKDTQDANTIFRGNSLATRCLDEMMKIVGGHYLKVTLKPILDEICDSSKSCEIDPIKLKEGDNVENNKENLRYYVDKLFNTIVKSSMSCPTVMCDIFYSLRQMATQRFPNDPHVQYSAVSSFVFLRFFAVAVVSPHTFHLRPHHPDAQTIRTLTLISKTIQTLGSWGSLSKSKSSFKETFMCEFFKMFQEEGYIIAVKKFLDEISSTETKESSGTSEPVHLKEGEMYKRAQGRTRIGKKNFKKRWFCLTSRELTYHKQPGKDAIYTIPVKNILAVEKLEESSFNKKNMFQVIHTEKPLYVQANNCVEANEWIDVLCRVSRCNQNRLSFYHPSVYLNGNWLCCQETGENTLGCKPCTAGVPADIQIDIDEDRETERIYSLFTLSLLKLQKMEEACGTIAVYQGPQKEPDDYSNFVIEDSVTTFKTIQQIKSIIEKLDEPHEKYRKKRSSSAKYGSKENPIVGKAS

SEQ ID NO: 818157 - protein, 849 aa, Homo sapiens; identical to SEQ ID NO: 818156

SEQ ID NO: 818158 - protein, 849 aa, Homo sapiens; identical to SEQ ID NO: 818156

SEQ ID NO: 818159 - protein, 849 aa, Homo sapiens; identical to SEQ ID NO: 818156

SEQ ID NO: 818160 - protein, 278 aa, Homo sapiens [sequence omitted]

SEQ ID NO: 818161 - protein, 926 aa, Homo sapiens
MYKRAQGRTRIGKKNFKKRWFCLTSRELTYHKQPGKDAIYTIPVKNILAVEKLEESSFNKKNMFQVIHTEKPLYVQANNCVEANEWIDVLCRVSRCNQNRLSFYHPSVYLNGNWLCCQETGENTLGCKPCTAGVPADIQIDIDEDRETERIYSLFTLSLLKLQKMEEACGTIAVYQGPQKEPDDYSNFVIEDSVTTFKTIQQIKSIIEKLDEPHEKYRKKRSSSAKYGSKENPIVGKASLSLTDWFRRTGKYYFSWSFSIHHVFCSWYLRMSIRFNVICLHIVFNNLIIEINCLGILVLMYYREFKAQDSLHTCVTKSMFLQLLFNRKNLPEKSFVTKGELLRSKKTISSCNTLFCGLVFTTISACSILPTLCFTRKFQFMTVQSFSFSSCRPSHFKKRKKIRSVFPLVHQSLQVPFKTVIETLENCQSILESWEILLPKDVNKTQDRRNQGICAIVCILFTFGISDGKRSNETTEIVFIVLNTRYSFSGFESLTWLLRTSLQKESKQGMKVVGKSLHSPTISCCNKGHHKDALLIVFGSDLPENSHLAHFNNLDCSRFDFRYSMVSSLYDQLNDQCLSLKKCFPENVYISLLFPYCLLAKWNLGKQLFEDFFTLEIYFVLKTLTVNKQSKQVATLKLRDTLCFISIKNHGTLILSFLIQNIFYMWYFEPWSIYMFLFKTVTFNVSLLVVLFLSEHKLYFKIYFANFVIGGKSFLNYIVIRELFLKTTGIQSKLFHEKNITEQCISLNDFVKINELCLSLHYGGYYSQLILKTSLKESFKFYKLVDSINYTDFIHLKEFEPFNKFLILNIAFRLKFLLRVSEMSACEEHVNIARYQSLFFSGFLVLCFVFLRQKKYASSISNTKSPIVIVLKIMVMITGTKAVCIYNSGFERRRVQPSSSFLHMTLLNSQFDWNYTNLAQPKKGVM

SEQ ID NO: 818162 - protein, 935 aa, Homo sapiens
MYKRAQGRTRIGKKNFKKRWFCLTSRELTYHKQPGKDAIYTIPVKNILAVEKLEESSFNKKNMFQVIHTEKPLYVQANNCVEANEWIDVLCRVSRCNQNRLSFYHPSVYLNGNWLCCQETGENTLGCKPCTAGVPADIQIDIDEDRETERIYSLFTLSLLKLQKMEEACGTIAVYQGPQKEPDDYSNFVIEDSVTTFKTIQQIKSIIEKLDEPHEKYRKKRSSSAKYGSKENPIVGKASLSLTDWFRRTGKYYFSWSFSIHHVFCSWYLRMSIRFNVICLHIVFNNLIIEINCLGILVLMYYREFKAQDSLHTCVTKSMFLQLLFNRKNLPEKSFVTKGELLRSKKTISSCNTLFCGLVFTTISACSILPTLCFTRKFQFMTVQSFSFSSCRPSHFKKRKKIRSVFPLVHQSLQVPFKTVIETLENCQSILESWEILLPKDVNKTQDRRNQGICAIVCILFTFGISDGKRSNETTEIVFIVLNTRYSFSGFESLTWLLRTSLQKESKQGMKVVGKSLHSPTISCCNKGHHKDALLIVFGSDLPENSHLAHFNNLDCSRFDFRYSMVSSLYDQLNDQCLSLKIMLPENVYISLLFPYCLLAKWNLGKQLFEDFFTLEIYFVLKTLTVNKQSKQVATLKLRDTLCFISIKNHGTLILSFLIQNIFYMWYFEPWSIYMFLFKTVTFNVSLLVVLFLSEHKLYFKIYFANFVIGGKSFLNYIVIRELFLKTTGIQSKLFHEKNITEQCISLNDFVKINELCLSLHYGGYYSQLILKTSLKESFKFYKLVDSINYTDFIHLKEFSHLKISYSQIAFRLKFLLRVSEMSACEEHVNIARYQSLFFSGFLVLCFFFKGKRNMHLAFLIPNPQCDCFKDHGMITGTKAVCIYNSGFERRRVQPSSSFLHMTLLNSQFDLELTNLAQPKKGDNVKLNYFSLKVF

SEQ ID NO: 818163 - protein, 239 aa, Homo sapiens [sequence omitted]

SEQ ID NO: 818164 - protein, 404 aa, Homo sapiens
MAAAAPAAAAASSEAPAASATAEPEAGDQDSREVRVLQSLRGKICEAKNLLPYLGPHKMRDCFCTINLDQEEVYRTQVVEKSLSPFFSEEFYFEIPRTFQYLSFYVYDKNVLQRDLRIGKVAIKKEDLCNHSGKETWFSLQPVDSNSEVQGKVHLELKLNELITENGTVCQQLVVHIKACHGLPLINGQSCDPYATVSLVGPSRNDQKKTKVKKKTSNPQFNEIFYFEVTRSSSYTRKSQFQVEEEDIEKLEIRIDLWNNGNLVQDVFLGEIKVPVNVLRTDSSHQAWYLLQPRDNGNKSSKTDDLGSLRLNICYTEDYVLPSEYYGPLKTLLLKSPDVQPISASAAYILSEICRDKNDAVLPLVRLLLHHDKLVPFATAVAELDLKDTQDANTIFNKEVPSSI

SEQ ID NO: 818165 - protein, 629 aa, Homo sapiens
MAAAAPAAAAASSEAPAASATAEPEAGDQDSREVRVLQSLRGKICEAKNLLPYLGPHKMRDCFCTINLDQEEVYRTQVVEKSLSPFFSEEFYFEIPRTFQYLSFYVYDKNVLQRDLRIGKVAIKKEDLCNHSGKETWFSLQPVDSNSEVQGKVHLELKLNELITENGTVCQQLVVHIKACHGLPLINGQSCDPYATVSLVGPSRNDQKKTKVKKKTSNPQFNEIFYFEVTRSSSYTRKSQFQVEEEDIEKLEIRIDLWNNGNLVQDVFLGEIKVPVNVLRTDSSHQAWYLLQPRDNGNKSSKTDDLGSLRLNICYTEDYVLPSEYYGPLKTLLLKSPDVQPISASAAYILSEICRDKNDAVLPLVRLLLHHDKLVPFATAVAELDLKDTQDANTIFRGNSLATRCLDEMMKIVGGHYLKVTLKPILDEICDSSKSCEIDPIKLKEGDNVENNKENLRYYVDKLFNTIVKSSMSCPTVMCDIFYSLRQMATQRFPNDPHVQYSAVSSFVFLRFFAVAVVSPHTFHLRPHHPDAQTIRTLTLISKTIQTLGSWGSLSKSKSSFKETFMCEFFKMFQEEGYIIAVKKFLDEISSTETKESSGTSEPVHLKEGEMYELMEELGLEQPVVVLCL

SEQ ID NO: 818166 - protein, 352 aa, Homo sapiens
ERRSRAAPEPRFSQWRRRDGRAGSARRRVLSFEPRCSELVGGPRGERGSLGGEPGVSCLKMHSDAAAVNFQLNSHLSTLANIHKIYHTLNKLNLTEDIGQDDHQTGSLRSCSSSDCFNKVMPPRKKRRPASGDDLSAKKSRHDSMYRKYDSTRIKTEEEAFSSKRCLEWFYEYAGTDDVVGPEGMEKFCEDIGVEPENVVMLVLAWKLDAQNMGYFTLQEWLKGMTSLQCDTTEKLRNTLDYLRSFLNDSTNFKLIYRYAFDFAREKDQRSLDINTAKCMLGLLLGKIWPLFPVFHQFLEQSKYKVINKDQWCNVLEFSRTINLDLSNYDEDGAWPVLLDEFVEWYKDKQMS

SEQ ID NO: 818167 - protein, 329 aa, Homo sapiens
  misc_feature (3)..(4): Xaa can be any naturally occurring amino acid
QIXXWPGSFEPRCSELVGGPRGERGSLGGEPGVSCLKMHSDAAAVNFQLNSHLSTLANIHKIYHTLNKLNLTEDIGQDDHQTGSLRSCSSSDCFNKVMPPRKKRRPASGDDLSAKKSRHDSMYRKYDSTRIKTEEEAFSSKRCLEWFYEYAGTDDVVGPEGMEKFCEDIGVEPENVVMLVLAWKLDAQNMGYFTLQEWLKGMTSLQCDTTEKLRNTLDYLRSFLNDSTNFKLIYRYAFDFAREKDQRSLDINTAKCMLGLLLGKIWPLFPVFHQFLEQSKYKVINKDQWCNVLEFSRTINLDLSNYDEDGAWPVLLDEFVEWYKDKQMS

SEQ ID NO: 818168 - protein, 352 aa, Homo sapiens; identical to SEQ ID NO: 818166

SEQ ID NO: 818169 - protein, 284 aa, Homo sapiens
ERRSRAAPEPRFSQWRRRDGRAGSARRRVLSFEPRCSELVGGPRGERGSLGGEPGVSCLKMHSDAAAVNFQLNSHLSTLANIHKIYHTLNKLNLTEDIGQDDHQTGSLRSCSSSDCFNKVMPPRKKRRPASGDDLSAKKSRHDSMYRKYDSTRIKTEEEAFSSKRCLEWFYEYAGTDDVVGPEGMEKFCEDIGVEPENVVMLVLAWKLDAQNMGYFTLQEWLKGMTSLQCDTTEKLRNTLDYLRSFLNDSTNFKLIYRYAFDFARAEDGVSDCELLAGTLAEQE

SEQ ID NO: 818170 - protein, 290 aa, Homo sapiens
ERRSRAAPEPRFSQWRRRDGRAGSARRRVLSFEPRCSELVGGPRGERGSLGGEPGVSCLKMHSDAAAVNFQLNSHLSTLANIHKIYHTLNKLNLTEDIGQDDHQTGSLRSCSSSDCFNKVMPPRKKRRPASGDDLSAKKSRHDSMYRKYDSTRIKTEEEAFSSKRCLEWFYEYAGTDDVVGPEGMEKFCEDIGVEPENVVMLVLAWKLDAQNMGYFTLQEWLKGMTSLQCDTTEKLRNTLDYLRSFLNDSTNFKLIYRYAFDFARAEDGVSDCELLAGTLAEQEKRTSAA

SEQ ID NO: 818171 - protein, 180 aa, Homo sapiens
  misc_feature (3)..(4): Xaa can be any naturally occurring amino acid
QIXXWPGSFEPRCSELVGGPRGERGSLGGEPGVSCLKMHSDAAAVNFQLNSHLSTLANIHKIYHTLNKLNLTEDIGQDDHQTGSLRSCSSSDCFNKVMPPRKKRRPASGDDLSAKKSRHDSMYRKYDSTRIKTEEEAFSSKRCLEWFYEYAGTDDVVGPEGMEKFCEDIGVEPENVSQTY

SEQ ID NO: 818172 - protein, 198 aa, Homo sapiens
GWTCDEGPRSECPGCMEVEAALGCSGQGRGCGGVAPAGRGRERASERGTRVRISKGLSGAGGSVRKADFQLNSHLSTLANIHKIYHTLNKLNLTEDIGQDDHQTGSLRSCSSSDCFNKVMPPRKKRRPASGDDLSAKKSRHDSMYRKYDSTRIKTEEEAFSSKRCLEWFYEYAGTDDVVGPEGMEKFCEDIGVEPENF

SEQ ID NO: 818173 - protein, 83 aa, Homo sapiens
  misc_feature (3)..(4): Xaa can be any naturally occurring amino acid
QIXXWPGSFEPRCSELVGGPRGERGSLGGEPGVSCLKMHSDAAAVNFQLNSHLSTLANIHKIYHTLNKLEVCGLAVLQTALIK

SEQ ID NO: 818174 - protein, 104 aa, Homo sapiens
LLHSMVCCCRLPHLCYREKDQRSLDINTAKCMLGLLLGKIWPLFPVFHQFLEQSKYKVINKDQWCNVLEFSRTINLDLSNYDEDGAWPVLLDEFVEWYKDKQMS

SEQ ID NO: 818175 - protein, 317 aa, Homo sapiens
ERRSRAAPEPRFSQWRRRDGRAGSARRRVLSFEPRCSELVGGPRGERGSLGGEPGVSCLKMHSDAAAVNFQLNSHLSTLANIHKIYHTLNKLNLTEDIGQDDHQTGSLRSCSSSDCFNKVMPPRKKRRPASGDDLSAKKSRHDSMYRKYDSTRIKTEEEAFSSKRCLEWFYEYAGTDDVVGPEGMEKFCEDIGVEPENVVMLVLAWKLDAQNMGYFTLQEWLKGMTSLQCDTTEKLRNTLDYLRSFLNDSTNFKLIYRYAFDFARQSKYKVINKDQWCNVLEFSRTINLDLSNYDEDGAWPVLLDEFVEWYKDKQMS

SEQ ID NO: 818176 - protein, 352 aa, Homo sapiens; identical to SEQ ID NO: 818166

SEQ ID NO: 818177 - protein, 352 aa, Homo sapiens; identical to SEQ ID NO: 818166

SEQ ID NO: 818178 - protein, 137 aa, Homo sapiens
  misc_feature (3)..(4): Xaa can be any naturally occurring amino acid
QIXXWPGSFEPRCSELVGGPRGERGSLGGEPGVSCLKMHSDAAAVNFQLNSHLSTLANIHKIYHTLNKLNLTEDIGQDDHQTGSLRSCSSSDCFNKVMPPRKKRRPASGDDLSAKKSRHDRSHSFTSTTELERSSCT

SEQ ID NO: 818179 - protein, 284 aa, Homo sapiens
  misc_feature (272)..(272): Xaa can be any naturally occurring amino acid
ERRSRAAPEPRFSQWRRRDGRAGSARRRVLSFEPRCSELVGGPRGERGSLGGEPGVSCLKMHSDAAAVNFQLNSHLSTLANIHKIYHTLNKLNLTEDIGQDDHQTGSLRSCSSSDCFNKVMPPRKKRRPASGDDLSAKKSRHDSMYRKYDSTRIKTEEEAFSSKRCLEWFYEYAGTDDVVGPEGMEKFCEDIGVEPENVVMLVLAWKLDAQNMGYFTLQEWLKGMTSLQCDTTEKLRNTLDYLRSFLNDSTNFKLIYRYAFDFARPGIKIPXLFIKEPIGCHCS

SEQ ID NO: 818180 - protein, 131 aa, Homo sapiens
  misc_feature (3)..(4): Xaa can be any naturally occurring amino acid
QIXXWPGSFEPRCSELVGGPRGERGSLGGEPGVSCLKMHSDAAAVNFQLNSHLSTLANIHKIYHTLNKLNLTEDIGQDDHQTGSLRSCSSSDCFNKVMPPRKKRRPASGDDLSAKKSRHDRYDVETVDQNQ

SEQ ID NO: 818181 - protein, 201 aa, Homo sapiens
MRRAWILLTLGLVACVSAESRAELTSDKDMYLDNSSIEEASGVYPIDDDDYASASGSGADEDVESPELTTSRPLPKILLTSAAPKVETTTLNIQNKIPAQTKSPEETDKEKVHLSDSERKMDPAEEDTNVYTEKHSDSLFKRTEVLAAVIAGGVIGFLFAIFLILLLVYRMRKKDEGSYDLGERKPSSAAYQKAPTKEFYA

SEQ ID NO: 818182 - protein, 167 aa, Homo sapiens
FKRTEVLAAVIAGGVIGFLFAIFLILLLTSAAPKVETTTLNIQNKIPAQTKSPEETDKEKVHLSDSERKMDPAEEDTNVYTEKHSDSLFKRTEVLAAVIAGGVIGFLFAIFLILLLTSAAPKVETTTLNIQNKIPAQTKSPEETDKEKVHLSDSERKMTQPKTDTNA

SEQ ID NO: 818183 - protein, 201 aa, Homo sapiens; identical to SEQ ID NO: 818181

SEQ ID NO: 818184 - protein, 172 aa, Homo sapiens
MYLDNSSIEEASGVYPIDDDDYASASGSGADEDVESPELTTSRPLPKILLTSAAPKVETTTLNIQNKIPAQTKSPEETDKEKVHLSDSERKMDPAEEDTNVYTEKHSDSLFKRTEVLAAVIAGGVIGFLFAIFLILLLVYRMRKKDEGSYDLGERKPSSAAYQKAPTKEFYA

SEQ ID NO: 818185 - protein, 234 aa, Homo sapiens
LEHTAVKGEDAERSGSGLGLGHLQGTRFLSGIRRAPLYKRHPTGTANISGTFQRAELTSDKDMYLDNSSIEEASGVYPIDDDDYASASGSGADEDVESPELTTSRPLPKILLTSAAPKVETTTLNIQNKIPAQTKSPEETDKEKVHLSDSERKMDPAEEDTNVYTEKHSDSLFKRTEVLAAVIAGGVIGFLFAIFLILLLVYRMRKKDEGSYDLGERKPSSAAYQKAPTKEFYA

SEQ ID NO: 818186 - protein, 201 aa, Homo sapiens; identical to SEQ ID NO: 818181

SEQ ID NO: 818187 - protein, 201 aa, Homo sapiens; identical to SEQ ID NO: 818181

SEQ ID NO: 818188 - protein, 201 aa, Homo sapiens; identical to SEQ ID NO: 818181

SEQ ID NO: 818189 - protein, 201 aa, Homo sapiens; identical to SEQ ID NO: 818181

SEQ ID NO: 818190 - protein, 290 aa, Homo sapiens
MDIEAYLERIGYKKSRNKLDLETLTDILQHQIRAVPFENLNIHCGDAMDLGLEAIFDQVVRRNRGGWCLQVNHLLYWALTTIGFETTMLGGYVYSTPAKKYSTGMIHLLLQVTIDGRNYIVDAGFGRSYQMWQPLELISGKDQPQVPCVFRLTEENGFWYLDQIRREQYIPNEEFLHSDLLEDSKYRKIYSFTLKPRTIEDFESMNTYLQTSPSSVFTSKSFCSLQTPDGVHCLVGFTLTHRRFNYKDNTDLIEFKTLSEEEIEKVLKNIFNISLQRKLVPKHGDRFFTI

SEQ ID NO: 818191 - protein, 69 aa, Homo sapiens
MLLLLLHKEAALEPQGPAVGYNSLPVSDDHHVSGIQARKKQQSVFWIKTEDQPTFNLLRKVLSAFLRAL

SEQ ID NO: 818192 - protein, 290 aa, Homo sapiens; identical to SEQ ID NO: 818190

SEQ ID NO: 818193 - protein, 290 aa, Homo sapiens; identical to SEQ ID NO: 818190

SEQ ID NO: 818194 - protein, 320 aa, Homo sapiens
ELVWCANTESAESRTSLDKLRSTTSLLEGIMDIEAYLERIGYKKSRNKLDLETLTDILQHQIRAVPFENLNIHCGDAMDLGLEAIFDQVVRRNRGGWCLQVNHLLYWALTTIGFETTMLGGYVYSTPAKKYSTGMIHLLLQVTIDGRNYIVDAGFGRSYQMWQPLELISGKDQPQVPCVFRLTEENGFWYLDQIRREQYIPNEEFLHSDLLEDSKYRKIYSFTLKPRTIEDFESMNTYLQTSPSSVFTSKSFCSLQTPDGVHCLVGFTLTHRRFNYKDNTDLIEFKTLSEEEIEKVLKNIFNISLQRKLVPKHGDRFFTI

SEQ ID NO: 818195 - protein, 290 aa, Homo sapiens; identical to SEQ ID NO: 818190

SEQ ID NO: 818196 - protein, 291 aa, Homo sapiens
MDIEAYLERIGYKKSRNKLDLETLTDILQHQIRAVPFENLNIHCGDAMDLGLEAIFDQVVRRNRGGWCLQVNHLLYWALTTIGFETTMLGGYVYSTPAKKYSTGMIHLLLQVTIDGRNYIVDAGFGRSYQMWQPLELISGKDQPQVPCVFRLTEENGFWYLDQIRREQYIPNEEFLHSDLLEDSKYRKIYSFTLKPRTIEDFESMNTYLQTSPSSVFTSKSFCSLQTPDGVHCLVGFTLTHRRFNYKDNTDLIEFKTLSEEEIEKVLKNIFNISLQRKLVPKHDRSSVDNW

SEQ ID NO: 818197 - protein, 175 aa, Homo sapiens
MDIEAYLERIGYKKSRNKLDLETLTDILQHQIRAVPFENLNIHCGDAMDLGLEAIFDQVVRRNRGGWCLQVNHLLYWALTTIGFETTMLGGYVYSTPAKKYSTGMIHLLLQVTIDGRNYIVDAGFGRSYQMWQPLELISGKDQPQVPCVFRLTEENGCGTKPPPPLPYLHPRCAS

SEQ ID NO: 818198 - protein, 509 aa, Homo sapiens
MEFSGRKWRKLRLAGDQRNASYPHCLQFYLQPPSENISLIEFENLAIDRVKLLKSVENLGVSYVKGTEQYQSKLESELRKLKFSYRENLEDEYEPRRRDHISHFILRLAYCQSEELRRWFIQQEMDLLRFRFSILPKDKIQDFLKDSQLQFEAISDEEKTLREQEIVASSPSLSGLKLGFESIYKIPFADALDLFRGRKVYLEDGFAYVPLKDIVAIILNEFRAKLSKALALTARSLPAVQSDERLQPLLNHLSHSYTGQDYSTQGNVGKISLDQIDLLSTKSFPPCMRQLHKALRENHHLRHGGRMQYGLFLKGIGLTLEQALQFWKQEFIKGKMDPDKFDKGYSYNIRHSFGKEGKRTDYTPFSCLKIILSNPPSQGDYHGCPFRHSDPELLKQKLQSYKISPGGISQILDLVKGTHYQVACQKYFEMIHNVDDCGFSLNHPNQFFCESQRILNGGKDIKKEPIQPETPQPKPSVQKTKDASSALASLNSSLEMDMEGLEDYFSEDS

SEQ ID NO: 818199 - protein, 240 aa, Homo sapiens
MEFSGRKWRKLRLAGDQRNASYPHCLQFYLQPPSENISLIEFENLAIDRVKLLKSVENLGVSYVKGTEQYQSKLESELRKLKFSYRENLEDEYEPRRRDHISHFILRLAYCQSEELRRWFIQQEMDLLRFRFSILPKDKIQDFLKDSQLQFEAISDEEKTLREQEIVASSPSLSGLKLGFESIYKIPFADALDLFRGRKVYLEDGFAYVPLKDIVAIILNEFRAKLSKALAVSILLDFCI

SEQ ID NO: 818200 - protein, 158 aa, Homo sapiens
MEFSGRKWRKLRLAGDQRNASYPHCLQFYLQPPSENISLIEFENLAIDRVKLLKSVENLGVSYVKGTEQYQSKLESELRKLKFSYRENLEDEYEPRRRDHISHFILRLAYCQSEELRRWFIQQEMDLLRFRFSILPKDKIQDFLKDSQLQFEAVSIFL

SEQ ID NO: 818201 - protein, 158 aa, Homo sapiens; identical to SEQ ID NO: 818200

SEQ ID NO: 818202 - protein, 222 aa, Homo sapiens
MRQLHKALRENHHLRHGGRMQYGLFLKGIGLTLEQALQFWKQEFIKGKMDPDKFDKGYSYNIRHSFGKEGKRTDYTPFSCLKIILSNPPSQGDYHGCPFRHSDPELLKQKLQSYKISPGGISQILDLVKGTHYQVACQKYFEMIHNVDDCGFSLNHPNQFFCESQRILNGGKDIKKEPIQPETPQPKPSVQKTKDASSALASLNSSLEMDMEGLEDYFSEDS

SEQ ID NO: 818203 - protein, 563 aa, Homo sapiens
ALHALTGVWPSPGRPFPSRDLGQAKSRTFGQTGDAAPPSLHPSFPPTRQFQVTKMEFSGRKWRKLRLAGDQRNASYPHCLQFYLQPPSENISLIEFENLAIDRVKLLKSVENLGVSYVKGTEQYQSKLESELRKLKFSYRENLEDEYEPRRRDHISHFILRLAYCQSEELRRWFIQQEMDLLRFRFSILPKDKIQDFLKDSQLQFEAISDEEKTLREQEIVASSPSLSGLKLGFESIYKIPFADALDLFRGRKVYLEDGFAYVPLKDIVAIILNEFRAKLSKALALTARSLPAVQSDERLQPLLNHLSHSYTGQDYSTQGNVGKISLDQIDLLSTKSFPPCMRQLHKALRENHHLRHGGRMQYGLFLKGIGLTLEQALQFWKQEFIKGKMDPDKFDKGYSYNIRHSFGKEGKRTDYTPFSCLKIILSNPPSQGDYHGCPFRHSDPELLKQKLQSYKISPGGISQILDLVKGTHYQVACQKYFEMIHNVDDCGFSLNHPNQFFCESQRILNGGKDIKKEPIQPETPQPKPSVQKTKDASSALASLNSSLEMDMEGLEDYFSEDS

SEQ ID NO: 818204 - protein, 509 aa, Homo sapiens; identical to SEQ ID NO: 818198

SEQ ID NO: 818205 - protein, 439 aa, Homo sapiens
MEFSGRKWRKLRLAGDQRNASYPHCLQFYLQPPSENISLIEFENLAIDRVKLLKSVENLGVSYVKGTEQYQSKLESELRKLKFSYRENLEDEYEPRRRDHISHFILRLAYCQSEELRRWFIQQEMDLLRFRFSILPKDKIQDFLKDSQLQFEAISDEEKTLREQEIVASSPSLSGLKLGFESIYKIPFADALDLFRGRKVYLEDGFAYVPLKDIVAIILNEFRAKLSKALALTARSLPAVQSDERLQPLLNHLSHSYTGQDYSTQGNVGKISLDQIDLLSTKSFPPCMRQLHKALRENHHLRHGGRMQYGLFLKGIGLTLEQALQFWKQEFIKGKMDPDKFDKGYSYNIRHSFGKEGKRTDYTPFSCLKIILSNPPSQGDYHGCPFRHSDPELLKQKLQSYKISPGGISQMRKLRFGEGKKLLRTIELIYDKARIRTYA

SEQ ID NO: 818206 - protein, 346 aa, Homo sapiens
MEFSGRKWRKLRLAGDQRNASYPHCLQFYLQPPSENISLIEFENLAIDRVKLLKSVENLGVSYVKGTEQYQSKLESELRKLKFSYRENLEDEYEPRRRDHISHFILRLAYCQSEELRRWFIQQEMDLLRFRFSILPKDKIQDFLKDSQLQFEAISDEEKTLREQEIVASSPSLSGLKLGFESIYKIPFADALDLFRGRKVYLEDGFAYVPLKDIVAIILNEFRAKLSKALALTARSLPAVQSDERLQPLLNHLSHSYTGQDYSTQGNVGKISLDQIDLLSTKSFPPCMRQLHKALRENHHLRHGGRMQYGLFLKGIGLTLEQALQFWKQEFIKGKMDPDKEEENDE

SEQ ID NO: 818207 - protein, 245 aa, Homo sapiens
MEFSGRKWRKLRLAGDQRNASYPHCLQFYLQPPSENISLIEFENLAIDRVKLLKSVENLGVSYVKGTEQYQSKLESELRKLKFSYRENLEDEYEPRRRDHISHFILRLAYCQSEELRRWFIQQEMDLLRFRFSILPKDKIQDFLKDSQLQFEAISDEEKTLREQEIVASSPSLSGLKLGFESIYKIPFADALDLFRGRKVYLEDGFAYVPLKDIVAIILNEFRAKLSKALAIWSLAMLPRLVLNS

SEQ ID NO: 818208 - protein, 686 aa, Homo sapiens
MRLPDLRPWTSLLLVDAALLWLLQGPLGTLLPQGLPGLWLEGTLRLGGLWGLLKLRGLLGFVGTLLLPLCLATPLTVSLRALVAGASRAPPARVASAPWSWLLVGYGAAGLSWSLWAVLSPPGAQEKEQDQVNNKVLMWRLLKLSRPDLPLLVAAFFFLVLAVLGETLIPHYSGRVIDILGGDFDPHAFASAIFFMCLFSFGSSLSAGCRGGCFTYTMSRINLRIREQLFSSLLRQDLGFFQETKTGELNSRLSSDTTLMSNWLPLNANVLLRSLVKVVGLYGFMLSISPRLTLLSLLHMPFTIAAEKVYNTRHQEVLREIQDAVARAGQVVREAVGGLQTVRSFGAEEHEVCRYKEALEQCRQLYWRRDLERALYLLVRRVLHLGVQMLMLSCGLQQMQDGELTQGSLLSFMIYQESVGSYVQTLVYIYGDMLSNVGAAEKVFSYMDRQPNLPSPGTLAPTTLQGVVKFQDVSFAYPNRPDRPVLKGLTFTLRPGEVTALVGPNGSGKSTVAALLQNLYQPTGGQVLLDEKPISQYEHCYLHSQVVSVGQEPVLFSGSVRNNIAYGLQSCEDDKVMAAAQAAHADDFIQEMEHGIYTDVGEKGSQLAAGQKQRLAIARALVRDPRVLILDEATSALDVQCEQALQDWNSRGDRTVLVIAHRLQTVQRAHQILVLQEGKLQKLAQL

SEQ ID NO: 818209 - protein, 686 aa, Homo sapiens; identical to SEQ ID NO: 818208

SEQ ID NO: 818210 - protein, 653 aa, Homo sapiens
MRLPDLRPWTSLLLVDAALLWLLQGPLGTLLPQGLPGLWLEGTLRLGGLWGLLKLRGLLGFVGTLLLPLCLATPLTVSLRALVAGASRAPPARVASAPWSWLLVGYGAAGLSWSLWAVLSPPGAQEKEQDQVNNKVLMWRLLKLSRPDLPLLVAAFFFLVLAVLGETLIPHYSGRVIDILGGDFDPHAFASAIFFMCLFSFGSSLSAGCRGGCFTYTMSRINLRIREQLFSSLLRQDLGFFQETKTGELNSRLSSDTTLMSNWLPLNANVLLRSLVKVVGLYGFMLSISPRLTLLSLLHMPFTIAAEKVYNTRHQEVLREIQDAVARAGQVVREAVGGLQTVRSFGAEEHEVCRYKEALEQCRQLYWRRDLERALYLLVRRVLHLGVQMLMLSCGLQQMQDGELTQGSLLSFMIYQESVGSYVQTLVYIYGDMLSNVGAAEKVFSYMDRQPNLPSPGTLAPTTLQGVVKFQDVSFAYPNRPDRPVLKGLTFTLRPGEVTALVGPNGSGKSTVAALLQNLYQPTGGQVLLDEKPISQYEHCYLHSQVVSVGQEPVLFSGSVRNNIAYGLQSCEDDKVMAAAQAAHADDFIQEMEHGIYTDVGEKGSQLAAGQKQRLAIARALVRDPRVLILDEATSALDVQCEQAKTLWKFMIF

SEQ ID NO: 818211 - protein, 217 aa, Homo sapiens
MGSGWVPWVVALLVNLTRLDSSMTQGTDSPEDFVIQAKADCYFTNGTEKVQFVVRFIFNLEEYVRFDSDVGMFVALTKLGQPDAEQWNSRLDLLERSRQAVDGVCRHNYRLGAPFTVGRKVQPEVTVYPERTPLLHQHNLLHCSVTGFYPGDIKIKWFLNGQEERAGVMSTGPIRNGDWTFQTVVMLEMTPELGHVYTCLVDHSSLLSPVSVEWSEN

SEQ ID NO: 818212 - protein, 295 aa, Homo sapiens
MGSGWVPWVVALLVNLTRLDSSMTQGTDSPEDFVIQAKADCYFTNGTEKVQFVVRFIFNLEEYVRFDSDVGMFVALTKLGQPDAEQWNSRLDLLERSRQAVDGVCRHNYRLGAPFTVGRKVQPEVTVYPERTPLLHQHNLLHCSVTGFYPGDIKIKWFLNGQEERAGVMSTGPIRNGDWTFQTVVMLEMTPELGHVYTCLVDHSSLLSPVSVEWRAQSEYSWRKMLSGIAAFLLGLIFLLVGSPPVGLEGFWAPLRDGVKEVAPCRARRFSAQKEWPGKTPDVETSLGPLVETPT

SEQ ID NO: 818213 - protein, 114 aa, Homo sapiens
KRLTILLSHFFPFSRMGSGWVPWVVALLVNLTRLDSSMTQGTDSPGKNRAIVFFQCVCKNWHGGVMPFFVSPGHRPDWKWLLVSKNSVLPFGRKVRLASLHGMDFIYQSHLFKG

SEQ ID NO: 818214 - protein, 686 aa, Homo sapiens; identical to SEQ ID NO: 818208

SEQ ID NO: 818215 - protein, 686 aa, Homo sapiens; identical to SEQ ID NO: 818208

SEQ ID NO: 818216 - protein, 247 aa, Homo sapiens
MVTQLRYESFCLHQFQEQDGESIPENQELASKQEILKEMEHLGDSKLQRDVSLDSKYRETCKRDSKAEKQQAHSTGERRHRCNECGKSFTKSSVLIEHQRIHTGEKPYECEECGKAFSRRSSLNEHRRSHTGEKPYQCKECGKAFSASNGLTRHRRIHTGEKPYECKVCGKAFLLSSCLVQHQRIHTGEKRYQCRECGKAFIQNAGLFQHLRVHTGEKPYQCSQCSKLFSKRTLLKKHQKIHTGERP

SEQ ID NO: 818217 - protein, 406 aa, Homo sapiens
MASTEEQYDLKIVKVEEDPIWDQETHLRGNNFSGQEASRQLFRQFCYQETPGPREALSRLRELCHQWLRPEIHTKEQILELLVLEQFLTILPEELQAWVREHHPESGEEAVAVVEDLEQELSEPGNQAPDHEHGHSEVLLEDVEHLKVKQEPTDIQLQPMVTQLRYESFCLHQFQEQDGESIPENQELASKQEILKEMEHLGDSKLQRDVSLDSKYRETCKRDSKAEKQQAHSTGERRHRCNECGKSFTKSSVLIEHQRIHTGEKPYECEECGKAFSRRSSLNEHRRSHTGEKPYQCKECGKAFSASNGLTRHRRIHTGEKPYECKVCGKAFLLSSCLVQHQRIHTGEKRYQCRECGKAFIQNAGLFQHLRVHTGEKPYQCSQCSKLFSKRTLLKKHQKIHTGERP

SEQ ID NO: 818218 - protein, 406 aa, Homo sapiens; identical to SEQ ID NO: 818217

SEQ ID NO: 818219 - protein, 406 aa, Homo sapiens; identical to SEQ ID NO: 818217

SEQ ID NO: 818220 - protein, 247 aa, Homo sapiens; identical to SEQ ID NO: 818216

SEQ ID NO: 818221 - protein, 247 aa, Homo sapiens; identical to SEQ ID NO: 818216

SEQ ID NO: 818222 - protein, 218 aa, Homo sapiens
MVTQLRYESFCLHQFQEQDGESIPENQELASKQEILKEMEHLGDSKLQRDVSLDSKYRETCKRDSKAEKQQAHSTGERRHRCNECGKSFTKSSVLIEHQRIHTGEKPYECEECGKAFSRRSSLNEHRRSHTGEKPYQCKECGKAFSASNGLTRHRRIHTGEKPYECKVCGKAFLLSSCLVQHQRIHTGEKRYQCRECGKAFIQNAGLFQHLRVHTVKT

SEQ ID NO: 818223 - protein, 299 aa, Homo sapiens
MASTEEQYDLKIVKVEEDPIWDQETHLRGNNFSGQEASRQLFRQFCYQETPGPREALSRLRELCHQWLRPEIHTKEQILELLVLEQFLTILPEELQAWVREHHPESGEEAVAVVEDLEQELSEPGNQAPDHEHGHSEVLLEDVEHLKVKQEPTDIQLQPMVTQLRYESFCLHQFQEQDGESIPENQELASKQEILKEMEHLGDSKLQRDVSLDSKYRETCKRDSKAEKQQAHSTGERRHRCNECGKSFTKSSVLIEHQRIHTGEKPYECEECGKAFSRRSSLNEHRRSHTGEKPYQFKT

SEQ ID NO: 818224 - protein, 366 aa, Homo sapiens
MQPPLDLKQILPFPLEPAPTLGLFSNYSTMDPVQKAVLSHTFGGPLLKTKRPVISCNICQIRFNSQSQAEAHYKGNRHARRVKGIEAAKTRGREPGVREPGDPAPPGSTPTNGDGVAPRPVSMENGLGPAPGSPEKQPGSPSPPSIPETGQGVTKGEGGTPAPASLPGGSKEEEEKAKRLLYCALCKVAVNSLSQLEAHNKGTKHKTILEARSGLGPIKAYPRLGPPTPGEPEAPAQDRTFHCEICNVKVNSEVQLKQHISSRRHRDGVAGKPNPLLSRHKKSRGAGELAGTLTFSKELPKSLAGGLLPSPLAVAAVMAAAAGSPLSLRPAPAAPLLQGPPITHPLLHPAPGPIRTAHGPILFSPY

SEQ ID NO: 818225 - protein, 318 aa, Homo sapiens
TERRGTPGAWVPSMILGSLSRAGPLPLLRQPPIMQPPLDLKQILPFPLEPAPTLGLFSNYSTMDPVQKAVLSHTFGGPLLKTKRPVISCNICQIRFNSQSQAEAHYKGNRHARRVKGIEAAKTRGREPGVREPGDPAPPGSTPTNGDGVAPRPGTKHKTILEARSGLGPIKAYPRLGPPTPGEPEAPAQDRTFHCEICNVKVNSEVQLKQHISSRRHRDGVAGKPNPLLSRHKKSRGAGELAGTLTFSKELPKSLAGGLLPSPLAVAAVMAAAAGSPLSLRPAPAAPLLQGPPITHPLLHPAPGPIRTAHGPILFSPY

SEQ ID NO: 818226 - protein, 107 aa, Homo sapiens
MENEPSIGVSHPACGSWTTSGSGPGHESMHVVTGWGLLVPCPPGNGGGLFHMKSLLQEPSRVIPMFLPQQQFPWRMDWGQPQDPQRNSGHQDMMAAVRSVVQGITKE

SEQ ID NO: 818227 - protein, 382 aa, Homo sapiens
AGPHSPEPPGQRAPRPWPARPGQARPPSPGPPPRAMEPRPPGSRRMDPVQKAVLSHTFGGPLLKTKRPVISCNICQIRFNSQSQAEAHYKGNRHARRVKGIEAAKTRGREPGVREPGDPAPPGSTPTNGDGVAPRPVSMENGLGPAPGSPEKQPGSPSPPSIPETGQGVTKGEGGTPAPASLPGGSKEEEEKAKRLLYCALCKVAVNSLSQLEAHNKGTKHKTILEARSGLGPIKAYPRLGPPTPGEPEAPAQDRTFHCEICNVKVNSEVQLKQHISSRRHRDGVAGKPNPLLSRHKKSRGAGELAGTLTFSKELPKSLAGGLLPSPLAVAAVMAAAAGSPLSLRPAPAAPLLQGPPITHPLLHPAPGPIRTAHGPILFSPY

SEQ ID NO: 818228 - protein, 399 aa, Homo sapiens
TERRGTPGAWVPSMILGSLSRAGPLPLLRQPPIMQPPLDLKQILPFPLEPAPTLGLFSNYSTMDPVQKAVLSHTFGGPLLKTKRPVISCNICQIRFNSQSQAEAHYKGNRHARRVKGIEAAKTRGREPGVREPGDPAPPGSTPTNGDGVAPRPVSMENGLGPAPGSPEKQPGSPSPPSIPETGQGVTKGEGGTPAPASLPGGSKEEEEKAKRLLYCALCKVAVNSLSQLEAHNKGTKHKTILEARSGLGPIKAYPRLGPPTPGEPEAPAQDRTFHCEICNVKVNSEVQLKQHISSRRHRDGVAGKPNPLLSRHKKSRGAGELAGTLTFSKELPKSLAGGLLPSPLAVAAVMAAAAGSPLSLRPAPAAPLLQGPPITHPLLHPAPGPIRTAHGPILFSPY

SEQ ID NO: 818229 - protein, 366 aa, Homo sapiens; identical to SEQ ID NO: 818224

SEQ ID NO: 818230 - protein, 399 aa, Homo sapiens
SRGSVYTMCTEGDTSECSLSRAGPLPLLRQPPIMQPPLDLKQILPFPLEPAPTLGLFSNYSTMDPVQKAVLSHTFGGPLLKTKRPVISCNICQIRFNSQSQAEAHYKGNRHARRVKGIEAAKTRGREPGVREPGDPAPPGSTPTNGDGVAPRPVSMENGLGPAPGSPEKQPGSPSPPSIPETGQGVTKGEGGTPAPASLPGGSKEEEEKAKRLLYCALCKVAVNSLSQLEAHNKGTKHKTILEARSGLGPIKAYPRLGPPTPGEPEAPAQDRTFHCEICNVKVNSEVQLKQHISSRRHRDGVAGKPNPLLSRHKKSRGAGELAGTLTFSKELPKSLAGGLLPSPLAVAAVMAAAAGSPLSLRPAPAAPLLQGPPITHPLLHPAPGPIRTAHGPILFSPY

SEQ ID NO: 818231 - protein, 415 aa, Homo sapiens
RAEPREGDAVRPRPLGGQGQATAWGQQASETKGSLSRAGPLPLLRQPPIMQPPLDLKQILPFPLEPAPTLGLFSNYSTMDPVQKAVLSHTFGGPLLKTKRPVISCNICQIRFNSQSQAEAHYKGNRHARRVKGIEAAKTRGREPGVREPGDPAPPGSTPTNGDGVAPRPVSMENGLGPAPGSPEKQPGSPSPPSIPETGQGVTKGEGGTPAPASLPGGSKEEEEKAKRLLYCALCKVAVNSLSQLEAHNKGTKHKTILEARSGLGPIKAYPRLGPPTPGEPEAPAQDRTFHCEICNVKVNSEVQLKQHISSRRHRDGVAGKPNPLLSRHKKSRGAGELAGTLTFSKELPKSLAGGLLPSPLAVAAVMAAAAGSPLSLRPAPAAPLLQGPPITHPLLHPAPGPIRTAHGPILFSPY

SEQ ID NO: 818232 - protein, 244 aa, Homo sapiens [sequence omitted]

SEQ ID NO: 818233 - protein, 412 aa, Homo sapiens
MQPPLDLKQILPFPLEPAPTLGLFSNYSTMDPVQKAVLSHTFGGPLLKTKRPVISCNICQIRFNSQSQAEAHYKGNRHARRVKGIEAAKTRGREPGVREPGDPAPPGSTPTNGDGVAPRPESHSVAQARVQWHNLSSLQPPPPRFKRFSCLSLLSSWDYRHLPPHPVSMENGLGPAPGSPEKQPGSPSPPSIPETGQGVTKGEGGTPAPASLPGGSKEEEEKAKRLLYCALCKVAVNSLSQLEAHNKGTKHKTILEARSGLGPIKAYPRLGPPTPGEPEAPAQDRTFHCEICNVKVNSEVQLKQHISSRRHRDGVAGKPNPLLSRHKKSRGAGELAGTLTFSKELPKSLAGGLLPSPLAVAAVMAAAAGSPLSLRPAPAAPLLQGPPITHPLLHPAPGPIRTAHGPILFSPY

SEQ ID NO: 818234 - protein, 366 aa, Homo sapiens; identical to SEQ ID NO: 818224

SEQ ID NO: 818235 - protein, 366 aa, Homo sapiens; identical to SEQ ID NO: 818224

SEQ ID NO: 818236 - protein, 70 aa, Homo sapiens
KHKTILEARSGLGPIKAYPRLGPPTPGEPEAPAQDRTFHCEICNVKVNSEVQLKQVGLRPFPGILGRSTR

SEQ ID NO: 818237 - protein, 174 aa, Homo sapiens
MSNGYRTLSQHLNDLKKENFSLKLLIYFLEERMQQKYEASREDIYKRNTELKVEVESLKRELQDKKQHLDKTWADVENLNSQNEAELRRQFEERQQETEHVYELLENKMQLLQEESRLAKNEAARMAALVEAEKECNLELSEKLKGVTKNWEDVPGDQVKPDQYTEALAQRDKI

SEQ ID NO: 818238 - protein, 174 aa, Homo sapiens; identical to SEQ ID NO: 818237

SEQ ID NO: 818239 - protein, 240 aa, Homo sapiens
MEQTWTRDYFAEDDGEMVPRTSHTAAFLSDTKDRGPPVQSQIWRSGEKVPFVQTYSLRAFEKPPQVQTQALRDFEKHLNDLKKENFSLKLLIYFLEERMQQKYEASREDIYKRNTELKVEVESLKRELQDKKQHLDKTWADVENLNSQNEAELRRQFEERQQETEHVYELLENKMQLLQEESRLAKNEAARMAALVEAEKECNLELSEKLKGVTKNWEDVPGDQVKPDQYTEALAQRDKI

SEQ ID NO: 818240 - protein, 142 aa, Homo sapiens
MQQKYEASREDIYKRNTELKVEVESLKRELQDKKQHLDKTWADVENLNSQNEAELRRQFEERQQETEHVYELLENKMQLLQEESRLAKNEAARMAALVEAEKECNLELSEKLKGVTKNWEDVPGDQVKPDQYTEALAQRDKI

SEQ ID NO: 818241 - protein, 185 aa, Homo sapiens
MSNGYRTLSQHLNDLKKENFSLKLLIYFLEERMQQKYEASREDIYKRNTELKVEVESLKRELQDKKQHLDKTWADVENLNSQNEAELRRQFEERQQETEHVYELLENKMQLLQEESRLAKNEAARMAALVEAEKECNLELSEKLKGVTKNWEDVPGDQVKPDQYTEALAQRDNPSTDSLKNFRLF

SEQ ID NO: 818242 - protein, 174 aa, Homo sapiens; identical to SEQ ID NO: 818237

SEQ ID NO: 818243 - protein, 185 aa, Homo sapiens; identical to SEQ ID NO: 818241

SEQ ID NO: 818244 - protein, 141 aa, Homo sapiens
MSNGYRTLSQHLNDLKKENFSLKLLIYFLEERMQQKYEASREDIYKRNTELKVEVESLKRELQDKKQHLDKTWADVENLNSQNEAELRRQFEERQQETEHVYELLENKMQLLQEESRLAKNEAARMAAPGSTPSLLPPELV

SEQ ID NO: 818245 - protein, 112 aa, Homo sapiens
MRPAGRTSTSGADVENLNSQNEAELRRQFEERQQETEHVYELLENKMQLLQEESRLAKNEAARMAALVEAEKECNLELSEKLKGVTKNWEDVPGDQVKPDQYTEALAQRDKI

SEQ ID NO: 818246 - protein, 214 aa, Homo sapiens
MSNGYRTLSQHLNDLKKENFSLKLLIYFLEERMQQKYEASREDIYKRNTELKVEVESLKRELQDKKQHLDKTWADVENLNSQNEAELRRQFEERQQETEHVYELLENKMQLLQEESRLAKNEAARMAALVEAEKECNLELSEKLKGVTKNWEDVPGDQVKPDQYTEALAQRDKSRFLHSGKEENVPILGKTSFRWHSFDQTAKFYPSMYCHLTV

SEQ ID NO: 818247 - protein, 391 aa, Homo sapiens
MEPLRVLELYSGVGGMHHALRESCIPAQVVAAIDVNTVANEVYKYNFPHTQLLAKTIEGITLEEFDRLSFDMILMSPPCQPFTRIGRQGDMTDSRTNSFLHILDILPRLQKLPKYILLENVKGFEVSSTRDLLIQTIENCGFQYQEFLLSPTSLGIPNSRLRYFLIAKLQSEPLPFQAPGQVLMEFPKIESVHPQKYAMDVENKIQEKNVEPNISFDGSIQCSGKDAILFKLETAEEIHRKNQQDSDLSVKMLKDFLEDDTDVNQYLLPPKSLLRYALLLDIVQPTCRRSVCFTKGYGSYIEGTGSVLQTAEDVQVENIYKSLTNLSQEEQITKLLILKLRYFTPKEIANLLGFPPEFGFPEKITVKQRYRLLGNSLNVHVVAKLIKILYE

SEQ ID NO: 818248 - protein, 391 aa, Homo sapiens; identical to SEQ ID NO: 818247

SEQ ID NO: 818249 - protein, 367 aa, Homo sapiens
MEPLRVLELYSGVGGMHHALRESCIPAQVVAAIDVNTVANEVYKYNFPHTQLLAKTIEGITLEEFDRLSFDMILMSPPCQPFTRLQKLPKYILLENVKGFEVSSTRDLLIQTIENCGFQYQEFLLSPTSLGIPNSRLRYFLIAKLQSEPLPFQAPGQVLMEFPKIESVHPQKYAMDVENKIQEKNVEPNISFDGSIQCSGKDAILFKLETAEEIHRKNQQDSDLSVKMLKDFLEDDTDVNQYLLPPKSLLRYALLLDIVQPTCRRSVCFTKGYGSYIEGTGSVLQTAEDVQVENIYKSLTNLSQEEQITKLLILKLRYFTPKEIANLLGFPPEFGFPEKITVKQRYRLLGNSLNVHVVAKLIKILYE

SEQ ID NO: 818250 - protein, 345 aa, Homo sapiens
MEPLRVLELYSGVGGMHHALRESCIPAQVVAAIDVNTVANEVYKYNFPHTQLLAKTIEGITLEEFDRLSFDMILMSPPCQPFTRDLLIQTIENCGFQYQEFLLSPTSLGIPNSRLRYFLIAKLQSEPLPFQAPGQVLMEFPKIESVHPQKYAMDVENKIQEKNVEPNISFDGSIQCSGKDAILFKLETAEEIHRKNQQDSDLSVKMLKDFLEDDTDVNQYLLPPKSLLRYALLLDIVQPTCRRSVCFTKGYGSYIEGTGSVLQTAEDVQVENIYKSLTNLSQEEQITKLLILKLRYFTPKEIANLLGFPPEFGFPEKITVKQRYRLLGNSLNVHVVAKLIKILYE

SEQ ID NO: 818251 - protein, 308 aa, Homo sapiens
MSTLSLMKYTSIIFLTHSYLPRRLKLQKLPKYILLENVKGFEVSSTRDLLIQTIENCGFQYQEFLLSPTSLGIPNSRLRYFLIAKLQSEPLPFQAPGQVLMEFPKIESVHPQKYAMDVENKIQEKNVEPNISFDGSIQCSGKDAILFKLETAEEIHRKNQQDSDLSVKMLKDFLEDDTDVNQYLLPPKSLLRYALLLDIVQPTCRRSVCFTKGYGSYIEGTGSVLQTAEDVQVENIYKSLTNLSQEEQITKLLILKLRYFTPKEIANLLGFPPEFGFPEKITVKQRYRLLGNSLNVHVVAKLIKILYE

SEQ ID NO: 818252 - protein, 310 aa, Homo sapiens
MSTLSLMKYTSIIFLTHSYLPRRLKIGRQGDMTDSRTNSFLHILDILPRDLLIQTIENCGFQYQEFLLSPTSLGIPNSRLRYFLIAKLQSEPLPFQAPGQVLMEFPKIESVHPQKYAMDVENKIQEKNVEPNISFDGSIQCSGKDAILFKLETAEEIHRKNQQDSDLSVKMLKDFLEDDTDVNQYLLPPKSLLRYALLLDIVQPTCRRSVCFTKGYGSYIEGTGSVLQTAEDVQVENIYKSLTNLSQEEQITKLLILKLRYFTPKEIANLLGFPPEFGFPEKITVKQRYRLLGNSLNVHVVAKLIKILYE

SEQ ID NO: 818253 - protein, 286 aa, Homo sapiens
MSTLSLMKYTSIIFLTHSYLPRRLKDLLIQTIENCGFQYQEFLLSPTSLGIPNSRLRYFLIAKLQSEPLPFQAPGQVLMEFPKIESVHPQKYAMDVENKIQEKNVEPNISFDGSIQCSGKDAILFKLETAEEIHRKNQQDSDLSVKMLKDFLEDDTDVNQYLLPPKSLLRYALLLDIVQPTCRRSVCFTKGYGSYIEGTGSVLQTAEDVQVENIYKSLTNLSQEEQITKLLILKLRYFTPKEIANLLGFPPEFGFPEKITVKQRYRLLGNSLNVHVVAKLIKILYE

SEQ ID NO: 818254 - protein, 377 aa, Homo sapiens
MEPLRVLELYSGVGGMHHALRESCIPAQVVAAIDVNTVANEVYKYNFPHTQLLAKTIEGITLEEFDRLSFDMILMSPPCQPFTRIGRQGDMTDSRTNSFLHILDILPRLQKLPKYILLENVKGFEVSSTRDLLIQTIENCGFQYQEFLLSPTSLGIPNSRLRYFLIAKLQSEPLPFQAPGQVLMEFPKIESVHPQKYAMDVENKIQEKNVEPNISFDGSIQCSGKDAILFKLETAEEIHRKNQQDSDLSVKMLKDFLEDDTDVNQYLLPPKSLLRYALLLDIVQPTCRRSVCFTKGYGSYIEGTGSVLQTAEDVQVENIYKSLTNLSQEEQITKLLILKLRYFTPKEIANLLGFPPEFDEQSDILLKTEKRLTIQLK

SEQ ID NO: 818255 - protein, 385 aa, Homo sapiens
SLSGCVCCRHCAALVPSEGSCCCRCLGPSPSLLVLLPQEPGGSGTPVRAGAGAGMWLWEDQGGLLGPFSFLLLVLLLVTRSPVNACLLTGSLFVLLRVFSFEPVPSCRALQVLKPRDRISAIAHRGGSHDAPENTLAAIRQAAKNGATGVELDIEFTSDGIPVLMHDNTVDRTTDGTGRLCDLTFEQIRKLNPAANHRLRNDFPDEKIPTLREAVAECLNHNLTIFFDVKGHAHKATEALKKMYMEFPQLYNNSVVCSFLPEVIYKMRQTDRDVITALTHRPWSLSHTGDGKPRYDTFWKHFIFVMMDILLDWSMHNILWYLCGISAFLMQKDFVSPAYLKKWSAKGIQVVGWTVNTFDEKSYYESHLGSSYITDSMVEDCEPHF

SEQ ID NO: 818256 - protein, 385 aa, Homo sapiens; identical to SEQ ID NO: 818255

SEQ ID NO: 818257 - protein, 385 aa, Homo sapiens; identical to SEQ ID NO: 818255

SEQ ID NO: 818258 - protein, 385 aa, Homo sapiens; identical to SEQ ID NO: 818255

SEQ ID NO: 818259 - protein, 385 aa, Homo sapiens; identical to SEQ ID NO: 818255

SEQ ID NO: 818260 - protein, 385 aa, Homo sapiens; identical to SEQ ID NO: 818255

SEQ ID NO: 818261 - protein, 385 aa, Homo sapiens; identical to SEQ ID NO: 818255

SEQ ID NO: 818262 - protein, 385 aa, Homo sapiens; identical to SEQ ID NO: 818255

SEQ ID NO: 818263 - protein, 380 aa, Homo sapiens
GLVEPGWLIGRGEGSCCCRCLGPSPSLLVLLPQEPGGSGTPVRAGAGAGMWLWEDQGGLLGPFSFLLLVLLLVTRSPVNACLLTGSLFVLLRVFSFEPVPSCRALQVLKPRDRISAIAHRGGSHDAPENTLAAIRQAAKNGATGVELDIEFTSDGIPVLMHDNTVDRTTDGTGRLCDLTFEQIRKLNPAANHRLRNDFPDEKIPTLREAVAECLNHNLTIFFDVKGHAHKATEALKKMYMEFPQLYNNSVVCSFLPEVIYKMRQTDRDVITALTHRPWSLSHTGDGKPRYDTFWKHFIFVMMDILLDWSMHNILWYLCGISAFLMQKDFVSPAYLKKWSAKGIQVVGWTVNTFDEKSYYESHLGSSYITDSMVEDCEPHF

SEQ ID NO: 818264 - protein, 385 aa, Homo sapiens; identical to SEQ ID NO: 818255

SEQ ID NO: 818265 - protein, 385 aa, Homo sapiens; identical to SEQ ID NO: 818255

SEQ ID NO: 818266 - protein, 385 aa, Homo sapiens; identical to SEQ ID NO: 818255

SEQ ID NO: 818267 - protein, 385 aa, Homo sapiens; identical to SEQ ID NO: 818255

SEQ ID NO: 818268 - protein, 354 aa, Homo sapiens
SLSGCVCCRHCAALVPSEGSCCCRCLGPSPSLLVLLPQEPGGSGTPVRAGAGAGMWLWEDQGGLLGPFSFLLLVLLLVTRSPVNACLLTGSLFVLLRVFSFEPVPSCRALQVLKPRDRISAIAHRGGSHDAPENTLAAIRQAAKNGATGVELDIEFTSDGIPVLMHDNTVDRTTDGTGRLCDLTFEQIRKLNPAANHRLRNDFPDEKIPTLREAVAECLNHNLTIFFDVKGHAHKMRQTDRDVITALTHRPWSLSHTGDGKPRYDTFWKHFIFVMMDILLDWSMHNILWYLCGISAFLMQKDFVSPAYLKKWSAKGIQVVGWTVNTFDEKSYYESHLGSSYITDSMVEDCEPHF

SEQ ID NO: 818269 - protein, 276 aa, Homo sapiens
MEKRSSLLLRSVSICRGGSHDAPENTLAAIRQAAKNGATGVELDIEFTSDGIPVLMHDNTVDRTTDGTGRLCDLTFEQIRKLNPAANHRLRNDFPDEKIPTLREAVAECLNHNLTIFFDVKGHAHKATEALKKMYMEFPQLYNNSVVCSFLPEVIYKMRQTDRDVITALTHRPWSLSHTGDGKPRYDTFWKHFIFVMMDILLDWSMHNILWYLCGISAFLMQKDFVSPAYLKKWSAKGIQVVGWTVNTFDEKSYYESHLGSSYITDSMVEDCEPHF

SEQ ID NO: 818270 - protein, 221 aa, Homo sapiens
MHDNTVDRTTDGTGRLCDLTFEQIRKLNPAANHRLRNDFPDEKIPTLREAVAECLNHNLTIFFDVKGHAHKATEALKKMYMEFPQLYNNSVVCSFLPEVIYKMRQTDRDVITALTHRPWSLSHTGDGKPRYDTFWKHFIFVMMDILLDWSMHNILWYLCGISAFLMQKDFVSPAYLKKWSAKGIQVVGWTVNTFDEKSYYESHLGSSYITDSMVEDCEPHF

SEQ ID NO: 818271 - protein, 277 aa, Homo sapiens
SLSGCVCCRHCAALVPSEGSCCCRCLGPSPSLLVLLPQEPGGSGTPVRAGAGAGMWLWEDQGGLLGPFSFLLLVLLLVTRSPVNACLLTGSLFVLLRVFSFEPVPSCRALQVLKPRDRISAIAHRGGSHDAPENTLAAIRQAAKNGATGVELDIEFTSDGIPVLMHDNTVDRTTDGTGRLCDLTFEQIRKLNPAANHRLRNDFPDEKIPTLREAVAECLNHNLTIFFDVKGHAHKATEALKKMYMEFPQLYNNSVVCSFLPEVIYKMSIMLRNYQKA

SEQ ID NO: 818272 - protein, 112 aa, Homo sapiens
MYHIVARSLEATMRKIGQEMCTCPPRSPSPILCALQGFRSESRVGDEKGNLCRLSLSLWSARVSRKKRYEHCEASAALHAGDLGSLCREVRVQHPCPGVVVQDLQGRVALFL

SEQ ID NO: 818273 - protein, 121 aa, Homo sapiens
PALHSQVFPALTPKRWTQVRRGTATVGGMAILQVTAGHPLAMAQGPAGHPPTMVQGPAGHPLAMAQGPAGHPPTMVQGPAGLPLAMAQVTHPLVHITEEVEENRTQDGKPERIAQLTWNEA

SEQ ID NO: 818274 - protein, 128 aa, Homo sapiens
GKWSEGELIQVSLALTSDSDIVHLTFHRGTATVGGMAILQVTAGHPLAMAQGPAGHPPTMVQGPAGHPLAMAQGPAGHPPTMVQGPAGLPLAMAQVTHPLVHITEEVEENRTQDGKPERIAQLTWNEA

SEQ ID NO: 818275 - protein, 101 aa, Homo sapiens
KNSARGSQVFPALTPKRWTQVRRGTATVGGMAILQVTAGHPLAMAQGPAGHPPTMVQGPAGLPLAMAQVTHPLVHITEEVEENRTQDGKPERIAQLTWNEA

SEQ ID NO: 818276 - protein, 305 aa, Homo sapiens
MAPLDLDKYVEIARLCKYLPENDLKRLCDYVCDLLLEESNVQPVSTPVTVCGDIHGQFYDLCELFRTGGQVPDTNYIFMGDFVDRGYYSLETFTYLLALKAKWPDRITLLRGNHESRQITQVYGFYDECQTKYGNANAWRYCTKVFDMLTVAALIDEQILCVHGGLSPDIKTLDQIRTIERNQEIPHKGAFCDLVWSDPEDVDTWAISPRGAGWLFGAKVTNEFVHINNLKLICRAHQLVHEGYKFMFDEKLVTVWSAPNYCYRCGNIASIMVFKDVNTREPKLFRAVPDSERVIPPRTTTPYFL

SEQ ID NO: 818277 - protein, 110 aa, Homo sapiens
MAPLDLDKYVEIARLCKYLPENDLKRLCDYVCDLLLEESNVQPVSTPVTVCGDIHGQFYDLCELFRTGGQVPDTNYIFMSLFQYIKRCVLVRFHAADKDIPETGQFTKEV

SEQ ID NO: 818278 - protein, 305 aa, Homo sapiens; identical to SEQ ID NO: 818276

SEQ ID NO: 818279 - protein, 305 aa, Homo sapiens; identical to SEQ ID NO: 818276

SEQ ID NO: 818280 - protein, 305 aa, Homo sapiens; identical to SEQ ID NO: 818276

SEQ ID NO: 818281 - protein, 305 aa, Homo sapiens; identical to SEQ ID NO: 818276

SEQ ID NO: 818282 - protein, 305 aa, Homo sapiens; identical to SEQ ID NO: 818276

SEQ ID NO: 818283 - protein, 305 aa, Homo sapiens; identical to SEQ ID NO: 818276

SEQ ID NO: 818284 - protein, 305 aa, Homo sapiens; identical to SEQ ID NO: 818276

SEQ ID NO: 818285 - protein, 305 aa, Homo sapiens; identical to SEQ ID NO: 818276

SEQ ID NO: 818286 - protein, 335 aa, Homo sapiens
SDHAFAARGHSVNDPAQYLVTYVILVLISACLLQQMNLEARGMYTELFVTLIILNRSPCSVMSHDLLIQVEQSVCEHLPIGTFTASPFYDLCELFRTGGQVPDTNYIFMGDFVDRGYYSLETFTYLLALKAKWPDRITLLRGNHESRQITQVYGFYDECQTKYGNANAWRYCTKVFDMLTVAALIDEQILCVHGGLSPDIKTLDQIRTIERNQEIPHKGAFCDLVWSDPEDVDTWAISPRGAGWLFGAKVTNEFVHINNLKLICRAHQLVHEGYKFMFDEKLVTVWSAPNYCYRCGNIASIMVFKDVNTREPKLFRAVPDSERVIPPRTTTPYFL

SEQ ID NO: 818287 - protein, 158 aa, Homo sapiens
MLTVAALIDEQILCVHGGLSPDIKTLDQIRTIERNQEIPHKGAFCDLVWSDPEDVDTWAISPRGAGWLFGAKVTNEFVHINNLKLICRAHQLVHEGYKFMFDEKLVTVWSAPNYCYRCGNIASIMVFKDVNTREPKLFRAVPDSERVIPPRTTTPYFL

SEQ ID NO: 818288 - protein, 305 aa, Homo sapiens; identical to SEQ ID NO: 818276

SEQ ID NO: 818289 - protein, 231 aa, Homo sapiens
MAPLDLDKYVEIARLCKYLPENDLKRLCDYVCDLLLEESNVQPVSTPVTVCGDIHGQFYDLCELFRTGGQVPDTNYIFMGDFVDRGYYSLETFTYLLALKAKWPDRITLLRGNHESRQITQVYGFYDECQTKYGNANAWRYCTKVFDMLTVAALIDEQILCVHGGLSPDIKTLDQIRTIERNQEIPHKGAFCDLVWSDPEDVDTWAISPRGAGWLFGAKVTNEVKPTFLEM

SEQ ID NO: 818290 - protein, 267 aa, Homo sapiens
MAVPETRPNHTIYINNLNEKIKKDELKKSLYAIFSQFGQILDILVSRSLKMRGQAFVIFKEVSSATNALRSMQGFPFYDKPMRIQYAKTDSDIIAKMKGTFVERDRKREKRKPKSQETPATKKAVQGGGATPVVGAVQGPVPGMPPMTQAPRIMHHMPGQPPYMPPPGMIPPPGLAPGQIPPGAMPPQQLMPGQMPPAQPLSENPPNHILFLTNLPEETNELMLSMLFNQFPGFKEVRLVPGRHDIAFVEFDNEVQAGAARGCPAGL

SEQ ID NO: 818291 - protein, 267 aa, Homo sapiens; identical to SEQ ID NO: 818290

SEQ ID NO: 818292 - protein, 262 aa, Homo sapiens
MAVPETRPNHTIYINNLNEKIKKDELKKSLYAIFSQFGQILDILVSRSLKMRGQAFVIFKEVSSATNALRSMQGFPFYDKPMRIQYAKTDSDIIAKMKGTFVERDRKREKRKPKSQETPATKKAVQGGGATPVVGAVQGPVPGMPPMTQAPRIMHHMPGQPPYMPPPGMIPPPGLAPGQIPPGAMPPQQLMPGQMPPAQPLSENPPNHILFLTNLPEETNELMLSMLFNQFPGFKEVRLVPGRHDIAFVEFDNEVQAGAAGA

SEQ ID NO: 818293 - protein, 184 aa, Homo sapiens [sequence omitted]

SEQ ID NO: 818294 - protein, 227 aa, Homo sapiens
RDAYRLVTFTDWSVDPGATEGELKKSLYAIFSQFGQILDILVSRSLKMRGQAFVIFKEVSSATNALRSMQGFPFYDKPMRIQYAKTDSDIIAKMKGTFVERDRKREKRKPKSQETPATKKAVQGGGATPVVGAVQGPVPGMPPMTQAPRIMHHMPGQPPYMPPPGMIPPPGLAPGQIPPGAMPPQQLMPGQMPPAQPLSENPPNHILFLTNLPEETNELMLSMLFNQ

SEQ ID NO: 818295 - protein, 267 aa, Homo sapiens; identical to SEQ ID NO: 818290

SEQ ID NO: 818296 - protein, 267 aa, Homo sapiens; identical to SEQ ID NO: 818290

SEQ ID NO: 818297 - protein, 267 aa, Homo sapiens; identical to SEQ ID NO: 818290

SEQ ID NO: 818298 - protein, 267 aa, Homo sapiens; identical to SEQ ID NO: 818290

SEQ ID NO: 818299 - protein, 230 aa, Homo sapiens [sequence omitted]

SEQ ID NO: 818300 - protein, 267 aa, Homo sapiens; identical to SEQ ID NO: 818290

SEQ ID NO: 818301 - protein, 267 aa, Homo sapiens; identical to SEQ ID NO: 818290

SEQ ID NO: 818302 - protein, 229 aa, Homo sapiens
MAVPETRPNHTIYINNLNEKIKKDELKKSLYAIFSQFGQILDILVSRSLKMRGQAFVIFKEVSSATNALRSMQGFPFYDKPMRIQYAKTDSDIIAKMKGTFVERDRKREKRKPKSQETPATKKAVQGGGATPVVGAVQGPVPGMPPMTQAPRIMHHMPGQPPYMPPPGMIPPPGLAPGQIPPGAMPPQQLMPGQMPPAQPCSFLDPDHCLHCRDKVWASSRLVRGLVGG

SEQ ID NO: 818303 - protein, 347 aa, Homo sapiens
MFASASQNNRGSYSHVWIDRSLASAPSTRTHRVGMHLLCRSEESCEPTTLDDGSRRIPGLTVTVYVLSVYKTLPPWSSLSMAVPETRPNHTIYINNLNEKIKKDELKKSLYAIFSQFGQILDILVSRSLKMRGQAFVIFKEVSSATNALRSMQGFPFYDKPMRIQYAKTDSDIIAKMKGTFVERDRKREKRKPKSQETPATKKAVQGGGATPVVGAVQGPVPGMPPMTQAPRIMHHMPGQPPYMPPPGMIPPPGLAPGQIPPGAMPPQQLMPGQMPPAQPLSENPPNHILFLTNLPEETNELMLSMLFNQFPGFKEVRLVPGRHDIAFVEFDNEVQAGAARGCPAGL

SEQ ID NO: 818304 - protein, 284 aa, Homo sapiens
  misc_feature (3)..(3): Xaa can be any naturally occurring amino acid
  misc_feature (22)..(22): Xaa can be any naturally occurring amino acid
  misc_feature (28)..(28): Xaa can be any naturally occurring amino acid
  misc_feature (35)..(35): Xaa can be any naturally occurring amino acid
  misc_feature (38)..(38): Xaa can be any naturally occurring amino acid
RHXNKIENQANTFLFKLLQLTXAVPHRXTHYFSTXNEXSEGELKKSLYAIFSQFGQILDILVSRSLKMRGQAFVIFKEVSSATNALRSMQGFPFYDKPMRIQYAKTDSDIIAKMKGTFVERDRKREKRKPKSQETPATKKAVQGGGATPVVGAVQGPVPGMPPMTQAPRIMHHMPGQPPYMPPPGMIPPPGLAPGQIPPGAMPPQQLMPGQMPPAQPLSENPPNHILFLTNLPEETNELMLSMLFNQFPGFKEVRLVPGRHDIAFVEFDNEVQAGAARGCPAGL

SEQ ID NO: 818305 - protein, 279 aa, Homo sapiens
MDPRHSGYPINWLMVFYLGCASSKKGSSKVFFSPTAELKKSLYAIFSQFGQILDILVSRSLKMRGQAFVIFKEVSSATNALRSMQGFPFYDKPMRIQYAKTDSDIIAKMKGTFVERDRKREKRKPKSQETPATKKAVQGGGATPVVGAVQGPVPGMPPMTQAPRIMHHMPGQPPYMPPPGMIPPPGLAPGQIPPGAMPPQQLMPGQMPPAQPLSENPPNHILFLTNLPEETNELMLSMLFNQFPGFKEVRLVPGRHDIAFVEFDNEVQAGAARGCPAGL

SEQ ID NO: 818306 - protein, 246 aa, Homo sapiens
MAVPETRPNHTIYINNLNEKIKKDELKKSLYAIFSQFGQILDILVSRSLKMRGQAFVIFKERIQYAKTDSDIIAKMKGTFVERDRKREKRKPKSQETPATKKAVQGGGATPVVGAVQGPVPGMPPMTQAPRIMHHMPGQPPYMPPPGMIPPPGLAPGQIPPGAMPPQQLMPGQMPPAQPLSENPPNHILFLTNLPEETNELMLSMLFNQFPGFKEVRLVPGRHDIAFVEFDNEVQAGAARGCPAGL

SEQ ID NO: 818307 - protein, 165 aa, Homo sapiens
ARGFVVWSQGSSRRRLRELRPCRKVTSGANDHRRQASGTLGVRAFLGPSEETCCSRPGCLGPVPFFYTGSHIRVFSPGRPFGCLGQWESPFRVLRPPGRVEHPGSRSKSLESSLRTRAGEAGPTHALLSRFASVLPPTPALPDFLFGGRSLSSRRWDKGFGETQG

SEQ ID NO: 818308 - protein, 120 aa, Homo sapiens
MAVPETRPNHTIYINNLNEKIKKDELKKSLYAIFSQFGQILDILVSRSLKMRGQAFVIFKEVSSATNLPEETNELMLSMLFNQFPGFKEVRLVPGRHDIAFVEFDNEVQAGAARGCPAGL

SEQ ID NO: 818309 - protein, 82 aa, Homo sapiens
GLRALVLTDSPIPPQLSENPPNHILFLTNLPEETNELMLSMLFNQFPGFKEVRLVPGRHDIAFVEFDNEVQAGAARGCPAGL

SEQ ID NO: 818310 - protein, 165 aa, Homo sapiens; identical to SEQ ID NO: 818307

SEQ ID NO: 818311 - protein, 75 aa, Homo sapiens
NLEDPRYNAKAINELMLSMLSISSLASRRSVWYPGGMTSPSWSLTMRYRQGQLADALQGFKITQNNAMKISFAKK

SEQ ID NO: 818312 - protein, 561 aa, Homo sapiens
GAANGPAPLGVRAPPAWRTSPAAEMGATGAAEPLQSVLWVKQQRCAVSLEPARALLRWWRSPGPGAGAPGADACSVPVSEIIAVEETDVHGKHQGSGKWQKMEKPYAFTVHCVKRARRHRWKWAQVTFWCPEEQLCHLWLQTLREMLEKLTSRPKHLLVFINPFGGKGQGKRIYERKVAPLFTLASITTDIIVTEHANQAKETLYEINIDKYDGIVCVGGDGMFSEVLHGLIGRTQRSAGVDQNHPRAVLVPSSLRIGIIPAGSTDCVCYSTVGTSDAETSALHIVVGDSLAMDVSSVHHNSTLLRYSVSLLGYGFYGDIIKDSEKKRWLGLARYDFSGLKTFLSHHCYEGTVSFLPAQHTVGSPRDRKPCRAGCFVCRQSKQQLEEEQKKALYGLEAAEDVEEWQVVCGKFLAINATNMSCACRRSPRGLSPAAHLGDGSSDLILIRKCSRFNFLRFLIRHTNQQDQFDFTFVEVYRVKKFQFTSKHMEDEDSDLKEGGKKRFGHICSSHPSCCCTVSNSSWNCDGEVLHSPAIEVRVHCQLVRLFARGIEENPKPDSHS

SEQ ID NO: 818313 - protein, 111 aa, Homo sapiens
KDDIADRFIAVRGISWTEFDFTFVEVYRVKKFQFTSKHMEDEDSDLKEGGKKRFGHICSSHPSCCCTVSNSSWNCDGEVLHSPAIEVRVHCQLVRLFARGIEENPKPDSHS

SEQ ID NO: 818314 - protein, 561 aa, Homo sapiens; identical to SEQ ID NO: 818312

SEQ ID NO: 818315 - protein, 561 aa, Homo sapiens; identical to SEQ ID NO: 818312

SEQ ID NO: 818316 - protein, 171 aa, Homo sapiens
GAANGPAPLGVRAPPAWRTSPAAEMGATGAAEPLQSVLWVKQQRCAVSLEPARALLRWWRSPGPGAGAPGADACSVPVSEIIAVEETDVHGKHQGSGKWQKMEKPYAFTVHCVKRARRHRWKWAQVTFWCPEEQLCHLWLQTLREMLEKLSTCVFGLRDRMAVVACACLIG

SEQ ID NO: 818317 - protein, 182 aa, Homo sapiens
MKTLAGLVLGLVIFDAAVTAPTLESINYDSETYDATLEDLDNLYNYENIPVDKVEIEIATVMPSGNRELLTPPPQPEKAQEEEEEEESTPRLIDGSSPQEPEFTGVLGPHTNEDFPTCLLCTCISTTVYCDDHELDAIPPLPKNTAYFYSRFNRIKKINKNDFASLSMDDSINGLHRFTHFL

SEQ ID NO: 818318 - protein, 322 aa, Homo sapiens
MKTLAGLVLGLVIFDAAVTAPTLESINYDSETYDATLEDLDNLYNYENIPVDKVEIEIATVMPSGNRELLTPPPQPEKAQEEEEEEESTPRLIDGSSPQEPEFTGVLGPHTNEDFPTCLLCTCISTTVYCDDHELDAIPPLPKNTAYFYSRFNRIKKINKNDFASLSDLKRIDLTSNLISEIDEDAFRKLPQLRELVLRDNKIRQLPELPTTLTFIDISNNRLGRKGIKQEAFKDMYDLHHLYLTDNNLDHIPLPLPENLRALHLQNNNILEMHEDTFCNVKNLTYIRKALEDIRLDGNPINLSKTPQAYMCLPRLPVGSLV

SEQ ID NO: 818319 - protein, 408 aa, Homo sapiens
MLNDSQYNPKRQTLVFSATLTLVHQAPARILHKKHTKKMDKTAKLDLLMQKIGMRGKPKVIDLTRNEATVETLTETKIHCETDEKDFYLYYFLMQYPGRSLVFANSISCIKRLSGLLKVLDIMPLTLHACMHQKQRLRNLEQFARLEDCVLLATDVAARGLDIPKVQHVIHYQVPRTSEIYVHRSGRTARATNEGLSLMLIGPEDVINFKKIYKALKKDEDIPLFPVQTKYMDVVKERIRLARQIEKSEYRNFQACLHNSWIEQQQCPALLVVGDSSPAVDAVVECNSKLDPTKTTLLKMADCGGLPQISQPAKLAEAFKYFVQGMGYMPSASMTRLMRSRTASGSSVTSLDGTRSRSHTSEGTRSRSHTSEGTRSRSHTSEGAHLDITPNSGAAGNSAGPKSMEVSC

SEQ ID NO: 818320 - protein, 116 aa, Homo sapiens
MVVSHLFGKEEMQSNVEVVHTYRQHIVNDMNPGNLHLFINAYNSRRDLEIERPMPGTHTVTLQCPALLVVGDSSPAVDAVVECNSKLDPTKTTLLKMADCGGLPQISHPPSSLYEP

SEQ ID NO: 818321 - protein, 81 aa, Homo sapiens
ASGDLAPQQLTAFSLLVSRSRPSSLRPSSTSCRAWDTVSMAFPVCSGSGHVSELEVLCPEPGLDEQFCVPLASFSFLGGNS

SEQ ID NO: 818322 - protein, 394 aa, Homo sapiens
MSREMQDVDLAEVKPLVEKGETITGLLQEFDVQEQDIETLHGSVHVTLCGTPKGNRPVILTYHDIGMNHKTCYNPLFNYEDMQEITQHFAVCHVDAPGQQDGAASFPAGYMYPSMDQLAEMLPGVLQQFGLKSIIGMGTGAGAYILTRFALNNPEMVEGLVLINVNPCAEGWMDWAASKISGWTQALPDMVVSHLFGKEEMQSNVEVVHTYRQHIVNDMNPGNLHLFINAYNSRRDLEIERPMPGTHTVTLQCPALLVVGDSSPAVDAVVECNSKLDPTKTTLLKMADCGGLPQISQPAKLAEAFKYFVQGMGYMPSASMTRLMRSRTASGSSVTSLDGTRSRSHTSEGTRSRSHTSEGTRSRSHTSEGAHLDITPNSGAAGNSAGPKSMEVSC

SEQ ID NO: 818323 - protein, 394 aa, Homo sapiens; identical to SEQ ID NO: 818322

SEQ ID NO: 818324 - protein, 372 aa, Homo sapiens [sequence omitted]

SEQ ID NO: 818325 - protein, 345 aa, Homo sapiens
TTYFRPWSLRRPNHDIGMNHKTCYNPLFNYEDMQEITQHFAVCHVDAPGQQDGAASFPAGYMYPSMDQLAEMLPGVLQQFGLKSIIGMGTGAGAYILTRFALNNPEMVEGLVLINVNPCAEGWMDWAASKISGWTQALPDMVVSHLFGKEEMQSNVEVVHTYRQHIVNDMNPGNLHLFINAYNSRRDLEIERPMPGTHTVTLQCPALLVVGDSSPAVDAVVECNSKLDPTKTTLLKMADCGGLPQISQPAKLAEAFKYFVQGMGYMPSASMTRLMRSRTASGSSVTSLDGTRSRSHTSEGTRSRSHTSEGTRSRSHTSEGAHLDITPNSGAAGNSAGPKSMEVSC

SEQ ID NO: 818326 - protein, 205 aa, Homo sapiens
MVVSHLFGKEEMQSNVEVVHTYRQHIVNDMNPGNLHLFINAYNSRRDLEIERPMPGTHTVTLQCPALLVVGDSSPAVDAVVECNSKLDPTKTTLLKMADCGGLPQISQPAKLAEAFKYFVQGMGYMPSASMTRLMRSRTASGSSVTSLDGTRSRSHTSEGTRSRSHTSEGTRSRSHTSEGAHLDITPNSGAAGNSAGPKSMEVSC

SEQ ID NO: 818327 - protein, 125 aa, Homo sapiens
FYLKAAGIKSSLGLARRRACGWWTGMPGSSPGSLLPSNRLSLVPLVPSASMTRLMRSRTASGSSVTSLDGTRSRSHTSEGTRSRSHTSEGTRSRSHTSEGAHLDITPNSGAAGNSAGPKSMEVSC

SEQ ID NO: 818328 - protein, 394 aa, Homo sapiens; identical to SEQ ID NO: 818322

SEQ ID NO: 818329 - protein, 394 aa, Homo sapiens; identical to SEQ ID NO: 818322

SEQ ID NO: 818330 - protein, 394 aa, Homo sapiens; identical to SEQ ID NO: 818322

SEQ ID NO: 818331 - protein, 394 aa, Homo sapiens; identical to SEQ ID NO: 818322

SEQ ID NO: 818332 - protein, 106 aa, Homo sapiens
LNKILFSFGEGGNSDMQAPLLNRQNRKGEKVGFMSRLNLAWLPAGAEARQFTIRPRLPRGAGPPASAPSFPFSLALGAGHRDFTWLCSRHAVWDSQGKPACHPHLP

SEQ ID NO: 818333 - protein, 394 aa, Homo sapiens; identical to SEQ ID NO: 818322

SEQ ID NO: 818334 - protein, 336 aa, Homo sapiens [sequence omitted]

SEQ ID NO: 818335 - protein, 339 aa, Homo sapiens
  misc_feature (259)..(259): Xaa can be any naturally occurring amino acid
  misc_feature (288)..(289): Xaa can be any naturally occurring amino acid
  misc_feature (302)..(302): Xaa can be any naturally occurring amino acid
  misc_feature (306)..(306): Xaa can be any naturally occurring amino acid
  misc_feature (330)..(330): Xaa can be any naturally occurring amino acid
MSREMQDVDLAEVKPLVEKGETITGLLQEFDVQEQDIETLHGSVHVTLCGTPKGNRPVILTYHDIGMNHKTCYNPLFNYEDMQEITQHFAVCHVDAPGQQDGAASFPAGYMYPSMDQLAEMLPGVLQQFGLKSIIGMGTGAGAYILTRFALNNPEMVEGLVLINVNPCAEGWMDWAASKISGWTQALPDMVVSHLFGKEEMQSNVEVVHTYRQHIVNDMNPGNLHLFINAYNSGRLEMGEDAGTHRHLQCLLCGGGALXCVMRVSALILTTRHSLRWRLCGSADLQRXXSLRLQYSCRMGNXSEHXRLMRPPALVQRILVTRVNRRTSVXRGRASHTGH

SEQ ID NO: 818336 - protein, 210 aa, Homo sapiens [sequence omitted]

SEQ ID NO: 818337 - protein, 113 aa, Homo sapiens
MSREMQDVDLAEVKPLVEKGETITGLLQEFDVQEQDIETLHGSVHVTLCGTPKGNRPVILTYHDIGMNHKTCYNPLFNYEDMQEITQHFAVCHVDAPGQQDGAASFPAGFQVA

SEQ ID NO: 818338 - protein, 130 aa, Homo sapiens
MSREMQDVDLAEVKPLVEKGETITGLLQEFDVQEQDIETLHGSVHVTLCGTPKGNRPVILTYHDIGMNHKTCYNPLFNYEDMQEITQHFAVCHVDAPGQQDGAASFPAGYMYPSMDQLAEMLPGVLQQFG

SEQ ID NO: 818339 - protein, 109 aa, Homo sapiens
MADCGGLPQISQPAKLAEAFKYFVQGMGYMPSASMTRLMRSRTASGSSVTSLDGTRSRSHTSEGTRSRSHTSEGTRSRSHTSEGAHLDITPNSGAAGNSAGPKSMEVSC

SEQ ID NO: 818340 - protein, 104 aa, Homo sapiens
MCFATETPNFFLILLFSLLSLTAVLQTKPATTPSSTTRTCRRSPSTLPSATWTPLASRTAQPPSPQGTCTPPWISWLKCFLESFNSLGKSEGSAPSLSAEKPGF

SEQ ID NO: 818341 - protein, 394 aa, Homo sapiens; identical to SEQ ID NO: 818322

SEQ ID NO: 818342 - protein, 394 aa, Homo sapiens; identical to SEQ ID NO: 818322

SEQ ID NO: 818343 - protein, 293 aa, Homo sapiens
MGWGRGAAACSAAHTAFFWVLLSSFGLPWKVPSVSDCWDVCLTLCLELQLNNPEMVEGLVLINVNPCAEGWMDWAASKISGWTQALPDMVVSHLFGKEEMQSNVEVVHTYRQHIVNDMNPGNLHLFINAYNSRRDLEIERPMPGTHTVTLQCPALLVVGDSSPAVDAVVECNSKLDPTKTTLLKMADCGGLPQISQPAKLAEAFKYFVQGMGYMPSASMTRLMRSRTASGSSVTSLDGTRSRSHTSEGTRSRSHTSEGTRSRSHTSEGAHLDITPNSGAAGNSAGPKSMEVSC

SEQ ID NO: 818344 - protein, 198 aa, Homo sapiens
MQEEMQSNVEVVHTYRQHIVNDMNPGNLHLFINAYNSRRDLEIERPMPGTHTVTLQCPALLVVGDSSPAVDAVVECNSKLDPTKTTLLKMADCGGLPQISQPAKLAEAFKYFVQGMGYMPSASMTRLMRSRTASGSSVTSLDGTRSRSHTSEGTRSRSHTSEGTRSRSHTSEGAHLDITPNSGAAGNSAGPKSMEVSC

SEQ ID NO: 818345 - protein, 67 aa, Homo sapiens
RYRQVVCQLWSGRHSREYVHQLRQECYALNGTQRFLERYIYNLGSEFVRFDSDVVVEFRAVTGAGAA

SEQ ID NO: 818346 - protein, 394 aa, Homo sapiens; identical to SEQ ID NO: 818322

SEQ ID NO: 818347 - protein, 394 aa, Homo sapiens; identical to SEQ ID NO: 818322

SEQ ID NO: 818348 - protein, 383 aa, Homo sapiens
MSREMQDVDLAEVKPLVEKGETITGLLQEFDVQEQDIETLHGSVHVTLCGTPKGNRPVILTYHDIGMNHKTCYNPLFNYEDMQEITQHFAVCHVDAPGQQDGAASFPAGYMYPSMDQLAEMLPGVLQQFGLKSIIGMGTGAGAYILTRFALNNPEMVEGLVLINVNPCAEGWMDWAASKISGWTQALPDMVVSHLFGKEEMQSNVEVVHTYRQHIVNDMNPGNLHLFINAYNSRRDLEIERPMPGTHTVTLQCPALLVVGDSSPAVDAVVECNSKLDPTKTTLLKMADCGGLPQISQPAKLAEAFKYFVQGMGYSEYGIPRVQWVGACVGIGSAWLDEPFAHLASVLTVRFSSCSVDIPDLWVRSRGSEKYVSCGCGIDPNSF

SEQ ID NO: 818349 - protein, 216 aa, Homo sapiens
MSREMQDVDLAEVKPLVEKGETITGLLQEFDVQEQDIETLHGSVHVTLCGTPKGNRPVILTYHDIGMNHKTCYNPLFNYEDMQEITQHFAVCHVDAPGQQDGAASFPAGYMYPSMDQLAEMLPGVLQQFGLKSIIGMGTGAGAYILTRFALNNPEMVEGLVLINVNPCAEGWMDWAASKPFDYQALVLDTVMCAVTSCSPSLDLVALKFLALPVPD

SEQ ID NO: 818350 - protein, 264 aa, Homo sapiens
MSREMQDVDLAEVKPLVEKGETITGLLQEFDVQEQDIETLHGSVHVTLCGTPKGNRPVILTYHDIGMNHKTCYNPLFNYEDMQEITQHFAVCHVDAPGQQDGAASFPAGYMYPSMDQLAEMLPGVLQQFGLKQHYWHGKQEQAPYILSSELALKQTRGDEWRGLVLIKRGTTGAGRAGMDEGRLQDLRMDPSSAGHGGVPPFWEGRNAEYVEVVHTYRQHIVNDMNPGNLHLFINAYNSRRDLEIERPMPGTHTVTVSTLPGPA

SEQ ID NO: 818351 - protein, 115 aa, Homo sapiens
LGWMGVGDFSRGGVLMLMMHLFPAAGATWRLSDQCREPTQSPCSEWLFSPPALAVGAAHYKGGLAGRAFFLSVAGHCVSETWIYSTQRLSITQPDLDFSLCRWHPFLGCPHDLGL

SEQ ID NO: 818352 - protein, 608 aa, Homo sapiens
MSDKSDLKAELERKKQRLAQIREEKKRKEEERKKKEADMQQKKEPVQDDSDLDRKRRETEALLQSIGISPEPPLVPTPMSPSSKSVSTPSEAGSQDSGDLGPLTRRRLHKLGVSKVTQVDFLPREVVSYSKETQTPLATHQSEEDEEDEEMVESKVGQDSELENQDKKQEVKEAPPRELTEEEKQQILHSEEFLIFFDRTIRVIERALAEDSDIFFDYSGRELEEKDGDVQAGANLSFNRQFYDEHWSKHRVVTCMDWSLQYPELMVASYNNNEDAPHEPDGVALVWNMKFKKTTPEYVFHCQSSVMSVCFARFHPNLVVGGTYSGQIVLWDNRSHRRTPVQRTPLSAAAHTHPVYCVNVVGTQNAHNLITVSTDGKMCSWSLDMLSTPQESMELVYNKSKPVAVTGMAFPTGDVNNFVVGSEEGTVYTACRHGSKAGIGEVFEGHQGPVTGINCHMAVGPIDFSHLFVTSSFDWTVKLWTTKHNKPLYSFEDNADYVYDVMWSPVHPALFACVDGMGRLDLWNLNNDTEVPTASVAIEGASALNRVRWAQAGKEVAVGDSEGRIWVYDVGELAVPHNDEWTRFARTLVEIRANRADSEEEGTVELSA

SEQ ID NO: 818353 - protein, 116 aa, Homo sapiens
MSDKSDLKAELERKKQRLAQIREEKKRKEEERKKKEADMQQKKEPVQDDSDLDRKRRETEALLQSIGISPEPPLVPTPMSPSSKSVSTPSEAGSQDSGDLGPLTRDEALLCSPGWS

SEQ ID NO: 818354 - protein, 625 aa, Homo sapiens
MSDKSDLKAELERKKQRLAQIREEKKRKEEERKKKEADMQQKKEPVQDDSDLDRKRRETEALLQSIGISPEPPLVQPLHFLTWDTCYFHYLVPTPMSPSSKSVSTPSEAGSQDSGDLGPLTRRRLHKLGVSKVTQVDFLPREVVSYSKETQTPLATHQSEEDEEDEEMVESKVGQDSELENQDKKQEVKEAPPRELTEEEKQQILHSEEFLIFFDRTIRVIERALAEDSDIFFDYSGRELEEKDGDVQAGANLSFNRQFYDEHWSKHRVVTCMDWSLQYPELMVASYNNNEDAPHEPDGVALVWNMKFKKTTPEYVFHCQSSVMSVCFARFHPNLVVGGTYSGQIVLWDNRSHRRTPVQRTPLSAAAHTHPVYCVNVVGTQNAHNLITVSTDGKMCSWSLDMLSTPQESMELVYNKSKPVAVTGMAFPTGDVNNFVVGSEEGTVYTACRHGSKAGIGEVFEGHQGPVTGINCHMAVGPIDFSHLFVTSSFDWTVKLWTTKHNKPLYSFEDNADYVYDVMWSPVHPALFACVDGMGRLDLWNLNNDTEVPTASVAIEGASALNRVRWAQAGKEVAVGDSEGRIWVYDVGELAVPHNDEWTRFARTLVEIRANRADSEEEGTVELSA

SEQ ID NO: 818355 - protein, 541 aa, Homo sapiens
MSDKSDLKAELERKKQRLAQIREEKKRKEEERKKKEADMQQKKEPVQDDSDLDRKRRETEALLQSIGISPEPPLVPTPMSPSSKSVSTPSEAGSQDSGDLGPLTRTLQWDTDPSVLQLQSDSELGRRLHKLGVSKVTQVDFLPREVVSYSKETQTPLATHQSEEDEEDEEMVESKVGQDSELENQDKKQEVKEAPPRELTEEEKQQILHSEEFLIFFDRTIRVIERALAEDSDIFFDYSGRELEEKDGDVQAGANLSFNRQFYDEHWSKHRVVTCMDWSLQYPELMVASYNNNEDAPHEPDGVALVWNMKFKKTTPEYVFHCQSSVMSVCFARFHPNLVVGGTYSGQIVLWDNRSHRRTPVQRTPLSAAAHTHPVYCVNVVGTQNAHNLITVSTDGKMCSWSLDMLSTPQESMELVYNKSKPVAVTGMAFPTGDVNNFVVGSEEGTVYTACRHGSKAGIGEVFEGHQGPVTGINCHMAVGPIDFSHLFVTSSFDWTVKLWTTKSEVTGPPINSREPGLSVYYWKCTSFVEVSGKECCGIGD

SEQ ID NO: 818356 - protein, 645 aa, Homo sapiens
MSDKSDLKAELERKKQRLAQIREEKKRKEEERKKKEADMQQKKEPVQDDSDLDRKRRETEALLQSIGISPEPPLVQPLHFLTWDTCYFHYLVPTPMSPSSKSVSTPSEAGSQDSGDLGPLTRTLQWDTDPSVLQLQSDSELGRRLHKLGVSKVTQVDFLPREVVSYSKETQTPLATHQSEEDEEDEEMVESKVGQDSELENQDKKQEVKEAPPRELTEEEKQQILHSEEFLIFFDRTIRVIERALAEDSDIFFDYSGRELEEKDGDVQAGANLSFNRQFYDEHWSKHRVVTCMDWSLQYPELMVASYNNNEDAPHEPDGVALVWNMKFKKTTPEYVFHCQSSVMSVCFARFHPNLVVGGTYSGQIVLWDNRSHRRTPVQRTPLSAAAHTHPVYCVNVVGTQNAHNLITVSTDGKMCSWSLDMLSTPQESMELVYNKSKPVAVTGMAFPTGDVNNFVVGSEEGTVYTACRHGSKAGIGEVFEGHQGPVTGINCHMAVGPIDFSHLFVTSSFDWTVKLWTTKHNKPLYSFEDNADYVYDVMWSPVHPALFACVDGMGRLDLWNLNNDTEVPTASVAIEGASALNRVRWAQAGKEVAVGDSEGRIWVYDVGELAVPHNDEWTRFARTLVEIRANRADSEEEGTVELSA

SEQ ID NO: 818357 - protein, 231 aa, Homo sapiens
MSDKSDLKAELERKKQRLAQIREEKKRKEEERKKKEADMQQKKEPVQDDSDLDRKRRETEALLQSIGISPEPPLVPTPMSPSSKSVSTPSEAGSQDSGDLGPLTRTLQWDTDPSVLQLQSDSELGRRLHKLGVSKVTQVDFLPREVVSYSKETQTPLATHQSEEDEEDEEMVESKVGQDSELENQDKKQEVKEAPPREVTEGRKTGRIFTSEEFHTLNGQKRDEEPRGNNA

SEQ ID NO: 818358 - protein, 628 aa, Homo sapiens
MSDKSDLKAELERKKQRLAQIREEKKRKEEERKKKEADMQQKKEPVQDDSDLDRKRRETEALLQSIGISPEPPLVPTPMSPSSKSVSTPSEAGSQDSGDLGPLTRTLQWDTDPSVLQLQSDSELGRRLHKLGVSKVTQVDFLPREVVSYSKETQTPLATHQSEEDEEDEEMVESKVGQDSELENQDKKQEVKEAPPRELTEEEKQQILHSEEFLIFFDRTIRVIERALAEDSDIFFDYSGRELEEKDGDVQAGANLSFNRQFYDEHWSKHRVVTCMDWSLQYPELMVASYNNNEDAPHEPDGVALVWNMKFKKTTPEYVFHCQSSVMSVCFARFHPNLVVGGTYSGQIVLWDNRSHRRTPVQRTPLSAAAHTHPVYCVNVVGTQNAHNLITVSTDGKMCSWSLDMLSTPQESMELVYNKSKPVAVTGMAFPTGDVNNFVVGSEEGTVYTACRHGSKAGIGEVFEGHQGPVTGINCHMAVGPIDFSHLFVTSSFDWTVKLWTTKHNKPLYSFEDNADYVYDVMWSPVHPALFACVDGMGRLDLWNLNNDTEVPTASVAIEGASALNRVRWAQAGKEVAVGDSEGRIWVYDVGELAVPHNDEWTRFARTLVEIRANRADSEEEGTVELSA

SEQ ID NO: 818359 - protein, 343 aa, Homo sapiens
MVASYNNNEDAPHEPDGVALVWNMKFKKTTPEYVFHCQSSVMSVCFARFHPNLVVGGTYSGQIVLWDNRSHRRTPVQRTPLSAAAHTHPVYCVNVVGTQNAHNLITVSTDGKMCSWSLDMLSTPQESMELVYNKSKPVAVTGMAFPTGDVNNFVVGSEEGTVYTACRHGSKAGIGEVFEGHQGPVTGINCHMAVGPIDFSHLFVTSSFDWTVKLWTTKHNKPLYSFEDNADYVYDVMWSPVHPALFACVDGMGRLDLWNLNNDTEVPTASVAIEGASALNRVRWAQAGKEVAVGDSEGRIWVYDVGELAVPHNDEWTRFARTLVEIRANRADSEEEGTVELSA

SEQ ID NO: 818360 - protein, 267 aa, Homo sapiens
MHACMHACACMHACMHACACMHACMHACACMHACMHACACMHACMHACACMHACMHACACMHACMHACACMHACMHACACMHACMHACACMHACMHACACMHACMHACACMHACMHACACMHACMHACACMHACMHACACMHACMHACACMHACMHACACMHACMHACACMHACMHACACMHACMHACACMHACMHACACMHACMHACACMHACMHACACMHACMHAMMHACMHACTPGIVLLNPYEARYDWVQMWCSSYYGTGPKT

SEQ ID NO: 818361 - protein, 217 aa, Homo sapiens
YQMETQAEQQELETLPTTKMAQTNPTPGSLGPWKITIYDQENFQGKRMEFTSSCPNVSERSFDNVRSLKVESGAWIGYEHTSFCGQQFILERGEYPRWDAWSGSNAYHIERLMSFRPICSANHKESKMTIFEKENFIGRQWEISDDYPSLQAMGWFNNEVGSMKIQSGAWVCYQYPGYRGYQYILECDHHGGDYKHWREWGSHAQTSQIQSIRRIQQ

SEQ ID NO: 818362 - protein, 922 aa, Homo sapiens
RREEIEKQALEKSKRSSKTFKEMLQDRESQNQKSTVPSRRRMYSFDDVLEEGKRPPTMTVSEASYQSERVEEKGATYPSEIPKEDSTTFAKREDRVTTEIQLPSQSPVEEQSPASLSSLRSRSTQMESTRVSASLPRSYRKTDTVRLTSVVTPRPFGSQTRGISSLPRSYTMDDAWKYNGDVEDIKRTPNNVVSTPAPSPDASQLASSLSSQKEVAATEEDVTRLPSPTSPFSSLSQDQAATSKATLSSTSGLDLMSESGEGEISPQREVSRSQDQFSDMRISINQTPGKSLDFGFTIKWDIPGIFVASVEAGSPAEFSQLQVDDEIIAINNTKFSYNDSKEWEEAMAKAQETGHLVMDVRRYGKAGSPETKWIDATSGIYNSEKSSNLSVTTDFSESLQSSNIESKEINGIHDESNAFESKASESISLKNLKRRSQFFEQGSSDSVVPDLPVPTISAPSRWVWDQEEERKRQERWQKEQDRLLQEKYQREQEKLREEWQRAKQEAERENSKYLDEELMVLSSNSMSLTTREPSLATWEATWSEGSKSSDREGTRAGEEERRQPQEEVVHEDQGKKPQDQLVIERERKWEQQLQEEQEQKRLQAEAEEQKRPAEEQKRQAEIERETSVRIYQYRRPVDSYDIPKTEEASSGFLPGDRNKSRSTTELDDYSTNKNGNNKYLDQIGNTTSSQRRSKKEQVPSGAELERQQILQEMRKRTPLHNDNSWIRQRSASVNKEPVSLPGIMRRGESLDNLDSPRSNSWRQPPWLNQPTGFYASSSVQDFSRPPPQLVSTSNRAYMRNPSSSVPPPSAGSVKTSTTGVATTQSPTPRSHSPSASQSGSQLRNRSVSGKRICSYCNNILGKGAAMIIESLGLCYHLHCFKCVACECDLGGSSSGAEVRIRNHQLYCNDCYLRFKSGRPTAM

SEQ ID NO: 818363 - protein, 909 aa, Homo sapiens
RREEIEKQALEKSKRSSKTFKEMLQDRESQNQKSTVPSRRRMYSFDDVLEEGKRPPTMTVSEASYQSERVEEKGATYPSEIPKEDSTTFAKREDRVTTEIQLPSQSPVEEQSPASLSSLRSRSTQMESTRVSASLPRSYRKTDTVRLTSVVTPRPFGSQTRGISSLPRSYTMDDAWKYNGDVEDIKRTPNNVVSTPAPSPDASQLASSLSSQKEVAATEEDVTRLPSPTSPFSSLSQDQAATSKATLSSTSGLDLMSESGEGEISPQREVSRSQDQFSDMRISINQTPGKSLDFGFTIKWDIPGIFVASVEAGSPAEFSQLQVDDEIIAINNTKFSYNDSKEWEEAMAKAQETGHLVMDVRRYGKAGSPETKWIDATSGIYNSEKSSNLSVTTDFSESLQSSNIESKEINGIHDESNAFESKASESISLKNLKRRSQFFEQGSSDSVVPDLPVPTISAPSRWVWDQEEERKRQERWQKEQDRLLQEKYQREQEKLREEWQRAKQEAERENSKYLDEELMVLSSNSMSLTTREPSLATWEATWSEGSKSSDREGTRAGEEERRQPQEEVVHEDQGKKPQDQLVIERERKWEQQLQEEQEQKRLQAEAEEQKRPAEEQKRQAEIERETSVRIYQYRRPVDSYDIPKTEEASSGFLPGDRNKSRSTTELDDYSTNKNGNNKYLDQIGNTTSSQRRSKKEQVPSGAELERQQILQEMRKRTPLHNDNSWIRQRSASVNKEPVSLPGIMRRGESLDNLDSPRSNSWRQPPWLNQPTGFYASSSVQDFSRPPPQLVSTSNRAYMRNPSSSVPPPSAGSVKTSTTGVATTQSPTPRSHSPSASQSGSQLRNSVLPVSVTSEALPQELKSGSETTNCTATTAISDSNLDGQPPCDVSLHTKALLQIEEEVVAAHVDL

SEQ ID NO: 818364 - protein, 853 aa, Homo sapiens
RREEIEKQALEKSKRSSKTFKEMLQDRESQNQKSTVPSRRRMYSFDDVLEEGKRPPTMTVSEASYQSERVEEKGATYPSEIPKEDSTTFAKREDRVTTEIQLPSQSPVEEQSPASLSSLRSRSTQMESTRVSASLPRSYRKTDTVRLTSVVTPRPFGSQTRGISSLPRSYTMDDAWKYNGDVEDIKRTPNNVVSTPAPSPDASQLASSLSSQKEVAATEEDVTRLPSPTSPFSSLSQDQAATSKATLSSTSGLDLMSESGEGEISPQREVSRSQDQFSDMRISINQTPGKSLDFGFTIKWDIPGIFVASVEAGSPAEFSQLQVDDEIIAINNTKFSYNDSKEWEEAMAKAQETGHLVMDVRRYGKAGSPETKWIDATSGIYNSEKSSNLSVTTDFSESLQSSNIESKEINGIHDESNAFESKASESISLKNLKRRSQFFEQGSSDSVVPDLPVPTISAPSRWVWDQEEERKRQERWQKEQDRLLQEKYQREQEKLREEWQRAKQEAERENSKYLDEELMVLSSNSMSLTTREPSLATWEATWSEGSKSSDREGTRAGEEERRQPQEEVVHEDQGKKPQDQLVIERERKWEQQLQEEQEQKRLQAEAEEQKRPAEEQKRQAEIERETSVRIYQYRRPVDSYDIPKTEEASSGFLPGDRNKSRSTTELDDYSTNKNGNNKYLDQIGNTTSSQRRSKKEQVPSGAELERQQILQEMRKRTPLHNDNSWIRQRSASVNKEPVSLPGIMRRGESLDNLDSPRSNSWRQPPWLNQPTGFYASSSVQDFSRPPPQLVSTSNRAYMRNPSSSVPPPSAGSVKTSTTGVATTQSPTPRSHSPSASQSGSQLRNSWTANRHVM

SEQ ID NO: 818365 - protein, 949 aa, Homo sapiens
RREEIEKQALEKSKRSSKTFKEMLQDRESQNQKSTVPSRRRMYSFDDVLEEGKRPPTMTVSEASYQSERVEEKGATYPSEIPKEDSTTFAKREDRVTTEIQLPSQSPVEEQSPASLSSLRSRSTQMESTRVSASLPRSYRKTDTVRLTSVVTPRPFGSQTRGISSLPRSYTMDDAWKYNGDVEDIKRTPNNVVSTPAPSPDASQLASSLSSQKEVAATEEDVTRLPSPTSPFSSLSQDQAATSKATLSSTSGLDLMSESGEGEISPQREVSRSQDQFSDMRISINQTPGKSLDFGFTIKWDIPGIFVASVEAGSPAEFSQLQVDDEIIAINNTKFSYNDSKEWEEAMAKAQETGHLVMDVRRYGKADWGKDQPSLPFIRHKTLNLTSMATKIIGSPETKWIDATSGIYNSEKSSNLSVTTDFSESLQSSNIESKEINGIHDESNAFESKASESISLKNLKRRSQFFEQGSSDSVVPDLPVPTISAPSRWVWDQEEERKRQERWQKEQDRLLQEKYQREQEKLREEWQRAKQEAERENSKYLDEELMVLSSNSMSLTTREPSLATWEATWSEGSKSSDREGTRAGEEERRQPQEEVVHEDQGKKPQDQLVIERERKWEQQLQEEQEQKRLQAEAEEQKRPAEEQKRQAEIERETSVRIYQYRRPVDSYDIPKTEEASSGFLPGDRNKSRSTTELDDYSTNKNGNNKYLDQIGNTTSSQRRSKKEQVPSGAELERQQILQEMRKRTPLHNDNSWIRQRSASVNKEPVSLPGIMRRGESLDNLDSPRSNSWRQPPWLNQPTGFYASSSVQDFSRPPPQLVSTSNRAYMRNPSSSVPPPSAGSVKTSTTGVATTQSPTPRSHSPSASQSGSQLRNRSVSGKRICSYCNNILGKGAAMIIESLGLCYHLHCFKCVACECDLGGSSSGAEVRIRNHQLYCNDCYLRFKSGRPTAM

SEQ ID NO: 818366 - protein, 565 aa, Homo sapiens
KIGTIQRRLAWPLRKDDSKFVKRSIFEKSSNLSVTTDFSESLQSSNIESKEINGIHDESNAFESKASESISLKNLKRRSQFFEQGSSDSVVPDLPVPTISAPSRWVWDQEEERKRQERWQKEQDRLLQEKYQREQEKLREEWQRAKQEAERENSKYLDEELMVLSSNSMSLTTREPSLATWEATWSEGSKSSDREGTRAGEEERRQPQEEVVHEDQGKKPQDQLVIERERKWEQQLQEEQEQKRLQAEAEEQKRPAEEQKRQAEIERETSVRIYQYRRPVDSYDIPKTEEASSGFLPGDRNKSRSTTELDDYSTNKNGNNKYLDQIGNTTSSQRRSKKEQVPSGAELERQQILQEMRKRTPLHNDNSWIRQRSASVNKEPVSLPGIMRRGESLDNLDSPRSNSWRQPPWLNQPTGFYASSSVQDFSRPPPQLVSTSNRAYMRNPSSSVPPPSAGSVKTSTTGVATTQSPTPRSHSPSASQSGSQLRNRSVSGKRICSYCNNILGKGAAMIIESLGLCYHLHCFKCVACECDLGGSSSGAEVRIRNHQLYCNDCYLRFKSGRPTAM

SEQ ID NO: 818367 - protein, 498 aa, Homo sapiens
MKTYIVYFSSLPMCCNTGSSDSVVPDLPVPTISAPSRWVWDQEEERKRQERWQKEQDRLLQEKYQREQEKLREEWQRAKQEAERENSKYLDEELMVLSSNSMSLTTREPSLATWEATWSEGSKSSDREGTRAGEEERRQPQEEVVHEDQGKKPQDQLVIERERKWEQQLQEEQEQKRLQAEAEEQKRPAEEQKRQAEIERETSVRIYQYRRPVDSYDIPKTEEASSGFLPGDRNKSRSTTELDDYSTNKNGNNKYLDQIGNTTSSQRRSKKEQVPSGAELERQQILQEMRKRTPLHNDNSWIRQRSASVNKEPVSLPGIMRRGESLDNLDSPRSNSWRQPPWLNQPTGFYASSSVQDFSRPPPQLVSTSNRAYMRNPSSSVPPPSAGSVKTSTTGVATTQSPTPRSHSPSASQSGSQLRNRSVSGKRICSYCNNILGKGAAMIIESLGLCYHLHCFKCVACECDLGGSSSGAEVRIRNHQLYCNDCYLRFKSGRPTAM

SEQ ID NO: 818368 - protein, 922 aa, Homo sapiens; identical to SEQ ID NO: 818362

SEQ ID NO: 818369 - protein, 210 aa, Homo sapiens [sequence omitted]

SEQ ID NO: 818370 - protein, 922 aa, Homo sapiens; identical to SEQ ID NO: 818362

SEQ ID NO: 818371 - protein, 178 aa, Homo sapiens
AIIAQKRDTRNSCKTPQCHSVQPENVPGSASGSEPSAMWQSKNLGQVSDHFSIFAQLSIHSVAVPELSSSQLPSNGSYPEPPALLLPRHIISLVSSNLNFPACEMGPLNLDFPAVLPVSVTSEALPQELKSGSETTNCTATTAISDSNLDGQPPCDVSLHTKALLQIEEEVVAAHVDL

SEQ ID NO: 818372 - protein, 820 aa, Homo sapiens
RREEIEKQALEKSKRSSKTFKEMLQDRESQNQKSTVPSRRRMYSFDDVLEEGKRPPTMTVSEASYQSERVEEKGATYPSEIPKEDSTTFAKREDRVTTEIQLPSQSPVEEQSPASLSSLRSRSTQMESTRVSASLPRSYRKTDTVRLTSVVTPRPFGSQTRGISSLPRSYTMDDAWKYNGDVEDIKRTPNNVVSTPAPSPDASQLASSLSSQKEVAATEEDVTRLPSPTSPFSSLSQDQAATSKATLSSTSGLDLMSESGEGEISPQREVSRSQDQFSDMRISINQTPGKSLDFGFTIKWDIPGIFVASVEAGSPAEFSQLQVDDEIIAINNTKFSYNDSKEWEEAMAKAQETGHLVMDVRRYGKAGSPETKWIDATSGIYNSEKSSNLSVTTDFSESLQSSNIESKEINGIHDESNAFESKASESISLKNLKRRSQFFEQGSSDSVVPDLPVPTISAPSRWVWDQEEERKRQERWQKEQDRLLQEKYQREQEKLREEWQRAKQEAERENSKYLDEELMVLSSNSMSLTTREPSLATWEATWSEGSKSSDREGTRAGEEERRQPQEEVVHEDQGKKPQDQLVIERERKWEQQLQEEQEQKRLQAEAEEQKRPAEEQKRQAEIERETSVRIYQYRRPVDSYDIPKTEEASSGFLPGDRNKSRSTTELDDYSTNKNGNNKYLDQIGNTTSSQRRSKKEQVPSGAELERQQILQEMRKRTPLHNDNSWIRQRSASVNKEPVSLPGIMRRGESLDNLDSPRSNSWRQPPWLNQPTGFYASSSVQDFSRPPPQLVSTSNRAEPWNHGKTFTCTAAYPESKPREVS

SEQ ID NO: 818373 - protein, 631 aa, Homo sapiens
RREEIEKQALEKSKRSSKTFKEMLQDRESQNQKSTVPSRRRMYSFDDVLEEGKRPPTMTVSEASYQSERVEEKGATYPSEIPKEDSTTFAKREDRVTTEIQLPSQSPVEEQSPASLSSLRSRSTQMESTRVSASLPRSYRKTDTVRLTSVVTPRPFGSQTRGISSLPRSYTMDDAWKYNGDVEDIKRTPNNVVSTPAPSPDASQLASSLSSQKEVAATEEDVTRLPSPTSPFSSLSQDQAATSKATLSSTSGLDLMSESGEGEISPQREVSRSQDQFSDMRISINQTPGKSLDFGFTIKWDIPGIFVASVEAGSPAEFSQLQVDDEIIAINNTKFSYNDSKEWEEAMAKAQETGHLVMDVRRYGKAGSPETKWIDATSGIYNSEKSSNLSVTTDFSESLQSSNIESKEINGIHDESNAFESKASESISLKNLKRRSQFFEQGSSDSVVPDLPVPTISAPSRWVWDQEEERKRQERWQKEQDRLLQEKYQREQEKLREEWQRAKQEAERENSKYLDEELMVLSSNSMSLTTREPSLATWEATWSEGSKSSDREGTRAGEEERRQPQEEVVHEDQGKKPQDQLVIERERKWEQQLQEEQEQKRLQAEAEEQKRPAEEQKRQADHRTGSTRPRI

SEQ ID NO: 818374 - protein, 473 aa, Homo sapiens
RREEIEKQALEKSKRSSKTFKEMLQDRESQNQKSTVPSRRRMYSFDDVLEEGKRPPTMTVSEASYQSERVEEKGATYPSEIPKEDSTTFAKREDRVTTEIQLPSQSPVEEQSPASLSSLRSRSTQMESTRVSASLPRSYRKTDTVRLTSVVTPRPFGSQTRGISSLPRSYTMDDAWKYNGDVEDIKRTPNNVVSTPAPSPDASQLASSLSSQKEVAATEEDVTRLPSPTSPFSSLSQDQAATSKATLSSTSGLDLMSESGEGEISPQREVSRSQDQFSDMRISINQTPGKSLDFGFTIKWDIPGIFVASVEAGSPAEFSQLQVDDEIIAINNTKFSYNDSKEWEEAMAKAQETGHLVMDVRRYGKADWGKDQPSLPFIRHKTLNLTSMATKIIGSPETKWIDATSGIYNSEKSSNLSVTTDFSESLQSSNIESKEINGIHDESNAFESKASESISLKNLKRRSQFFEQGKPQS

SEQ ID NO: 818375 - protein, 560 aa, Homo sapiens
RREEIEKQALEKSKRSSKTFKEMLQDRESQNQKSTVPSRRRMYSFDDVLEEGKRPPTMTVSEASYQSERVEEKGATYPSEIPKEDSTTFAKREDRVTTEIQLPSQSPVEEQSPASLSSLRSRSTQMESTRVSASLPRSYRKTDTVRLTSVVTPRPFGSQTRGISSLPRSYTMDDAWKYNGDVEDIKRTPNNVVSTPAPSPDASQLASSLSSQKEVAATEEDVTRLPSPTSPFSSLSQDQAATSKATLSSTSGLDLMSESGEGEISPQREVSRSQDQFSDMRISINQTPGKSLDFGFTIKWDIPGIFVASVEAGSPAEFSQLQVDDEIIAINNTKFSYNDSKEWEEAMAKAQETGHLVMDVRRYGKADWGKDQPSLPFIRHKTLNLTSMATKIIGSPETKWIDATSGIYNSEKSSNLSVTTDFSESLQSSNIESKEINGIHDESNAFESKGSSDSVVPDLPVPTISAPSRWVWDQEEERKRQERWQKEQDRLLQEKYSHVSQGRTEGRVATGTQGGERRDSTYFGRGTLSSQPLSRPRGLLRLQATETAMKKITNRKRHTR

SEQ ID NO: 818376 - protein, 302 aa, Homo sapiens
ELFIHKKKRLRTARVSQNPAAVYPAEPPAPGMFRDFGEPGPSSGNGGGYGGPAQPPAAAQAAQQKFHLVPSINTMSGSQELQWMVQPHFLGPSSYPRPLTYPQYSPPQPRPGVIRALGPPPGVRRRPCEQISPEEEERRRVRRERNKLAAAKCRNRRKELTDFLQAETDKLEDEKSGLQREIEELQKQKERLELVLEAHRPICKIPEGAKEGDTGSTSGTSSPPAPCRPVPCISLSPGPVLEPEALHTPTLMTTPSLTPFTPSLVFTYPSTPEPCASAHRKSSSSSGDPSSDPLGSPTLLAL

SEQ ID NO: 818377 - protein, 302 aa, Homo sapiens; identical to SEQ ID NO: 818376

SEQ ID NO: 818378 - protein, 228 aa, Homo sapiens
MSGSQELQWMVQPHFLGPSSYPRPLTYPQYSPPQPRPGVIRALGPPPGVRRRPCEQISPEEEERRRVRRERNKLAAAKCRNRRKELTDFLQAETDKLEDEKSGLQREIEELQKQKERLELVLEAHRPICKIPEGAKEGDTGSTSGTSSPPAPCRPVPCISLSPGPVLEPEALHTPTLMTTPSLTPFTPSLVFTYPSTPEPCASAHRKSSSSSGDPSSDPLGSPTLLAL

SEQ ID NO: 818379 - protein, 266 aa, Homo sapiens
ELFIHKKKRLRTARVSQNPAAVYPAEPPAPGMFRDFGEPGPSSGNGGGYGGPAQPPAAAQAAQQKFHLVPSINTMSGSQELQWMVQPHFLGPSSYPRPLTYPQYSPPQPRPGVIRALGPPPGVRRRPCEQETDKLEDEKSGLQREIEELQKQKERLELVLEAHRPICKIPEGAKEGDTGSTSGTSSPPAPCRPVPCISLSPGPVLEPEALHTPTLMTTPSLTPFTPSLVFTYPSTPEPCASAHRKSSSSSGDPSSDPLGSPTLLAL

SEQ ID NO: 818380 - protein, 308 aa, Homo sapiens
ELFIHKKKRLRTARVSQNPAAVYPAEPPAPGMFRDFGEPGPSSGNGGGYGGPAQPPAAAQAAQQKFHLVPSINTMSGSQELQWMVQPHFLGPSSYPRPLTYPQYSPPQPRPGVIRALGPPPGVRRRPCEQISPEEEERRRVRRERNKLAAAKCRNRRKELTDFLQAETDKLEDEKSGLQREIEELQKQKERLELVLEAHRPICKIPEGAKEGDTGSTSGTSSPPAPCRPVPCISLSPGPVLEPEALHTPTLMTTPSLTPFTPSLVFTYPSTPEPCASAHRKSSSSSGDPSSDPLNRTAQEAPLASVMS

SEQ ID NO: 818381 - protein, 162 aa, Homo sapiens
MAVLSKEYGFVLLTGAASFIMVAHLAINVSKARKKYKVEYPIMYSTDPENGHIFNCIQRAPPRTRWKVYPPLLIFSSCWEVFTHPRRIASGPWAWPWDCWTSSLCLWLLHGRTPASVVEGALGSNSALLGLGGAQLCALLSSILVGLKVAWAVDPNAAIKEL

SEQ ID NO: 818382 - protein, 189 aa, Homo sapiens
SGSTHAVADSDVLSLSSSCAKDDARRKMAVLSKEYGFVLLTGAASFIMVAHLAINVSKARKKYKVEYPIMYSTDPENGHIFNCIQRAPPRTRWKVYPPLLIFSSCWEVFTHPRRIASGPWAWPWDCWTSSLCLWLLHGRTPASVVEGALGSNSALLGLGGAQLCALLSSILVGLKVAWAVDPNAAIKEL

SEQ ID NO: 818383 - protein, 162 aa, Homo sapiens; identical to SEQ ID NO: 818381

SEQ ID NO: 818384 - protein, 162 aa, Homo sapiens; identical to SEQ ID NO: 818381

SEQ ID NO: 818385 - protein, 162 aa, Homo sapiens; identical to SEQ ID NO: 818381

SEQ ID NO: 818386 - protein, 176 aa, Homo sapiens
MPWRGRRFRLCRRKMAVLSKEYGFVLLTGAASFIMVAHLAINVSKARKKYKVEYPIMYSTDPENGHIFNCIQRAPPRTRWKVYPPLLIFSSCWEVFTHPRRIASGPWAWPWDCWTSSLCLWLLHGRTPASVVEGALGSNSALLGLGGAQLCALLSSILVGLKVAWAVDPNAAIKEL

SEQ ID NO: 818387 - protein, 162 aa, Homo sapiens; identical to SEQ ID NO: 818381

SEQ ID NO: 818388 - protein, 162 aa, Homo sapiens; identical to SEQ ID NO: 818381

SEQ ID NO: 818389 - protein, 162 aa, Homo sapiens; identical to SEQ ID NO: 818381

SEQ ID NO: 818390 - protein, 162 aa, Homo sapiens; identical to SEQ ID NO: 818381

SEQ ID NO: 818391 - protein, 160 aa, Homo sapiens
SDSPLYTIPCIGGAASFIMVAHLAINVSKARKKYKVEYPIMYSTDPENGHIFNCIQRAPPRTRWKVYPPLLIFSSCWEVFTHPRRIASGPWAWPWDCWTSSLCLWLLHGRTPASVVEGALGSNSALLGLGGAQLCALLSSILVGLKVAWAVDPNAAIKEL

SEQ ID NO: 818392 - protein, 162 aa, Homo sapiens; identical to SEQ ID NO: 818381

SEQ ID NO: 818393 - protein, 162 aa, Homo sapiens; identical to SEQ ID NO: 818381

SEQ ID NO: 818394 - protein, 162 aa, Homo sapiens; identical to SEQ ID NO: 818381

SEQ ID NO: 818395 - protein, 146 aa, Homo sapiens
MAVLSKEYGFVLLTGAASFIMVAHLAINVSKARKKYKVEYPIMYSTDPGWKVYPPLLIFSSCWEVFTHPRRIASGPWAWPWDCWTSSLCLWLLHGRTPASVVEGALGSNSALLGLGGAQLCALLSSILVGLKVAWAVDPNAAIKEL

SEQ ID NO: 818396 - protein, 145 aa, Homo sapiens
MAVLSKEYGFVLLTGAASFIMVAHLAINVSKARKKYKVEYPIMYSTDPENGHIFNCIQRAPPRTRWKVYPPLLIFSSCWEVFTHPRNFCSFFFFRTPASVVEGALGSNSALLGLGGAQLCALLSSILVGLKVAWAVDPNAAIKEL

SEQ ID NO: 818397 - protein, 120 aa, Homo sapiens
MAVLSKEYGFVLLTGAASFIMVAHLAINVSKARKKYKVEYPIMYSTDPENGHIFNCIQRAPPRTRWKVYPPLLIFSSCWEVFTHPRTLGTGRLFPRRPCILGEALPFFLVELHPQCSLQN

SEQ ID NO: 818398 - protein, 81 aa, Homo sapiens
SDSPLYTIPCIGGAASFIMVAHLAINVSKARKKYKVEYPIMYSTDPENGHIFNCIQRAPPRTRECRPCRAPKTSAEWVFSV

SEQ ID NO: 818399 - protein, 319 aa, Homo sapiens
RSEPRPGCGNKMAGKKNVLSSLAVYAEDSEPESDGEAGIEAVGSAAEEKGGLVSDAYGEDDFSRLGGDEDGYEEEEDENSRQSEDDDSETEKPEADDPKDNTEAEKRDPQELVASFSERVRNMSPDEIKIPPEPPGRCSNHLQDKIQKLYERKIKEGMDMNYIIQRKKEFRNPSIYEKLIQFCAIDELGTNYPKDMFDPHGWSEDSYYEALAKAQKIEMDKLEKAKKERTKIEFVTGTKKGTTTNATSTTTTTASTAVADAQKRKSKWDSAIPVTTIAQPTILTTTATLPAVVTVTTSASGSKTTVISAVGTIVKKAKQ

SEQ ID NO: 818400 - protein, 319 aa, Homo sapiens; identical to SEQ ID NO: 818399

SEQ ID NO: 818401 - protein, 319 aa, Homo sapiens; identical to SEQ ID NO: 818399

SEQ ID NO: 818402 - protein, 319 aa, Homo sapiens; identical to SEQ ID NO: 818399

SEQ ID NO: 818403 - protein, 190 aa, Homo sapiens
RSEPRPGCGNKMAGKKNVLSSLAVYAEDSEPESDGEAGIEAVGSAAEEKGGLVSDAYGEDDFSRLGGDEDGYEEEEDENSRQSEDDDSETEKPEADDPKDNTEAEKRDPQELVASFSERVRNMSPDEIKIPPEPPGRCSNHLQDKIQKLYERKIKEGMDMNYIIQRKKEFRNPRICLIPMAGLRTPTMRH

SEQ ID NO: 818404 - protein, 259 aa, Homo sapiens
RSEPRPGCGNKMAGKKNVLSSLAVYAEDSEPESDGEAGIEAVGSAAEEKGGLVSDAYGEDDFSRLGGDEDGYEEEEDENSRQSEDDDSETEKPEADDPKDNTEAEKRDPQELVASFSERVRNMSPDEIKIPPEPPGRCSNHLQDKIQKLYERKIKEGMDMNYIIQRKKEFRNPSIYEKLIQFCAIDELGTNYPKDMFDPHGWSEDSYYEALAKAQKIEMDKLEKAKKERTKACCRDVSAAPGDRSCPSPVRAGTASSWV

SEQ ID NO: 818405 - protein, 74 aa, Homo sapiens
GLSLATLRSTFGVWDAQKRKSKWDSAIPVTTIAQPTILTTTATLPAVVTVTTSASGSKTTVISAVGTIVKKAKQ

SEQ ID NO: 818406 - protein, 130 aa, Homo sapiens
RSEPRPGCGNKMAGKKNVLSSLAVYAEDSEPESDGEAGIEAVGSAAEEKGGLVSDAYGEDDFSRLGGDEDGYEEEEDENSRQSEDDDSETEKPEADDPKVFGVGCGGWLDANKVFEHCGSVRMFGQDLSH

SEQ ID NO: 818407 - protein, 113 aa, Homo sapiens
RSEPRPGCGNKMAGKKNVLSSLAVYAEDSEPESDGEAGIEAVGSAAEEKGGLVSDAYGEDDFSRLGGDEDGYEEEEDENSRQSEDDDSETEKPEADDPKVEPAPLVWIPLKTS

SEQ ID NO: 818408 - protein, 319 aa, Homo sapiens; identical to SEQ ID NO: 818399

SEQ ID NO: 818409 - protein, 319 aa, Homo sapiens; identical to SEQ ID NO: 818399

SEQ ID NO: 818410 - protein, 319 aa, Homo sapiens; identical to SEQ ID NO: 818399

SEQ ID NO: 818411 - protein, 197 aa, Homo sapiens
MSPDEIKIPPEPPGRCSNHLQDKIQKLYERKIKEGMDMNYIIQRKKEFRNPSIYEKLIQFCAIDELGTNYPKDMFDPHGWSEDSYYEALAKAQKIEMDKLEKAKKERTKIEFVTGTKKGTTTNATSTTTTTASTAVADAQKRKSKWDSAIPVTTIAQPTILTTTATLPAVVTVTTSASGSKTTVISAVGTIVKKAKQ

SEQ ID NO: 818412 - protein, 197 aa, Homo sapiens; identical to SEQ ID NO: 818411

SEQ ID NO: 818413 - protein, 128 aa, Homo sapiens
MVPTKTIESWGTCELEQLAANEDGRRGHVHLRCQEVKNTALLIGGRPQVVRGQTLSTAPGSRAACPSIWNAKQKLLSGGIWGVGPSPEIYKVAPPTGQWSLGCTVLSSPRVAPQVTAWPSSQWCPQQR

SEQ ID NO: 818414 - protein, 103 aa, Homo sapiens [sequence omitted]

SEQ ID NO: 818415 - protein, 157 aa, Homo sapiens
MGIKHILWVVGAKLVNGTELDQLLVDAERTVPALSRHKSTSLHGTCTIQLLGLHKTFTTFKSSSAALSKLPDGPPTLPRKMDPVNLGAREEHRVKVTAEFCLTDLQSAQLDWAYHTQTHTRAMLFSLYVTSLNIQWRKTRHRSGPKTSHLYAKISFF

SEQ ID NO: 818416 - protein, 189 aa, Homo sapiens
MPHSRSPQTSHGDQTYPGARLSSLVFYPRGGSQVLKNMGARSPHPADPRSSRSTHVPTNQGPGTRPATGISLVDYFRTIGTPTKETGTVLSTIRATMWTFAWLQLKFHGTSKGSWVSPSPSSPVCQTHLWVVGAKLVNGTELDQLLVDAERTVPALQQAQVHVPAWDLNHPAPGADTKPSQLLNPAQLL

SEQ ID NO: 818417 - protein, 302 aa, Homo sapiens
MNSALPIWGRARCLRRTQRGFSLLKELSKQYCIPPGITRSLHMPGTPRPPPHLTCPEPFGQAPPPHTQEEAVPPAQGKDSSGPQALQTRPCNKLLFAPFWPFPICPSQFSGPWLMPHSRSPQTSHGDQTYPGARLSSLVFYPRGGSQVLKNMGARSPHPADPRSSRSTHVPTNQGPGTRPATGISLVDYFRTIGTPTKETGTVLSTIRATMWTFAWLQLNPMEQAKDLGVPITLQPVCQTHLWVVGAKLVNGTELDQLLVDAERTVPALQQAQVHVPAWDLNHPAPGADTKPSQLLNPAQLL

SEQ ID NO: 818418 - protein, 105 aa, Homo sapiens
MKTREAVTKVAPEQLWAEGAYSDPCVLFSGLKAFMGSVFFVLGKMKPALGRHRAGAFSSRLAGCMPCVCPEGSATPELLWTANTRDTGLMGNKDTQEQTMKKSRH

SEQ ID NO: 818419 - protein, 190 aa, Homo sapiens
MNSALPIWGRARCLRRTQRGFSLLKELSKQYCIPPGITRSLHMPGTPRPPPHLTCPEPFGQAPPPHTQEEAVPARTGEGQLRSPGAADTSLQQAWGLEGRGKEREGRFNQGLRMRNPNYPLAPAPTFLAQQPAPPEGHQCPGPTAPLLGVREAVWRPQLLEDGQAEPEVGGAGVLMPGSETGHKGNKAQR

SEQ ID NO: 818420 - protein, 202 aa, Homo sapiens
RSEPRPGCGNKMAGKKNVLSSLAVYAEDSEPESDGEAGIEAVGSAAEEKGGLVSDAYGEDDFSRLGGDEDGYEEEEDENSRQSEDDDSETEKPEADDPKDNTEAEKRDPQELVASFSERVRNMSPDEIKIPPEPPGRCSNHLQDKIQKLYERKIKEGMDMNYIIQRKKEFRNPSIYEKLIQFCAIDELGTNYPKICLIHMLV

SEQ ID NO: 818421 - protein, 103 aa, Homo sapiens
MVPTKTIESWGTCELEQLAANEDGRRGHVHLRCQEVKNTALLIGGRPQVVRGQTLSTAPGSRAACPSIWNAKQKLLSGGIWGVGPSPEIYKVAPPTGQWSGSR

SEQ ID NO: 818422 - protein, 136 aa, Homo sapiens
RSEPRPGCGNKMAGKKNVLSSLAVYAEDSEPESDGEAGIEAVGSAAEEKGGLVSDAYGEDDFSRLGGDEDGYEEEEDENSRQSEDDDSETEKPEADDPKDNTEAEKRDPQELVVHKASGSCLASDLNICQGVLAGS

SEQ ID NO: 818423 - protein, 105 aa, Homo sapiens
GRDSWWDDPSWVNGLFAPAPSYACETPQARSFKLNPLNSLSCRKMTIQRLKNLRLMTQRYLVLAVVGGWMQTRCLNTVAQFVCLVKICPTDKLCNCVDIFWDKIS

SEQ ID NO: 818424 - protein, 210 aa, Homo sapiens
SPSRRGSASRAGPGRASETMNFLLSWVHWSLALLLYLHHAKWSQAAPMAEGGGQNHHEVVKFMDVYQRSYCHPIETLVDIFQEYPDEIEYIFKPSCVPLMRCGGCCNDEGLECVPTEESNITMQIMRIKPHQGQHIGEMSFLQHNKCECRPKKDRARQENPCGPCSERRKHLFVQDPQTCKCSCKNTDSRCKARQLELNERTCRCDKPRR

SEQ ID NO: 818425 - protein, 210 aa, Homo sapiens; identical to SEQ ID NO: 818424

SEQ ID NO: 818426 - protein, 210 aa, Homo sapiens; identical to SEQ ID NO: 818424

SEQ ID NO: 818427 - protein, 234 aa, Homo sapiens
SPSRRGSASRAGPGRASETMNFLLSWVHWSLALLLYLHHAKWSQAAPMAEGGGQNHHEVVKFMDVYQRSYCHPIETLVDIFQEYPDEIEYIFKPSCVPLMRCGGCCNDEGLECVPTEESNITMQIMRIKPHQGQHIGEMSFLQHNKCECRPKKDRARQEKKSVRGKGKGQKRKRKKSRYKSWSVPCGPCSERRKHLFVQDPQTCKCSCKNTDSRCKARQLELNERTCRCDKPRR

SEQ ID NO: 818428 - protein, 228 aa, Homo sapiens
SPSRRGSASRAGPGRASETMNFLLSWVHWSLALLLYLHHAKWSQAAPMAEGGGQNHHEVVKFMDVYQRSYCHPIETLVDIFQEYPDEIEYIFKPSCVPLMRCGGCCNDEGLECVPTEESNITMQIMRIKPHQGQHIGEMSFLQHNKCECRPKKDRARQEKKSVRGKGKGQKRKRKKSRPCGPCSERRKHLFVQDPQTCKCSCKNTDSRCKARQLELNERTCRCDKPRR

SEQ ID NO: 818429 - protein, 210 aa, Homo sapiens; identical to SEQ ID NO: 818424

SEQ ID NO: 818430 - protein, 251 aa, Homo sapiens
SPSRRGSASRAGPGRASETMNFLLSWVHWSLALLLYLHHAKWSQAAPMAEGGGQNHHEVVKFMDVYQRSYCHPIETLVDIFQEYPDEIEYIFKPSCVPLMRCGGCCNDEGLECVPTEESNITMQIMRIKPHQGQHIGEMSFLQHNKCECRPKKDRARQEKKSVRGKGKGQKRKRKKSRYKSWSVYVGARCCLMPWSLPGPHPCGPCSERRKHLFVQDPQTCKCSCKNTDSRCKARQLELNERTCRCDKPRR

SEQ ID NO: 818431 - protein, 166 aa, Homo sapiens
SPSRRGSASRAGPGRASETMNFLLSWVHWSLALLLYLHHAKWSQAAPMAEGGGQNHHEVVKFMDVYQRSYCHPIETLVDIFQEYPDEIEYIFKPSCVPLMRCGGCCNDEGLECVPTEESNITMQIMRIKPHQGQHIGEMSFLQHNKCECRPKKDRARQEKCDKPRR

SEQ ID NO: 818432 - protein, 210 aa, Homo sapiens; identical to SEQ ID NO: 818424

SEQ ID NO: 818433 - protein, 193 aa, Homo sapiens
SPSRRGSASRAGPGRASETMNFLLSWVHWSLALLLYLHHAKWSQAAPMAEGGGQNHHEVVKFMDVYQRSYCHPIETLVDIFQEYPDEIEYIFKPSCVPLMRCGGCCNDEGLECVPTEESNITMQIMRIKPHQGQHIGEMSFLQHNKCECRPKKDRARQENPCGPCSERRKHLFVQDPQTCKCSCKNTDSRCKM

SEQ ID NO: 818434 - protein, 210 aa, Homo sapiens; identical to SEQ ID NO: 818424

SEQ ID NO: 818435 - protein, 210 aa, Homo sapiens; identical to SEQ ID NO: 818424

SEQ ID NO: 818436 - protein, 210 aa, Homo sapiens; identical to SEQ ID NO: 818424

SEQ ID NO: 818437 - protein, 210 aa, Homo sapiens; identical to SEQ ID NO: 818424

SEQ ID NO: 818438 - protein, 210 aa, Homo sapiens; identical to SEQ ID NO: 818424

SEQ ID NO: 818439 - protein, 210 aa, Homo sapiens; identical to SEQ ID NO: 818424

SEQ ID NO: 818440 - protein, 210 aa, Homo sapiens; identical to SEQ ID NO: 818424

SEQ ID NO: 818441 - protein, 296 aa, Homo sapiens
SPSRRGSASRAGPGRASETMNFLLSWVHWSLALLLYLHHAKWSQAAPMAEGGGQNHHEVVKFMDVYQRSYCHPIETLVDIFQEYPDEIEYIFKPSCVPLMRCGGCCNDEGLECVPTEESNITMQIMRIKPHQGQHIGEMSFLQHNKCECRPKKDRARQEKVSGPDFSTSPSPWPVVLVWGSWLPLLGAPIASLGQGLGLVGDLWWQQQWDGANSRMMALGLVRKHSQEPGTSFGRDNAFWVSRSFLTRTCCFGVSGGTVDTGSLACSRTPTVGRGSGWQRGQLLCVRGNGLFWWLL

SEQ ID NO: 818442 - protein, 156 aa, Homo sapiens
SPSRRGSASRAGPGRASETMNFLLSWVHWSLALLLYLHHAKWSQAAPMAEGGGQNHHEVVKFMDVYQRSYCHPIETLVDIFQEYPDEIEYIFKPSCVPLMRCGGCCNDEGLECVPTEESNITMQIMRINLKEAKHIAEEADRKYEEVARKLVTPGG

SEQ ID NO: 818443 - protein, 1173 aa, Homo sapiens
MEELSADEIRRRRLARLAGGQTSQPTTPLTSPQRENPPGPPIAASAPGPSQSLGLNVHNMTPATSPIGASGVAHRSQSSEGVSSLSSSPSNSLETQSQSLSRSQSMDIDGVSCEKSMSQVDVDSGIENMEVDENDRREKRSLSDKEPSSGPEVSEEQALQLVCKIFRVSWKDRDRDVIFLSSLSAQFKQNPKEVFSDFKDLIGQILMEVLMMSTQTRDENPFASLTATSQPIAAAARSPDRNLLLNTGSNPGTSPMFCSVASFGASSLSSLGASGGASNWDSYSDHFTIETCKETDMLNYLIECFDRVGIEEKKAPKMCSQPAVSQLLSNIRSQCISHTALVLQGSLTQPRSLQQPSFLVPYMLCRNLPYGFIQELVRTTHQDEEVFKQIFIPILQGLALAAKECSLDSDYFKYPLMALGELCETKFGKTHPVCNLVASLRLWLPKSLSPGCGRELQRLSYLGAFFSFSVFAEDDVKVVEKYFSGPAITLENTRVVSQSLQHYLELGRQELFKILHSILLNGETREAALSYMAAVVNANMKKAQMQTDDRLVSTDGFMLNFLWVLQQLSTKIKLETVDPTYIFHPRCRITLPNDETRVNATMEDVNDWLTELYGDQPPFSEPKFPTECFFLTLHAHHLSILPSCRRYIRRLRAIRELNRTVEDLKNNESQWKDSPLATRHREMLKRCKTQLKKLVRCKACADAGLLDESFLRRCLNFYGLLIQLLLRILDPAYPDITLPLNSDVPKVFAALPEFYVEDVAEFLFFIVQYSPQALYEPCTQDIVMFLVVMLCNQNYIRNPYLVAKLVEVMFMTNPAVQPRTQKFFEMIENHPLSTKLLVPSLMKFYTDVEHTGATSEFYDKFTIRYHISTIFKSLWQNIAHHGTFMEEFNSGKQFVRYINMLINDTTFLLDESLESLKRIHEVQEEMKNKEQWDQLPRDQQQARQSQLAQDERVSRSYLALATETVDMFHILTKQVQKPFLRPELGPRLAAMLNFNLQQLCGPKCRDLKVENPEKYGFEPKKLLDQLTDIYLQLDCARFAKAIADDQRSYSKELFEEVISKMRKAGIKSTIAIEKFKLLAEKVEEIVAKNARAEIDYSDAPDEFRDPLMDTLMTDPVRLPSGTIMDRSIILRHLLNSPTDPFNRQTLTESMLEPVPELKEQIQAWMREKQNSDH

SEQ ID NO: 818444 - protein, 1173 aa, Homo sapiens; identical to SEQ ID NO: 818443

SEQ ID NO: 818445 - protein, 1302 aa, Homo sapiens
MEELSADEIRRRRLARLAGGQTSQPTTPLTSPQRENPPGPPIAASAPGPSQSLGLNVHNMTPATSPIGASGVAHRSQSSEGVSSLSSSPSNSLETQSQSLSRSQSMDIDGVSCEKSMSQVDVDSGIENMEVDENDRREKRSLSDKEPSSGPEVSEEQALQLVCKIFRVSWKDRDRDVIFLSSLSAQFKQNPKEVFSDFKDLIGQILMEVLMMSTQTRDENPFASLTATSQPIAAAARSPDRNLLLNTGSNPGTSPMFCSVASFGASSLSSLYESSPAPTPSFWSSVPVMGPSLASPSRAASQLAVPSTPLSPHSAASGTAAGSQPSSPRYRPYTVTHPWASSGVSILSSSPSPPALASSPQAVPASSSRQRPSSTGPPLPPASPSATSRRPSSLRISPSLGASGGASNWDSYSDHFTIETCKETDMLNYLIECFDRVGIEEKKAPKMCSQPAVSQLLSNIRSQCISHTALVLQGSLTQPRSLQQPSFLVPYMLCRNLPYGFIQELVRTTHQDEEVFKQIFIPILQGLALAAKECSLDSDYFKYPLMALGELCETKFGKTHPVCNLVASLRLWLPKSLSPGCGRELQRLSYLGAFFSFSVFAEDDVKVVEKYFSGPAITLENTRVVSQSLQHYLELGRQELFKILHSILLNGETREAALSYMAAVVNANMKKAQMQTDDRLVSTDGFMLNFLWVLQQLSTKIKLETVDPTYIFHPRCRITLPNDETRVNATMEDVNDWLTELYGDQPPFSEPKFPTECFFLTLHAHHLSILPSCRRYIRRLRAIRELNRTVEDLKNNESQWKDSPLATRHREMLKRCKTQLKKLVRCKACADAGLLDESFLRRCLNFYGLLIQLLLRILDPAYPDITLPLNSDVPKVFAALPEFYVEDVAEFLFFIVQYSPQALYEPCTQDIVMFLVVMLCNQNYIRNPYLVAKLVEVMFMTNPAVQPRTQKFFEMIENHPLSTKLLVPSLMKFYTDVEHTGATSEFYDKFTIRYHISTIFKSLWQNIAHHGTFMEEFNSGKQFVRYINMLINDTTFLLDESLESLKRIHEVQEEMKNKEQWDQLPRDQQQARQSQLAQDERVSRSYLALATETVDMFHILTKQVQKPFLRPELGPRLAAMLNFNLQQLCGPKCRDLKVENPEKYGFEPKKLLDQLTDIYLQLDCARFAKAIADDQRSYSKELFEEVISKMRKAGIKSTIAIEKFKLLAEKVEEIVAKNARAEIDYSDAPDEFRDPLMDTLMTDPVRLPSGTIMDRSIILRHLLNSPTDPFNRQTLTESMLEPVPELKEQIQAWMREKQNSDH

SEQ ID NO: 818446 - protein, 1173 aa, Homo sapiens; identical to SEQ ID NO: 818443

SEQ ID NO: 818447 - protein, 1057 aa, Homo sapiens
MSQVDVDSGIENMEVDENDRREKRSLSDKEPSSGPEVSEEQALQLVCKIFRVSWKDRDRDVIFLSSLSAQFKQNPKEVFSDFKDLIGQILMEVLMMSTQTRDENPFASLTATSQPIAAAARSPDRNLLLNTGSNPGTSPMFCSVASFGASSLSSLGASGGASNWDSYSDHFTIETCKETDMLNYLIECFDRVGIEEKKAPKMCSQPAVSQLLSNIRSQCISHTALVLQGSLTQPRSLQQPSFLVPYMLCRNLPYGFIQELVRTTHQDEEVFKQIFIPILQGLALAAKECSLDSDYFKYPLMALGELCETKFGKTHPVCNLVASLRLWLPKSLSPGCGRELQRLSYLGAFFSFSVFAEDDVKVVEKYFSGPAITLENTRVVSQSLQHYLELGRQELFKILHSILLNGETREAALSYMAAVVNANMKKAQMQTDDRLVSTDGFMLNFLWVLQQLSTKIKLETVDPTYIFHPRCRITLPNDETRVNATMEDVNDWLTELYGDQPPFSEPKFPTECFFLTLHAHHLSILPSCRRYIRRLRAIRELNRTVEDLKNNESQWKDSPLATRHREMLKRCKTQLKKLVRCKACADAGLLDESFLRRCLNFYGLLIQLLLRILDPAYPDITLPLNSDVPKVFAALPEFYVEDVAEFLFFIVQYSPQALYEPCTQDIVMFLVVMLCNQNYIRNPYLVAKLVEVMFMTNPAVQPRTQKFFEMIENHPLSTKLLVPSLMKFYTDVEHTGATSEFYDKFTIRYHISTIFKSLWQNIAHHGTFMEEFNSGKQFVRYINMLINDTTFLLDESLESLKRIHEVQEEMKNKEQWDQLPRDQQQARQSQLAQDERVSRSYLALATETVDMFHILTKQVQKPFLRPELGPRLAAMLNFNLQQLCGPKCRDLKVENPEKYGFEPKKLLDQLTDIYLQLDCARFAKAIADDQRSYSKELFEEVISKMRKAGIKSTIAIEKFKLLAEKVEEIVAKNARAEIDYSDAPDEFRDPLMDTLMTDPVRLPSGTIMDRSIILRHLLNSPTDPFNRQTLTESMLEPVPELKEQIQAWMREKQNSDH

SEQ ID NO: 818448 - protein, 296 aa, Homo sapiens
MYDHVQYNCLSSSGKQFVRYINMLINDTTFLLDESLESLKRIHEVQEEMKNKEQWDQLPRDQQQARQSQLAQDERVSRSYLALATETVDMFHILTKQVQKPFLRPELGPRLAAMLNFNLQQLCGPKCRDLKVENPEKYGFEPKKLLDQLTDIYLQLDCARFAKAIADDQRSYSKELFEEVISKMRKAGIKSTIAIEKFKLLAEKVEEIVAKNARAEIDYSDAPDEFRDPLMDTLMTDPVRLPSGTIMDRSIILRHLLNSPTDPFNRQTLTESMLEPVPELKEQIQAWMREKQNSDH

SEQ ID NO: 818449 - protein, 642 aa, Homo sapiens
MAAVVNANMKKAQMQTDDRLVSTDGFMLNFLWVLQQLSTKIKLETVDPTYIFHPRCRITLPNDETRVNATMEDVNDWLTELYGDQPPFSEPKFPTECFFLTLHAHHLSILPSCRRYIRRLRAIRELNRTVEDLKNNESQWKDSPLATRHREMLKRCKTQLKKLVRCKACADAGLLDESFLRRCLNFYGLLIQLLLRILDPAYPDITLPLNSDVPKVFAALPEFYVEDVAEFLFFIVQYSPQALYEPCTQDIVMFLVVMLCNQNYIRNPYLVAKLVEVMFMTNPAVQPRTQKFFEMIENHPLSTKLLVPSLMKFYTDVEHTGATSEFYDKFTIRYHISTIFKSLWQNIAHHGTFMEEFNSGKQFVRYINMLINDTTFLLDESLESLKRIHEVQEEMKNKEQWDQLPRDQQQARQSQLAQDERVSRSYLALATETVDMFHILTKQVQKPFLRPELGPRLAAMLNFNLQQLCGPKCRDLKVENPEKYGFEPKKLLDQLTDIYLQLDCARFAKAIADDQRSYSKELFEEVISKMRKAGIKSTIAIEKFKLLAEKVEEIVAKNARAEIDYSDAPDEFRDPLMDTLMTDPVRLPSGTIMDRSIILRHLLNSPTDPFNRQTLTESMLEPVPELKEQIQAWMREKQNSDH

SEQ ID NO: 818450 - protein, 1173 aa, Homo sapiens; identical to SEQ ID NO: 818443

SEQ ID NO: 818451 - protein, 183 aa, Homo sapiens
MLNFNLQQLCGPKCRDLKVENPEKYGFEPKKLLDQLTDIYLQLDCARFAKAIADDQRSYSKELFEEVISKMRKAGIKSTIAIEKFKLLAEKVEEIVAKNARAEIDYSDAPDEFRDPLMDTLMTDPVRLPSGTIMDRSIILRHLLNSPTDPFNRQTLTESMLEPVPELKEQIQAWMREKQNSDH

SEQ ID NO: 818452 - protein, 1217 aa, Homo sapiens
MEELSADEIRRRRLARLAGGQTSQPTTPLTSPQRENPPGPPIAASAPGPSQSLGLNVHNMTPATSPIGASGVAHRSQSSEGVSSLSSSPSNSLETQSQSLSRSQSMDIDGVSCEKSMSQVDVDSGIENMEVDENDRREKRSLSDKEPSSGPEVSEEQALQLVCKIFRVSWKDRDRDVIFLSSLSAQFKQNPKEVFSDFKDLIGQILMEVLMMSTQTRDENPFASLTATSQPIAAAARSPDRNLLLNTGSNPGTSPMFCSVASFGASSLSSLGASGGASNWDSYSDHFTIETCKETDMLNYLIECFDRVGIEEKKAPKMCSQPAVSQLLSNIRSQCISHTALVLQGSLTQPRSLQQPSFLVPYMLCRNLPYGFIQELVRTTHQDEEVFKQIFIPILQGLALAAKECSLDSDYFKYPLMALGELCETKFGKTHPVCNLVASLRLWLPKSLSPGCGRELQRLSYLGAFFSFSVFAEDDVKVVEKYFSGPAITLENTRVVSQSLQHYLELGRQELFKILHSILLNGETREAALSYMAAVVNANMKKAQMQTDDRLVSTDGFMLNFLWVLQQLSTKIKLETVDPTYIFHPRCRITLPNDETRVNATMEDVNDWLTELYGDQPPFSEPKFPTECFFLTLHAHHLSILPSCRRYIRRLRAIRELNRTVEDLKNNESQWKDSPLATRHREMLKRCKTQLKKLVRCKACADAGLLDESFLRRCLNFYGLLIQLLLRILDPAYPDITLPLNSDVPKVFAALPEFYVEDVAEFLFFIVQYSPQALYEPCTQDIVMFLVVMLCNQNYIRNPYLVAKLVEVMFMTNPAVQPRTQKFFEMIENHPLSTKLLVPSLMKFYTDVEHTGATSEFYDKFTIRYHISTIFKSLWQNIAHHGTFMEEFNSGKQFVRYINMLINDTTFLLDESLESLKRIHEVQEEMKNKEQWDQLPRDQQQARQSQLAQDERVSRSYLALATETVDMFHILTKQVQKPFLRPELGPRLAAMLNFNLQQLCGPKCRDLKVENPEKYGFEPKKLLDQLTDIYLQLDCARFAKAIADDQNTHHCVTTADRIQYSPTLYSFVAYGAIGYTIEPRRGVGHAIQVCRSYSKELFEEVISKMRKAGIKSTIAIEKFKLLAEKVEEIVAKNARAEIDYSDAPDEFRDPLMDTLMTDPVRLPSGTIMDRSIILRHLLNSPTDPFNRQTLTESMLEPVPELKEQIQAWMREKQNSDH

SEQ ID NO: 818453 - protein, 1164 aa, Homo sapiens
MEELSADEIRRRRLARLAGGQTSQPTTPLTSPQRENPPGPPIAASAPGPSQSLGLNVHNMTPATSPIGASGVAHRSQSSEGVSSLSSSPSNSLETQSQSLSRSQSMDIDGVSCEKSMSQVDVDSGIENMEVDENDRREKRSLSDKEPSSGPEVSEEQALQLVCKIFRVSWKDRDRDVIFLSSLSAQFKQNPKEVFSDFKDLIGQILMEVLMMSTQTRDENPFASLTATSQPIAAAARSPDRNLLLNTGSNPGTSPMFCSVASFGASSLSSLGASGGASNWDSYSDHFTIETCKETDMLNYLIECFDRVGIEEKKAPKMCSQPAVSQLLSNIRSQCISHTALVLQGSLTQPRSLQQPSFLVPYMLCRNLPYGFIQELVRTTHQDEEVFKQIFIPILQGLALAAKECSLDSDYFKYPLMALGELCETKFGKTHPVCNLVASLRLWLPKSLSPGCGRELQRLSYLGAFFSFSVFAEDDVKVVEKYFSGPAITLENTRVVSQSLQHYLELGRQELFKILHSILLNGETREAALSYMAAVVNANMKKAQMQTDDRLVSTDGFMLNFLWVLQQLSTKIKLETVDPTYIFHPRCRITLPNDETRVNATMEDVNDWLTELYGDQPPFSEPKFPTECFFLTLHAHHLSILPSCRRYIRRLRAIRELNRTVEDLKNNESQWKDSPLATRHREMLKRCKTQLKKLVRCKACADAGLLDESFLRRCLNFYGLLIQLLLRILDPAYPDITLPLNSDVPKVFAALPEFYVEDVAEFLFFIVQYSPQALYEPCTQDIVMFLVVMLCNQNYIRNPYLVAKLVEVMFMTNPAVQPRTQKFFEMIENHPLSTKLLVPSLMKFYTDVEHTGATSEFYDKFTIRYHISTIFKSLWQNIAHHGTFMEEFNSGKQFVRYINMLINDTTFLLDESLESLKRIHEVQEEMKNKEQWDQLPRDQQQARQSQLAQDERVSRSYLALATETVDMFHILTKQVQKPFLRPELGPRLAAMLNFNLQQLCGPKCRDLKVENPEKYGFEPKKLLDQLTDIYLQLDCARFAKAIADDQRSYSKELFEEVISKMRKAGIKSTIAIEKFKLLAEKVEEIVAKNARAEIDYSDAPDEFRGVDERETEQRSLNRSAAHPLLDTAKANEASRSSGRSEAAVHVLEAKCGKPTPGPPRASKR

SEQ ID NO: 818454 - protein, 113 aa, Homo sapiens [sequence omitted]

SEQ ID NO: 818455 - protein, 119 aa, Homo sapiens
DLKPDNNPEDSKGRAAFASGDSHFQRIPRSPKTKNSSLPSSPRSLWGLLLDPLMDTLMTDPVRLPSGTIMDRSIILRHLLNSPTDPFNRQTLTESMLEPVPELKEQIQAWMREKQNSDH

SEQ ID NO: 818456 - protein, 1197 aa, Homo sapiens
MEELSADEIRRRRLARLAGGQTSQPTTPLTSPQRENPPGPPIAASAPGPSQSLGLNVHNMTPATSPIGASGVAHRSQSSEGVSSLSSSPSNSLETQSQSLSRSQSMDIDGVSCEKSMSQVDVDSGIENMEVDENDRREKRSLSDKEPSSGPEVSEEQALQLVCKIFRVSWKDRDRDVIFLSSLSAQFKQNPKEVFSDFKDLIGQILMEVLMMSTQTRDENPFASLTATSQPIAAAARSPDRNLLLNTGSNPGTSPMFCSVASFGASSLSSLGASGGASNWDSYSDHFTIETCKETDMLNYLIECFDRVGIEEKKAPKMCSQPAVSQLLSNIRSQCISHTALVLQGSLTQPRSLQQPSFLVPYMLCRNLPYGFIQELVRTTHQDEEVFKQIFIPILQGLALAAKECSLDSDYFKYPLMALGELCETKFGKTHPVCNLVASLRLWLPKSLSPGCGRELQRLSYLGAFFSFSVFAEDDVKVVEKYFSGPAITLENTRVVSQSLQHYLELGRQELFKILHSILLNGETREAALSYMAAVVNANMKKAQMQTDDRLVSTDGFMLNFLWVLQQLSTKIKLETVDPTYIFHPRCRITLPNDETRVNATMEDVNDWLTELYGDQPPFSEPKFPTECFFLTLHAHHLSILPSCRRYIRRLRAIRELNRTVEDLKNNESQWKDSPLATRHREMLKRCKTQLKKLVRCKACADAGLLDESFLRRCLNFYGLLIQLLLRILDPAYPDITLPLNSDVPKVFAALPEFYVEDVAEFLFFIVQYSPQALYEPCTQDIVMFLVVMLCNQNYIRNPYLVAKLVEVMFMTNPAVQPRTQKFFEMIENHPLSTKLLVPSLMKFYTDVEHTGATSEFYDKFTIRYHISTIFKSLWQNIAHHGTFMEEFNSGKQFVRYINMLINDTTFLLDESLESLKRIHEVQEEMKNKEQWDQLPRDQQQARQSQLAQDERVSRSYLALATETVDMFHILTKQVQKPFLRPELGPRLAAMLNFNLQQLCGPKCRDLKVENPEKYGFEPKKLLDQLTDIYLQLDCARFAKAIADDQRSYSKELFEEVISKMRKAGIKSTIAIEKFKLLAEKVEEIVAKNARAEIDYSDAPDEFRDPLMDTLMTDPVRLPSGTIMDRSIILRHLLNSPTDPFNRQTLTESMLEPVPELKEQIQAWMREKPGPGDTLAARRSIAQRSFSQNTALPGSHS

SEQ ID NO: 818457 - protein, 1069 aa, Homo sapiens
MEELSADEIRRRRLARLAGGQTSQPTTPLTSPQRENPPGPPIAASAPGPSQSLGLNVHNMTPATSPIGASGVAHRSQSSEGVSSLSSSPSNSLETQSQSLSRSQSMDIDGVSCEKSMSQVDVDSGIENMEVDENDRREKRSLSDKEPSSGPEVSEEQALQLVCKIFRVSWKDRDRDVIFLSSLSAQFKQNPKEVFSDFKDLIGQILMEVLMMSTQTRDENPFASLTATSQPIAAAARSPDRNLLLNTGSNPGTSPMFCSVASFGASSLSSLGASGGASNWDSYSDHFTIETCKETDMLNYLIECFDRVGIEEKKAPKMCSQPAVSQLLSNIRSQCISHTALVLQGSLTQPRSLQQPSFLVPYMLCRNLPYGFIQELVRTTHQDEEVFKQIFIPILQGLALAAKECSLDSDYFKYPLMALGELCETKFGKTHPVCNLVASLRLWLPKSLSPGCGRELQRLSYLGAFFSFSVFAEDDVKVVEKYFSGPAITLENTRVVSQSLQHYLELGRQELFKILHSILLNGETREAALSYMAAVVNANMKKAQMQTDDRLVSTDGFMLNFLWVLQQLSTKIKLETVDPTYIFHPRCRITLPNDETRVNATMEDVNDWLTELYGDQPPFSEPKFPTECFFLTLHAHHLSILPSCRRYIRRLRAIRELNRTVEDLKNNESQWKDSPLATRHREMLKRCKTQLKKLVRCKACADAGLLDESFLRRCLNFYGLLIQLLLRILDPAYPDITLPLNSDVPKVFAALPEFYVEDVAEFLFFIVQYSPQALYEPCTQDIVMFLVVMLCNQNYIRNPYLVAKLVEVMFMTNPAVQPRTQKFFEMIENHPLSTKLLVPSLMKFYTDVEHTGATSEFYDKFTIRYHISTIFKSLWQNIAHHGTFMEEFNSGKQFVRYINMLINDTTFLLDESLESLKRIHEVQEEMKNKEQWDQLPRDQQQARQSQLAQDERVSRSYLALATETVDMFHILTKQVQKPFLRPELGPRLAAMLNFNLQQLCGPKCRDLKVENPEKYGFEPKKLLDQLTDIYLQLDCARFAKAIADDQNTHHCVTTADRIQYSPTLYSFVA

SEQ ID NO: 818458 - protein, 637 aa, Homo sapiens
MEELSADEIRRRRLARLAGGQTSQPTTPLTSPQRENPPGPPIAASAPGPSQSLGLNVHNMTPATSPIGASGVAHRSQSSEGVSSLSSSPSNSLETQSQSLSRSQSMDIDGVSCEKSMSQVDVDSGIENMEVDENDRREKRSLSDKEPSSGPEVSEEQALQLVCKIFRVSWKDRDRDVIFLSSLSAQFKQNPKEVFSDFKDLIGQILMEVLMMSTQTRDENPFASLTATSQPIAAAARSPDRNLLLNTGSNPGTSPMFCSVASFGASSLSSLGASGGASNWDSYSDHFTIETCKETDMLNYLIECFDRVGIEEKKAPKMCSQPAVSQLLSNIRSQCISHTALVLQGSLTQPRSLQQPSFLVPYMLCRNLPYGFIQELVRTTHQDEEVFKQIFIPILQGLALAAKECSLDSDYFKYPLMALGELCETKFGKTHPVCNLVASLRLWLPKSLSPGCGRELQRLSYLGAFFSFSVFAEDDVKVVEKYFSGPAITLENTRVVSQSLQHYLELGRQELFKILHSILLNGETREAALSYMAAVVNANMKKAQMQTDDRLVSTDGFMLNFLWVLQQLSTKIKLETVDPTYIFHPRCRITLPNDETRVNATMEDVNDWLTELCEYCVRDSVIKTLPSCLCASSSSSA

SEQ ID NO: 818459 - protein, 477 aa, Homo sapiens
MEELSADEIRRRRLARLAGGQTSQPTTPLTSPQRENPPGPPIAASAPGPSQSLGLNVHNMTPATSPIGASGVAHRSQSSEGVSSLSSSPSNSLETQSQSLSRSQSMDIDGVSCEKSMSQVDVDSGIENMEVDENDRREKRSLSDKEPSSGPEVSEEQALQLVCKIFRVSWKDRDRDVIFLSSLSAQFKQNPKEVFSDFKDLIGQILMEVLMMSTQTRDENPFASLTATSQPIAAAARSPDRNLLLNTGSNPGTSPMFCSVASFGASSLSSLGASGGASNWDSYSDHFTIETCKETDMLNYLIECFDRVGIEEKKAPKMCSQPAVSQLLSNIRSQCISHTALVLQGSLTQPRSLQQPSFLVPYMLCRNLPYGFIQELVRTTHQDEEVFKQIFIPILQGLALAAKECSLDSDYFKYPLMVKLCSFSLTHSIDVFLSDYFDIYFSFRSMRSTLFSNLKHEITVLAMQSVWCAVRCISEDS

SEQ ID NO: 818460 - protein, 443 aa, Homo sapiens
MEELSADEIRRRRLARLAGGQTSQPTTPLTSPQRENPPGPPIAASAPGPSQSLGLNVHNMTPATSPIGASGVAHRSQSSEGVSSLSSSPSNSLETQSQSLSRSQSMDIDGVSCEKSMSQVDVDSGIENMEVDENDRREKRSLSDKEPSSGPEVSEEQALQLVCKIFRVSWKDRDRDVIFLSSLSAQFKQNPKEVFSDFKDLIGQILMEVLMMSTQTRDENPFASLTATSQPIAAAARSPDRNLLLNTGSNPGTSPMFCSVASFGASSLSSLYESSPAPTPSFWSSVPVMGPSLASPSRAASQLAVPSTPLSPHSAASGTAAGSQPSSPRYRPYTVTHPWASSGVSILSSSPSPPALASSPQAVPASSSRQRPSSTGPPLPPASPSATSRRPSSLRISPRYLSHRRVACVFAVQGKEINTVWKKCCVTLTLLNCCFGLLTCVAN

SEQ ID NO: 818461 - protein, 86 aa, Homo sapiens
MTDPVRLPSGTIMDRSIILRHLLNSPTDPFNRQTLTESMLEPGQRRVQFEVQRWRQYQEIKPKSHIGDEAEGKFIKCRNYLLYDTL

SEQ ID NO: 818462 - protein, 79 aa, Homo sapiens
VARSLRIKEEESTLFTDGPSLLTLIFNSMELYCLFLVVLTSTFPFQMCSQPAVSQLLSNIRSQCISHTALVLQGSLTQP

SEQ ID NO: 818463 - protein, 469 aa, Homo sapiens
MAQGNNYGQTSNGVADESPNMLVYRKMEDVIARMQDEKNGIPIRTVKSFLSKIPSVFSGSDIVQWLIKNLTIEDPVEALHLGTLMAAHGYFFPISDHVLTLKDDGTFYRFQTPYFWPSNCWEPENTDYAVYLCKRTMQNKARLELADYEAESLARLQRAFARKWEFIFMQAEAQAKVDKKRDKIERKILDSQERAFWDVHRPVPGCVNTTEVDIKKSSRMRNPHKTRKSVYGLQNDIRSHSPTHTPTPETKPPTEDELQQQIKYWQIQLDRHRLKMSKVADSLLSYTEQYLEYDPFLLPPDPSNPWLSDDTTFWELEASKEPSQQRVKRWGFGMDEALKDPVGREQFLKFLESEFSSENLRFWLAVEDLKKRPIKEVPSRVQEIWQEFLAPGAPSAINLDSKSYDKTTQNVKEPGRYTFEDAQEHIYKLMKSDSYPRFIRSSAYQELLQAKKKGKSLTSKRLTSLAQSY

SEQ ID NO: 818464 - protein, 495 aa, Homo sapiens
MAQGNNYGQTSNGVADESPNMLVYRKMEDVIARMQDEKNGIPIRTVKSFLSKIPSVFSGSDIVQWLIKNLTIEDPVEALHLGTLMAAHGYFFPISDHVLTLKDDGTFYRFQTPYFWPSNCWEPENTDYAVYLCKRTMQNKARLELADYEAESLARLQRAFARKWEFIFMQAEAQAKVDKKRDKIERKILDSQERAFWDVHRPVPGCVNTTEVDIKKSSRMRNPHKTRKSVYGLQNDIRSHSPTHTPTPETKPPTEDELQQQIKYWQIQLDRHRLKMSKVADSLLSYTEQYLEYDPFLLPPDPSNPWLSDDTTFWELEASKEPSQQRVKRWGFGMDEALKDPVGREQFLKFLESEFSSENLRFWLAVEDLKKRPIKEVPSRVQEIWQEFLAPGAPSAINLDSKSYDKTTQNVKEPGRYTFEDAQEHIYKLMKSDSYPRFIRSSAYQELLQAKKKSGNSMDRRTSFEKFAQNVGRNIPIFPCHKNCTPTLRASTNLL

SEQ ID NO: 818465 - protein, 463 aa, Homo sapiens
MLDGRARWLTPVISALWEAEMEDVIARMQDEKNGIPIRTVKSFLSKIPSVFSGSDIVQWLIKNLTIEDPVEALHLGTLMAAHGYFFPISDHVLTLKDDGTFYRFQTPYFWPSNCWEPENTDYAVYLCKRTMQNKARLELADYEAESLARLQRAFARKWEFIFMQAEAQAKVDKKRDKIERKILDSQERAFWDVHRPVPGCVNTTEVDIKKSSRMRNPHKTRKSVYGLQNDIRSHSPTHTPTPETKPPTEDELQQQIKYWQIQLDRHRLKMSKVADSLLSYTEQYLEYDPFLLPPDPSNPWLSDDTTFWELEASKEPSQQRVKRWGFGMDEALKDPVGREQFLKFLESEFSSENLRFWLAVEDLKKRPIKEVPSRVQEIWQEFLAPGAPSAINLDSKSYDKTTQNVKEPGRYTFEDAQEHIYKLMKSDSYPRFIRSSAYQELLQAKKKGKSLTSKRLTSLAQSY

SEQ ID NO: 818466 - protein, 631 aa, Homo sapiens
SQPSRRGGERQGLVARARLSLRPSIPELSERTSRPCRASPASLPSQHTSSPAQARVRNLAQSTFPLAAQETPGRAPAHAPLSSFVPGVGGRSPASVGISAPGGGPSGAAAKMPLELTQSRVQKIWVPVDHRPSLPRSCGPKLTNSPTVIVMVGLPARGKTYISKKLTRYLNWIGVPTKVFNVGEYRREAVKQYSSYNFFRPDNEEAMKVRKQCALAALRDVKSYLAKEGGQIAVFDATNTTRERRHMILHFAKENDFKAFFIESVCDDPTVVASNIMEVKISSPDYKDCNSAEAMDDFMKRISCYEASYQPLDPDKCDRDLSLIKVIDVGRRFLVNRVQDHIQSRIVYYLMNIHVQPRTIYLCRHGENEHNLQGRIGGDSGLSSRGKKFASALSKFVEEQNLKDLRVWTSQLKSTIQTAEALRLPYEQWKALNEIDAGVCEELTYEEIRDTYPEEYALREQDKYYYRYPTGESYQDLVQRLEPVIMELERQENVLVICHQAVLRCLLAYFLDKSAEEMPYLKCPLHTVLKLTPVAYGCRVESIYLNVESVCTHRERSEDAKKGPNPLMRRNSVTPLASPEPTKKPRINSFEEHVASTSAALPSCLPPEVPTQLPGQNMKGSRSSADSSRKH

SEQ ID NO: 818467 - protein, 625 aa, Homo sapiens
SQPSRRGGERQGLVARARLSLRPSIPELSERTSRPCRASPASLPSQHTSSPAQARVRNLAQSTFPLAAQETPGRAPAHAPLSSFVPGVGGRSPASVGISAPGGGPSGAAAKMPLELTQSRVQKIWVPVDHRPSLPRSCGPKLTNSPTVIVMVGLPARGKTYISKKLTRYLNWIGVPTKVFNVGEYRREAVKQYSSYNFFRPDNEEAMKVRKQCALAALRDVKSYLAKEGGQIAVFDATNTTRERRHMILHFAKENDFKAFFIESVCDDPTVVASNIMEVKISSPDYKDCNSAEAMDDFMKRISCYEASYQPLDPDKCDRDLSLIKVIDVGRRFLVNRVQDHIQSRIVYYLMNIHVQPRTIYLCRHGENEHNLQGRIGGDSGLSSRGKKFASALSKFVEEQNLKDLRVWTSQLKSTIQTAEALRLPYEQWKALNEIDAGVCEELTYEEIRDTYPEEYALREQDKYYYRYPTGESYQDLVQRLEPVIMELERQENVLVICHQAVLRCLLAYFLDKSAEEMPYLKCPLHTVLKLTPVAYGCRVESIYLNVESVCTHRERSEDAKKGPNPLMRRNSVTPLASPEPTKKPRINSFEEHVASTSAALPSCLPPEVPTQLPGQPLLGQACLT

SEQ ID NO: 818468 - protein, 146 aa, Homo sapiens [sequence omitted]

SEQ ID NO: 818469 - protein, 631 aa, Homo sapiens; identical to SEQ ID NO: 818466

SEQ ID NO: 818470 - protein, 631 aa, Homo sapiens; identical to SEQ ID NO: 818466

SEQ ID NO: 818471 - protein, 634 aa, Homo sapiens
SQPSRRGGERQGLVARARLSLRPSIPELSERTSRPCRASPASLPSQHTSSPAQARVRNLAQSTFPLAAQETPGRAPAHAPLSSFVPGVGGRSPASVGISAPGGGPSGAAAKMPLELTQSRVQKIWVPVDHRPSLPRSCGPKLTNSPTVIVMVGLPARGKTYISKKLTRYLNWIGVPTKVFNVGEYRREAVKQYSSYNFFRPDNEEAMKVRKQCALAALRDVKSYLAKEGGQIAVFDATNTTRERRHMILHFAKENDFKAFFIESVCDDPTVVASNIMEVKISSPDYKDCNSAEAMDDFMKRISCYEASYQPLDPDKCDRDLSLIKVIDVGRRFLVNRVQDHIQSRIVYYLMNIHVQPRTIYLCRHGENEHNLQGRIGGDSGLSSRGKKFASALSKFVEEQNLKDLRVWTSQLKSTIQTAEALRLPYEQWKALNEIDAGVCEELTYEEIRDTYPEEYALREQDKYYYRYPTGESYQDLVQRLEPVIMELERQENVLVICHQAVLRCLLAYFLDKSAEEMPYLKCPLHTVLKLTPVAYGCRVESIYLNVESVCTHRERSEDAKKGPNPLMRRNSVTPLASPEPTKKPRINSFEEHVASTSAALPSCLPPEVPTQLPGQPLLGQACLNWKGVMRNAA

SEQ ID NO: 818472 - protein, 637 aa, Homo sapiens
SQPSRRGGERQGLVARARLSLRPSIPELSERTSRPCRASPASLPSQHTSSPAQARVRNLAQSTFPLAAQETPGRAPAHAPLSSFVPGVGGRSPASVGISAPGGGPSGAAAKMPLELTQSRVQKIWVPVDHRPSLPRSCGPKLTNSPTVIVMVGLPARGKTYISKKLTRYLNWIGVPTKVFNVGEYRREAVKQYSSYNFFRPDNEEAMKVRKQCALAALRDVKSYLAKEGGQIAVFDATNTTRERRHMILHFAKENDFKAFFIESVCDDPTVVASNIMEVKISSPDYKDCNSAEAMDDFMKRISCYEASYQPLDPDKCDRDLSLIKVIDVGRRFLVNRVQDHIQSRIVYYLMNIHVQPRTIYLCRHGENEHNLQGRIGGDSGLSSRGKKFASALSKFVEEQNLKDLRVWTSQLKSTIQTAEALRLPYEQWKALNEIDAGVCEELTYEEIRDTYPEEYALREQDKYYYRYPTGESYQDLVQRLEPVIMELERQENVLVICHQAVLRCLLAYFLDKSAEEMPYLKCPLHTVLKLTPVAYGCRVESIYLNVESVCTHRERSEDAKKGPNPLMRRNSVTPLASPEPTKKPRINSFEEHVASTSAALPSCLPPEVPTQLPGQPLLGQACLRTVCHIFSKFSPY

SEQ ID NO: 818473 - protein, 670 aa, Homo sapiens
SQPSRRGGERQGLVARARLSLRPSIPELSERTSRPCRASPASLPSQHTSSPAQARVRNLAQSTFPLAAQETPGRAPAHAPLSSFVPGVGGRSPASVGISAPGGGPSGAAAKMPLELTQSRVQKIWVPVDHRPSLPRSCGPKLTNSPTVIVMVGLPARGKTYISKKLTRYLNWIGVPTKVFNVGEYRREAVKQYSSYNFFRPDNEEAMKVRKQCALAALRDVKSYLAKEGGQIAVFDATNTTRERRHMILHFAKENDFKAFFIESVCDDPTVVASNIMEVKISSPDYKDCNSAEAMDDFMKRISCYEASYQPLDPDKCDRDLSLIKVIDVGRRFLVNRVQDHIQSRIVYYLMNIHVQPRTIYLCRHGENEHNLQGRIGGDSGLSSRGKKFASALSKFVEEQNLKDLRVWTSQLKSTIQTAEALRLPYEQWKALNEIDAGVCEELTYEEIRDTYPEEYALREQDKYYYRYPTGESYQDLVQRLEPVIMELERQENVLVICHQAVLRCLLAYFLDKSAEEMPYLKCPLHTVLKLTPVAYGCRVESIYLNVESVCTHRERSEGLSLFPRLECGGAVTAHCSLNLLGSSDPPASASRELRLQDAKKGPNPLMRRNSVTPLASPEPTKKPRINSFEEHVASTSAALPSCLPPEVPTQLPGQNMKGSRSSADSSRKH

SEQ ID NO: 818474 - protein, 573 aa, Homo sapiens
SQPSRRGGERQGLVARARLSLRPSIPELSERTSRPCRASPASLPSQHTSSPAQARVRNLAQSTFPLAAQETPGRAPAHAPLSSFVPGVGGRSPASVGISAPGGGPSGAAAKMPLELTQSRVQKIWVPVDHRPSLPRSCGPKLTNSPTVIVMVGLPARGKTYISKKLTRYLNWIGVPTKVFNVGEYRREAVKQYSSYNFFRPDNEEAMKVRKQCALAALRDVKSYLAKEGGQIAVFDATNTTRERRHMILHFAKENDFKAFFIESVCDDPTVVASNIMEVKISSPDYKDCNSAEAMDDFMKRISCYEASYQPLDPDKCDRDLSLIKVIDVGRRFLVNRVQDHIQSRIVYYLMNIHVQPRTIYLCRHGENEHNLQGRIGGDSGLSSRGKKFASALSKFVEEQNLKDLRVWTSQLKSTIQTAEALRLPYEQWKALNEIDAGVCEELTYEEIRDTYPEEYALREQDKYYYRYPTGESYQDLVQRLEPVIMELERQENVLVICHQAVLRCLLAYFLDKSAEEMPYLKCPLHTVLKLTPVAYGCRVESIYLNVESVCTHRERSENMKGSRSSADSSRKH

SEQ ID NO: 818475 - protein, 538 aa, Homo sapiens
SQPSRRGGERQGLVARARLSLRPSIPELSERTSRPCRASPASLPSQHTSSPAQARVRNLAQSTFPLAAQETPGRAPAHAPLSSFVPGVGGRSPASVGISAPGGGPSGAAAKMPLELTQSRVQKIWVPVDHRPSLPRSCGPKLTNSPTVIVMVGLPARGKTYISKKLTRYLNWIGVPTKVFNVGEYRREAVKQYSSYNFFRPDNEEAMKVRKQCALAALRDVKSYLAKEGGQIAVFDATNTTRERRHMILHFAKENDFKAFFIESVCDDPTVVASNIMEVKISSPDYKDCNSAEAMDDFMKRISCYEASYQPLDPDKCDRDLSLIKVIDVGRRFLVNRVQDHIQSRIVYYLMNIHVQPRTIYLCRHGENEHNLQGRIGGDSGLSSRGKKFASALSKFVEEQNLKDLRVWTSQLKSTIQTAEALRLPYEQWKALNEIDASYQDLVQRLEPVIMELERQENVLVICHQAVLRCLLAYFLDKSAEEMPYLKCPLHTVLKLTPVAYGCRVESIYLNVESVCTHRERSENMKGSRSSADSSRKH

SEQ ID NO: 818476 - protein, 528 aa, Homo sapiens
APRVAGLPLGRRPVWVSRAGPAGSAPGAMPFRKACGPKLTNSPTVIVMVGLPARGKTYISKKLTRYLNWIGVPTKVFNVGEYRREAVKQYSSYNFFRPDNEEAMKVRKQCALAALRDVKSYLAKEGGQIAVFDATNTTRERRHMILHFAKENDFKAFFIESVCDDPTVVASNIMEVKISSPDYKDCNSAEAMDDFMKRISCYEASYQPLDPDKCDRDLSLIKVIDVGRRFLVNRVQDHIQSRIVYYLMNIHVQPRTIYLCRHGENEHNLQGRIGGDSGLSSRGKKFASALSKFVEEQNLKDLRVWTSQLKSTIQTAEALRLPYEQWKALNEIDAGVCEELTYEEIRDTYPEEYALREQDKYYYRYPTGESYQDLVQRLEPVIMELERQENVLVICHQAVLRCLLAYFLDKSAEEMPYLKCPLHTVLKLTPVAYGCRVESIYLNVESVCTHRERSEDAKKGPNPLMRRNSVTPLASPEPTKKPRINSFEEHVASTSAALPSCLPPEVPTQLPGQNMKGSRSSADSSRKH

SEQ ID NO: 818477 - protein, 631 aa, Homo sapiens; identical to SEQ ID NO: 818466

SEQ ID NO: 818478 - protein, 631 aa, Homo sapiens; identical to SEQ ID NO: 818466

SEQ ID NO: 818479 - protein, 631 aa, Homo sapiens; identical to SEQ ID NO: 818466

SEQ ID NO: 818480 - protein, 530 aa, Homo sapiens
SQPSRRGGERQGLVARARLSLRPSIPELSERTSRPCRASPASLPSQHTSSPAQARVRNLAQSTFPLAAQETPGRAPAHAPLSSFVPGVGGRSPASVGISAPGGGPSGAAAKMPLELTQSRVQKIWVPVDHRPSLPRSCGPKLTNSPTVIVMVGLPARGKTYISKKLTRYLNWIGVPTKVFNVGEYRREAVKQYSSYNFFRPDNEEAMKVRKQCALAALRDVKSYLAKEGGQIAVFDATNTTRERRHMILHFAKENDFKAFFIESVCDDPTVVASNIMEVKISSPDYKDCNSAEAMDDFMKRISCYEASYQPLDPDKCDRDLSLIKVIDVGRRFLVNRVQDHIQSRIVYYLMNIHVQPRTIYLCRHGENEHNLQGRIGGDSGLSSRGKKFASALSKFVEEQNLKDLRVWTSQLKSTIQTAEALRLPYEQWKALNEIDAGVCEELTYEEIRDTYPEEYALREQDKYYYRYPTGEVSAGWGGLTVPSTHDHCCAGLGHPSREFTSVWVLGAPTPSTSELSPPKLNLLTAWGEV

SEQ ID NO: 818481 - protein, 69 aa, Homo sapiens
LVQRLEPVIMELERQENVLVICHQAVLRCLLAYFLDKSAGTSGRSWPRDGGRRGLALGGGSAADLPWPA

SEQ ID NO: 818482 - protein, 607 aa, Homo sapiens
MWMTPKRSKMEVDEALVFRPEWTQRYLVVEPPEGDGALCLVCRRLIVATRERDVRRHYEAEHEYYERYVADGERAALVERLRQGDLPVASFTPEERAARAGLGLCRLLALKGRGWGEGDFVYQCMEVLLREVLPEHVSVLQGVDLSPDITRQRILSIDRNLRNQLFNRARDFKAYSLALDDQAFVAYENYLLVFIRGVGPELEVQEDLLTIINLTHHFSVGALMSAILESLQTAGLSLQRMVGLTTTHTLRMIGENSGLVSYMREKAVSPNCWNVIHYSGFLHLELLSSYDVDVNQIINTISEWIVLIKTRGVRRPEFQTLLTESESEHGERVNGRCLNNWLRRGKTLKLIFSLRKEMEAFLVSVGATTVHFSDKQWLCDFGFLVDIMEHLRELSEELRVSKVFAAAAFDHICTFEVKLNLFQRHIEEKNLTDFPALREVVDELKQQNKEDEKIFDPDRYQMVICRLQKEFERHFKDLRFIKKDLELFSNPFNFKPEYAPISVRVELTKLQANTNLWNEYRIKDLGQFYAGLSAESYPIIKGVACKVASLFDSNQICEKAFSYLTRNQHTLSQPLTDEHLQALFRVATTEMEPGWDDLVRERNESNP

SEQ ID NO: 818483 - protein, 607 aa, Homo sapiens; identical to SEQ ID NO: 818482

SEQ ID NO: 818484 - protein, 607 aa, Homo sapiens; identical to SEQ ID NO: 818482

SEQ ID NO: 818485 - protein, 607 aa, Homo sapiens; identical to SEQ ID NO: 818482

SEQ ID NO: 818486 - protein, 126 aa, Homo sapiens
TGAATARRESLPQANNPEQLCKQRCINEASWTMKRVLSCVPEPTVVMAARALCMLGLVLALLSSSSAEEYVGLSANQCAVPAKDRVDCGYPHVTPKECNNRGCCFDSRIPGVPWCFKPLQEAECTF

SEQ ID NO: 818487 - protein, 117 aa, Homo sapiens
MGPLFVKTSGSRYELSAEALAGSKGTERLRSTWACLQTSVPCQPRTGWTAATPMSPPRSATTGAAALTPGSLECLGVSSPCRKQNAPSEAPPAAPGRGMRGSEHPCPAVIAARHNVL

SEQ ID NO: 818488 - protein, 73 aa, Homo sapiens
EKLRRTVPGSNHSRARAANQCAVPAKDRVDCGYPHVTPKECNNRGCCFDSRIPGVPWCFKPLQEAGKAPVASW

SEQ ID NO: 818489 - protein, 126 aa, Homo sapiens; identical to SEQ ID NO: 818486

SEQ ID NO: 818490 - protein, 130 aa, Homo sapiens
MGPLFVKTSGSRYELSAEALAGSKGTERLRSTWACLQTSVPCQPRTGWTAATPMSPPRSATTGAAALTPGSLECLGVSSPCRKQNAPSEAPPAAPGRGMRGSEHPCPAVIAARHCSSQLFCPFAPGKRFC

SEQ ID NO: 818491 - protein, 120 aa, Homo sapiens
TGAATARRESLPQANNPEQLCKQRCINEASWTMKRVLSCVPEPTVVMAARALCMLGLVLALLSSSSAEEYVGLSQQGLWQLTGLCLGQLCKPVCRASQGQGGLRLPPCHPQGVQQPGLLL

SEQ ID NO: 818492 - protein, 525 aa, Homo sapiens
MKALIAALLLITLQYSCAVSPTDCSAVEPEAEKALDLINKRRRDGYLFQLLRIADAHLDRVENTTVYYLVLDVQESDCSVLSRKYWNDCEPPDSRRPSEIVIGQCKVIATRHSHESQDLRVIDFNCTTSSVSSALANTKDSPVLIDFFEDTERYRKQANKALEKYKEENDDFASFRVDRIERVARVRGGEGTGYFVDFSVRNCSRHHFPRHPNVFGFCRANLFYDVEALDLESPKNLVINCEVFDPQEHENINGVPPHLGHPFHWGGHERSSTTKPPFKPHGSRDHHHPHKPHEHGPPPPPDERDHSHGPPLPQGPPPLLPMSCSSCQHATFGTNGAQRHSHNNNSSDLHPHKHHSHEQHPHGHHPHAHHPHEHDTHRQHPHGHHPHGHHPHGHHPHGHHPHGHHPHCHDFQDYGPCDPPPHNQGHCCHGHGPPPGHLRRRGPGKGPCPFHCRQIGSVYRLPPLRKGEVLPLPEANFPSFPLPHHKHPLKPDIQPFPQSVSESCPGKFKSGFPQVSMFFTHTFPK

SEQ ID NO: 818493 - protein, 234 aa, Homo sapiens
  misc_feature (2)..(2): Xaa can be any naturally occurring amino acid
IXRAAGIGTRALIAALLLITLQYSCAVSPTDCSAVEPEAEKALDLINKRRRDGYLFQLLRIADAHLDRVENTTVYYLVLDVQESDCSVLSRKYWNDCEPPDSRRPSEIVIGQCKVIATRHSHESQDLRVIDFNCTTSSVSSALANTKDSPVLIDFFEDTERYSSFRVDRIERVARVRGGEGTGYFVDFSVRNCSRHHFPRHPNVFDSETDCLCEKLDLEADYLHNCELDLRHGH

SEQ ID NO: 818494 - protein, 247 aa, Homo sapiens
  misc_feature (2)..(2): Xaa can be any naturally occurring amino acid
  misc_feature (211)..(211): Xaa can be any naturally occurring amino acid
IXRAAGIGTRALIAALLLITLQYSCAVSPTDCSAVEPEAEKALDLINKRRRDGYLFQLLRIADAHLDRVENTTVYYLVLDVQESDCSVLSRKYWNDCEPPDSRRPSEIVIGQCKVIATRHSHESQDLRVIDFNCTTSSVSSALANTKDSPVLIDFFEDTERYRKQANKALEKYKEENDDFASFRVDRIERVARVREGGTVLVTLWRTAQHXSQHPMSLILRQIVYVRSWTGKPATCITVSLTSDMDI

SEQ ID NO: 818495 - protein, 515 aa, Homo sapiens
  misc_feature (2)..(2): Xaa can be any naturally occurring amino acid
IXRAAGIGTRALIAALLLITLQYSCAVSPTDCSAVEPEAEKALDLINKRRRDGYLFQLLRIADAHLDRVVLSRKYWNDCEPPDSRRPSEIVIGQCKVIATRHSHESQDLRVIDFNCTTSSVSSALANTKDSPVLIDFFEDTERYRKQANKALEKYKEENDDFASFRVDRIERVARVRGGEGTGYFVDFSVRNCSRHHFPRHPNVFGFCRANLFYDVEALDLESPKNLVINCEVFDPQEHENINGVPPHLGHPFHWGGHERSSTTKPPFKPHGSRDHHHPHKPHEHGPPPPPDERDHSHGPPLPQGPPPLLPMSCSSCQHATFGTNGAQRHSHNNNSSDLHPHKHHSHEQHPHGHHPHAHHPHEHDTHRQHPHGHHPHGHHPHGHHPHGHHPHGHHPHCHDFQDYGPCDPPPHNQGHCCHGHGPPPGHLRRRGPGKGPCPFHCRQIGSVYRLPPLRKGEVLPLPEANFPSFPLPHHKHPLKPDIQPFPQSVSESCPGKFKSGFPQVSMFFTHTFPK

SEQ ID NO: 818496 - protein, 525 aa, Homo sapiens; identical to SEQ ID NO: 818492

SEQ ID NO: 818497 - protein, 525 aa, Homo sapiens; identical to SEQ ID NO: 818492

SEQ ID NO: 818498 - protein, 454 aa, Homo sapiens
MKALIAALLLITLQYSCAVSPTDCSAVEPEAEKALDLINKRRRDGYLFQLLRIADAHLDRVENTTVYYLVLDVQESDCSVLSRKYWNDCEPPDSRRPSEIVIGQCKVIATRHSHESQDLRVIDFNCTTSSVSSALANTKDSPVLIDFFEDTERYRKQANKALEKYKEENDDFASFRVDRIERVARVRGGEGTGYFVDFSVRNCSRHHFPRHPNVFGFCRANLFYDVEALDLESPKNLVINCEVFDPQEHENINGVPPHLGHPFHWGGHERSSTTKPPFKPHGSRDHHHPHKPHEHGPPPPPDERDHSHGPPLPQGPPPLLPMSCSSCQHATFGTNGAQRHSHNNNSSDLHPHKHHSHEQHPHGHHPHAHHPHEHDTHRQHPHGHHPHGHHPHGHHPHGHHPHGHHPHCHDFQDYGPCDPPPHNQGHCCHGHGPPPGHLRRPIFPASHCRTTNIL

SEQ ID NO: 818499 - protein, 466 aa, Homo sapiens
MKALIAALLLITLQYSCAVSPTDCSAVEPEAEKALDLINKRRRDGYLFQLLRIADAHLDRVENTTVYYLVLDVQESDCSVLSRKYWNDCEPPDSRRPSEIVIGQCKVIATRHSHESQDLRVIDFNCTTSSVSSALANTKDSPVLIDFFEDTERYRKQANKALEKYKEENDDFASFRVDRIERVARVRGGEGTGYFVDFSVRNCSRHHFPRHPNVFGFCRANLFYDVEALDLESPKNLVINCEVFDPQEHENINGVPPHLGHPFHWGGHERSSTTKPPFKPHGSRDHHHPHKPHEHGPPPPPDERDHSHGPPLPQGPPPLLPMSCSSCQHATFGTNGAQRHSHNNNSSDLHPHKHHSHEQHPHGPPPGHLRRRGPGKGPRPFHCRQIGSVYRHPHGHHPHGHHPHGHHPHGHHPHGHHPHCHDFQDYGPCDPPPHNQGHCCHGHGPPPGHLRRPIFPASHCRTTNIL

SEQ ID NO: 818500 - protein, 509 aa, Homo sapiens
MKALIAALLLITLQYSCAVSPTDCSAVEPEAEKALDLINKRRRDGYLFQLLRIADAHLDRVENTTVYYLVLDVQESDCSVLSRKYWNDCEPPDSRRPSEIVIGQCKVIATRHSHESQDLRVIDFNCTTSSVSSALANTKDSPVLIDFFEDTERYRKQANKALEKYKEENDDFASFRVDRIERVARVRGGEGTGYFVDFSVRNCSRHHFPRHPNVFGFCRANLFYDVEALDLESPKNLVINCEVFDPQEHENINGVPPHLGHPFHWGGHERSSTTKPPFKPHGSRDHHHPHKPHEHGPPPPPDERDHSHGPPLPQGPPPLLPMSCSSCQHATFGTNGAQRHSHNNNSSDLHPHKHHSHEQHPHGHHPHAHHPHEHDTHRQHPHGHHPHGHHPHGHHPHGHHPHGHHPHCHDFQDYGPCDPPPHNQGHCCHGHGPPPGHLRRRGPGKGPCPFHCRQIGSVYRLPPLRKGEVLPLPEANFPSFPLPHHKHPLKPDIQPFPQVSMFFTHTFPK

SEQ ID NO: 818501 - protein, 230 aa, Homo sapiens
  misc_feature (2)..(2): Xaa can be any naturally occurring amino acid
  misc_feature (183)..(183): Xaa can be any naturally occurring amino acid
  misc_feature (221)..(222): Xaa can be any naturally occurring amino acid
  misc_feature (227)..(228): Xaa can be any naturally occurring amino acid
IXRAAGIGTRALIAALLLITLQYSCAVSPTDCSAVEPEAEKALDLINKRRRDGYLFQLLRIADAHLDRVVLSRKYWNDCEPPDSRRPSEIVIGQCKVIATRHSHESQDLRVIDFNCTTSSVSSALANTKDSPVLIDFFEDTERYRKQANKALEKYKEENDDFASFRVDRIERVARVRDGKDLXTRDSLAELSDTFPAPNALDLRADCLYDGHHVDRSLDIXXWCMTXXHS

SEQ ID NO: 818502 - protein, 234 aa, Homo sapiens
  misc_feature (193)..(193): Xaa can be any naturally occurring amino acid
  misc_feature (231)..(232): Xaa can be any naturally occurring amino acid
MKALIAALLLITLQYSCAVSPTDCSAVEPEAEKALDLINKRRRDGYLFQLLRIADAHLDRVENTTVYYLVLDVQESDCSVLSRKYWNDCEPPDSRRPSEIVIGQCKVIATRHSHESQDLRVIDFNCTTSSVSSALANTKDSPVLIDFFEDTERYRKQANKALEKYKEENDDFASFRVDRIERVARVRDGKDLXTRDSLAELSDTFPAPNALDLRADCLYDGHHVTAHWTSXXGA

SEQ ID NO: 818503 - protein, 191 aa, Homo sapiens
MNAHMRIIEWWRPVMFALVMLTLEDKDMKGFSWAIVPALTSLGYLIILVVSIFPFWVRLTNEESHEVFFSGLFENCFNAKCWKPRPLSRACAFLALVLHALEIKALRMKLGPLQFSVLWPYYVLGFGIFLFIVAGTICLIQEMVCPCWHLLSTSQSMEEDHGSLYLDNLESLGGEPSSVQKETQVTAETVI

SEQ ID NO: 818504 - protein, 181 aa, Homo sapiens
MEEIPAQEAAGSPRVQFQSLETQSECLSPEPQFVQDTDMEQGLTGAPPVPQVPALPREGSPGDQAAALLTARYQEFVTFEDVAVHLTREEWGYLDPVQRDLYREVMLENYGNVVSLGILLRLPTTRIHSVNSCPALSHTQASAFSGETLAVLTAGISKRWPKYRLPIDIARPCSETPFPRL

SEQ ID NO: 818505 - protein, 512 aa, Homo sapiens
MIFILWPWCYSVLIPQSSQDVLFQEFVTFEDVAVHLTREEWGYLDPVQRDLYREVMLENYGNVVSLDGETREENKLLIPKQKISEEVHSYKVRVGRLKHDITQVPETREVYKSEDRLERLQEILRKFLYLEREFRQITISKETFTSEKNNECHEPEKSFSLDSTIDADQRVLRIQNTDDNDKYDMSFNQNSASGKHEHLNLTEDFQSSECKESLMDLSHLNKWESIPNTEKSYKCDVCGKIFHQSSALTRHQRIHTREKPYKCKECEKSFSQSSSLSRHKRIHTREKPYKCEASDKSCEASDKSCSPSSGIIQHKKIHTRAKSYKCSSCERVFSRSVHLTQHQKIHKEMPCKCTVCGSDFCHTSYLLEHQRVHHEEKAYEYDEYGLAYIKQQGIHFREKPYTCSECGKDFRLNSHLIQHQRIHTGEKAHECNECGKAFSQTSCLIQHHKMHRKEKSYECNEYEGSFSHSSDLILQQEVLTRQKAFDCDVWEKNSSQRAHLVQHQSIHTKENS

SEQ ID NO: 818506 - protein, 526 aa, Homo sapiens
MEEIPAQEAAGSPRVQFQSLETQSECLSPEPQFVQDTDMEQGLTGGFPISKPDGISQLEQDLQVFDLETKTREVLRDDCSDGETREENKLLIPKQKISEEVHSYKVRVGRLKHDITQVPETREVYKSEDRLERLQEILRKFLYLEREFRQITISKETFTSEKNNECHEPEKSFSLDSTIDADQRVLRIQNTDDNDKYDMSFNQNSASGKHEHLNLTEDFQSSECKESLMDLSHLNKWESIPNTEKSYKCDVCGKIFHQSSALTRHQRIHTREKPYKCKECEKSFSQSSSLSRHKRIHTREKPYKCEASDKSCEASDKSCSPSSGIIQHKKIHTRAKSYKCSSCERVFSRSVHLTQHQKIHKEMPCKCTVCGSDFCHTSYLLEHQRVHHEEKAYEYDEYGLAYIKQQGIHFREKPYTCSECGKDFRLNSHLIQHQRIHTGEKAHECNECGKAFSQTSCLIQHHKMHRKEKSYECNEYEGSFSHSSDLILQQEVLTRQKAFDCDVWEKNSSQRAHLVQHQSIHTKENS

SEQ ID NO: 818507 - protein, 491 aa, Homo sapiens
MEEIPAQEAAGSPRVQFQSLETQSECLSPEPQFVQDTDMEQGLTGDGETREENKLLIPKQKISEEVHSYKVRVGRLKHDITQVPETREVYKSEDRLERLQEILRKFLYLEREFRQITISKETFTSEKNNECHEPEKSFSLDSTIDADQRVLRIQNTDDNDKYDMSFNQNSASGKHEHLNLTEDFQSSECKESLMDLSHLNKWESIPNTEKSYKCDVCGKIFHQSSALTRHQRIHTREKPYKCKECEKSFSQSSSLSRHKRIHTREKPYKCEASDKSCEASDKSCSPSSGIIQHKKIHTRAKSYKCSSCERVFSRSVHLTQHQKIHKEMPCKCTVCGSDFCHTSYLLEHQRVHHEEKAYEYDEYGLAYIKQQGIHFREKPYTCSECGKDFRLNSHLIQHQRIHTGEKAHECNECGKAFSQTSCLIQHHKMHRKEKSYECNEYEGSFSHSSDLILQQEVLTRQKAFDCDVWEKNSSQRAHLVQHQSIHTKENS

SEQ ID NO: 818508 - protein, 562 aa, Homo sapiens
MEEIPAQEAAGSPRVQFQSLETQSECLSPEPQFVQDTDMEQGLTGAPPVPQVPALPREGSPGDQAAALLTARYQEFVTFEDVAVHLTREEWGYLDPVQRDLYREVMLENYGNVVSLDGETREENKLLIPKQKISEEVHSYKVRVGRLKHDITQVPETREVYKSEDRLERLQEILRKFLYLEREFRQITISKETFTSEKNNECHEPEKSFSLDSTIDADQRVLRIQNTDDNDKYDMSFNQNSASGKHEHLNLTEDFQSSECKESLMDLSHLNKWESIPNTEKSYKCDVCGKIFHQSSALTRHQRIHTREKPYKCKECEKSFSQSSSLSRHKRIHTREKPYKCEASDKSCEASDKSCSPSSGIIQHKKIHTRAKSYKCSSCERVFSRSVHLTQHQKIHKEMPCKCTVCGSDFCHTSYLLEHQRVHHEEKAYEYDEYGLAYIKQQGIHFREKPYTCSECGKDFRLNSHLIQHQRIHTGEKAHECNECGKAFSQTSCLIQHHKMHRKEKSYECNEYEGSFSHSSDLILQQEVLTRQKAFDCDVWEKNSSQRAHLVQHQSIHTKENS

SEQ ID NO: 818509 - protein, 512 aa, Homo sapiens; identical to SEQ ID NO: 818505

SEQ ID NO: 818510 - protein, 512 aa, Homo sapiens; identical to SEQ ID NO: 818505

SEQ ID NO: 818511 - protein, 526 aa, Homo sapiens; identical to SEQ ID NO: 818506

SEQ ID NO: 818512 - protein, 327 aa, Homo sapiens
ARYEAGWRGKHEHLNLTEDFQSSECKESLMDLSHLNKWESIPNTEKSYKCDVCGKIFHQSSALTRHQRIHTREKPYKCKECEKSFSQSSSLSRHKRIHTREKPYKCEASDKSCEASDKSCSPSSGIIQHKKIHTRAKSYKCSSCERVFSRSVHLTQHQKIHKEMPCKCTVCGSDFCHTSYLLEHQRVHHEEKAYEYDEYGLAYIKQQGIHFREKPYTCSECGKDFRLNSHLIQHQRIHTGEKAHECNECGKAFSQTSCLIQHHKMHRKEKSYECNEYEGSFSHSSDLILQQEVLTRQKAFDCDVWEKNSSQRAHLVQHQSIHTKENS

SEQ ID NO: 818513 - protein, 512 aa, Homo sapiens; identical to SEQ ID NO: 818505

SEQ ID NO: 818514 - protein, 512 aa, Homo sapiens; identical to SEQ ID NO: 818505

SEQ ID NO: 818515 - protein, 512 aa, Homo sapiens; identical to SEQ ID NO: 818505

SEQ ID NO: 818516 - protein, 512 aa, Homo sapiens; identical to SEQ ID NO: 818505

SEQ ID NO: 818517 - protein, 181 aa, Homo sapiens; identical to SEQ ID NO: 818504

SEQ ID NO: 818518 - protein, 110 aa, Homo sapiens
MEEIPAQEAAGSPRVQFQSLETQSECLSPEPQFVQDTDMEQGLTGGILLRLPTTRIHSVNSCPALSHTQASAFSGETLAVLTAGISKRWPKYRLPIDIARPCSETPFPRL

SEQ ID NO: 818519 - protein, 105 aa, Homo sapiens [sequence omitted]

SEQ ID NO: 818520 - protein, 123 aa, Homo sapiens
MEEIPAQEAAGSPRVQFQSLETQSECLSPEPQFVQDTDMEQGLTGAPPVPQVPALPREGSPGDQAAALLTARYQEFVTFEDVAVHLTREEWGYLDPVQRDLYREVMLENYGNVVSLGTVGSWD

SEQ ID NO: 818521 - protein, 110 aa, Homo sapiens; identical to SEQ ID NO: 818518

SEQ ID NO: 818522 - protein, 97 aa, Homo sapiens
QRNKQETKEKGGRLPTGTVFSVFSIPGSLIFVGILLRLPTTRIHSVNSCPALSHTQASAFSGETLAVLTAGISKRWPKYRLPIDIARPCSETPFPRL

SEQ ID NO: 818523 - protein, 120 aa, Homo sapiens
FFFFPLALSMLVASRALLCLPDYAQDSRSSYLWGGRLPTGTVFSVFSIPGSLIFVGILLRLPTTRIHSVNSCPALSHTQASAFSGETLAVLTAGISKRWPKYRLPIDIARPCSETPFPRL

SEQ ID NO: 818524 - protein, 248 aa, Homo sapiens
MEGSGTGKRRGKAAKTSLRIMDARAQLLLRVPHPGAVTHIRGPHSHPGPSSGALTHIRDPHAWAEEGGPSFGTLHSVAGSATEKRRPRGCLQRPGRGCGGPERECVGDRTAARPAPPLGEYPEAVLGSQRGGSLFCLHGSRRRRRPAAADGSSLPRECAEARVRGGDLYREVMLENYGNVVSLGILLRLPTTRIHSVNSCPALSHTQASAFSGETLAVLTAGISKRWPKYRLPIDIARPCSETPFPRL

SEQ ID NO: 818525 - protein, 512 aa, Homo sapiens; identical to SEQ ID NO: 818505

SEQ ID NO: 818526 - protein, 181 aa, Homo sapiens; identical to SEQ ID NO: 818504

SEQ ID NO: 818527 - protein, 236 aa, Homo sapiens
MKLRQDQPALTHHGVMLTLEDKDMKGFSWAIVPALTSLGYLIILVVSIFPFWVRLTNEESHEVFFSGLFENCFNAKCWKPRPLSIYIILGRVFLLSAVFLAFVTTFIMMPFASEFFPRTWKQNFVLACISFFTGACAFLALVLHALEIKALRMKLGPLQFSVLWPYYVLGFGIFLFIVAGTICLIQEMVCPCWHLLSTSQSMEEDHGSLYLDNLESLGGEPSSVQKETQVTAETVI

SEQ ID NO: 818528 - protein, 236 aa, Homo sapiens; identical to SEQ ID NO: 818527

SEQ ID NO: 818529 - protein, 221 aa, Homo sapiens
MLTLEDKDMKGFSWAIVPALTSLGYLIILVVSIFPFWVRLTNEESHEVFFSGLFENCFNAKCWKPRPLSIYIILGRVFLLSAVFLAFVTTFIMMPFASEFFPRTWKQNFVLACISFFTGACAFLALVLHALEIKALRMKLGPLQFSVLWPYYVLGFGIFLFIVAGTICLIQEMVCPCWHLLSTSQSMEEDHGSLYLDNLESLGGEPSSVQKETQVTAETVI

SEQ ID NO: 818530 - protein, 282 aa, Homo sapiens
QERGGAWSGGRGSHRDPPGGQPSSGTRNRLRRCQFQEPLSSCLFSSLNPHHWPTLGVGRPVMLTLEDKDMKGFSWAIVPALTSLGYLIILVVSIFPFWVRLTNEESHEVFFSGLFENCFNAKCWKPRPLSIYIILGRVFLLSAVFLAFVTTFIMMPFASEFFPRTWKQNFVLACISFFTGACAFLALVLHALEIKALRMKLGPLQFSVLWPYYVLGFGIFLFIVAGTICLIQEMVCPCWHLLSTSQSMEEDHGSLYLDNLESLGGEPSSVQKETQVTAETVI

SEQ ID NO: 818531 - protein, 221 aa, Homo sapiens; identical to SEQ ID NO: 818529

SEQ ID NO: 818532 - protein, 172 aa, Homo sapiens
MLTLEDKDMKGFSWAIVPALTSLGYLIILVVSIFPFWVRLTNEESHEVFFSGLFENCFNAKCWKPRPLSRACAFLALVLHALEIKALRMKLGPLQFSVLWPYYVLGFGIFLFIVAGTICLIQEMVCPCWHLLSTSQSMEEDHGSLYLDNLESLGGEPSSVQKETQVTAETVI

SEQ ID NO: 818533 - protein, 224 aa, Homo sapiens
MEEIPAQEAAGSPRVQFQSLETQSECLSPEPQFVQDTDMEQGLTGAVPRASEFLPFFISESPPLAYIGSGATFYIILGRVFLLSAVFLAFVTTFIMMPFASEFFPRTWKQNFVLACISFFTGACAFLALVLHALEIKALRMKLGPLQFSVLWPYYVLGFGIFLFIVAGTICLIQEMVCPCWHLLSTSQSMEEDHGSLYLDNLESLGGEPSSVQKETQVTAETVI

SEQ ID NO: 818534 - protein, 516 aa, Homo sapiens
MIFILWPWCYSVLIPQSSQDVLFQEFVTFEDVAVHLTREEWGYLDPVQRDLYREVMLENYGNVVSLDGETREENKLLIPKQKISEEVHSYKVRVGRLKHDITQVPETREVYKSEDRLERLQEILRKFLYLEREFRQITISKETFTSEKNNECHEPEKSFSLDSTIDADQRVLRIQNTDDNDKYDMSFNQNSASGKHEHLNLTEDFQSSECKESLMDLSHLNKWESIPNTEKSYKCDVCGKIFHQSSALTRHQRIHTREKPYKCKECEKSFSQSSSLSRHKRIHTREKPYKCEASDKSCEASDKSCSPSSGIIQHKKIHTRAKSYKCSSCERVFSRSVHLTQHQKIHKEMPCKCTVCGSDFCHTSYLLEHQRVHHEEKAYEYDEYGLAYIKQQGIHFREKPYTCSECGKDFRLNSHLIQHQRIHTGEKAHECNECGKAFSQTSCLIQHHKMHRKEKSYEWQQLRPPGPVYVCTRRAPKPVSPRVLGEVSMDEVVGNNFVHPICNNFVHTDLCHHGFG

SEQ ID NO: 818535 - protein, 105 aa, Homo sapiens [sequence omitted]

SEQ ID NO: 818536 - protein, 236 aa, Homo sapiens; identical to SEQ ID NO: 818527

SEQ ID NO: 818537 - protein, 105 aa, Homo sapiens [sequence omitted]

SEQ ID NO: 818538 - protein, 258 aa, Homo sapiens
MLTLEDKDMKGFSWAIVPALTSLGYLIILVVSIFPFWVRLTNEESHEVFFSGLFENCFNAKCWKPRPLSIYIILGRVFLLSAVFLAFVTTFIMMPFASEFFPRTWKQNFVLACISFFTGACAFLALVLHALEIKALRMKLGPLQFSVLWPYYVLGFGIFLFIVAGPSALLKKWLAPCWNLVSPSQTTDEGPSHPVSALSWLVRQDTACGCLSDSFRRLSHTTDARHVLIPCPMIPHCPRFHPRLRPPLLATTPPDPTP

SEQ ID NO: 818539 - protein, 213 aa, Homo sapiens
MKLRQDQPALTHHGVMLTLEDKDMKGFSWAIVPALTSLGYLIILVVSIFPFWVRLTNEESHEVFFSGLFENCFNAKCWKPRPLSIYIILGRVFLLSAVFLAFVTTFIMMPFASEFFPRTWKQNFVLACISFFTGACAFLALVLHALEIKALRMKLGPLQFSVLWPYYVLGFGIFLFIVAGTICLIQEMVCPCWHLLSTPHTHSDSILLVCEIC

SEQ ID NO: 818540 - protein, 172 aa, Homo sapiens; identical to SEQ ID NO: 818532

SEQ ID NO: 818541 - protein, 105 aa, Homo sapiens [sequence omitted]

SEQ ID NO: 818542 - protein, 105 aa, Homo sapiens [sequence omitted]

SEQ ID NO: 818543 - protein, 105 aa, Homo sapiens [sequence omitted]

SEQ ID NO: 818544 - protein, 105 aa, Homo sapiens [sequence omitted]

SEQ ID NO: 818545 - protein, 626 aa, Homo sapiens
MSRSGAAAEKADSRQRPQMKVNEYKENQNIAYVSLRPAQTTVLIKTAKVYLAPFSLSNYQLDQLMCPKSLSEKNSNNEVACKKTKIKKTCRRIIPPKMKNTSSKAESTLQNSSSAVHTESNKLQPKRTADAMNLSVDVESSQDGDSDEDTTPALDFSGLSPYERKRLKNISENADFFASLQLSESAARLREMIEKRQPPKSKRKKPKRENGIGCRRSMRLLKVDPSGVSLPAAPTPPTLVADETPLLPPGPLEMTSENQEDNNERFKGFLHTWAGMSKPSSKNTEKGLSSIKSYKANLNGMVISEDTVYKVTTGPIFSMALHPSETRTLVAVGAKFGQVGLCDLTQQPKEDGVYVFHPHSQPVSCLYFSPANPAHILSLSYDGTLRCGDFSRAIFEEVYRNERSSFSSFDFLAEDASTLIVGHWDGNMSLVDRRTPGTSYEKLTSSSMGKIRTVHVHPVHRQYFITAGLRDTHIYDARRLNSRRSQPLISLTEHTKSIASAYFSPLTGNRVVTTCADCNLRIFDSSCISSKIPLLTTIRHNTFTGRWLTRFQAMWDPKQEDCVIVGSMAHPRRVEIFHETGKRVHSFGGEYLVSVCSINAMHPTRYILAGGNSSGKIHVFMNEKSC

SEQ ID NO: 818546 - protein, 553 aa, Homo sapiens
MSRSGAAAEKADSRQRPQMKVNEYKENQNIAYVSLRPAQTTVLIKTAKVYLAPFSLSNYQLDQLMCPKSLSEKNSNNEVACKKTKIKKTCRRIIPPKMKNTSSKAESTLQNSSSAVHTESNKLQPKRTADAMNLSVDVESSQDGDSDEDTTPALDFSGLSPYERKRLKNISENADFFASLQLSESAARLREMIEKRQPPKSKRKKPKRENGIGCRRSMRLLKVDPSGVSLPAAPTPPTLVADETPLLPPGPLEMTSENQEDNNERFKGFLHTWAGMSKPSSKNTEKGLSSIKSYKANLNGMVISEDTVYKVTTGPIFSMALHPSETRTLVAVGAKFGQVGLCDLTQQPKEDGVYVFHPHSQPVSCLYFSPANPAHILSLSYDGTLRCGDFSRAIFEEVYRNERSSFSSFDFLAEDASTLIVGHWDGNMSLVDRRTPGTSYEKLTSSSMGKIRTVHVHPVHRQYFITAGLRDTHIYDARRLNSRRSQPLISLTEHTKSIASAYFSPLTGNRVVTTCADCNLRIFDSSCISSKIPLLTTISHHAWPSELVIKTVC

SEQ ID NO: 818547 - protein, 562 aa, Homo sapiens
MCPKSLSEKNSNNEVACKKTKIKKTCRRIIPPKMKNTSSKAESTLQNSSSAVHTESNKLQPKRTADAMNLSVDVESSQDGDSDEDTTPALDFSGLSPYERKRLKNISENADFFASLQLSESAARLREMIEKRQPPKSKRKKPKRENGIGCRRSMRLLKVDPSGVSLPAAPTPPTLVADETPLLPPGPLEMTSENQEDNNERFKGFLHTWAGMSKPSSKNTEKGLSSIKSYKANLNGMVISEDTVYKVTTGPIFSMALHPSETRTLVAVGAKFGQVGLCDLTQQPKEDGVYVFHPHSQPVSCLYFSPANPAHILSLSYDGTLRCGDFSRAIFEEVYRNERSSFSSFDFLAEDASTLIVGHWDGNMSLVDRRTPGTSYEKLTSSSMGKIRTVHVHPVHRQYFITAGLRDTHIYDARRLNSRRSQPLISLTEHTKSIASAYFSPLTGNRVVTTCADCNLRIFDSSCISSKIPLLTTIRHNTFTGRWLTRFQAMWDPKQEDCVIVGSMAHPRRVEIFHETGKRVHSFGGEYLVSVCSINAMHPTRYILAGGNSSGKIHVFMNEKSC

SEQ ID NO: 818548 - protein, 562 aa, Homo sapiens; identical to SEQ ID NO: 818547

SEQ ID NO: 818549 - protein, 540 aa, Homo sapiens
MSRSGAAAEKADSRQRPQMKVNEYKENQNIAYVSLRPAQTTVLIKTAKVYLAPFSLSNYQLDQLMCPKSLSEKNSNNEVACKKTKIKKTCRRIIPPKMKNTSSKAESTLQNSSSAVHTESNKLQPKRTADAMNLSVDVESSQDGDSDEDTTPALDFSGLSPYERKRLKNISENADFFASLQLSESAARLREMIEKRQPPKSKRKKPKRENGIGCRRSMRLLKVDPSGVSLPAAPTPPTLVADETPLLPPGPLEMTSENQEDNNERFKGFLHTWAGMSKPSSKNTEKGLSSIKSYKANLNGMVISEDTVYKVTTGPIFSMALHPSETRTLVAVGAKFGQVGLCDLTQQPKEDGVYVFHPHSQPVSCLYFSPANPAHILSLSYDGTLRCGDFSRAIFEEVYRNERSSFSSFDFLAEDASTLIVGHWDGNMSLVDRRTPGTSYEKLTSSSMGKIRTVHVHPVHRQYFITAGLRDTHIYDARRLNSRRSQPLISLTEHTKSIASAYFSPLTGNRVVTTCADCNLRIFDSSCISSKIPLLTTISR

SEQ ID NO: 818550 - protein, 347 aa, Homo sapiens
MSRSGAAAEKADSRQRPQMKVNEYKENQNIAYVSLRPAQTTVLIKTAKVYLAPFSLSNYQLDQLMCPKSLSEKNSNNEVACKKTKIKKTCRRIIPPKMKNTSSKAESTLQNSSSAVHTESNKLQPKRTADAMNLSVDVESSQDGDSDEDTTPALDFSGLSPYERKRLKNISENADFFASLQLSESAARLREMIEKRQPPKSKRKKPKRENGIGCRRSMRLLKVDPSGVSLPAAPTPPTLVADETPLLPPGPLEMTSENQEDNNERFKGFLHTWAGMSKPSSKNTEKGLSSIKSYKANLNGMVISEDTVYKVTTGPIFSMALHPSETRTLVAVGAKFGQVGLCDLVSY

SEQ ID NO: 818551 - protein, 180 aa, Homo sapiens
MFSPVVEVHYMYYGNIDHCFSHYRDTHIYDARRLNSRRSQPLISLTEHTKSIASAYFSPLTGNRVVTTCADCNLRIFDSSCISSKIPLLTTIRHNTFTGRWLTRFQAMWDPKQEDCVIVGSMAHPRRVEIFHETGKRVHSFGGEYLVSVCSINAMHPTRYILAGGNSSGKIHVFMNEKSC

SEQ ID NO: 818552 - protein, 325 aa, Homo sapiens
MPCIQAQYGTPAPSPGPRDHLASDPLTPEFIKPTMDLASPEAAPAAPTALPSFSTFMDGYTGEFDTFLYQLPGTVQPCSSASSSASSTSSSSATSPASASFKFEDFQVYGCYPGPLSGPVDEALSSSGSDYYGSPCSAPSPSTPSFQPPQLSPWDGSFGHFSPSQTYEGLRAWTEQLPKASGPPQPPAFFSFSPPTGPSPSLAQSPLKLFPSQATHQLGEGESYSMPTAFPGLAPTSPHLEGSGILDTPVTSTKARSGAPGGSEGRCAVCGDNASCQHYGVRTCEGCKGFFKVPRSPRWGLLLEMERGWPHPIGTCGLPLGSPPS

SEQ ID NO: 818553 - protein, 347 aa, Homo sapiens [sequence omitted]

SEQ ID NO: 818554 - protein, 698 aa, Homo sapiens
GESQWRRLRNLGECTEELRERTRDQDQAETRGASPGRGSGSRPEMPCIQAQYGTPAPSPGPRDHLASDPLTPEFIKPTMDLASPEAAPAAPTALPSFSTFMDGYTGEFDTFLYQLPGTVQPCSSASSSASSTSSSSATSPASASFKFEDFQVYGCYPGPLSGPVDEALSSSGSDYYGSPCSAPSPSTPSFQPPQLSPWDGSFGHFSPSQTYEGLRAWTEQLPKASGPPQPPAFFSFSPPTGPSPSLAQSPLKLFPSQATHQLGEGESYSMPTAFPGLAPTSPHLEGSGILDTPVTSTKARSGAPGGSEGRCAVCGDNASCQHYGVRTCEGCKGFFKRTVQKNAKYICLANKDCPVDKRRRNRCQFCRFQKCLAVGMVKEVVRTDSLKGRRGRLPSKPKQPPDASPANLLTSLVRAHLDSGPSTAKLDYSKLQPWVNMCDLASESLGRISDPLPLPGSGIQVSDTAIRGSGCRSLPGVLTPLDRLPEFQELVLPHFGKEDAGDVQQFYDLLSGSLEVIRKWAEKIPGFAELSPADQDLLLESAFLELFILRLAYRSKPGEGKLIFCSGLVLHRLQCARGFGDWIDSILAFSRSLHSLLVDVPAFACLSALVLITDRHGLQEPRRVEELQNRIASCLKEHVAAVAGEPQPASCLSRLLGKLPELRTLCTQGLQRIFYLKLEDLVPPPPIIDKIFMDTLPF

SEQ ID NO: 818555 - protein, 347 aa, Homo sapiens [sequence omitted]

SEQ ID NO: 818556 - protein, 347 aa, Homo sapiens [sequence omitted]

SEQ ID NO: 818557 - protein, 409 aa, Homo sapiens
GPAGARPRKAGVERRAEPAGPGLHHGQRPGPAPPRQPGSFCWALKADGIMWLAKACWSIQSEMPCIQAQYGTPAPSPGPRDHLASDPLTPEFIKPTMDLASPEAAPAAPTALPSFSTFMDGYTGEFDTFLYQLPGTVQPCSSASSSASSTSSSSATSPASASFKFEDFQVYGCYPGPLSGPVDEALSSSGSDYYGSPCSAPSPSTPSFQPPQLSPWDGSFGHFSPSQTYEGLRAWTEQLPKASGPPQPPAFFSFSPPTGPSPSLAQSPLKLFPSQATHQLGEGESYSMPTAFPGLAPTSPHLEGSGILDTPVTSTKARSGAPGGSEGRCAVCGDNASCQHYGVRTCEGCKGFFKRTVQKNAKYICLANKDCPVDKRRRNRCQFCRFQKCLAVGMVKEGVWLGCGPAGQG

SEQ ID NO: 818558 - protein, 391 aa, Homo sapiens
GESQWRRLRNLGECTEELRERTRDQDQAETRGASPGRGSGSRPEMPCIQAQYGTPAPSPGPRDHLASDPLTPEFIKPTMDLASPEAAPAAPTALPSFSTFMDGYTGEFDTFLYQLPGTVQPCSSASSSASSTSSSSATSPASASFKFEDFQVYGCYPGPLSGPVDEALSSSGSDYYGSPCSAPSPSTPSFQPPQLSPWDGSFGHFSPSQTYEGLRAWTEQLPKASGPPQPPAFFSFSPPTGPSPSLAQSPLKLFPSQATHQLGEGESYSMPTAFPGLAPTSPHLEGSGILDTPVTSTKARSGAPGGSEGRCAVCGDNASCQHYGVRTCEGCKGFFKRTVQKNAKYICLANKDCPVDKRRRNRCQFCRFQKCLAVGMVKEGVWLGCGPAGQG

SEQ ID NO: 818559 - protein, 213 aa, Homo sapiens
MFQELVLPHFGKEDAGDVQQFYDLLSGSLEVIRKWAEKIPGFAELSPADQDLLLESAFLELFILRLAYRSKPGEGKLIFCSGLVLHRLQCARGFGDWIDSILAFSRSLHSLLVDVPAFACLSALVLITDRHGLQEPRRVEELQNRIASCLKEHVAAVAGEPQPASCLSRLLGKLPELRTLCTQGLQRIFYLKLEDLVPPPPIIDKIFMDTLPF

SEQ ID NO: 818560 - protein, 213 aa, Homo sapiens; identical to SEQ ID NO: 818559

SEQ ID NO: 818561 - protein, 220 aa, Homo sapiens
RVSPAGPLCGSLCGIAVWHFEDNYTFGQPGPQRATLQVIRKWAEKIPGFAELSPADQDLLLESAFLELFILRLAYRSKPGEGKLIFCSGLVLHRLQCARGFGDWIDSILAFSRSLHSLLVDVPAFACLSALVLITDRHGLQEPRRVEELQNRIASCLKEHVAAVAGEPQPASCLSRLLGKLPELRTLCTQGLQRIFYLKLEDLVPPPPIIDKIFMDTLPF

SEQ ID NO: 818562 - protein, 391 aa, Homo sapiens; identical to SEQ ID NO: 818558

SEQ ID NO: 818563 - protein, 391 aa, Homo sapiens; identical to SEQ ID NO: 818558

SEQ ID NO: 818564 - protein, 369 aa, Homo sapiens
GESQWRRLRNLGECTEELRERTRDQDQAETRGASPGRGSGSRPEMPCIQAQYGTPAPSPGPRDHLASDPLTPEFIKPTMDLASPEAAPAAPTALPSFSTFMDGYTGEFDTFLYQLPGTVQPCSSASSSASSTSSSSATSPASASFKFEDFQVYGCYPGPLSGPVDEALSSSGSDYYGSPCSAPSPSTPSFQPPQLSPWDGSFGHFSPSQTYEGLRAWTEQLPKASGPPQPPAFFSFSPPTGPSPSLAQSPLKLFPSQATHQLGEGESYSMPTAFPGLAPTSPHLEGSGILDTPVTSTKARSGAPGGSEGRCAVCGDNASCQHYGVRTCEGCKGFFKVPRSPRWGLLLEMERGWPHPIGTCGLPLGSPPS

SEQ ID NO: 818565 - protein, 110 aa, Homo sapiens
MPCIQAQYGTPAPSPGPRDHLASDPLTPEFIKPTMDLASPEAAPAAPTALPSFSTFMDGYTGEFDTFLYQLPGTVQPCSSASSSASSTSSSSAVHLEVLELEGGRAGEVA

SEQ ID NO: 818566 - protein, 642 aa, Homo sapiens
GESQWRRLRNLGECTEELRERTRDQDQAETRGASPGRGSGSRPEMPCIQAQYGTPAPSPGPRDHLASDPLTPEFIKPTMDLASPEAAPAAPTALPSFSTFMDGYTGEFDTFLYQLPGTVQPCSSASSSASSTSSSSATSPASASFKFEDFQVYGCYPGPLSGPVDEALSSSGSDYYGSPCSAPSPSTPSFQPPQLSPWDGSFGHFSPSQTYEGLRAWTEQLPKASGPPQPPAFFSFSPPTGPSPSLAQSPLKLFPSQATHQLGEGESYSMPTAFPGLAPTSPHLEGSGILDTPVTSTKARSGAPGGSEGRCAVCGDNASCQHYGVRTCEGCKGFFKRTVQKNAKYICLANKDCPVDKRRRNRCQFCRFQKCLAVGMVKEVVRTDSLKGRRGRLPSKPKQPPDASPANLLTSLVRAHLDSGPSTAKLDYSKFQELVLPHFGKEDAGDVQQFYDLLSGSLEVIRKWAEKIPGFAELSPADQDLLLESAFLELFILRLAYRSKPGEGKLIFCSGLVLHRLQCARGFGDWIDSILAFSRSLHSLLVDVPAFACLSALVLITDRHGLQEPRRVEELQNRIASCLKEHVAAVAGEPQPASCLSRLLGKLPELRTLCTQGLQRIFYLKLEDLVPPPPIIDKIFMDTLPF

SEQ ID NO: 818567 - protein, 391 aa, Homo sapiens; identical to SEQ ID NO: 818558

SEQ ID NO: 818568 - protein, 331 aa, Homo sapiens
MPCIQAQYGTPAPSPGPRDHLASDPLTPEFINALPSFSTFMDGYTGEFDTFLYQLPGTVQPCSSASSSASSTSSSSATSPASASFKFEDFQVYGCYPGPLSGPVDEALSSSGSDYYGSPCSAPSPSTPSFQPPQLSPWDGSFGHFSPSQTYEGLRAWTEQLPKASGPPQPPAFFSFSPPTGPSPSLAQSPLKLFPSQATHQLGEGESYSMPTAFPGLAPTSPHLEGSGILDTPVTSTKARSGAPGGSEGRCAVCGDNASCQHYGVRTCEGCKGFFKRTVQKNAKYICLANKDCPVDKRRRNRCQFCRFQKCLAVGMVKEGVWLGCGPAGQG

SEQ ID NO: 818569 - protein, 347 aa, Homo sapiens [sequence omitted]

SEQ ID NO: 818570 - protein, 245 aa, Homo sapiens
MKEMGVRAGREDVVGPACKRVGVVCSSDYYGSPCSAPSPSTPSFQPPQLSPWDGSFGHFSPSQTYEGLRAWTEQLPKASGPPQPPAFFSFSPPTGPSPSLAQSPLKLFPSQATHQLGEGESYSMPTAFPGLAPTSPHLEGSGILDTPVTSTKARSGAPGGSEGRCAVCGDNASCQHYGVRTCEGCKGFFKRTVQKNAKYICLANKDCPVDKRRRNRCQFCRFQKCLAVGMVKEGVWLGCGPAGQG

SEQ ID NO: 818571 - protein, 213 aa, Homo sapiens; identical to SEQ ID NO: 818559

SEQ ID NO: 818572 - protein, 325 aa, Homo sapiens
GESQWRRLRNLGECTEELRERTRDQDQAETRGASPGRGSGSRPGRFPSGNVHLFLGAVHEGDGCTRGQRGCCEGRLPSKPKQPPDASPANLLTSLVRAHLDSGPSTAKLDYSKFQELVLPHFGKEDAGDVQQFYDLLSGSLEVIRKWAEKIPGFAELSPADQDLLLESAFLELFILRLAYRSKPGEGKLIFCSGLVLHRLQCARGFGDWIDSILAFSRSLHSLLVDVPAFACLSALVLITDRHGLQEPRRVEELQNRIASCLKEHVAAVAGEPQPASCLSRLLGKLPELRTLCTQGLQRIFYLKLEDLVPPPPIIDKIFMDTLPF

SEQ ID NO: 818573 - protein, 100 aa, Homo sapiens
LLLVVSSQDRKSKSMQEYSSVRKKMPGQTMEVAHTCNPHTLGGRGMEDHLSLGARDQAWANMAETLSVQKYRKLVSVVVLACGPSYLEYEDNEGYCFSDL

SEQ ID NO: 818574 - protein, 391 aa, Homo sapiens; identical to SEQ ID NO: 818558

SEQ ID NO: 818575 - protein, 391 aa, Homo sapiens; identical to SEQ ID NO: 818558

SEQ ID NO: 818576 - protein, 83 aa, Homo sapiens
RRVPFRPPVLWVPRTARIFGREDRNAVCECGPRAPVASRKHLFPASCLAQGPTGICPYVDRKLIFIKSSQRSGSIQCQQQMEV

SEQ ID NO: 818577 - protein, 583 aa, Homo sapiens
MPKPINVRVTTMDAELEFAIQPNTTGKQLFDQVVKTVGLREVWFFGLQYVDSKGYSTWLKLNKKVTQQDVKKENPLQFKFRAKFFPEDVSEELIQEITQRLFFLQVKEAILNDEIYCPPETAVLLASYAVQAKYGDYNKEIHKPGYLANDRLLPQRVLEQHKLTKEQWEERIQNWHEEHRGMLREDSMMEYLKIAQDLEMYGVNYFEIKNKKGTELWLGVDALGLNIYEHDDKLTPKIGFPWSEIRNISFNDKKFVIKPIDKKAPDFVFYAPRLRINKRILALCMGNHELYMRRRKPDTIEVQQMKAQAREEKHQKQLERAQLENEKKKREIAEKEKERIEREKEELMERLKQIEEQTIKAQKELEEQTRKALELDQERKRAKEEAERLEKERRAAEEAKSAIAKQAADQMKNQEQLAAELAEFTAKIALLEEAKKKKEEEATEWQHKAFAAQEDLEKTKEELKTVMSAPPPPPPPPVIPPTENEHDEHDENNAEASAELSNEGVMNHRSEEERVTETQKNERVKKQLQALSSELAQARDETKKTQNDVLHAENVKAGRDKYKTLRQIRQGNTKQRIDEFEAM

SEQ ID NO: 818578 - protein, 583 aa, Homo sapiens; identical to SEQ ID NO: 818577

SEQ ID NO: 818579 - protein, 583 aa, Homo sapiens; identical to SEQ ID NO: 818577

SEQ ID NO: 818580 - protein, 565 aa, Homo sapiens
MPKPINVRVTTMDAELEFAIQPNTTGKQLFDQVVKTVGLREVWFFGLQYVDSKGYSTWLKLNKKVTQQDVKKENPLQFKFRAKFFPEDVSEELIQEITQRLFFLQVKEAILNDEIYCPPETAVLLASYAVQAKYGDYNKEIHKPGYLANDRLLPQRVLEQHKLTKEQWEERIQNWHEEHRGMLREDSMMEYLKIAQDLEMYGVNYFEIKNKKGTELWLGVDALGLNIYEHDDKLTPKIGFPWSEIRNISFNDKKFVIKPIDKKAPDFVFYAPRLRINKRILALCMGNHELYMRRRKPDTIEVQQMKAQAREEKHQKQLERAQLENEKKKREIAEKEKERIEREKEELMERLKQIEEQTIKAQKELEEQTRKALELDQERKRAKEEAERLEKERRAAEEAKSAIAKQAADQMKNQEQLAAELAEFTAKIALLEEAKKKKEEEATEWQHKAFAAQEDLEKTKEELKTVMSAPPPPPPPPVIPPTANEGVMNHRSEEERVTETQKNERVKKQLQALSSELAQARDETKKTQNDVLHAENVKAGRDKYKTLRQIRQGNTKQRIDEFEAM

SEQ ID NO: 818581 - protein, 572 aa, Homo sapiens
MDAELEFAIQPNTTGKQLFDQVVKTVGLREVWFFGLQYVDSKGYSTWLKLNKKVTQQDVKKENPLQFKFRAKFFPEDVSEELIQEITQRLFFLQVKEAILNDEIYCPPETAVLLASYAVQAKYGDYNKEIHKPGYLANDRLLPQRVLEQHKLTKEQWEERIQNWHEEHRGMLREDSMMEYLKIAQDLEMYGVNYFEIKNKKGTELWLGVDALGLNIYEHDDKLTPKIGFPWSEIRNISFNDKKFVIKPIDKKAPDFVFYAPRLRINKRILALCMGNHELYMRRRKPDTIEVQQMKAQAREEKHQKQLERAQLENEKKKREIAEKEKERIEREKEELMERLKQIEEQTIKAQKELEEQTRKALELDQERKRAKEEAERLEKERRAAEEAKSAIAKQAADQMKNQEQLAAELAEFTAKIALLEEAKKKKEEEATEWQHKAFAAQEDLEKTKEELKTVMSAPPPPPPPPVIPPTENEHDEHDENNAEASAELSNEGVMNHRSEEERVTETQKNERVKKQLQALSSELAQARDETKKTQNDVLHAENVKAGRDKYKTLRQIRQGNTKQRIDEFEAM

SEQ ID NO: 818582 - protein, 77 aa, Homo sapiens
RISSGGVFYYQKLHYIRIQTHDPLLKTDTPLELLGFLVSSFGGAMTLPAALACHPCFVVSPDTHSQQVLLNLLPESC

SEQ ID NO: 818583 - protein, 583 aa, Homo sapiens; identical to SEQ ID NO: 818577

SEQ ID NO: 818584 - protein, 583 aa, Homo sapiens; identical to SEQ ID NO: 818577

SEQ ID NO: 818585 - protein, 583 aa, Homo sapiens; identical to SEQ ID NO: 818577

SEQ ID NO: 818586 - protein, 156 aa, Homo sapiens
MPKPINVRVTTMDAELEFAIQPNTTGKQLFDQVVKTVGLREVWFFGLQYVDSKGYSTWLKLNKKVTQQDVKKENPLQFKFRAKFFPEDVSEELIQEITQRLFFLQVKEAILNDEIYCPPETAVLLASYAVQAKYGDYNKEIHKPGYLANDRLLPQR

SEQ ID NO: 818587 - protein, 1217 aa, Homo sapiens
MYIKQVIIQGFRSYRDQTIVDPFSSKHNVIVGRNGSGKSNFFYAIQFVLSDEFSHLRPEQRLALLHEGTGPRVISAFVEIIFDNSDNRLPIDKEEVSLRRVIGAKKDQYFLDKKMVTKNDVMNLLESAGFSRSNPYYIVKQGKINQMATAPDSQRLKLLREVAGTRVYDERKEESISLMKETEGKREKINELLKYIEERLHTLEEEKEELAQYQKWDKMRRALEYTIYNQELNETRAKLDELSAKRETSGEKSRQLRDAQQDARDKMEDIERQVRELKTKISAMKEEKEQLSAERQEQIKQRTKLELKAKDLQDELAGNSEQRKRLLKERQKLLEKIEEKQKELAETEPKFNSVKEKEERGIARLAQATQERTDLYAKQGRGSQFTSKEERDKWIKKELKSLDQAINDKKRQIAAIHKDLEDTEANKEKNLEQYNKLDQDLNEVKARVEELDRKYYEVKNKKDELQSERNYLWREENAEQQALAAKREDLEKKQQLLRAATGKAILNGIDSINKVLDHFRRKGINQHVQNGYHGIVMNNFECEPAFYTCVEVTAGNRLFYHIVDSDEVSTKILMEFNKMNLPGEVTFLPLNKLDVRDTAYPETNDAIPMISKLRYNPRFDKAFKHVFGKTLICRSMEVSTQLARAFTMDCITLEGDQVSHRGALTGGYYDTRKSRLELQKDVRKAEEELGELEAKLNENLRRNIERINNEIDQLMNQMQQIETQQRKFKASRDSILSEMKMLKEKRQQSEKTFMPKQRSLQSLEASLHAMESTRESLKAELGTDLLSQLSLEDQKRVDALNDEIRQLQQENRQLLNERIKLEGIITRVETYLNENLRKRLDQVEQELNELRETEGGTVLTATTSELEAINKRVKDTMARSEDLDNSIDKTEAGIKELQKSMERWKNMEKEHMDAINHDTKELEKMTNRQGMLLKKKEECMKKIRELGSLPQEAFEKYQTLSLKQLFRKLEQCNTELKKYSHVNKKALDQFVNFSEQKEKLIKRQEELDRGYKSIMELMNVLELRKYEAIQLTFKQVSKNFSEVFQKLVPGGKATLVMKKGDVEGSQSQDEGEGSGESERGSGSQSSVPSVDQFTGVGIRVSFTGKQGEMREMQQLSGGQKSLVALALIFAIQKCDPAPFYLFDEIDQALDAQHRKAVSDMIMELAVHAQFITTTFRPELLESADKFYGVKFRNKVSHIDVITAEMAKDFVEDDTTHG

SEQ ID NO: 818588 - protein, 308 aa, Homo sapiens
RPRAGRAVWSCRGGLTRPMCLGCVERWLPRPGGGPGGIGWGVVTCHCGEPFLSPVNPRSERDPPACRIRSAASLGCLLLSKWSSRAGLHHKDEPRHTALETVFCWVIIQGFRSYRDQTIVDPFSSKHNVIVGRNGSGKSNFFYAIQFVLSDEFSHLRPEQRLALLHEGTGPRVISAFVEIIFDNSDNRLPIDKEEVSLRRVIGAKKDQYFLDKKMVTKNDVMNLLESAGFSRSNPYYIVKQGKINQMATAPDSQRLKLLREVAGTRVYDERKEESISLMKETEGKRGKNQSAVPMSSRKLSYVKGNKT

SEQ ID NO: 818589 - protein, 126 aa, Homo sapiens
RPRAGRAVWSCRGGLTRPMCLGCVERWLPRPGGGPGGIGWGVVTCHCGEPFLSPVNPRSERDPPACRIRSAASLGCLLLSKWSSRAGLHHKDEPRHTALETVFCWVCRALSTPSLERGFFQAGRRE

SEQ ID NO: 818590 - protein, 1217 aa, Homo sapiens; identical to SEQ ID NO: 818587

SEQ ID NO: 818591 - protein, 1213 aa, Homo sapiens
LTGGYYDTRKSRLELQKDVRKAEEELGELEAKLNERIKLEGIITRVETYLNENLRKRLDQVEQELNELRETEGGTVLTATTSELEAINKRVKDTMARSEDLDNSIDKTEAGIKELQKSMERWKNMEKEHMDAINHDTERINQMATAPDSQRLKLLREVAGTRVYDERKEESISLMKETEGKREKINELLKYIEERLHTLEEEKEELAQYQKWDKMRRALEYTIYNQELNETRAKLDELSAKRETSGEKSRQLRDAQQDARDKMEDIERQVRELKTKISAMKEEKEQLSAERQEQIKQRTKLELKAKDLQDELAGNSEQRKRLLKERQKLLEKIEEKQKELAETEPKFNSVKEKEERGIARLAQATQERTDLYAKQGRGSQFTSKEERDKWIKKELKSLDQAINDKKRQIAAIHKDLEDTEANKEKNLEQYNKLDQDLNEVKARVEELDRKYYEVKNKKDELQSERNYLWREENAEQQALAAKREDLEKKQQLLRAATGKAILNGIDSINKVLDHFRRKGINQHVQNGYHGIVMNNFECEPAFYTCVEVTAGNRLFYHIVDSDEVSTKILMEFNKMNLPGEVTFLPLNKLDVRDTAYPETNDAIPMISKLRYNPRFDKAFKHVFGKTLICRSMEVSTQLARAFTMDCITLEGDQVSHRGALTGGYYDTRKSRLELQKDVRKAEEELGELEAKLNENLRRNIERINNEIDQLMNQMQQIETQQRKFKASRDSILSEMKMLKEKRQQSEKTFMPKQRSLQSLEASLHAMESTRESLKAELGTDLLSQLSLEDQKRVDALNDEIRQLQQENRQLLNERIKLEGIITRVETYLNENLRKRLDQVEQELNELRETEGGTVLTATTSELEAINKRVKDTMARSEDLDNSIDKTEAGIKELQKSMERWKNMEKEHMDAINHDTKELEKMTNRQGMLLKKKEECMKKIRELGSLPQEAFEKYQTLSLKQLFRKLEQCNTELKKYSHVNKKALDQFVNFSEQKEKLIKRQEELDRGYKSIMELMNVLELRKYEAIQLTFKQVSKNFSEVFQKLVPGGKATLVMKKGDVEGSQSQDEGEGSGESERGSGSQSSVPSVDQFTGVGIRVSFTGKQGEMREMQQLSGGQKSLVALALIFAIQKCDPAPFYLFDEIDQALDAQHRKAVSDMIMELAVHAQFITTTFRPELLESADKFYGVKFRNKVSHIDVITAEMAKDFVEDDTTHG

SEQ ID NO: 818592 - protein, 564 aa, Homo sapiens
MYIKQVIIQGFRSYRDQTIVDPFSSKHNVIVGRNGSGKSNFFYAIQFVLSDEFSHLRPEQRLALLHEGTGPRVISAFVEIIFDNSDNRLPIDKEEVSLRRVIGAKKDQYFLDKKMVTKNDVMNLLESAGFSRSNPYYIVKQGKINQMATAPDSQRLKLLREVAGTRVYDERKEESISLMKETEGKREKINELLKYIEERLHTLEEEKEELAQYQKWDKMRRALEYTIYNQELNETRAKLDELSAKRETSGEKSRQLRDAQQDARDKMEDIERQVRELKTKISAMKEEKEQLSAERQEQIKQRTKLELKAKDLQDELAGNSEQRKRLLKERQKLLEKIEEKQKELAETEPKFNSVKEKEERGIARLAQATQERTDLYAKQGRGSQFTSKEERDKWIKKELKSLDQAINDKKRQIAAIHKDLEDTEANKEKNLEQYNKLDQDLNEVKARVEELDRKYYEVKNKKDELQSERNYLWREENAEQQALAAKREDLEKKQQLLRAATGKAILNGIDSINKVLDHFRRKGINQHVQNGYHGIVMNNFECEPAFYTCVEVTAGNRLKLLLDI

SEQ ID NO: 818593 - protein, 898 aa, Homo sapiens
LTGGYYDTRKSRLEIEKIEEKQKELAETEPKFNSVKEKEERGIARLAQATQERTDLYAKQGRGSQFTSKEERDKWIKKELKSLDQAINDKKRQIAAIHKDLEDTEANKEKNLEQYNKLDQDLNEVKARVEELDRKYYEVKNKKDELQSERNYLWREENAEQQALAAKREDLEKKQQLLRAATGKAILNGIDSINKVLDHFRRKGINQHVQNGYHGIVMNNFECEPAFYTCVEVTAGNRLFYHIVDSDEVSTKILMEFNKMNLPGEVTFLPLNKLDVRDTAYPETNDAIPMISKLRYNPRFDKAFKHVFGKTLICRSMEVSTQLARAFTMDCITLEGDQVSHRGALTGGYYDTRKSRLELQKDVRKAEEELGELEAKLNENLRRNIERINNEIDQLMNQMQQIETQQRKFKASRDSILSEMKMLKEKRQQSEKTFMPKQRSLQSLEASLHAMESTRESLKAELGTDLLSQLSLEDQKRVDALNDEIRQLQQENRQLLNERIKLEGIITRVETYLNENLRKRLDQVEQELNELRETEGGTVLTATTSELEAINKRVKDTMARSEDLDNSIDKTEAGIKELQKSMERWKNMEKEHMDAINHDTKELEKMTNRQGMLLKKKEECMKKIRELGSLPQEAFEKYQTLSLKQLFRKLEQCNTELKKYSHVNKKALDQFVNFSEQKEKLIKRQEELDRGYKSIMELMNVLELRKYEAIQLTFKQVSKNFSEVFQKLVPGGKATLVMKKGDVEGSQSQDEGEGSGESERGSGSQSSVPSVDQFTGVGIRVSFTGKQGEMREMQQLSGGQKSLVALALIFAIQKCDPAPFYLFDEIDQALDAQHRKAVSDMIMELAVHAQFITTTFRPELLESADKFYGVKFRNKVSHIDVITAEMAKDFVEDDTTHG

SEQ ID NO: 818594 - protein, 899 aa, Homo sapiens
DLNEVKARVEELDRKYYEVKNKKDELAETEPKFNSVKEKEERGIARLAQATQERTDLYAKQGRGSQFTSKEERDKWIKKELKSLDQAINDKKRQIAAIHKDLEDTEANKEKNLEQYNKLDQDLNEVKARVEELDRKYYEVKNKKDELQSERNYLWREENAEQQALAAKREDLEKKQQLLRAATGKAILNGIDSINKVLDHFRRKGINQHVQNGYHGIVMNNFECEPAFYTCVEVTAGNRLFYHIVDSDEVSTKILMEFNKMNLPGEVTFLPLNKLDVRDTAYPETNDAIPMISKLRYNPRFDKAFKHVFGKTLICRSMEVSTQLARAFTMDCITLEGDQVSHRGALTGGYYDTRKSRLELQKDVRKAEEELGELEAKLNENLRRNIERINNEIDQLMNQMQQIETQQRKFKASRDSILSEMKMLKEKRQQSEKTFMPKQRSLQSLEASLHAMESTRESLKAELGTDLLSQLSLEDQKRVDALNDEIRQLQQENRQLLNERIKLEGIITRVETYLNENLRKRLDQVEQELNELRETEGGTVLTATTSELEAINKRVKDTMARSEDLDNSIDKTEAGIKELQKSMERWKNMEKEHMDAINHDTKELEKMTNRQGMLLKKKEECMKKIRELGSLPQEAFEKYQTLSLKQLFRKLEQCNTELKKYSHVNKKALDQFVNFSEQKEKLIKRQEELDRGYKSIMELMNVLELRKYEAIQLTFKQVSKNFSEVFQKLVPGGKATLVMKKGDVEGSQSQDEGEGSGESERGSGSQSSVPSVDQFTGVGIRVSFTGKQGEMREMQQLSGGQKSLVALALIFAIQKCDPAPFYLFDEIDQALDAQHRKAVSDMIMELAVHAQFITTTFRPELLESADKFYGVKFRNKVSHIDVITAEMAKDFVEDDTTHG

SEQ ID NO: 818595 - protein, 690 aa, Homo sapiens
MYIKQVIIQGFRSYRDQTIVDPFSSKHNVIVGRNGSGKSNFFYAIQFVLSDEFSHLRPEQRLALLHEGTGPRVISAFVEIIFDNSDNRLPIDKEEVSLRRVIGAKKDQYFLDKKMVTKNDVMNLLESAGFSRSNPYYIVKQGKINQMATAPDSQRLKLLREVAGTRVYDERKEESISLMKETEGKREKINELLKYIEERLHTLEEEKEELAQYQKWDKMRRALEYTIYNQELNETRAKLDELSAKRETSGEKSRQLRDAQQDARDKMEDIERQVRELKTKISAMKEEKEQLSAERQEQIKQRTKLELKAKDLQDELAGNSEQRKRLLKERQKLLEKIEEKQKELAETEPKFNSVKEKEERGIARLAQATQERTDLYAKQGRGSQFTSKEERDKWIKKELKSLDQAINDKKRQIAAIHKDLEDTEANKEKNLEQYNKLDQDLNEVKARVEELDRKYYEVKNKKDELQSERNYLWREENAEQQALAAKREDLEKKQQLLRAATGKAILNGIDSINKVLDHFRRKGINQHVQNGYHGIVMNNFECEPAFYTCVEVTAGNRLFYHIVDSDEVSTKILMEFNKMNLPGEVTFLPLNKLDVRDTAYPETNDAIPMISKLRYNPRFDKAFKHVFGKTLICRSMEVSTQLARAFTMDCITLEGDQVSHRGALTGGYYDTRKSRLELQKDVRKAERRTR

SEQ ID NO: 818596 - protein, 564 aa, Homo sapiens; identical to SEQ ID NO: 818592

SEQ ID NO: 818597 - protein, 415 aa, Homo sapiens
SSSGTITDEDELTGILKKLSLEKYQPIFEEQEVDMEAFLTLTDGDLKELGIKTDGPRQQCAIETSKTGLVLEVSIARSEDLDNSIDKTEAGIKELQKSMERWKNMEKEHMDAINHDTKELEKMTNRQGMLLKKKEECMKKIRELGSLPQEAFEKYQTLSLKQLFRKLEQCNTELKKYSHVNKKALDQFVNFSEQKEKLIKRQEELDRGYKSIMELMNVLELRKYEAIQLTFKQVSKNFSEVFQKLVPGGKATLVMKKGDVEGSQSQDEGEGSGESERGSGSQSSVPSVDQFTGVGIRVSFTGKQGEMREMQQLSGGQKSLVALALIFAIQKCDPAPFYLFDEIDQALDAQHRKAVSDMIMELAVHAQFITTTFRPELLESADKFYGVKFRNKVSHIDVITAEMAKDFVEDDTTHG

SEQ ID NO: 818598 - protein, 208 aa, Homo sapiens
MYIKQVIIQGFRSYRDQTIVDPFSSKHNVIVGRNGSGKSNFFYAIQFVLSDEFSHLRPEQRLALLHEGTGPRVISAFVEIIFDNSDNRLPIDKEEVSLRRVIGAKKDQYFLDKKMVTKNDVMNLLESAGFSRSNPYYIVKQGKINQMATAPDSQRLKLLREVAGTRVYDERKEESISLMKETEGKRGKNQSAVPMSSRKLSYVKGNKT

SEQ ID NO: 818599 - protein, 43 aa, Homo sapiens
MPVARSWVCRKTYVTPRRPFEKSRLDQELKLIGEYGLRNKREV

SEQ ID NO: 818600 - protein, 361 aa, Homo sapiens
MEQPQEEAPEVREEEEKEEVAEAEGAPELNGGPQHALPSSSYTDLSRSSSPPSLLDQLQMGCDGASCGSLNMECRVCGDKASGFHYGVHACEGCKGFFRRTIRMKLEYEKCERSCKIQKKNRNKCQYCRFQKCLALGMSHNAIRFGRMPEAEKRKLVAGLTANEGSQYNPQVADLKAFSKHIYNAYLKNFNMTKKKARSILTGKASHTAPFVIHDIETLWQAEKGLVWKQLVNGLPPYKEISVHVFYRCQCTTVETVRELTEFAKSIPSFSSLFLNDQVTLLKYGVHEAIFAMLASIVNKDGLLVANGSGFVTREFLRSLRKPFSDIIEPKFEFAVKFNALELDDSDLALFIAAIILCGGE

SEQ ID NO: 818601 - protein, 135 aa, Homo sapiens
LQPVHYAWLLAWLFAWLFAWHLAWLVAWPLVWHLAWLFAWLLVWLFGWLFAGALWQAEKGLVWKQLVNGLPPYKEISVHVFYRCQCTTVETVRELTEFAKSIPSFSSLFLNDQVTLLKGPHKEPPNVPGSSRTAP

SEQ ID NO: 818602 - protein, 441 aa, Homo sapiens
MEQPQEEAPEVREEEEKEEVAEAEGAPELNGGPQHALPSSSYTDLSRSSSPPSLLDQLQMGCDGASCGSLNMECRVCGDKASGFHYGVHACEGCKGFFRRTIRMKLEYEKCERSCKIQKKNRNKCQYCRFQKCLALGMSHNAIRFGRMPEAEKRKLVAGLTANEGSQYNPQVADLKAFSKHIYNAYLKNFNMTKKKARSILTGKASHTAPFVIHDIETLWQAEKGLVWKQLVNGLPPYKEISVHVFYRCQCTTVETVRELTEFAKSIPSFSSLFLNDQVTLLKYGVHEAIFAMLASIVNKDGLLVANGSGFVTREFLRSLRKPFSDIIEPKFEFAVKFNALELDDSDLALFIAAIILCGDRPGLMNVPRVEAIQDTILRALEFHLQANHPDAQYLFPKLLQKMADLRQLVTEHAQMMQRIKKTETETSLHPLLQEIYKDMY

SEQ ID NO: 818603 - protein, 441 aa, Homo sapiens; identical to SEQ ID NO: 818602

SEQ ID NO: 818604 - protein, 441 aa, Homo sapiens; identical to SEQ ID NO: 818602

SEQ ID NO: 818605 - protein, 441 aa, Homo sapiens; identical to SEQ ID NO: 818602

SEQ ID NO: 818606 - protein, 441 aa, Homo sapiens; identical to SEQ ID NO: 818602

SEQ ID NO: 818607 - protein, 441 aa, Homo sapiens; identical to SEQ ID NO: 818602

SEQ ID NO: 818608 - protein, 294 aa, Homo sapiens [sequence omitted]

SEQ ID NO: 818609 - protein, 113 aa, Homo sapiens
MHQRGVGGSHQESEQCSGFPLLFPCSQDAWQVFPLPPCPVAAAHIVSASRARAWPHIPLLLSLAGSTGVQAPLPLKLPLQHTHISTEITLPAGSMHLPSLPEAGENPERGACR

SEQ ID NO: 818610 - protein, 108 aa, Homo sapiens
QSPNSAQSPNSAQSPNSAQSPNSAQSPNSAFAPRTRGLSPGVRPGRARGRPSASTPTAPLPSSSRPHCVSIQGQGLASHPPAPFSSWLHGSSGPTPPEAAPPAHTHKH

SEQ ID NO: 818611 - protein, 361 aa, Homo sapiens; identical to SEQ ID NO: 818600

SEQ ID NO: 818612 - protein, 830 aa, Homo sapiens
MANCQIAILYQRFQRVVFGISQLLCFSALISELTNQKEVAAWTYHYSTKAYSWNISRKYCQNRYTDLVAIQNKNEIDYLNKVLPYYSSYYWIGIRKNNKTWTWVGTKKALTNEAENWADNEPNNKRNNEDCVEIYIKSPSAPGKWNDEHCLKKKHALCYTASCQDMSCSKQGECLETIGNYTCSCYPGFYGPECEYVRECGELELPQHVLMNCSHPLGNFSFNSQCSFHCTDGYQVNGPSKLECLASGIWTNKPPQCLAAQCPPLKIPERGNMTCLHSAKAFQHQSSCSFSCEEGFALVGPEVVQCTASGVWTAPAPVCKAVQCQHLEAPSEGTMDCVHPLTAFAYGSSCKFECQPGYRVRGLDMLRCIDSGHWSAPLPTCEAISCEPLESPVHGSMDCSPSLRAFQYDTNCSFRCAEGFMLRGADIVRCDNLGQWTAPAPVCQALQCQDLPVPNEARVNCSHPFGAFRYQSVCSFTCNEGLLLVGASVLQCLATGNWNSVPPECQAIPCTPLLSPQNGTMTCVQPLGSSSYKSTCQFICDEGYSLSGPERLDCTRSGRWTDSPPMCEAIKCPELFAPEQGSLDCSDTRGEFNVGSTCHFSCNNGFKLEGPNNVECTTSGRWSATPPTCKGIASLPTPGVQCPALTTPGQGTMYCRHHPGTFGFNTTCYFGCNAGFTLIGDSTLSCRPSGQWTAVTPACRAVKCSELHVNKPIAMNCSNLWGNFSYGSICSFHCLEGQLLNGSAQTACQENGHWSTTVPTCQAGPLTIQEALTYFGGAVASTIGLIMGGTLLALLRKRFRQKDDGKCPLNPHSHLGTYGVFTNAAFDPSP

SEQ ID NO: 818613 - protein, 830 aa, Homo sapiens; identical to SEQ ID NO: 818612

SEQ ID NO: 818614 - protein, 790 aa, Homo sapiens
MANCQIAILYQRFQRVVFGISQLLCFSALISELTNQKEVAAWTYHYSTKAYSWNISRKYCQNRYTDLVAIQNKNEIDYLNKVLPYYSSYYWIGIRKNNKTWTWVGTKKALTNEAENWADNEPNNKRNNEDCVEIYIKSPSAPGKWNDEHCLKKKHALCYTASCQDMSCSKQGECLETIGNYTCSCYPGFYGPECEYVRECGELELPQHVLMNCSHPLGNFSFNSQCSFHCTDGYQVNGPSKLECLASGIWTNKPPQCLAAQCPPLKIPERGNMTCLHSAKAFQHQSSCSFSCEEGFALVGPEVVQCTASGVWTAPAPVCKAVQCQHLEAPSEGTMDCVHPLTAFAYGSSCKFECQPGYRVRGLDMLRCIDSGHWSAPLPTCEAISCEPLESPVHGSMDCSPSLRAFQYDTNCSFRCAEGFMLRGADIVRCDNLGQWTAPAPVCQALQCQDLPVPNEARVNCSHPFGAFRYQSVCSFTCNEGLLLVGASVLQCLATGNWNSVPPECQAIPCTPLLSPQNGTMTCVQPLGSSSYKSTCQFICDEGYSLSGPERLDCTRSGRWTDSPPMCEAIKCPELFAPEQGSLDCSDTRGEFNVGSTCHFSCNNGFKLEGPNNVECTTSGRWSATPPTCKGIASLPTPGVQCPALTTPGQGTMYCRHHPGTFGFNTTCYFGCNAGFTLIGDSTLSCRPSGQWTAVTPACRAVKCSELHVNKPIAMNCSNLWGNFSYGSICSFHCLEGQLLNGSAQTACQENGHWSTTVPTCQDDGKCPLNPHSHLGTYGVFTNAAFDPSP

SEQ ID NO: 818615 - protein, 178 aa, Homo sapiens
MYCRHHPGTFGFNTTCYFGCNAGFTLIGDSTLSCRPSGQWTAVTPACRAVKCSELHVNKPIAMNCSNLWGNFSYGSICSFHCLEGQLLNGSAQTACQENGHWSTTVPTCQAGPLTIQEALTYFGGAVASTIGLIMGGTLLALLRKRFRQKDDGKCPLNPHSHLGTYGVFTNAAFDPSP

SEQ ID NO: 818616 - protein, 204 aa, Homo sapiens
PEAGGAVRRAEAVVRIMGGGWWWARAARLARLRFRRSLLPPQRPRSGGARGSFAPGHGPRAGASPPPVSELDRADAWLLRKAHETAFLSWFRNGLLASGIGVISFMQSDMGREAAYGFFLLGGLCVVWGSASYAVGLAALRGPMQLTLGGAAVGAGAVLAASLLWACAVGLYMGQLELDVELVPEDDGTASAEGPDEAGRPPPE

SEQ ID NO: 818617 - protein, 204 aa, Homo sapiens; identical to SEQ ID NO: 818616

SEQ ID NO: 818618 - protein, 139 aa, Homo sapiens
TWLWSPPLRSDSQRCRLAPGTALPLFLSPQPWLCSQTIPRPWPCCYPASPAGFFLLGGLCVVWGSASYAVGLAALRGPMQLTLGGAAVGAGAVLAASLLWACAVGLYMGQLELDVELVPEDDGTASAEGPDEAGRPPPE

SEQ ID NO: 818619 - protein, 157 aa, Homo sapiens
PEAGGAVRRAEAVVRIMGGGWWWARAARLARLRFRRSLLPPQRPRSGGARGSFAPGHGPRAGASPPPVSELDRADAWLLRKAHETAFLSWFRNGLLASGIGVISFMQTDAGGRGRGRGRRAGRQPALGVRRGPLHGAAGAGRGAGARGRRDGLRGRP

SEQ ID NO: 818620 - protein, 706 aa, Homo sapiens
MAVPAALIPPTQLVPPQPPISTSASSSGTTTSTSSATSSPAPSIGPPASSGPTLFRPEPIASAAAAAATVTSTGGGGGGGGSGGGGGSSGNGGGGGGGGGGSNCNPNLAAASNGSGGGGGGISAGGGVASSTPINASTGSSSSSSSSSSSSSSSSSSSSSSSSCGPLPGKPVYSTPSPVENTPQNNECKMVDLRGAKVASFTVEGCELICLPQAFDLFLKHLVGGLHTVYTKLKRLEITPVVCNVEQVRILRGLGAIQPGVNRCKLISRKDFETLYNDCTNASSRPGRPPKRTQSVTSPENSHIMPHSVPGLMSPGIIPPTGLTAAAAAAAAATNAAIAEAMKVKKIKLEAMSNYHASNNQHGADSENGDMNSSVGLELPFMMMPHPLIPVSLPPASVTMAMSQMNHLSTIANMAAAAQVQSPPSRVETSVIKERVPDSPSPAPSLEEGRRPGSHPSSHRSSSVSSSPARTESSSDRIPVHQNGLSMNQMLMGLSPNVLPGPKEGDLAGHDMGHESKRMHIEKDETPLSTPTARDSLDKLSLTGHGQPLPPGFPSPFLFPDGLSSIETLLTNIQGLLKVAIDNARAQEKQVQLEKTELKMDFLRERELRETLEKQLAMEQKNRAIVQKRLKKEKKAKRKLQEALEFETKRREQAEQTLKQAASTDSLRVLNDSLTPEIEADRSGGRTDAERTIQDGRLYLKTTVMY

SEQ ID NO: 818621 - protein, 706 aa, Homo sapiens; identical to SEQ ID NO: 818620

SEQ ID NO: 818622 - protein, 229 aa, Homo sapiens
PHPAHPPPPLLSVSHIPPRCSRPGRPPKRTQSVTSPENSHIMPHSVPGLMSPGIIPPTGLTAAAAAAAAATNAAIAEAMKVKKIKLEAMSNYHASNNQHGADSENGDMNSSVGLELPFMMMPHPLIPVSLPPASVTMAMSQMNHLSTIANMAAAAQVQSPPSRVETSVIKERVPDSPSPAPSLEEGRRPGSHPSSHRSSSVSSSPARTESSSDRIRRSHTSTCHHFKLY

SEQ ID NO: 818623 - protein, 706 aa, Homo sapiens; identical to SEQ ID NO: 818620

SEQ ID NO: 818624 - protein, 661 aa, Homo sapiens
MAVPAALIPPTQLVPPQPPISTSASSSGTTTSTSSATSSPAPSIGPPASSGPTLFRPEPIASAAAAAATVTSTGGGGGGGGSGGGGGSSGNGGGGGGGGGGSNCNPNLAAASNGSGGGGGGISAGGGVASSTPINASTGSSSSSSSSSSSSSSSSSSSSSSSSCGPLPGKPVYSTPSPVENTPQNNECKMVDLRGAKVASFTVEGCELICLPQAFDLFLKHLVGGLHTVYTKLKRLEITPVVCNVEQVRILRGLGAIQPGVNRCKLISRKDFETLYNDCTNASSRPGRPPKRTQSVTSPENSHIMPHSVPGLMSPGIIPPTGLTAAAAAAAAATNAAIAEAMKVKKIKLEAMSNYHASNNQHGADSENGDMNSSVGLELPFMMMPHPLIPVSLPPASVTMAMSQMNHLSTIANMAAAAQVQSPPSRVETSVIKERVPDSPSPAPSLEEGRRPGSHPSSHRSSSVSSSPARTESSSDRIHETPLSTPTARDSLDKLSLTGHGQPLPPGFPSPFLFPDGLSSIETLLTNIQGLLKVAIDNARAQEKQVQLEKTELKMDFLRERELRETLEKQLAMEQKNRAIVQKRLKKEKKAKRKLQEALEFETKRREQAEQTLKQAASTDSLRVLNDSLTPEIEADRSGGRTDAERTIQDGRLYLKTTVMY

SEQ ID NO: 818625 - protein, 674 aa, Homo sapiens
MAVPAALIPPTQLVPPQPPISTSASSSGTTTSTSSATSSPAPSIGPPASSGPTLFRPEPIASAAAAAATVTSTGGGGGGGGSGGGGGSSGNGGGGGGGGGGSNCNPNLAAASNGSGGGGGGISAGGGVASSTPINASTGSSSSSSSSSSSSSSSSSSSSSSSSCGPLPGKPVYSTPSPVENTPQNNECKMVDLRGAKVASFTVEGCELICLPQAFDLFLKHLVGGLHTVYTKLKRLEITPVVCNVEQVRILRGLGAIQPGVNRCKLISRKDFETLYNDCTNASSRPGRPPKRTQSVTSPENSHIMPHSVPGLMSPGIIPPTGLTAAAAAAAAATNAAIAEAMKVKKIKLEAMSNYHASNNQHGADSENGDMNSSVGLELPFMMMPHPLIPVSLPPASVTMAMSQMNHLSTIANMAAAAQVQSPPSRVETSVIKERVPDSPSPAPSLEEGRRPGSHPSSHRSSSVSSSPARTESSSDRIPVHQNGLSMNQMLMGLSPNVLPGPKEGDLAGHDMGHESKRMHIEKDETPLSTPTARDSLDKLSLTGHGQPLPPGFPSPFLFPDGLSSIETLLTNIQGLLKVAIDNARAQEKQVQLEKTELKMDFLRERELRETLEKQLAMEQKNRAIVQKRLKKEKKAKRKLQEALEFETKRREQAEQTLKQAASTDSLRVLNGIK

SEQ ID NO: 818626 - protein, 405 aa, Homo sapiens
REAALALESDGSAVAAANTVCLTAAAAAAAAATNAAIAEAMKVKKIKLEAMSNYHASNNQHGADSENGDMNSSVGLELPFMMMPHPLIPVSLPPASVTMAMSQMNHLSTIANMAAAAQVQSPPSRVETSVIKERVPDSPSPAPSLEEGRRPGSHPSSHRSSSVSSSPARTESSSDRIPVHQNGLSMNQMLMGLSPNVLPGPKEGDLAGHDMGHESKRMHIEKDETPLSTPTARDSLDKLSLTGHGQPLPPGFPSPFLFPDGLSSIETLLTNIQGLLKVAIDNARAQEKQVQLEKTELKMDFLRERELRETLEKQLAMEQKNRAIVQKRLKKEKKAKRKLQEALEFETKRREQAEQTLKQAASTDSLRVLNDSLTPEIEADRSGGRTDAERTIQDGRLYLKTTVMY

SEQ ID NO: 818627 - protein, 492 aa, Homo sapiens
MAVPAALIPPTQLVPPQPPISTSASSSGTTTSTSSATSSPAPSIGPPASSGPTLFRPEPIASAAAAAATVTSTGGGGGGGGSGGGGGSSGNGGGGGGGGGGSNCNPNLAAASNGSGGGGGGISAGGGVASSTPINASTGSSSSSSSSSSSSSSSSSSSSSSSSCGPLPGKPVYSTPSPVENTPQNNECKMVDLRGAKVASFTVEGCELICLPQAFDLFLKHLVGGLHTVYTKLKRLEITPVVCNVEQVRILRGLGAIQPGVNRCKLISRKDFETLYNDCTNASSRPGRPPKRTQSVTSPENSHIMPHSVPGLMSPGIIPPTGLTAAAAAAAAATNAAIAEAMKVKKIKLEAMSNYHASNNQHGADSENGDMNSSVGLELPFMMMPHPLIPVSLPPASVTMAMSQMNHLSTIANMAAAAQVQSPPSRVETSVIKERVPDSPSPAPSLEEGRRPGSHPSSHRSSSVSSSPARTESSSDRIRRSHTSTCHHFKLY

SEQ ID NO: 818628 - protein, 126 aa, Homo sapiens
GSSFQIARSASPTRRMLPTTARRMVMALGVFPHSWLSGSCLSPSTTGGSLQSFRASDPGPAMKWLQIHYTESLSPRTLWTSPSTSSTNPTMALWTDVSFSEGLERGSDEKVRLKRLARLLGLITAP

SEQ ID NO: 818629 - protein, 799 aa, Homo sapiens
MPRAPAPLYACLLGLCALLPRLAGLNICTSGSATSCEECLLIHPKCAWCSKEDFGSPRSITSRCDLRANLVKNGCGGEIESPASSFHVLRSLPLSSKGSGSAGWDVIQMTPQEIAVNLRPGDKTTFQLQVRQVEDYPVDLYYLMDLSLSMKDDLDNIRSLGTKLAEEMRKLTSNFRLGFGSFVDKDISPFSYTAPRYQTNPCIGYKLFPNCVPSFGFRHLLPLTDRVDSFNEEVRKQRVSRNRDAPEGGFDAVLQAAVCKEKIGWRKDALHLLVFTTDDVPHIALDGKLGGLVQPHDGQCHLNEANEYTASNQMDYPSLALLGEKLAENNINLIFAVTKNHYMLYKNFTALIPGTTVEILDGDSKNIIQLIINAYNSIRSKVELSVWDQPEDLNLFFTATCQDGVSYPGQRKCEGLKIGDTASFEVSLEARSCPSRHTEHVFALRPVGFRDSLEVGVTYNCTCGCSVGLEPNSARCNGSGTYVCGLCECSPGYLGTRCECQDGENQSVYQNLCREAEGKPLCSGRGDCSCNQCSCFESEFGKIYGPFCECDNFSCARNKGVLCSGHGECHCGECKCHAGYIGDNCNCSTDISTCRGRDGQICSERGHCLCGQCQCTEPGAFGEMCEKCPTCPDACSTKRDCVECLLLHSGKPDNQTCHSLCRDEVITWVDTIVKDDQEAVLCFYKTAKDCVMMFTYVELPSGKSNLTVLREPECGNTPNAMTILLAVVGSILLVGLALLAIWKLLVTIHDRREFAKFQSERSRARYEMASNPLYRKPISTHTVDFTFNKFNKSYNGTVD

SEQ ID NO: 818630 - protein, 817 aa, Homo sapiens
RQSLTLSPRLECSGEISTHYNLCLLGSSDSPASASRIAGITGLNICTSGSATSCEECLLIHPKCAWCSKEDFGSPRSITSRCDLRANLVKNGCGGEIESPASSFHVLRSLPLSSKGSGSAGWDVIQMTPQEIAVNLRPGDKTTFQLQVRQVEDYPVDLYYLMDLSLSMKDDLDNIRSLGTKLAEEMRKLTSNFRLGFGSFVDKDISPFSYTAPRYQTNPCIGYKLFPNCVPSFGFRHLLPLTDRVDSFNEEVRKQRVSRNRDAPEGGFDAVLQAAVCKEKIGWRKDALHLLVFTTDDVPHIALDGKLGGLVQPHDGQCHLNEANEYTASNQMDYPSLALLGEKLAENNINLIFAVTKNHYMLYKNFTALIPGTTVEILDGDSKNIIQLIINAYNSIRSKVELSVWDQPEDLNLFFTATCQDGVSYPGQRKCEGLKIGDTASFEVSLEARSCPSRHTEHVFALRPVGFRDSLEVGVTYNCTCGCSVGLEPNSARCNGSGTYVCGLCECSPGYLGTRCECQDGENQSVYQNLCREAEGKPLCSGRGDCSCNQCSCFESEFGKIYGPFCECDNFSCARNKGVLCSGHGECHCGECKCHAGYIGDNCNCSTDISTCRGRDGQICSERGHCLCGQCQCTEPGAFGEMCEKCPTCPDACSTKRDCVECLLLHSGKPDNQTCHSLCRDEVITWVDTIVKDDQEAVLCFYKTAKDCVMMFTYVELPSGKSNLTVLREPECGNTPNAMTILLAVVGSILLVGLALLAIWKLLVTIHDRREFAKFQSERSRARYEMASNPLYRKPISTHTVDFTFNKFNKSYNGTVD

SEQ ID NO: 818631 - protein, 815 aa, Homo sapiens
SLTLLPRLECSGAISGHRNLCLPGSSDSPASASRVAGITGLNICTSGSATSCEECLLIHPKCAWCSKEDFGSPRSITSRCDLRANLVKNGCGGEIESPASSFHVLRSLPLSSKGSGSAGWDVIQMTPQEIAVNLRPGDKTTFQLQVRQVEDYPVDLYYLMDLSLSMKDDLDNIRSLGTKLAEEMRKLTSNFRLGFGSFVDKDISPFSYTAPRYQTNPCIGYKLFPNCVPSFGFRHLLPLTDRVDSFNEEVRKQRVSRNRDAPEGGFDAVLQAAVCKEKIGWRKDALHLLVFTTDDVPHIALDGKLGGLVQPHDGQCHLNEANEYTASNQMDYPSLALLGEKLAENNINLIFAVTKNHYMLYKNFTALIPGTTVEILDGDSKNIIQLIINAYNSIRSKVELSVWDQPEDLNLFFTATCQDGVSYPGQRKCEGLKIGDTASFEVSLEARSCPSRHTEHVFALRPVGFRDSLEVGVTYNCTCGCSVGLEPNSARCNGSGTYVCGLCECSPGYLGTRCECQDGENQSVYQNLCREAEGKPLCSGRGDCSCNQCSCFESEFGKIYGPFCECDNFSCARNKGVLCSGHGECHCGECKCHAGYIGDNCNCSTDISTCRGRDGQICSERGHCLCGQCQCTEPGAFGEMCEKCPTCPDACSTKRDCVECLLLHSGKPDNQTCHSLCRDEVITWVDTIVKDDQEAVLCFYKTAKDCVMMFTYVELPSGKSNLTVLREPECGNTPNAMTILLAVVGSILLVGLALLAIWKLLVTIHDRREFAKFQSERSRARYEMASNPLYRKPISTHTVDFTFNKFNKSYNGTVD

SEQ ID NO: 818632 - protein, 836 aa, Homo sapiens
MRRYRHDPRTCSPSRSLATAFGPSNLGSPNTACPAPFPWRRAAKQRELGSTQWFRAPHAPSLNICTSGSATSCEECLLIHPKCAWCSKEDFGSPRSITSRCDLRANLVKNGCGGEIESPASSFHVLRSLPLSSKGSGSAGWDVIQMTPQEIAVNLRPGDKTTFQLQVRQVEDYPVDLYYLMDLSLSMKDDLDNIRSLGTKLAEEMRKLTSNFRLGFGSFVDKDISPFSYTAPRYQTNPCIGYKLFPNCVPSFGFRHLLPLTDRVDSFNEEVRKQRVSRNRDAPEGGFDAVLQAAVCKEKIGWRKDALHLLVFTTDDVPHIALDGKLGGLVQPHDGQCHLNEANEYTASNQMDYPSLALLGEKLAENNINLIFAVTKNHYMLYKNFTALIPGTTVEILDGDSKNIIQLIINAYNSIRSKVELSVWDQPEDLNLFFTATCQDGVSYPGQRKCEGLKIGDTASFEVSLEARSCPSRHTEHVFALRPVGFRDSLEVGVTYNCTCGCSVGLEPNSARCNGSGTYVCGLCECSPGYLGTRCECQDGENQSVYQNLCREAEGKPLCSGRGDCSCNQCSCFESEFGKIYGPFCECDNFSCARNKGVLCSGHGECHCGECKCHAGYIGDNCNCSTDISTCRGRDGQICSERGHCLCGQCQCTEPGAFGEMCEKCPTCPDACSTKRDCVECLLLHSGKPDNQTCHSLCRDEVITWVDTIVKDDQEAVLCFYKTAKDCVMMFTYVELPSGKSNLTVLREPECGNTPNAMTILLAVVGSILLVGLALLAIWKLLVTIHDRREFAKFQSERSRARYEMASNPLYRKPISTHTVDFTFNKFNKSYNGTVD

SEQ ID NO: 818633 - protein, 799 aa, Homo sapiens; identical to SEQ ID NO: 818629

SEQ ID NO: 818634 - protein, 754 aa, Homo sapiens
MPRAPAPLYACLLGLCALLPRLAGLNICTSGSATSCEECLLIHPKCAWCSKEDFGSPRSITSRCDLRANLVKNGCGGEIESPASSFHVLRSLPLSSKGSGSAGWDVIQMTPQEIAVNLRPGDKTTFQLQVRQVEDYPVDLYYLMDLSLSMKDDLDNIRSLGTKLAEEMRKLTSNFRLGFGSFVDKDISPFSYTAPRYQTNPCIGYKLFPNCVPSFGFRHLLPLTDRVDSFNEEVRKQRVSRNRDAPEGGFDAVLQAAVCKEKIGWRKDALHLLVFTTDDVPHIALDGKLGGLVQPHDGQCHLNEANEYTASNQMDYPSLALLGEKLAENNINLIFAVTKNHYMLYKNFTALIPGTTVEILDGDSKNIIQLIINAYNASFEVSLEARSCPSRHTEHVFALRPVGFRDSLEVGVTYNCTCGCSVGLEPNSARCNGSGTYVCGLCECSPGYLGTRCECQDGENQSVYQNLCREAEGKPLCSGRGDCSCNQCSCFESEFGKIYGPFCECDNFSCARNKGVLCSGHGECHCGECKCHAGYIGDNCNCSTDISTCRGRDGQICSERGHCLCGQCQCTEPGAFGEMCEKCPTCPDACSTKRDCVECLLLHSGKPDNQTCHSLCRDEVITWVDTIVKDDQEAVLCFYKTAKDCVMMFTYVELPSGKSNLTVLREPECGNTPNAMTILLAVVGSILLVGLALLAIWKLLVTIHDRREFAKFQSERSRARYEMASNPLYRKPISTHTVDFTFNKFNKSYNGTVD

SEQ ID NO: 818635 - protein, 769 aa, Homo sapiens
MPRAPAPLYACLLGLCALLPRLAGLNICTSGSATSCEECLLIHPKCAWCSKEDFGSPRSITSRCDLRANLVKNGCGGEIESPASSFHVLRSLPLSSKGSGSAGWDVIQMTPQEIAVNLRPGDKTTFQLQVRQVEDYPVDLYYLMDLSLSMKDDLDNIRSLGTKLAEEMRKLTSNFRLGFGSFVDKDISPFSYTAPRYQTNPCIGYKLFPNCVPSFGFRHLLPLTDRVDSFNEEVRKQRVSRNRDAPEGGFDAVLQAAVCKEKIGWRKDALHLLVFTTDDVPHIALDGKLGGLVQPHDGQCHLNEANEYTASNQMDYPSLALLGEKLAENNINLIFAVTKNHYMLYKSIRSKVELSVWDQPEDLNLFFTATCQDGVSYPGQRKCEGLKIGDTASFEVSLEARSCPSRHTEHVFALRPVGFRDSLEVGVTYNCTCGCSVGLEPNSARCNGSGTYVCGLCECSPGYLGTRCECQDGENQSVYQNLCREAEGKPLCSGRGDCSCNQCSCFESEFGKIYGPFCECDNFSCARNKGVLCSGHGECHCGECKCHAGYIGDNCNCSTDISTCRGRDGQICSERGHCLCGQCQCTEPGAFGEMCEKCPTCPDACSTKRDCVECLLLHSGKPDNQTCHSLCRDEVITWVDTIVKDDQEAVLCFYKTAKDCVMMFTYVELPSGKSNLTVLREPECGNTPNAMTILLAVVGSILLVGLALLAIWKLLVTIHDRREFAKFQSERSRARYEMASNPLYRKPISTHTVDFTFNKFNKSYNGTVD

SEQ ID NO: 818636 - protein, 619 aa, Homo sapiens
IADSRGSPSSPPTSRGDQTNPCIGYKLFPNCVPSFGFRHLLPLTDRVDSFNEEVRKQRVSRNRDAPEGGFDAVLQAAVCKEKIGWRKDALHLLVFTTDDVPHIALDGKLGGLVQPHDGQCHLNEANEYTASNQMDYPSLALLGEKLAENNINLIFAVTKNHYMLYKNFTALIPGTTVEILDGDSKNIIQLIINAYNSIRSKVELSVWDQPEDLNLFFTATCQDGVSYPGQRKCEGLKIGDTASFEVSLEARSCPSRHTEHVFALRPVGFRDSLEVGVTYNCTCGCSVGLEPNSARCNGSGTYVCGLCECSPGYLGTRCECQDGENQSVYQNLCREAEGKPLCSGRGDCSCNQCSCFESEFGKIYGPFCECDNFSCARNKGVLCSGHGECHCGECKCHAGYIGDNCNCSTDISTCRGRDGQICSERGHCLCGQCQCTEPGAFGEMCEKCPTCPDACSTKRDCVECLLLHSGKPDNQTCHSLCRDEVITWVDTIVKDDQEAVLCFYKTAKDCVMMFTYVELPSGKSNLTVLREPECGNTPNAMTILLAVVGSILLVGLALLAIWKLLVTIHDRREFAKFQSERSRARYEMASNPLYRKPISTHTVDFTFNKFNKSYNGTVD

SEQ ID NO: 818637 - protein, 649 aa, Homo sapiens
MPRAPAPLYACLLGLCALLPRLAGLNICTSGSATSCEECLLIHPKCAWCSKEDFGSPRSITSRCDLRANLVKNGCGGEIESPASSFHVLRSLPLSSKGSGSAGWDVIQMTPQEIAVNLRPGDKTTFQLQVRQVEDYPVDLYYLMDLSLSMKDDLDNIRSLGTKLAEEMRKLTSNFRLGFGSFVDKDISPFSYTAPRYQTNPCIGYKLFPNCVPSFGFRHLLPLTDRVDSFNEEVRKQRVSRNRDAPEGGFDAVLQAAVCKEKIGWRKDALHLLVFTTDDVPHIALDGKLGGLVQPHDGQCHLNEANEYTASNQMDYPSLALLGEKLAENNINLIFAVTKNHYMLYKNFTALIPGTTVEILDGDSKNIIQLIINAYNSIRSKVELSVWDQPEDLNLFFTATCQDGVSYPGQRKCEGLKIGDTASFEVSLEARSCPSRHTEHVFALRPVGFRDSLEVGVTYNCTCGCSVGLEPNSARCNGSGTYVCGLCECSPGYLGTRCECQDGENQSVYQNLCREAEGKPLCSGRGDCSCNQCSCFESEFGKIYGPFCECDNFSCARNKGVLCSGHGECHCGECKCHAGYIGDNCNCSTDISTCRGSANARSRGPLGRCVRSAPPARMHAAPREIASSACCSTLGNLTTRPATAYAGMR

SEQ ID NO: 818638 - protein, 701 aa, Homo sapiens
RQSLTLSPRLECSGEISTHYNLCLLGSSDSPASASRIAGITGLNICTSGSATSCEECLLIHPKCAWCSKEDFGSPRSITSRCDLRANLVKNGCGGEIESPASSFHVLRSLPLSSKGSGSAGWDVIQMTPQEIAVNLRPGDKTTFQLQVRQVEDYPVDLYYLMDLSLSMKDDLDNIRSLGTKLAEEMRKLTSNFRLGFGSFVDKDISPFSYTAPRYQTNPCIGYKLFPNCVPSFGFRHLLPLTDRVDSFNEEVRKQRVSRNRDAPEGGFDAVLQAAVCKSIRSKVELSVWDQPEDLNLFFTATCQDGVSYPGQRKCEGLKIGDTASFEVSLEARSCPSRHTEHVFALRPVGFRDSLEVGVTYNCTCGCSVGLEPNSARCNGSGTYVCGLCECSPGYLGTRCECQDGENQSVYQNLCREAEGKPLCSGRGDCSCNQCSCFESEFGKIYGPFCECDNFSCARNKGVLCSGHGECHCGECKCHAGYIGDNCNCSTDISTCRGRDGQICSERGHCLCGQCQCTEPGAFGEMCEKCPTCPDACSTKRDCVECLLLHSGKPDNQTCHSLCRDEVITWVDTIVKDDQEAVLCFYKTAKDCVMMFTYVELPSGKSNLTVLREPECGNTPNAMTILLAVVGSILLVGLALLAIWKLLVTIHDRREFAKFQSERSRARYEMASNPLYRKPISTHTVDFTFNKFNKSYNGTVD

SEQ ID NO: 818639 - protein, 450 aa, Homo sapiens
MPRAPAPLYACLLGLCALLPRLAGLNICTSGSATSCEECLLIHPKCAWCSKEDFGSPRSITSRCDLRANLVKNGCGGEIESPASSFHVLRSLPLSSKGSGSAGWDVIQMTPQEIAVNLRPGDKTTFQLQVRQVEDYPVDLYYLMDLSLSMKDDLDNIRSLGTKLAEEMRKLTSNFRLGFGSFVDKDISPFSYTAPRYQTNPCIGYKLFPNCVPSFGFRHLLPLTDRVDSFNEEVRKQRVSRNRDAPEGGFDAVLQAAVCKEKIGWRKDALHLLVFTTDDVPHIALDGKLGGLVQPHDGQCHLNEANEYTASNQMDYPSLALLGEKLAENNINLIFAVTKNHYMLYKNFTALIPGTTVEILDGDSKNIIQLIINAYNSIRSKVELSVWDQPEDLNLFFTATCQDGVSYPGQRKCEVRQLLLCQEQGSPLLRPWRVSLRGMQVPCRLHRGQL

SEQ ID NO: 818640 - protein, 843 aa, Homo sapiens
MPRAPAPLYACLLGLCALLPRLAGLNICTSGSATSCEECLLIHPKCAWCSKEDFGSPRSITSRCDLRANLVKNGCGGEIESPASSFHVLRSLPLSSKGSGSAGWDVIQMTPQEIAVNLRPGDKTTFQLQVRQVEDYPVDLYYLMDLSLSMKDDLDNIRSLGTKLAEEMRKLTSNFRLGFGSFVDKDISPFSYTAPRYQTNPCIGYKLFPNCVPSFGFRHLLPLTDRVDSFNEEVRKQRVSRNRDAPEGGFDAVLQAAVCKEKIGWRKDALHLLVFTTDDVPHIALDGKLGGLVQPHDGQCHLNEANEYTASNQMDYPSLALLGEKLAENNINLIFAVTKNHYMLYKNFTALIPGTTVEILDGDSKNIIQLIINAYNSIRSKVELSVWDQPEDLNLFFTATCQDGVSYPGQRKCEGLKIGDTASFEVSLEARSCPSRHTEHVFALRPVGFRDSLEVGVTYNCTCGCSVGLEPNSARCNGSGTYVCGLCECSPGYLGTRCECQDGENQSVYQNLCREAEGKPLCSGRGDCSCNQCSCFESEFGKIYGPFCECDNFSCARNKGVLCSGHGECHCGECKCHAGYIGDNCNCSTDISTCRGRDGQICSERGHCLCGQCQCTEPGAFGEMCEKCPTCPDACSTKRDCVECLLLHSGKPDNQTCHSLCRDEVITWVDTIVKDDQEAVLCFYKTAKDCVMMFTYVELPSGKSNLTVLREPECGNTPNAMTILLAVVGSILLVGLALLAIWKLLVTIHDRREFAKFQSERSRARYEMASNPLYRKPISTIKFQMKKVLCLAVAVGHVKMTDDELVYNIHLAVNFLVSLLKKNWQNVRALYIKSTMGKPQRLY

SEQ ID NO: 818641 - protein, 446 aa, Homo sapiens
MPRAPAPLYACLLGLCALLPRLAGLNICTSGSATSCEECLLIHPKCAWCSKEDFGSPRSITSRCDLRANLVKNGCGGEIESPASSFHVLRSLPLSSKGSGSAGWDVIQMTPQEIAVNLRPGDKTTFQLQVRQVEDYPVDLYYLMDLSLSMKDDLDNIRSLGTKLAEEMRKLTSNFRLGFGSFVDKDISPFSYTAPRYQTNPCIGYKLFPNCVPSFGFRHLLPLTDRVDSFNEEVRKQRVSRNRDAPEGGFDAVLQAAVCKEKIGWRKDALHLLVFTTDDVPHIALDGKLGGLVQPHDGQCHLNEANEYTASNQMDYPSLALLGEKLAENNINLIFAVTKNHYMLYKNFTALIPGTTVEILDGDSKNIIQLIINAYNSIRSKVELSVWDQPEDLNLFFTATCQDGVSYPGQRKCEGLKIGDTHLFEVSLEPLRIKINNRDVFDHADQ

SEQ ID NO: 818642 - protein, 229 aa, Homo sapiens
SECDKCFSRSTNLIRHRRTHTGEKPFKCLECEKAFSGKSDLISHQRTHTGERPYKCNKCEKSYRHRSAFIVHKRVHTGEKPYKCGACEKCFGQKSDLIVHQRVHTGEKPYKCLECMRSFTRSANLIRHQATHTHTFKCLEYEKSFNCSSDLIVHQRIHMEEKPHQWSACESGFLLGMDFVAQQKMRTQTEELHYKYTVCDKSFHQSSALLQHQTVHIGEKGLNSGGATL

SEQ ID NO: 818643 - protein, 245 aa, Homo sapiens
SECDKCFSRSTNLIRHRRTHTGEKPFKCLECEKAFSGKSDLISHQRTHTGERPYKCNKCEKSYRHRSAFIVHKRVHTGEKPYKCGACEKCFGQKSDLIVHQRVHTGEKPYKCLECMRSFTRSANLIRHQATHTHTFKCLEYEKSFNCSSDLIVHQRIHMEEKPHQWSACESGFLLGMDFVAQQKMRTQTEELHYKYTVCDKSFHQSSALLQHQTVHIGEKPFVCNVSEKGLELSPPHASEASQMS

SEQ ID NO: 818644 - protein, 245 aa, Homo sapiens; identical to SEQ ID NO: 818643

SEQ ID NO: 818645 - protein, 245 aa, Homo sapiens; identical to SEQ ID NO: 818643

SEQ ID NO: 818646 - protein, 72 aa, Homo sapiens
FCGDLEDPELFCGEGFERSMMTCEDINECAQNPLLCAFRCVNTYGSYECKCPVGYVLREDRRMCKDEDEWMK

SEQ ID NO: 818647 - protein, 359 aa, Homo sapiens
MSPDYQHIRLLDNNECTSDINLCGSKGICQNTPGSFTCECQRGFSLDQTGSSCEDVDECEGNHRCQHGCQNIIGGYRCSCPQGYLQHYQWNQCVDENECLSAHICGGASCHNTLGSYKCMCPAGFQYEQFSGGCQDINECGSAQAPCSYGCSNTEGGYLCGCPPGYFRIGQGHCVSGMGMGRGNPEPPVSGEMDDNSLSPEACYECKINGYPKRGRKRRSTNETDASNIEDQSETEANVSLASWDVEKTAIFAFNISHVSNKVRILELLPALTTLTNHNRYLIESGNEDGFFKINQKEGISYLHFTKKKPVAGTYSLQISSTPLYKKKELNQLEDKYDKDYLSGELGDNLKMKIQVLLH

SEQ ID NO: 818648 - protein, 240 aa, Homo sapiens [sequence omitted]

SEQ ID NO: 818649 - protein, 103 aa, Homo sapiens
MRRGRLLEIALGFTVLLASYTSHGADANLEAGNVKETRASRAKRRGGGGHDALKGIAPVYKGRGDLILWLKICREVGGLVRHLSHFSGLSPTSVFPWECEKRN

SEQ ID NO: 818650 - protein, 88 aa, Homo sapiens
MRRGRLLEIALGFTVLLASYTSHGADANLEAGNVKETRASRAKRRGGGGHDALKGYKEPVPSFGVGLPSFKIQNNGQDDSPCGRLLGK

SEQ ID NO: 818651 - protein, 173 aa, Homo sapiens
ANSLVIRDCEKEEEQVIQVWNKKNANEKGRSQTSKLPPRFAKKQATGIQQAQSSASVPPLASAPLPPSTSASVPASTSAPLPATLTPVPASTSAPVPASTLAPVLASTSAPVPASPLAPVSASASVSASVPASTSAAAITSSSAPASAPAVLPRLLLAVSNRIPAAPCGPEAC

SEQ ID NO: 818652 - protein, 2763 aa, Homo sapiens
MSEKSGQSTKAKDGKKYATLSLFNTYKGKSLETQKTTVAARHGLQSLGKVGISRRMPPPANLPSLKAENKGNDPNVNIVPKDGTGWASKQEQHEEEKTPEVPPAQPKPGVAAPPEVAPAPKSWASNKQGGQGDGIQVNSQFQQEFPSLQAAGDQEKKEKETNDDNYGPGPSLRPPNVACWRDGGKAAGSPSSSDQDEKLPGQDESTAGTSEQNDILKVVEKRIACGPPQAKLNGQQAALASQYRAMMPPYMFQQYPRMTYPPLHGPMRFPPSLSETNKGLRGRGPPPSWASEPERPSILSASELKELDKFDNLDAEADEGWAGAQMEVDYTEQLNFSDDDEQGSNSPKENNSEDQGSKASENNENKKETDEVSNTKSSSQIPAQPSVAKVPYGKGPSFNQERGTSSHLPPPPKLLAQQHPPPDRQAVPGRPGPFPSKQQVADEDEIWKQRRRQQSEISAAVERARRTATEGEERRMEEQRKAACAEKLKRLDEKLGILEKQPSPEEIREREREKEREREKELEKEQEQEREKEREKDRERQQEKEKELEKEQEKQREMEKERKQEKEKELERQKEKEKELQKMKEQEKECELEKEREKLEEKIEPREPNLEPMVEKQESENSCNKEEEPVFTRQDSNRSEKEATPVVHETEPESGSQPRPAVLSGYFKQFQKSLPPRFQRQQEQMKQQQWQQQQQQGVLPQTVPSQPSSSTVPPPPHRPLYQPMQPHPQHLASMGFDPRWLMMQSYMDPRMMSGRPAMDIPPIHPGMIPPKPLMRRDQMEGSPNSSESFEHIARSARDHAISLSEPRMLWGSDPYPHAEPQQATTPKATEEPEDVRSEAALDQEQITAAYSVEHNQLEAHPKADFIRESSEAQVQKFLSRSVEDVRPHHTDANNQSACFEAPDQKTLSTPQEERISAVESQPSRKRSVSHGSNHTQKPDEQRSEPSAGIPKVTSRCIDSKEPIERPEEKPKKEGFIRSSEGPKPEKVYKSKSETRWGPRPSSNRREEVNDRPVRRSGPIKKPVLRDMKEEREQRKEKEGEKAEKVTEKVVVKPEKTEKKDLPPPPPPPQPPAPIQPQSVPPPIQPEAEKFPSTETATLAQKPSQDTEKPLEPVSTVQVEPAVKTVNQQTMAAPVVKEEKQPEKVISKDLVIERPRPDSRPAVKKESTLPPRTYWKEARERDWFPDQGYRGRGRGEYYSRGRSYRGSYGGRGRGGRGHTRDYPQYRDNKPRAEHIPSGPLRQREESETRSESSDFEVVPKRRRQRGSETDTDSEIHESASDKDSLSKGKLPKREERPENKKPVKPHSSFKPDNHVRIDNRLLEKPYVRDDDKAKPGFLPKGEPTRRGRGGTFRRGGRDPGGRPSRPSTLRRPAYRDNQWNPRQSEVPKPEDGEPPRRHEQFIPIAADKRPPKFERKFDPARERPRRQRPTRPPRQDKPPRFRRLREREAASKSNEVVAVPTNGTVNNVAQEPVNTLGDISGNKTPDLSNQNSSDQANEEWETASESSDFNERRERDEKKNADLNAQTVVKVGENVLPPKREIAKRSFSSQRPVDRQNRRGNNGPPKSGRNFSGPRNERRSGPPSKSGKRGPFDDQPAGTTGVDLINGSSAHHQEGVPNGTGQKNSKDCTGKKREDPKPGPKKPKEKVDALSQFDLNNYASVVIIDDHPEVTVIEDPQSNLNDDGFTEVVSKKQQKRLQDEERRKKEEQVIQVWNKKNANEKGRSQTSKLPPRFAKKQATGIQQAQSSASVPPLASAPLPPSTSASVPASTSAPLPATLTPVPASTSAPVPASTLAPVLASTSAPVPQFPFLLQPYASTSAPTPAPAASSPAAPVITAPTIPASAPTASVPLAPASASAPAPAPTPVSAPNPAPPAPAQTQAQTHKPVQNPLQTTSQSSKQPPPSIRLPSAQTPNGTDYVASGKSIQTPQSHGTLTAELWDNKVAPPAVLNDISKKLGPISPPQPPSVSAWNKPLTSFGSAPSSEGAKNGQESGLEIGTDTIQFGAPASNGNENEVVPVLSEKSADKIPEPKEQRQKQPRAGPIKAQKLPDLSPVENKEHKPGPIGKERSLKNRKVKDAQQVEPEGQEKPSPATVRSTDPVTTKETKAVSEMSTEIGTMISVSSAEYGTNAKESVTDYTTPSSSLPNTVATNNTKMEDTLVNNVPLPNTLPLPKRETIQQSSSLTSVPPTTFSLTFKMESARKAWENSPNVREKGSPVTSTAPPIATGVSSSASGPSTANYNSFSSASMPQIPVASVTPTASLSGAGTYTTSSLSTKSTTTSDPPNICKVKPQQLQTSSLPSASHFSQLSCMPSLIAQQQQNPQVYVSQSAAAQIPAFYMDTSHLFNTQHARLAPPSLAQQQGFQPGLSQPTSVQQIPIPIYAPLQGQHQAQLSLGAGPAVSQAQELFSSSLQPYRSQPAFMQSSLSQPSVVLSGTAIHNFPTVQHQELAKAQSGLAFQQTSNTQPIPILYEHQLGQASGLGGSQLIDTHLLQARANLTQASNLYSGQVQQPGQTNFYNTAQSPSALQQVTVPLPASQLSLPNFGSTGQPLIALPQTLQPPLQHTTPQAQAQSLSRPAQVSQPFRGLIPAGTQHSMIATTGKMSEMELKAFGSGIDIKPGTPPIAGRSTTPTSSPFRATSTSPNSQSSKMNSIVYQKQFQSAPATVRMTQPFPTQFAPQAKQRAEVLQSTQRFFSEQQQSKQIGGGKAQKVDSDSSKPPETLTDPPGVCQEKVEEKPPPAPSIATKPVRTGPIKPQAIKTEETKS

SEQ ID NO: 818653 - protein, 2755 aa, Homo sapiens
MSEKSGQSTKAKDGKKYATLSLFNTYKGKSLETQKTTVAARHGLQSLGKVGISRRMPPPANLPSLKAENKGNDPNVNIVPKDGTGWASKQEQHEEEKTPEVPPAQPKPGVAAPPEVAPAPKSWASNKQGGQGDGIQVNSQFQQEFPSLQAAGDQEKKEKETNDDNYGPGPSLRPPNVACWRDGGKAAGSPSSSDQDEKLPGQDESTAGTSEQNDILKVVEKRIACGPPQAKLNGQQAALASQYRAMMPPYMFQQYPRMTYPPLHGPMRFPPSLSETNKGLRGRGPPPSWASEPERPSILSASELKELDKFDNLDAEADEGWAGAQMEVDYTEQLNFSDDDEQGSNSPKENNSEDQGSKASENNENKKETDEVSNTKSSSQIPAQPSVAKVPYGKGPSFNQERGTSSHLPPPPKLLAQQHPPPDRQAVPGRPGPFPSKQQVADEDEIWKQRRRQQSEISAAVERARRTATEGEERRMEEQRKAACAEKLKRLDEKLGILEKQPSPEEIREREREKEREREKELEKEQEQEREKEREKDRERQQEKEKELEKEQEKQREMEKERKQEKEKELERQKEKEKELQKMKEQEKECELEKEREKLEEKIEPREPNLEPMVEKQESENSCNKEEEPVFTRQDSNRSEKEATPVVHETEPESGSQPRPAVLSGYFKQFQKSLPPRFQRQQEQMKQQQWQQQQQQGVLPQTVPSQPSSSTVPPPPHRPLYQPMQPHPQHLASMGFDPRWLMMQSYMDPRMMSGRPAMDIPPIHPGMIPPKPLMRRDQMEGSPNSSESFEHIARSARDHAISLSEPRMLWGSDPYPHAEPQQATTPKATEEPEDVRSEAALDQEQITAAYSVEHNQLEAHPKADFIRESSEAQVQKFLSRSVEDVRPHHTDANNQSACFEAPDQKTLSTPQEERISAVESQPSRKRSVSHGSNHTQKPDEQRSEPSAGIPKVTSRCIDSKEPIERPEEKPKKEGFIRSSEGPKPEKVYKSKSETRWGPRPSSNRREEVNDRPVRRSGPIKKPVLRDMKEEREQRKEKEGEKAEKVTEKVVVKPEKTEKKDLPPPPPPPQPPAPIQPQSVPPPIQPEAEKFPSTETATLAQKPSQDTEKPLEPVSTVQVEPAVKTVNQQTMAAPVVKEEKQPEKVISKDLVIERPRPDSRPAVKKESTLPPRTYWKEARERDWFPDQGYRGRGRGEYYSRGRSYRGSYGGRGRGGRGHTRDYPQYRDNKPRAEHIPSGPLRQREESETRSESSDFEVVPKRRRQRGSETDTDSEIHESASDKDSLSKGKLPKREERPENKKPVKPHSSFKPDNHVRIDNRLLEKPYVRDDDKAKPGFLPKGEPTRRGRGGTFRRGGRDPGGRPSRPSTLRRPAYRDNQWNPRQSEVPKPEDGEPPRRHEQFIPIAADKRPPKFERKFDPARERPRRQRPTRPPRQDKPPRFRRLREREAASKSNEVVAVPTNGTVNNVAQEPVNTLGDISGNKTPDLSNQNSSDQANEEWETASESSDFNERRERDEKKNADLNAQTVVKVGENVLPPKREIAKRSFSSQRPVDRQNRRGNNGPPKSGRNFSGPRNERRSGPPSKSGKRGPFDDQPAGTTGVDLINGSSAHHQEGVPNGTGQKNSKDCTGKKREDPKPGPKKPKEKVDALSQFDLNNYASVVIIDDHPEVTVIEDPQSNLNDDGFTEVVSKKQQKRLQDEERRKKEEQVIQVWNKKNANEKGRSQTSKLPPRFAKKQATGIQQAQSSASVPPLASAPLPPSTSASVPASTSAPLPATLTPVPASTSAPVPASTLAPVLASTSAPVPASPLAPVSASASVSASVPASTSAAAITSSSAPASAPAPTPILASVSTPASVTILASASIPILASALASTSAPTPAPAASSPAAPVITAPTIPASAPTASVPLAPASASAPAPAPTPVSAPNPAPPAPAQTQAQTHKPVQNPLQTTSQSSKQPPPSIRLPSAQTPNGTDYVASGKSIQTPQSHGTLTAELWDNKVAPPAVLNDISKKLGPISPPQPPSVSAWNKPLTSFGSAPSSEGAKNGQESGLEIGTDTIQFGAPASNGNENEVVPVLSEKSADKIPEPKEQRQKQPRAGPIKAQKLPDLSPVENKEHKPGPIGKERSLKNRKVKDAQQVEPEGQEKPSPATVRSTDPVTTKETKAVSEMSTEIGTMISVSSAEYGTNAKMESARKAWENSPNVREKGSPVTSTAPPIATGVSSSASGPSTANYNSFSSASMPQIPVASVTPTASLSGAGTYTTSSLSTKSTTTSDPPNICKVKPQQLQTSSLPSASHFSQLSCMPSLIAQQQQNPQVYVSQSAAAQIPAFYMDTSHLFNTQHARLAPPSLAQQQGFQPGLSQPTSVQQIPIPIYAPLQGQHQAQLSLGAGPAVSQAQELFSSSLQPYRSQPAFMQSSLSQPSVVLSGTAIHNFPTVQHQELAKAQSGLAFQQTSNTQPIPILYEHQLGQASGLGGSQLIDTHLLQARANLTQASNLYSGQVQQPGQTNFYNTAQSPSALQQVTVPLPASQLSLPNFGSTGQPLIALPQTLQPPLQHTTPQAQAQSLSRPAQVSQPFRGLIPAGTQHSMIATTGKMSEMELKAFGSGIDIKPGTPPIAGRSTTPTSSPFRATSTSPNSQSSKMNSIVYQKQFQSAPATVRMTQPFPTQFAPQAKQRAEVLQSTQRFFSEQQQSKQIGGGKAQKVDSDSSKPPETLTDPPGVCQEKVEEKPPPAPSIATKPVRTGPIKPQAIKTEETKS

SEQ ID NO: 818654 - protein, 2723 aa, Homo sapiens
MWNNLRERGRELYPGRVVCIIFSIKVTFNVFLKKSIGIQVNSQFQQEFPSLQAAGDQEKKEKETNDDNYGPGPSLRPPNVACWRDGGKAAGSPSSSDQDEKLPGQDESTAGTSEQNDILKVVEKRIACGPPQAKLNGQQAALASQYRAMMPPYMFQQYPRMTYPPLHGPMRFPPSLSETNKGLRGRGPPPSWASEPERPSILSASELKELDKFDNLDAEADEGWAGAQMEVDYTEQLNFSDDDEQGSNSPKENNSEDQGSKASENNENKKETDEVSNTKSSSQIPAQPSVAKVPYGKGPSFNQERGTSSHLPPPPKLLAQQHPPPDRQAVPGRPGPFPSKQQVADEDEIWKQRRRQQSEISAAVERARRTATEGEERRMEEQRKAACAEKLKRLDEKLGILEKQPSPEEIREREREKEREREKELEKEQEQEREKEREKDRERQQEKEKELEKEQEKQREMEKERKQEKEKELERQKEKEKELQKMKEQEKECELEKEREKLEEKIEPREPNLEPMVEKQESENSCNKEEEPVFTRQDSNRSEKEATPVVHETEPESGSQPRPAVLSGYFKQFQKSLPPRFQRQQEQMKQQQWQQQQQQGVLPQTVPSQPSSSTVPPPPHRPLYQPMQPHPQHLASMGFDPRWLMMQSYMDPRMMSGRPAMDIPPIHPGMIPPKPLMRRDQMEGSPNSSESFEHIARSARDHAISLSEPRMLWGSDPYPHAEPQQATTPKATEEPEDVRSEAALDQEQITAAYSVEHNQLEAHPKADFIRESSEAQVQKFLSRSVEDVRPHHTDANNQSACFEAPDQKTLSTPQEERISAVESQPSRKRSVSHGSNHTQKPDEQRSEPSAGIPKVTSRCIDSKEPIERPEEKPKKEGFIRSSEGPKPEKVYKSKSETRWGPRPSSNRREEVNDRPVRRSGPIKKPVLRDMKEEREQRKEKEGEKAEKVTEKVVVKPEKTEKKDLPPPPPPPQPPAPIQPQSVPPPIQPEAEKFPSTETATLAQKPSQDTEKPLEPVSTVQVEPAVKTVNQQTMAAPVVKEEKQPEKVISKDLVIERPRPDSRPAVKKESTLPPRTYWKEARERDWFPDQGYRGRGRGEYYSRGRSYRGSYGGRGRGGRGHTRDYPQYRDNKPRAEHIPSGPLRQREESETRSESSDFEVVPKRRRQRGSETDTDSEIHESASDKDSLSKGKLPKREERPENKKPVKPHSSFKPDNHVRIDNRLLEKPYVRDDDKAKPGFLPKGEPTRRGRGGTFRRGGRDPGGRPSRPSTLRRPAYRDNQWNPRQSEVPKPEDGEPPRRHEQFIPIAADKRPPKFERKFDPARERPRRQRPTRPPRQDKPPRFRRLREREAASKSNEVVAVPTNGTVNNVAQEPVNTLGDISGNKTPDLSNQNSSDQANEEWETASESSDFNERRERDEKKNADLNAQTVVKVGENVLPPKREIAKRSFSSQRPVDRQNRRGNNGPPKSGRNFSGPRNERRSGPPSKSGKRGPFDDQPAGTTGVDLINGSSAHHQEGVPNGTGQKNSKDCTGKKREDPKPGPKKPKEKVDALSQFDLNNYASVVIIDDHPEVTVIEDPQSNLNDDGFTEVVSKKQQKRLQDEERRKKEEQVIQVWNKKNANEKGRSQTSKLPPRFAKKQATGIQQAQSSASVPPLASAPLPPSTSASVPASTSAPLPATLTPVPASTSAPVPASTLAPVLASTSAPVPASPLAPVSASASVSASVPASTSAAAITSSSAPASAPAPTPILASVSTPASVTILASASIPILASALASTSAPTPAPAASSPAAPVITAPTIPASAPTASVPLAPASASAPAPAPTPVSAPNPAPPAPAQTQAQTHKPVQNPLQTTSQSSKQPPPSIRLPSAQTPNGTDYVASGKSIQTPQSHGTLTAELWDNKVAPPAVLNDISKKLGPISPPQPPSVSAWNKPLTSFGSAPSSEGAKNGQESGLEIGTDTIQFGAPASNGNENEVVPVLSEKSADKIPEPKEQRQKQPRAGPIKAQKLPDLSPVENKEHKPGPIGKERSLKNRKVKDAQQVEPEGQEKPSPATVRSTDPVTTKETKAVSEMSTEIGTMISVSSAEYGTNAKESVTDYTTPSSSLPNTVATNNTKMEDTLVNNVPLPNTLPLPKRETIQQSSSLTSVPPTTFSLTFKMESARKAWENSPNVREKGSPVTSTAPPIATGVSSSASGPSTANYNSFSSASMPQIPVASVTPTASLSGAGTYTTSSLSTKSTTTSDPPNICKVKPQQLQTSSLPSASHFSQLSCMPSLIAQQQQNPQVYVSQSAAAQIPAFYMDTSHLFNTQHARLAPPSLAQQQGFQPGLSQPTSVQQIPIPIYAPLQGQHQAQLSLGAGPAVSQAQELFSSSLQPYRSQPAFMQSSLSQPSVVLSGTAIHNFPTVQHQELAKAQSGLAFQQTSNTQPIPILYEHQLGQASGLGGSQLIDTHLLQARANLTQASNLYSGQVQQPGQTNFYNTAQSPSALQQVTVPLPASQLSLPNFGSTGQPLIALPQTLQPPLQHTTPQAQAQSLSRPAQVSQPFRGLIPAGTQHSMIATTGKMSEMELKAFGSGIDIKPGTPPIAGRSTTPTSSPFRATSTSPNSQSSKMNSIVYQKQFQSAPATVRMTQPFPTQFAPQAKQRAEVLQSTQRFFSEQQQSKQIGGGKAQKVDSDSSKPPETLTDPPGVCQEKVEEKPPPAPSIATKPVRTGPIKPQAIKTEETKS

SEQ ID NO: 818655 - protein, 2757 aa, Homo sapiens
MSEKSGQSTKAKDGKKYATLSLFNTYKGKSLETQKTTVAARHGLQSLGKVGISRRMPPPANLPSLKAENKGNDPNVNIVPKDGTGWASKQEQHEEEKTPEVPPAQPKPGVAAPPEVAPAPKSWASNKQGGQGDGIQVNSQFQQEFPSLQAAGDQEKKEKETNDDNYGPGPSLRPPNVACWRDGGKAAGSPSSSDQDEKLPGQDESTAGTSEQNDILKVVEKRIACGPPQAKLNGQQAALASQYRAMMPPYMFQQYPRMTYPPLHGPMRFPPSLSETNKGLRGRGPPPSWASEPERPSILSASELKELDKFDNLDAEADEGWAGAQMEVDYTEQLNFSDDDEQGSNSPKENNSEDQGSKASENNENKKETDEVSNTKSSSQIPAQPSVAKVPYGKGPSFNQERGTSSHLPPPPKLLAQQHPPPDRQAVPGRPGPFPSKQQVADEDEIWKQRRRQQSEISAAVERARRTATEGEERRMEEQRKAACAEKLKRLDEKLGILEKQPSPEEIREREREKEREREKELEKEQEQEREKEREKDRERQQEKEKELEKEQEKQREMEKERKQEKEKELERQKEKEKELQKMKEQEKECELEKEREKLEEKIEPREPNLEPMVEKQESENSCNKEEEPVFTRQDSNRSEKEATPVVHETEPESGSQPRPAVLSGYFKQFQKSLPPRFQRQQEQMKQQQWQQQQQQGVLPQTVPSQPSSSTVPPPPHRPLYQPMQPHPQHLASMGFDPRWLMMQSYMDPRMMSGRPAMDIPPIHPGMIPPKPLMRRDQMEGSPNSSESFEHIARSARDHAISLSEPRMLWGSDPYPHAEPQQATTPKATEEPEDVRSEAALDQEQITAAYSVEHNQLEAHPKADFIRESSEAQVQKFLSRSVEDVRPHHTDANNQSACFEAPDQKTLSTPQEERISAVESQPSRKRSVSHGSNHTQKPDEQRSEPSAGIPKVTSRCIDSKEPIERPEEKPKKEGFIRSSEGPKPEKVYKSKSETRWGPRPSSNRREEVNDRPVRRSGPIKKPVLRDMKEEREQRKEKEGEKAEKVTEKVVVKPEKTEKKDLPPPPPPPQPPAPIQPQSVPPPIQPEAEKFPSTETATLAQKPSQDTEKPLEPVSTVQVEPAVKTVNQQTMAAPVVKEEKQPEKVISKDLVIERPRPDSRPAVKKESTLPPRTYWKEARERDWFPDQGYRGRGRGEYYSRGRSYRGSYGGRGRGGRGHTRDYPQYRDNKPRAEHIPSGPLRQREESETRSESSDFEVVPKRRRQRGSETDTDSEIHESASDKDSLSKGKLPKREERPENKKPVKPHSSFKPDNHVRIDNRLLEKPYVRDDDKAKPGFLPKGEPTRRGRGGTFRRGGRDPGGRPSRPSTLRRPAYRDNQWNPRQSEVPKPEDGEPPRRHEQFIPIAADKRPPKFERKFDPARERPRRQRPTRPPRQDKPPRFRRLREREAASKSNEVVAVPTNGTVNNVAQEPVNTLGDISGNKTPDLSNQNSSDQANEEWETASESSDFNERRERDEKKNADLNAQTVVKVGENVLPPKREIAKRSFSSQRPVDRQNRRGNNGPPKSGRNFSGPRNERRSGPPSKSGKRGPFDDQPAGTTGVDLINGSSAHHQEGVPNGTGQKNSKDCTGKKREDPKPGPKKPKEKVDALSQFDLNNYASVVIIDDHPEVTVIEDPQSNLNDDGFTEVVSKKQQKRLQDEERRKKEEQVIQVWNKKNANEKGRSQTSKLPPRFAKKQATGIQQAQSSASVPPLASAPLPPSTSASVPASTSAPLPATLTPVPASTSAPVPASTLAPVLASTSAPVPASPLAPVSASASVSASVPASTSAAAITSSSAPASAPAPTPILASVSTPASVTILASASIPILASALASTSAPTPAPAASSPAAPVITAPTIPASAPTASVPLAPASASAPAPAPTPVSAPNPAPPAPAQTQAQTHKPVQNPLQTTSQSSKQPPPSIRLPSAQTPNGTDYVASGKSIQTPQSHGTLTAELWDNKVAPPAVLNDISKKLGPISPPQPPSVSAWNKPLTSFGSAPSSEGAKNGQESGLEIGTDTIQFGAPASNGNENEVVPVLSEKSADKIPEPKEQRQKQPRAGPIKAQKLPDLSPVENKEHKPGPIGKERSLKNRKVKDAQQVEPEGQEKPSPATVRSTDPVTTKETKAVSEMSTEIGTMISVSSAEYGTNAKESVTDYTTPSSSLPNTVATNNTKMEDTLVNNVPLPNTLPLPKRETIQQSSSLTSVPPTTFSLTFKMESARKAWENSPNVREKGSPVTSTAPPIATGVSSSASGPSTANYNSFSSASMPQIPVASVTPTASLSGAGTYTTSSLSTKSTTTSDPPNICKVKPQQLQTSSLPSASHFSQLSCMPSLIAQQQQNPQVYVSQSAAAQIPAFYMDTSHLFNTQHARLAPPSLAQQQGFQPGLSQPTSVQQIPIPIYAPLQGQHQAQLSLGAGPAVSQAQELFSSSLQPYRSQPAFMQSSLSQPSVVLSGTAIHNFPTVQHQELAKAQSGLAFQQTSNTQPIPILYEHQLGQASGLGGSQLIDTHLLQARANLTQASNLYSGQVQQPGQTNFYNTAQSPSALQQVTVPLPASQLSLPNFGSTGQPLIALPQTLQPPLQHTTPQAQAQSLSRPAQVSQPFRGLIPAGTQHSMIATTGKMSEMELKAFGSGIDIKPGTPPIAGRSTTPTSSPFRATSTSPNSQSSKMTQPFPTQFAPQKRAVGRGLSHKTFGPRCWQSREQRFFSPRNGSSLNSNRANR

SEQ ID NO: 818656 - protein, 2345 aa, Homo sapiens
MEEQRKAACAEKLKRLDEKLGILEKQPSPEEIREREREKEREREKELEKEQEQEREKEREKDRERQQEKEKELEKEQEKQREMEKERKQEKEKELERQKEKEKELQKMKEQEKECELEKEREKLEEKIEPREPNLEPMVEKQESENSCNKEEEPVFTRQDSNRSEKEATPVVHETEPESGSQPRPAVLSGYFKQFQKSLPPRFQRQQEQMKQQQWQQQQQQGVLPQTVPSQPSSSTVPPPPHRPLYQPMQPHPQHLASMGFDPRWLMMQSYMDPRMMSGRPAMDIPPIHPGMIPPKPLMRRDQMEGSPNSSESFEHIARSARDHAISLSEPRMLWGSDPYPHAEPQQATTPKATEEPEDVRSEAALDQEQITAAYSVEHNQLEAHPKADFIRESSEAQVQKFLSRSVEDVRPHHTDANNQSACFEAPDQKTLSTPQEERISAVESQPSRKRSVSHGSNHTQKPDEQRSEPSAGIPKVTSRCIDSKEPIERPEEKPKKEGFIRSSEGPKPEKVYKSKSETRWGPRPSSNRREEVNDRPVRRSGPIKKPVLRDMKEEREQRKEKEGEKAEKVTEKVVVKPEKTEKKDLPPPPPPPQPPAPIQPQSVPPPIQPEAEKFPSTETATLAQKPSQDTEKPLEPVSTVQVEPAVKTVNQQTMAAPVVKEEKQPEKVISKDLVIERPRPDSRPAVKKESTLPPRTYWKEARERDWFPDQGYRGRGRGEYYSRGRSYRGSYGGRGRGGRGHTRDYPQYRDNKPRAEHIPSGPLRQREESETRSESSDFEVVPKRRRQRGSETDTDSEIHESASDKDSLSKGKLPKREERPENKKPVKPHSSFKPDNHVRIDNRLLEKPYVRDDDKAKPGFLPKGEPTRRGRGGTFRRGGRDPGGRPSRPSTLRRPAYRDNQWNPRQSEVPKPEDGEPPRRHEQFIPIAADKRPPKFERKFDPARERPRRQRPTRPPRQDKPPRFRRLREREAASKSNEVVAVPTNGTVNNVAQEPVNTLGDISGNKTPDLSNQNSSDQANEEWETASESSDFNERRERDEKKNADLNAQTVVKVGENVLPPKREIAKRSFSSQRPVDRQNRRGNNGPPKSGRNFSGPRNERRSGPPSKSGKRGPFDDQPAGTTGVDLINGSSAHHQEGVPNGTGQKNSKDCTGKKREDPKPGPKKPKEKVDALSQFDLNNYASVVIIDDHPEVTVIEDPQSNLNDDGFTEVVSKKQQKRLQDEERRKKEEQVIQVWNKKNANEKGRSQTSKLPPRFAKKQATGIQQAQSSASVPPLASAPLPPSTSASVPASTSAPLPATLTPVPASTSAPVPASTLAPVLASTSAPVPASPLAPVSASASVSASVPASTSAAAITSSSAPASAPAPTPILASVSTPASVTILASASIPILASALASTSAPTPAPAASSPAAPVITAPTIPASAPTASVPLAPASASAPAPAPTPVSAPNPAPPAPAQTQAQTHKPVQNPLQTTSQSSKQPPPSIRLPSAQTPNGTDYVASGKSIQTPQSHGTLTAELWDNKVAPPAVLNDISKKLGPISPPQPPSVSAWNKPLTSFGSAPSSEGAKNGQESGLEIGTDTIQFGAPASNGNENEVVPVLSEKSADKIPEPKEQRQKQPRAGPIKAQKLPDLSPVENKEHKPGPIGKERSLKNRKVKDAQQVEPEGQEKPSPATVRSTDPVTTKETKAVSEMSTEIGTMISVSSAEYGTNAKESVTDYTTPSSSLPNTVATNNTKMEDTLVNNVPLPNTLPLPKRETIQQSSSLTSVPPTTFSLTFKMESARKAWENSPNVREKGSPVTSTAPPIATGVSSSASGPSTANYNSFSSASMPQIPVASVTPTASLSGAGTYTTSSLSTKSTTTSDPPNICKVKPQQLQTSSLPSASHFSQLSCMPSLIAQQQQNPQVYVSQSAAAQIPAFYMDTSHLFNTQHARLAPPSLAQQQGFQPGLSQPTSVQQIPIPIYAPLQGQHQAQLSLGAGPAVSQAQELFSSSLQPYRSQPAFMQSSLSQPSVVLSGTAIHNFPTVQHQELAKAQSGLAFQQTSNTQPIPILYEHQLGQASGLGGSQLIDTHLLQARANLTQASNLYSGQVQQPGQTNFYNTAQSPSALQQVTVPLPASQLSLPNFGSTGQPLIALPQTLQPPLQHTTPQAQAQSLSRPAQVSQPFRGLIPAGTQHSMIATTGKMSEMELKAFGSGIDIKPGTPPIAGRSTTPTSSPFRATSTSPNSQSSKMNSIVYQKQFQSAPATVRMTQPFPTQFAPQAKQRAEVLQSTQRFFSEQQQSKQIGGGKAQKVDSDSSKPPETLTDPPGVCQEKVEEKPPPAPSIATKPVRTGPIKPQAIKTEETKS

SEQ ID NO: 818657 - protein, 2500 aa, Homo sapiens
GLLLRASYCRSNRSIGQSDDDEEDNSPKENNSEDQGSKASENNENKKETDEVSNTKSSSQIPAQPSVAKVPYGKGPSFNQERGTSSHLPPPPKLLAQQHPPPDRQAVPGRPGPFPSKQQVADEDEIWKQRRRQQSEISAAVERARRTATEGEERRMEEQRKAACAEKLKRLDEKLGILEKQPSPEEIREREREKEREREKELEKEQEQEREKEREKDRERQQEKEKELEKEQEKQREMEKERKQEKEKELERQKEKEKELQKMKEQEKECELEKEREKLEEKIEPREPNLEPMVEKQESENSCNKEEEPVFTRQDSNRSEKEATPVVHETEPESGSQPRPAVLSGYFKQFQKSLPPRFQRQQEQMKQQQWQQQQQQGVLPQTVPSQPSSSTVPPPPHRPLYQPMQPHPQHLASMGFDPRWLMMQSYMDPRMMSGRPAMDIPPIHPGMIPPKPLMRRDQMEGSPNSSESFEHIARSARDHAISLSEPRMLWGSDPYPHAEPQQATTPKATEEPEDVRSEAALDQEQITAAYSVEHNQLEAHPKADFIRESSEAQVQKFLSRSVEDVRPHHTDANNQSACFEAPDQKTLSTPQEERISAVESQPSRKRSVSHGSNHTQKPDEQRSEPSAGIPKVTSRCIDSKEPIERPEEKPKKEGFIRSSEGPKPEKVYKSKSETRWGPRPSSNRREEVNDRPVRRSGPIKKPVLRDMKEEREQRKEKEGEKAEKVTEKVVVKPEKTEKKDLPPPPPPPQPPAPIQPQSVPPPIQPEAEKFPSTETATLAQKPSQDTEKPLEPVSTVQVEPAVKTVNQQTMAAPVVKEEKQPEKVISKDLVIERPRPDSRPAVKKESTLPPRTYWKEARERDWFPDQGYRGRGRGEYYSRGRSYRGSYGGRGRGGRGHTRDYPQYRDNKPRAEHIPSGPLRQREESETRSESSDFEVVPKRRRQRGSETDTDSEIHESASDKDSLSKGKLPKREERPENKKPVKPHSSFKPDNHVRIDNRLLEKPYVRDDDKAKPGFLPKGEPTRRGRGGTFRRGGRDPGGRPSRPSTLRRPAYRDNQWNPRQSEVPKPEDGEPPRRHEQFIPIAADKRPPKFERKFDPARERPRRQRPTRPPRQDKPPRFRRLREREAASKSNEVVAVPTNGTVNNVAQEPVNTLGDISGNKTPDLSNQNSSDQANEEWETASESSDFNERRERDEKKNADLNAQTVVKVGENVLPPKREIAKRSFSSQRPVDRQNRRGNNGPPKSGRNFSGPRNERRSGPPSKSGKRGPFDDQPAGTTGVDLINGSSAHHQEGVPNGTGQKNSKDCTGKKREDPKPGPKKPKEKVDALSQFDLNNYASVVIIDDHPEVTVIEDPQSNLNDDGFTEVVSKKQQKRLQDEERRKKEEQVIQVWNKKNANEKGRSQTSKLPPRFAKKQATGIQQAQSSASVPPLASAPLPPSTSASVPASTSAPLPATLTPVPASTSAPVPASTLAPVLASTSAPVPASPLAPVSASASVSASVPASTSAAAITSSSAPASAPAPTPILASVSTPASVTILASASIPILASALASTSAPTPAPAASSPAAPVITAPTIPASAPTASVPLAPASASAPAPAPTPVSAPNPAPPAPAQTQAQTHKPVQNPLQTTSQSSKQPPPSIRLPSAQTPNGTDYVASGKSIQTPQSHGTLTAELWDNKVAPPAVLNDISKKLGPISPPQPPSVSAWNKPLTSFGSAPSSEGAKNGQESGLEIGTDTIQFGAPASNGNENEVVPVLSEKSADKIPEPKEQRQKQPRAGPIKAQKLPDLSPVENKEHKPGPIGKERSLKNRKVKDAQQVEPEGQEKPSPATVRSTDPVTTKETKAVSEMSTEIGTMISVSSAEYGTNAKESVTDYTTPSSSLPNTVATNNTKMEDTLVNNVPLPNTLPLPKRETIQQSSSLTSVPPTTFSLTFKMESARKAWENSPNVREKGSPVTSTAPPIATGVSSSASGPSTANYNSFSSASMPQIPVASVTPTASLSGAGTYTTSSLSTKSTTTSDPPNICKVKPQQLQTSSLPSASHFSQLSCMPSLIAQQQQNPQVYVSQSAAAQIPAFYMDTSHLFNTQHARLAPPSLAQQQGFQPGLSQPTSVQQIPIPIYAPLQGQHQAQLSLGAGPAVSQAQELFSSSLQPYRSQPAFMQSSLSQPSVVLSGTAIHNFPTVQHQELAKAQSGLAFQQTSNTQPIPILYEHQLGQASGLGGSQLIDTHLLQARANLTQASNLYSGQVQQPGQTNFYNTAQSPSALQQVTVPLPASQLSLPNFGSTGQPLIALPQTLQPPLQHTTPQAQAQSLSRPAQVSQPFRGLIPAGTQHSMIATTGKMSEMELKAFGSGIDIKPGTPPIAGRSTTPTSSPFRATSTSPNSQSSKMNSIVYQKQFQSAPATVRMTQPFPTQFAPQAKQRAEVLQSTQRFFSEQQQSKQIGGGKAQKVDSDSSKPPETLTDPPGVCQEKVEEKPPPAPSIATKPVRTGPIKPQAIKTEETKS

SEQ ID NO: 818658 - protein, 2263 aa, Homo sapiens
MEKERKQEKEKELERQKEKEKELQKMKEQEKECELEKEREKLEEKIEPREPNLEPMVEKQESENSCNKEEEPVFTRQDSNRSEKEATPVVHETEPESGSQPRPAVLSGYFKQFQKSLPPRFQRQQEQMKQQQWQQQQQQGVLPQTVPSQPSSSTVPPPPHRPLYQPMQPHPQHLASMGFDPRWLMMQSYMDPRMMSGRPAMDIPPIHPGMIPPKPLMRRDQMEGSPNSSESFEHIARSARDHAISLSEPRMLWGSDPYPHAEPQQATTPKATEEPEDVRSEAALDQEQITAAYSVEHNQLEAHPKADFIRESSEAQVQKFLSRSVEDVRPHHTDANNQSACFEAPDQKTLSTPQEERISAVESQPSRKRSVSHGSNHTQKPDEQRSEPSAGIPKVTSRCIDSKEPIERPEEKPKKEGFIRSSEGPKPEKVYKSKSETRWGPRPSSNRREEVNDRPVRRSGPIKKPVLRDMKEEREQRKEKEGEKAEKVTEKVVVKPEKTEKKDLPPPPPPPQPPAPIQPQSVPPPIQPEAEKFPSTETATLAQKPSQDTEKPLEPVSTVQVEPAVKTVNQQTMAAPVVKEEKQPEKVISKDLVIERPRPDSRPAVKKESTLPPRTYWKEARERDWFPDQGYRGRGRGEYYSRGRSYRGSYGGRGRGGRGHTRDYPQYRDNKPRAEHIPSGPLRQREESETRSESSDFEVVPKRRRQRGSETDTDSEIHESASDKDSLSKGKLPKREERPENKKPVKPHSSFKPDNHVRIDNRLLEKPYVRDDDKAKPGFLPKGEPTRRGRGGTFRRGGRDPGGRPSRPSTLRRPAYRDNQWNPRQSEVPKPEDGEPPRRHEQFIPIAADKRPPKFERKFDPARERPRRQRPTRPPRQDKPPRFRRLREREAASKSNEVVAVPTNGTVNNVAQEPVNTLGDISGNKTPDLSNQNSSDQANEEWETASESSDFNERRERDEKKNADLNAQTVVKVGENVLPPKREIAKRSFSSQRPVDRQNRRGNNGPPKSGRNFSGPRNERRSGPPSKSGKRGPFDDQPAGTTGVDLINGSSAHHQEGVPNGTGQKNSKDCTGKKREDPKPGPKKPKEKVDALSQFDLNNYASVVIIDDHPEVTVIEDPQSNLNDDGFTEVVSKKQQKRLQDEERRKKEEQVIQVWNKKNANEKGRSQTSKLPPRFAKKQATGIQQAQSSASVPPLASAPLPPSTSASVPASTSAPLPATLTPVPASTSAPVPASTLAPVLASTSAPVPASPLAPVSASASVSASVPASTSAAAITSSSAPASAPAPTPILASVSTPASVTILASASIPILASALASTSAPTPAPAASSPAAPVITAPTIPASAPTASVPLAPASASAPAPAPTPVSAPNPAPPAPAQTQAQTHKPVQNPLQTTSQSSKQPPPSIRLPSAQTPNGTDYVASGKSIQTPQSHGTLTAELWDNKVAPPAVLNDISKKLGPISPPQPPSVSAWNKPLTSFGSAPSSEGAKNGQESGLEIGTDTIQFGAPASNGNENEVVPVLSEKSADKIPEPKEQRQKQPRAGPIKAQKLPDLSPVENKEHKPGPIGKERSLKNRKVKDAQQVEPEGQEKPSPATVRSTDPVTTKETKAVSEMSTEIGTMISVSSAEYGTNAKESVTDYTTPSSSLPNTVATNNTKMEDTLVNNVPLPNTLPLPKRETIQQSSSLTSVPPTTFSLTFKMESARKAWENSPNVREKGSPVTSTAPPIATGVSSSASGPSTANYNSFSSASMPQIPVASVTPTASLSGAGTYTTSSLSTKSTTTSDPPNICKVKPQQLQTSSLPSASHFSQLSCMPSLIAQQQQNPQVYVSQSAAAQIPAFYMDTSHLFNTQHARLAPPSLAQQQGFQPGLSQPTSVQQIPIPIYAPLQGQHQAQLSLGAGPAVSQAQELFSSSLQPYRSQPAFMQSSLSQPSVVLSGTAIHNFPTVQHQELAKAQSGLAFQQTSNTQPIPILYEHQLGQASGLGGSQLIDTHLLQARANLTQASNLYSGQVQQPGQTNFYNTAQSPSALQQVTVPLPASQLSLPNFGSTGQPLIALPQTLQPPLQHTTPQAQAQSLSRPAQVSQPFRGLIPAGTQHSMIATTGKMSEMELKAFGSGIDIKPGTPPIAGRSTTPTSSPFRATSTSPNSQSSKMNSIVYQKQFQSAPATVRMTQPFPTQFAPQAKQRAEVLQSTQRFFSEQQQSKQIGGGKAQKVDSDSSKPPETLTDPPGVCQEKVEEKPPPAPSIATKPVRTGPIKPQAIKTEETKS

SEQ ID NO: 818659 - protein, 2313 aa, Homo sapiens
MRSLASWKNNHLQRKLGKGSEGAREGEGKRQRETAGKGERAGEGAGKTKRNGERKKARKRKRTRTAERKGKRTTKDERTEKECELEKEREKLEEKIEPREPNLEPMVEKQESENSCNKEEEPVFTRQDSNRSEKEATPVVHETEPESGSQPRPAVLSGYFKQFQKSLPPRFQRQQEQMKQQQWQQQQQQGVLPQTVPSQPSSSTVPPPPHRPLYQPMQPHPQHLASMGFDPRWLMMQSYMDPRMMSGRPAMDIPPIHPGMIPPKPLMRRDQMEGSPNSSESFEHIARSARDHAISLSEPRMLWGSDPYPHAEPQQATTPKATEEPEDVRSEAALDQEQITAAYSVEHNQLEAHPKADFIRESSEAQVQKFLSRSVEDVRPHHTDANNQSACFEAPDQKTLSTPQEERISAVESQPSRKRSVSHGSNHTQKPDEQRSEPSAGIPKVTSRCIDSKEPIERPEEKPKKEGFIRSSEGPKPEKVYKSKSETRWGPRPSSNRREEVNDRPVRRSGPIKKPVLRDMKEEREQRKEKEGEKAEKVTEKVVVKPEKTEKKDLPPPPPPPQPPAPIQPQSVPPPIQPEAEKFPSTETATLAQKPSQDTEKPLEPVSTVQVEPAVKTVNQQTMAAPVVKEEKQPEKVISKDLVIERPRPDSRPAVKKESTLPPRTYWKEARERDWFPDQGYRGRGRGEYYSRGRSYRGSYGGRGRGGRGHTRDYPQYRDNKPRAEHIPSGPLRQREESETRSESSDFEVVPKRRRQRGSETDTDSEIHESASDKDSLSKGKLPKREERPENKKPVKPHSSFKPDNHVRIDNRLLEKPYVRDDDKAKPGFLPKGEPTRRGRGGTFRRGGRDPGGRPSRPSTLRRPAYRDNQWNPRQSEVPKPEDGEPPRRHEQFIPIAADKRPPKFERKFDPARERPRRQRPTRPPRQDKPPRFRRLREREAASKSNEVVAVPTNGTVNNVAQEPVNTLGDISGNKTPDLSNQNSSDQANEEWETASESSDFNERRERDEKKNADLNAQTVVKVGENVLPPKREIAKRSFSSQRPVDRQNRRGNNGPPKSGRNFSGPRNERRSGPPSKSGKRGPFDDQPAGTTGVDLINGSSAHHQEGVPNGTGQKNSKDCTGKKREDPKPGPKKPKEKVDALSQFDLNNYASVVIIDDHPEVTVIEDPQSNLNDDGFTEVVSKKQQKRLQDEERRKKEEQVIQVWNKKNANEKGRSQTSKLPPRFAKKQATGIQQAQSSASVPPLASAPLPPSTSASVPASTSAPLPATLTPVPASTSAPVPASTLAPVLASTSAPVPASPLAPVSASASVSASVPASTSAAAITSSSAPASAPAPTPILASVSTPASVTILASASIPILASALASTSAPTPAPAASSPAAPVITAPTIPASAPTASVPLAPASASAPAPAPTPVSAPNPAPPAPAQTQAQTHKPVQNPLQTTSQSSKQPPPSIRLPSAQTPNGTDYVASGKSIQTPQSHGTLTAELWDNKVAPPAVLNDISKKLGPISPPQPPSVSAWNKPLTSFGSAPSSEGAKNGQESGLEIGTDTIQFGAPASNGNENEVVPVLSEKSADKIPEPKEQRQKQPRAGPIKAQKLPDLSPVENKEHKPGPIGKERSLKNRKVKDAQQVEPEGQEKPSPATVRSTDPVTTKETKAVSEMSTEIGTMISVSSAEYGTNAKESVTDYTTPSSSLPNTVATNNTKMEDTLVNNVPLPNTLPLPKRETIQQSSSLTSVPPTTFSLTFKMESARKAWENSPNVREKGSPVTSTAPPIATGVSSSASGPSTANYNSFSSASMPQIPVASVTPTASLSGAGTYTTSSLSTKSTTTSDPPNICKVKPQQLQTSSLPSASHFSQLSCMPSLIAQQQQNPQVYVSQSAAAQIPAFYMDTSHLFNTQHARLAPPSLAQQQGFQPGLSQPTSVQQIPIPIYAPLQGQHQAQLSLGAGPAVSQAQELFSSSLQPYRSQPAFMQSSLSQPSVVLSGTAIHNFPTVQHQELAKAQSGLAFQQTSNTQPIPILYEHQLGQASGLGGSQLIDTHLLQARANLTQASNLYSGQVQQPGQTNFYNTAQSPSALQQVTVPLPASQLSLPNFGSTGQPLIALPQTLQPPLQHTTPQAQAQSLSRPAQVSQPFRGLIPAGTQHSMIATTGKMSEMELKAFGSGIDIKPGTPPIAGRSTTPTSSPFRATSTSPNSQSSKMNSIVYQKQFQSAPATVRMTQPFPTQFAPQAKQRAEVLQSTQRFFSEQQQSKQIGGGKAQKVDSDSSKPPETLTDPPGVCQEKVEEKPPPAPSIATKPVRTGPIKPQAIKTEETKS

SEQ ID NO: 818660 - protein, 2677 aa, Homo sapiens
MSEKSGQSTKAKDGKKYATLSLFNTYKGKSLETQKTTVAARHGLQSLGKVGISRRMPPPANLPSLKAENKGNDPNVNIVPKDGTGWASKQEQHEEEKTPEVPPAQPKPGVAAPPEVAPAPKSWASNKQGGQGDGIQVNSQFQQEFPSLQAAGDQEKKEKETNDDNYGPGPSLRPPNVACWRDGGKAAGSPSSSDQDEKLPGQDESTAGTSEQNDILKVVEKRIACGPPQAKLNGQQAALASQYRAMMPPYMFQQYPRMTYPPLHGPMRFPPSLSETNKGLRGRGPPPSWASEPERPSILSASELKELDKFDNLDAEADEGWAGAQMEVDYTEQLNFSDDDEQGSNSPKENNSEDQGSKASENNENKKETDEVSNTKSSSQIPAQPSVAKVPYGKGPSFNQERGTSSHLPPPPKLLAQQHPPPDRQAVPGRPGPFPSKQQVADEDEIWKQRRRQQSEISAAVERARRTATEGEERRMEEQRKAACAEKLKRLDEKLGILEKQPSPEEIREREREKEREREKELEKEQEQEREKEREKDRERQQEKEKELEKEQEKQREMEKERKQEKEKELERQKEKEKELQKMKEQEKECELEKEREKLEEKIEPREPNLEPMVEKQESENSCNKEEEPVFTRQDSNRSEKEATPVVHETEPESGSQPRPAVLSGYFKQFQKSLPPRFQRQQEQMKQQQWQQQQQQGVLPQTVPSQPSSSTVPPPPHRPLYQPMQPHPQHLASMGFDPRWLMMQSYMDPRMMSGRPAMDIPPIHPGMIPPKPLMRRDQMEGSPNSSESFEHIARSARDHAISLSEPRMLWGSDPYPHAEPQQATTPKATEEPEDVRSEAALDQEQITAAYSVEHNQLEAHPKADFIRESSEAQVQKFLSRSVEDVRPHHTDANNQSACFEAPDQKTLSTPQEERISAVESQPSRKRSVSHGSNHTQKPDEQRSEPSAGIPKVTSRCIDSKEPIERPEEKPKKEGFIRSSEGPKPEKVYKSKSETRWGPRPSSNRREEVNDRPVRRSGPIKKPVLRDMKEEREQRKEKEGEKAEKVTEKVVVKPEKTEKKDLPPPPPPPQPPAPIQPQSVPPPIQPEAEKFPSTETATLAQKPSQDTEKPLEPVSTVQVEPAVKTVNQQTMAAPVVKEEKQPEKVISKDLVIERPRPDSRPAVKKESTLPPRTYWKEARERDWFPDQGYRGRGRGEYYSRGRSYRGSYGGRGRGGRGHTRDYPQYRDNKPRAEHIPSGPLRQREESETRSESSDFEVVPKRRRQRGSETDTDSEIHESASDKDSLSKGKLPKREERPENKKPVKPHSSFKPDNHVRIDNRLLEKPYVRDDDKAKPGFLPKGEPTRRGRGGTFRRGGRDPGGRPSRPSTLRRPAYRDNQWNPRQSEVPKPEDGEPPRRHEQFIPIAADKRPPKFERKFDPARERPRRQRPTRPPRQDKPPRFRRLREREAASKSNEVVAVPTNGTVNNVAQEPVNTLGDISGNKTPDLSNQNSSDQANEEWETASESSDFNERRERDEKKNADLNAQTVVKVGENVLPPKREIAKRSFSSQRPVDRQNRRGNNGPPKSGRNFSGPRNERRSGPPSKSGKRGPFDDQPAGTTGVDLINGSSAHHQEGVPNGTGQKNSKDCTGKKREDPKPGPKKPKEKVDALSQFDLNNYASVVIIDDHPEVTVIEDPQSNLNDDGFTEVVSKKQQKRLQDEERRKKEEQVIQVWNKKNANEKGRSQTSKLPPRFAKKQATGIQQAQSSASVPPLASAPLPPSTSASVPASTSAPLPATLTPVPASTSAPVPASTLAPVLASTSAPVPASPLAPVSASASVSASVPASTSAAAITSSSAPASAPAPTPILASVSTPASVTILASASIPILASALASTSAPTPAPAASSPAAPVITAPTIPASAPTASVPLAPASASAPAPAPTPVSAPNPAPPAPAQTQAQTHKPVQNPLQTTSQSSKQPPPSIRLPSAQTPNGTDYVASGKSIQTPQSHGTLTAELWDNKVAPPAVLNDISKKLGPISPPQPPSVSAWNKPLTSFGSAPSSEGAKNGQESGLEIGTDTIQFGAPASNGNENEVVPVLSEKSADKIPEPKEQRQKQPRAGPIKAQKLPDLSPVENKEHKPGPIGKERSLKNRKVKDAQQVEPEGQEKPSPATVRSTDPVTTKETKAVSEMSTEIGTMISVSSAEYGTNAKESVTDYTTPSSSLPNTVATNNTKMEDTLVNNVPLPNTLPLPKRETIQQSSSLTSVPPTTFSLTFKMESARKAWENSPNVREKGSPVTSTAPPIATGVSSSASGPSTANYNSFSSASMPQIPVASVTPTASLSGAGTYTTSSLSTKSTTTSDPPNICKVKPQQLQTSSLPSASHFSQLSCMPSLIAQQQQNPQVYVSQSAAAQIPAFYMDTSHLFNTQHARLAPPSLAQQQGFQPGLSQPTSVQQIPIPIYAPLQGQHQAQLSLGAGPAVSQAQELFSSSLQPYRSQPAFMQSSLSQPSVVLSGTAIHNFPTVQHQELAKAQSGLAFQQTSNTQPIPILYEHQLGQASGLGGSQLIDTHLLQARANLTQASNLYSGQVQQPGQTNFYNTAQSPSALQQVTVPLPASQLSLPNFGSTGQPLIALPQTLQPPLQHTTPQAQAQSLSRPAQVSQPFRGLIPAGTQHSMIATTGKMSVELPLGGIDIFRATSTSP

SEQ ID NO: 818661 - protein, 2263 aa, Homo sapiens; identical to SEQ ID NO: 818658

SEQ ID NO: 818662 - protein, 2024 aa, Homo sapiens
MSEKSGQSTKAKDGKKYATLSLFNTYKGKSLETQKTTVAARHGLQSLGKVGISRRMPPPANLPSLKAENKGNDPNVNIVPKDGTGWASKQEQHEEEKTPEVPPAQPKPGVAAPPEVAPAPKSWASNKQGGQGDGIQVNSQFQQEFPSLQAAGDQEKKEKETNDDNYGPGPSLRPPNVACWRDGGKAAGSPSSSDQDEKLPGQDESTAGTSEQNDILKVVEKRIACGPPQAKLNGQQAALASQYRAMMPPYMFQQYPRMTYPPLHGPMRFPPSLSETNKGLRGRGPPPSWASEPERPSILSASELKELDKFDNLDAEADEGWAGAQMEVDYTEQLNFSDDDEQGSNSPKENNSEDQGSKASENNENKKETDEVSNTKSSSQIPAQPSVAKVPYGKGPSFNQERGTSSHLPPPPKLLAQQHPPPDRQAVPGRPGPFPSKQQVADEDEIWKQRRRQQSEISAAVERARRTATEGEERRMEEQRKAACAEKLKRLDEKLGILEKQPSPEEIREREREKEREREKELEKEQEQEREKEREKDRERQQEKEKELEKEQEKQREMEKERKQEKEKELERQKEKEKELQKMKEQEKECELEKEREKLEEKIEPREPNLEPMVEKQESENSCNKEEEPVFTRQDSNRSEKEATPVVHETEPESGSQPRPAVLSGYFKQFQKSLPPRFQRQQEQMKQQQWQQQQQQGVLPQTVPSQPSSSTVPPPPHRPLYQPMQPHPQHLASMGFDPRWLMMQSYMDPRMMSGRPAMDIPPIHPGMIPPKPLMRRDQMEGSPNSSESFEHIARSARDHAISLSEPRMLWGSDPYPHAEPQQATTPKATEEPEDVRSEAALDQEQITAAYSVEHNQLEAHPKADFIRESSEAQVQKFLSRSVEDVRPHHTDANNQSACFEAPDQKTLSTPQEERISAVESQPSRKRSVSHGSNHTQKPDEQRSEPSAGIPKVTSRCIDSKEPIERPEEKPKKEGFIRSSEGPKPEKVYKSKSETRWGPRPSSNRREEVNDRPVRRSGPIKKPVLRDMKEEREQRKEKEGEKAEKVTEKVVVKPEKTEKKDLPPPPPPPQPPAPIQPQSVPPPIQPEAEKFPSTETATLAQKPSQDTEKPLEPVSTVQVEPAVKTVNQQTMAAPVVKEEKQPEKVISKDLVIERPRPDSRPAVKKESTLPPRTYWKEARERDWFPDQGYRGRGRGEYYSRGRSYRGSYGGRGRGGRGHTRDYPQYRDNKPRAEHIPSGPLRQREESETRSESSDFEVVPKRRRQRGSETDTDSEIHESASDKDSLSKGKLPKREERPENKKPVKPHSSFKPDNHVRIDNRLLEKPYVRDDDKAKPGFLPKGEPTRRGRGGTFRRGGRDPGGRPSRPSTLRRPAYRDNQWNPRQSEVPKPEDGEPPRRHEQFIPIAADKRPPKFERKFDPARERPRRQRPTRPPRQDKPPRFRRLREREAASKSNEVVAVPTNGTVNNVAQEPVNTLGDISGNKTPDLSNQNSSDQANEEWETASESSDFNERRERDEKKNADLNAQTVVKVGENVLPPKREIAKRSFSSQRPVDRQNRRGNNGPPKSGRNFSGPRNERRSGPPSKSGKRGPFDDQPAGTTGVDLINGSSAHHQEGVPNGTGQKNSKDCTGKKREDPKPGPKKPKEKVDALSQFDLNNYASVVIIDDHPEVTVIEDPQSNLNDDGFTEVVSKKQQKRLQDEERRKKEEQVIQVWNKKNANEKGRSQTSKLPPRFAKKQATGIQQAQSSASVPPLASAPLPPSTSASVPASTSAPLPATLTPVPASTSAPVPASTLAPVLASTSAPVPASPLAPVSASASVSASVPASTSAAAITSSSAPASAPAPTPILASVSTPASVTILASASIPILASALASTSAPTPAPAASSPAAPVITAPTIPASAPTASVPLAPASASAPAPAPTPVSAPNPAPPAPAQTQAQTHKPVQNPLQTTSQSSKQPPPSIRLPSAQTPNGTDYVASGKSIQTPQSHGTLTAELWDNKVAPPAVLNDISKKCKLQKRSEGWGMA

SEQ ID NO: 818663 - protein, 1866 aa, Homo sapiens
MSEKSGQSTKAKDGKKYATLSLFNTYKGKSLETQKTTVAARHGLQSLGKVGISRRMPPPANLPSLKAENKGNDPNVNIVPKDGTGWASKQEQHEEEKTPEVPPAQPKPGVAAPPEVAPAPKSWASNKQGGQGDGIQVNSQFQQEFPSLQAAGDQEKKEKETNDDNYGPGPSLRPPNVACWRDGGKAAGSPSSSDQDEKLPGQDESTAGTSEQNDILKVVEKRIACGPPQAKLNGQQAALASQYRAMMPPYMFQQYPRMTYPPLHGPMRFPPSLSETNKGLRGRGPPPSWASEPERPSILSASELKELDKFDNLDAEADEGWAGAQMEVDYTEQLNFSDDDEQGSNSPKENNSEDQGSKASENNENKKETDEVSNTKSSSQIPAQPSVAKVPYGKGPSFNQERGTSSHLPPPPKLLAQQHPPPDRQAVPGRPGPFPSKQQVADEDEIWKQRRRQQSEISAAVERARRTATEGEERRMEEQRKAACAEKLKRLDEKLGILEKQPSPEEIREREREKEREREKELEKEQEQEREKEREKDRERQQEKEKELEKEQEKQREMEKERKQEKEKELERQKEKEKELQKMKEQEKECELEKEREKLEEKIEPREPNLEPMVEKQESENSCNKEEEPVFTRQDSNRSEKEATPVVHETEPESGSQPRPAVLSGYFKQFQKSLPPRFQRQQEQMKQQQWQQQQQQGVLPQTVPSQPSSSTVPPPPHRPLYQPMQPHPQHLASMGFDPRWLMMQSYMDPRMMSGRPAMDIPPIHPGMIPPKPLMRRDQMEGSPNSSESFEHIARSARDHAISLSEPRMLWGSDPYPHAEPQQATTPKATEEPEDVRSEAALDQEQITAAYSVEHNQLEAHPKADFIRESSEAQVQKFLSRSVEDVRPHHTDANNQSACFEAPDQKTLSTPQEERISAVESQPSRKRSVSHGSNHTQKPDEQRSEPSAGIPKVTSRCIDSKEPIERPEEKPKKEGFIRSSEGPKPEKVYKSKSETRWGPRPSSNRREEVNDRPVRRSGPIKKPVLRDMKEEREQRKEKEGEKAEKVTEKVVVKPEKTEKKDLPPPPPPPQPPAPIQPQSVPPPIQPEAEKFPSTETATLAQKPSQDTEKPLEPVSTVQVEPAVKTVNQQTMAAPVVKEEKQPEKVISKDLVIERPRPDSRPAVKKESTLPPRTYWKEARERDWFPDQGYRGRGRGEYYSRGRSYRGSYGGRGRGGRGHTRDYPQYRDNKPRAEHIPSGPLRQREESETRSESSDFEVVPKRRRQRGSETDTDSEIHESASDKDSLSKGKLPKREERPENKKPVKPHSSFKPDNHVRIDNRLLEKPYVRDDDKAKPGFLPKGEPTRRGRGGTFRRGGRDPGGRPSRPSTLRRPAYRDNQWNPRQSEVPKPEDGEPPRRHEQFIPIAADKRPPKFERKFDPARERPRRQRPTRPPRQDKPPRFRRLREREAASKSNEVVAVPTNGTVNNVAQEPVNTLGDISGNKTPDLSNQNSSDQANEEWETASESSDFNERRERDEKKNADLNAQTVVKVGENVLPPKREIAKRSFSSQRPVDRQNRRGNNGPPKSGRNFSGPRNERRSGPPSKSGKRGPFDDQPAGTTGVDLINGSSAHHQEGVPNGTGQKNSKDCTGKKREDPKPGPKKPKEKVDALSQFDLNNYASVVIIDDHPEVTVIEDPQSNLNDDGFTEVVSKKQQKRLQDEERRKKEEQVIQVWNKKNANEKGRSQTSKLPPRFAKKQATGIQQAQSSASVPPLASAPLPPSTSASVPASTSAPLPATLTPVPASTSAPVPASTLAPVLASTSAPVPASPLAPVSASSRQVFTFNILAPTRSNLLVACLGSTMVLCHGHTVLFCVCSPHEGFVLTISS

SEQ ID NO: 818664 - protein, 2269 aa, Homo sapiens
DRTLKPRSMKERISKLDFIKNVCSAKDTVKRMKSTQKECELEKEREKLEEKIEPREPNLEPMVEKQESENSCNKEEEPVFTRQDSNRSEKEATPVVHETEPESGSQPRPAVLSGYFKQFQKSLPPRFQRQQEQMKQQQWQQQQQQGVLPQTVPSQPSSSTVPPPPHRPLYQPMQPHPQHLASMGFDPRWLMMQSYMDPRMMSGRPAMDIPPIHPGMIPPKPLMRRDQMEGSPNSSESFEHIARSARDHAISLSEPRMLWGSDPYPHAEPQQATTPKATEEPEDVRSEAALDQEQITAAYSVEHNQLEAHPKADFIRESSEAQVQKFLSRSVEDVRPHHTDANNQSACFEAPDQKTLSTPQEERISAVESQPSRKRSVSHGSNHTQKPDEQRSEPSAGIPKVTSRCIDSKEPIERPEEKPKKEGFIRSSEGPKPEKVYKSKSETRWGPRPSSNRREEVNDRPVRRSGPIKKPVLRDMKEEREQRKEKEGEKAEKVTEKVVVKPEKTEKKDLPPPPPPPQPPAPIQPQSVPPPIQPEAEKFPSTETATLAQKPSQDTEKPLEPVSTVQVEPAVKTVNQQTMAAPVVKEEKQPEKVISKDLVIERPRPDSRPAVKKESTLPPRTYWKEARERDWFPDQGYRGRGRGEYYSRGRSYRGSYGGRGRGGRGHTRDYPQYRDNKPRAEHIPSGPLRQREESETRSESSDFEVVPKRRRQRGSETDTDSEIHESASDKDSLSKGKLPKREERPENKKPVKPHSSFKPDNHVRIDNRLLEKPYVRDDDKAKPGFLPKGEPTRRGRGGTFRRGGRDPGGRPSRPSTLRRPAYRDNQWNPRQSEVPKPEDGEPPRRHEQFIPIAADKRPPKFERKFDPARERPRRQRPTRPPRQDKPPRFRRLREREAASKSNEVVAVPTNGTVNNVAQEPVNTLGDISGNKTPDLSNQNSSDQANEEWETASESSDFNERRERDEKKNADLNAQTVVKVGENVLPPKREIAKRSFSSQRPVDRQNRRGNNGPPKSGRNFSGPRNERRSGPPSKSGKRGPFDDQPAGTTGVDLINGSSAHHQEGVPNGTGQKNSKDCTGKKREDPKPGPKKPKEKVDALSQFDLNNYASVVIIDDHPEVTVIEDPQSNLNDDGFTEVVSKKQQKRLQDEERRKKEEQVIQVWNKKNANEKGRSQTSKLPPRFAKKQATGIQQAQSSASVPPLASAPLPPSTSASVPASTSAPLPATLTPVPASTSAPVPASTLAPVLASTSAPVPASPLAPVSASASVSASVPASTSAAAITSSSAPASAPAPTPILASVSTPASVTILASASIPILASALASTSAPTPAPAASSPAAPVITAPTIPASAPTASVPLAPASASAPAPAPTPVSAPNPAPPAPAQTQAQTHKPVQNPLQTTSQSSKQPPPSIRLPSAQTPNGTDYVASGKSIQTPQSHGTLTAELWDNKVAPPAVLNDISKKLGPISPPQPPSVSAWNKPLTSFGSAPSSEGAKNGQESGLEIGTDTIQFGAPASNGNENEVVPVLSEKSADKIPEPKEQRQKQPRAGPIKAQKLPDLSPVENKEHKPGPIGKERSLKNRKVKDAQQVEPEGQEKPSPATVRSTDPVTTKETKAVSEMSTEIGTMISVSSAEYGTNAKESVTDYTTPSSSLPNTVATNNTKMEDTLVNNVPLPNTLPLPKRETIQQSSSLTSVPPTTFSLTFKMESARKAWENSPNVREKGSPVTSTAPPIATGVSSSASGPSTANYNSFSSASMPQIPVASVTPTASLSGAGTYTTSSLSTKSTTTSDPPNICKVKPQQLQTSSLPSASHFSQLSCMPSLIAQQQQNPQVYVSQSAAAQIPAFYMDTSHLFNTQHARLAPPSLAQQQGFQPGLSQPTSVQQIPIPIYAPLQGQHQAQLSLGAGPAVSQAQELFSSSLQPYRSQPAFMQSSLSQPSVVLSGTAIHNFPTVQHQELAKAQSGLAFQQTSNTQPIPILYEHQLGQASGLGGSQLIDTHLLQARANLTQASNLYSGQVQQPGQTNFYNTAQSPSALQQVTVPLPASQLSLPNFGSTGQPLIALPQTLQPPLQHTTPQAQAQSLSRPAQVSQPFRGLIPAGTQHSMIATTGKMSEMELKAFGSGIDIKPGTPPIAGRSTTPTSSPFRATSTSPNSQSSKMNSIVYQKQFQSAPATVRMTQPFPTQFAPQAKQRAEVLQSTQRFFSEQQQSKQIGGGKAQKVDSDSSKPPETLTDPPGVCQEKVEEKPPPAPSIATKPVRTGPIKPQAIKTEETKS

SEQ ID NO: 818665 - protein, 1870 aa, Homo sapiens
ALWATAVNVHNFIDWLMEKPKKEGFIRSSEGPKPEKVYKSKSETRWGPRPSSNRREEVNDRPVRRSGPIKKPVLRDMKEEREQRKEKEGEKAEKVTEKVVVKPEKTEKKDLPPPPPPPQPPAPIQPQSVPPPIQPEAEKFPSTETATLAQKPSQDTEKPLEPVSTVQVEPAVKTVNQQTMAAPVVKEEKQPEKVISKDLVIERPRPDSRPAVKKESTLPPRTYWKEARERDWFPDQGYRGRGRGEYYSRGRSYRGSYGGRGRGGRGHTRDYPQYRDNKPRAEHIPSGPLRQREESETRSESSDFEVVPKRRRQRGSETDTDSEIHESASDKDSLSKGKLPKREERPENKKPVKPHSSFKPDNHVRIDNRLLEKPYVRDDDKAKPGFLPKGEPTRRGRGGTFRRGGRDPGGRPSRPSTLRRPAYRDNQWNPRQSEVPKPEDGEPPRRHEQFIPIAADKRPPKFERKFDPARERPRRQRPTRPPRQDKPPRFRRLREREAASKSNEVVAVPTNGTVNNVAQEPVNTLGDISGNKTPDLSNQNSSDQANEEWETASESSDFNERRERDEKKNADLNAQTVVKVGENVLPPKREIAKRSFSSQRPVDRQNRRGNNGPPKSGRNFSGPRNERRSGPPSKSGKRGPFDDQPAGTTGVDLINGSSAHHQEGVPNGTGQKNSKDCTGKKREDPKPGPKKPKEKVDALSQFDLNNYASVVIIDDHPEVTVIEDPQSNLNDDGFTEVVSKKQQKRLQDEERRKKEEQVIQVWNKKNANEKGRSQTSKLPPRFAKKQATGIQQAQSSASVPPLASAPLPPSTSASVPASTSAPLPATLTPVPASTSAPVPASTLAPVLASTSAPVPASPLAPVSASASVSASVPASTSAAAITSSSAPASAPAPTPILASVSTPASVTILASASIPILASALASTSAPTPAPAASSPAAPVITAPTIPASAPTASVPLAPASASAPAPAPTPVSAPNPAPPAPAQTQAQTHKPVQNPLQTTSQSSKQPPPSIRLPSAQTPNGTDYVASGKSIQTPQSHGTLTAELWDNKVAPPAVLNDISKKLGPISPPQPPSVSAWNKPLTSFGSAPSSEGAKNGQESGLEIGTDTIQFGAPASNGNENEVVPVLSEKSADKIPEPKEQRQKQPRAGPIKAQKLPDLSPVENKEHKPGPIGKERSLKNRKVKDAQQVEPEGQEKPSPATVRSTDPVTTKETKAVSEMSTEIGTMISVSSAEYGTNAKESVTDYTTPSSSLPNTVATNNTKMEDTLVNNVPLPNTLPLPKRETIQQSSSLTSVPPTTFSLTFKMESARKAWENSPNVREKGSPVTSTAPPIATGVSSSASGPSTANYNSFSSASMPQIPVASVTPTASLSGAGTYTTSSLSTKSTTTSDPPNICKVKPQQLQTSSLPSASHFSQLSCMPSLIAQQQQNPQVYVSQSAAAQIPAFYMDTSHLFNTQHARLAPPSLAQQQGFQPGLSQPTSVQQIPIPIYAPLQGQHQAQLSLGAGPAVSQAQELFSSSLQPYRSQPAFMQSSLSQPSVVLSGTAIHNFPTVQHQELAKAQSGLAFQQTSNTQPIPILYEHQLGQASGLGGSQLIDTHLLQARANLTQASNLYSGQVQQPGQTNFYNTAQSPSALQQVTVPLPASQLSLPNFGSTGQPLIALPQTLQPPLQHTTPQAQAQSLSRPAQVSQPFRGLIPAGTQHSMIATTGKMSEMELKAFGSGIDIKPGTPPIAGRSTTPTSSPFRATSTSPNSQSSKMNSIVYQKQFQSAPATVRMTQPFPTQFAPQAKQRAEVLQSTQRFFSEQQQSKQIGGGKAQKVDSDSSKPPETLTDPPGVCQEKVEEKPPPAPSIATKPVRTGPIKPQAIKTEETKS

SEQ ID NO: 818666 - protein, 1193 aa, Homo sapiens
MSEKSGQSTKAKDGKKYATLSLFNTYKGKSLETQKTTVAARHGLQSLGKVGISRRMPPPANLPSLKAENKGNDPNVNIVPKDGTGWASKQEQHEEEKTPEVPPAQPKPGVAAPPEVAPAPKSWASNKQGGQGDGIQVNSQFQQEFPSLQAAGDQEKKEKETNDDNYGPGPSLRPPNVACWRDGGKAAGSPSSSDQDEKLPGQDESTAGTSEQNDILKVVEKRIACGPPQAKLNGQQAALASQYRAMMPPYMFQQYPRMTYPPLHGPMRFPPSLSETNKGLRGRGPPPSWASEPERPSILSASELKELDKFDNLDAEADEGWAGAQMEVDYTEQLNFSDDDEQGSNSPKENNSEDQGSKASENNENKKETDEVSNTKSSSQIPAQPSVAKVPYGKGPSFNQERGTSSHLPPPPKLLAQQHPPPDRQAVPGRPGPFPSKQQVADEDEIWKQRRRQQSEISAAVERARRTATEGEERRMEEQRKAACAEKLKRLDEKLGILEKQPSPEEIREREREKEREREKELEKEQEQEREKEREKDRERQQEKEKELEKEQEKQREMEKERKQEKEKELERQKEKEKELQKMKEQEKECELEKEREKLEEKIEPREPNLEPMVEKQESENSCNKEEEPVFTRQDSNRSEKEATPVVHETEPESGSQPRPAVLSGYFKQFQKSLPPRFQRQQEQMKQQQWQQQQQQGVLPQTVPSQPSSSTVPPPPHRPLYQPMQPHPQHLASMGFDPRWLMMQSYMDPRMMSGRPAMDIPPIHPGMIPPKPLMRRDQMEGSPNSSESFEHIARSARDHAISLSEPRMLWGSDPYPHAEPQQATTPKATEEPEDVRSEAALDQEQITAAYSVEHNQLEAHPKADFIRESSEAQVQKFLSRSVEDVRPHHTDANNQSACFEAPDQKTLSTPQEERISAVESQPSRKRSVSHGSNHTQKPDEQRSEPSAGIPKVTSRCIDSKEPIERPEEKPKKEGFIRSSEGPKPEKVYKSKSETRWGPRPSSNRREEVNDRPVRRSGPIKKPVLRDMKEEREQRKEKEGEKAEKVTEKVVVKPEKTEKKDLPPPPPPPQPPAPIQPQSVPPPIQPEAEKFPSTETATLAQKPSQDTEKPLEPVSTVQVEPAVKTVNQQTMAAPVVKEEKQRKQEKEKELERQKEKEKELQKMKEQELEKEQEKQREMEKERKQEKEKELERQK

SEQ ID NO: 818667 - protein, 1122 aa, Homo sapiens
MSEKSGQSTKAKDGKKYATLSLFNTYKGKSLETQKTTVAARHGLQSLGKVGISRRMPPPANLPSLKAENKGNDPNVNIVPKDGTGWASKQEQHEEEKTPEVPPAQPKPGVAAPPEVAPAPKSWASNKQGGQGDGIQVNSQFQQEFPSLQAAGDQEKKEKETNDDNYGPGPSLRPPNVACWRDGGKAAGSPSSSDQDEKLPGQDESTAGTSEQNDILKVVEKRIACGPPQAKLNGQQAALASQYRAMMPPYMFQQYPRMTYPPLHGPMRFPPSLSETNKGLRGRGPPPSWASEPERPSILSASELKELDKFDNLDAEADEGWAGAQMEVDYTEQLNFSDDDEQGSNSPKENNSEDQGSKASENNENKKETDEVSNTKSSSQIPAQPSVAKVPYGKGPSFNQERGTSSHLPPPPKLLAQQHPPPDRQAVPGRPGPFPSKQQVADEDEIWKQRRRQQSEISAAVERARRTATEGEERRMEEQRKAACAEKLKRLDEKLGILEKQPSPEEIREREREKEREREKELEKEQEQEREKEREKDRERQQEKEKELEKEQEKQREMEKERKQEKEKELERQKEKEKELQKMKEQEKECELEKEREKLEEKIEPREPNLEPMVEKQESENSCNKEEEPVFTRQDSNRSEKEATPVVHETEPESGSQPRPAVLSGYFKQFQKSLPPRFQRQQEQMKQQQWQQQQQQGVLPQTVPSQPSSSTVPPPPHRPLYQPMQPHPQHLASMGFDPRWLMMQSYMDPRMMSGRPAMDIPPIHPGMIPPKPLMRRDQMEGSPNSSESFEHIARSARDHAISLSEPRMLWGSDPYPHAEPQQATTPKATEEPEDVRSEAALDQEQITAAYSVEHNQLEAHPKADFIRESSEAQVQKFLSRSVEDVRPHHTDANNQSACFEAPDQKTLSTPQEERISAVESQPSRKRSVSHGSNHTQKPDEQRSEPSAGIPKVTSRCIDSKEPIERPEEKPKKEGFIRSSEGPKPEKVYKSKSETRWGPRPSSNRREEVNDRPVRRSGPIKKPVLRDMKEEREQRKEKEGEKAEKVTEKVVVKPEKAGEGAGKTKRNGERKKARKRKRTRTAERKGKRTTKEKEQELEKEQEKQREMEKERKQEKEKELERQK

SEQ ID NO: 818668 - protein, 1133 aa, Homo sapiens
MSEKSGQSTKAKDGKKYATLSLFNTYKGKSLETQKTTVAARHGLQSLGKVGISRRMPPPANLPSLKAENKGNDPNVNIVPKDGTGWASKQEQHEEEKTPEVPPAQPKPGVAAPPEVAPAPKSWASNKQGGQGDGIQVNSQFQQEFPSLQAAGDQEKKEKETNDDNYGPGPSLRPPNVACWRDGGKAAGSPSSSDQDEKLPGQDESTAGTSEQNDILKVVEKRIACGPPQAKLNGQQAALASQYRAMMPPYMFQQYPRMTYPPLHGPMRFPPSLSETNKGLRGRGPPPSWASEPERPSILSASELKELDKFDNLDAEADEGWAGAQMEVDYTEQLNFSDDDEQGSNSPKENNSEDQGSKASENNENKKETDEVSNTKSSSQIPAQPSVAKVPYGKGPSFNQERGTSSHLPPPPKLLAQQHPPPDRQAVPGRPGPFPSKQQVADEDEIWKQRRRQQSEISAAVERARRTATEGEERRMEEQRKAACAEKLKRLDEKLGILEKQPSPEEIREREREKEREREKELEKEQEQEREKEREKDRERQQEKEKELEKEQEKQREMEKERKQEKEKELERQKEKEKELQKMKEQEKECELEKEREKLEEKIEPREPNLEPMVEKQESENSCNKEEEPVFTRQDSNRSEKEATPVVHETEPESGSQPRPAVLSGYFKQFQKSLPPRFQRQQEQMKQQQWQQQQQQGVLPQTVPSQPSSSTVPPPPHRPLYQPMQPHPQHLASMGFDPRWLMMQSYMDPRMMSGRPAMDIPPIHPGMIPPKPLMRRDQMEGSPNSSESFEHIARSARDHAISLSEPRMLWGSDPYPHAEPQQATTPKATEEPEDVRSEAALDQEQITAAYSVEHNQLEAHPKADFIRESSEAQVQKFLSRSVEDVRPHHTDANNQSACFEAPDQKTLSTPQEERISAVESQPSRKRSVSHGSNHTQKPDEQRSEPSAGIPKVTSRCIDSKEPIERPEEKPKKEGFIRSSEGPKPEKVYKSKSETRWGPRPSSNRREEVNDRPVRRSGPIKKPVLRDMKEEREQRKEKEGEKAEKVTEKVVVKPEKRQRETAGKGERAGEGAGKTKRNGERKKARKRKRTRTAERKGKRTTKEKEQELEKEQEKQREMEKERKQEKEKELERQK

SEQ ID NO: 818669 - protein, 654 aa, Homo sapiens
MSTEIGTMISVSSAEYGTNAKESVTDYTTPSSSLPNTVATNNTKMEDTLVNNVPLPNTLPLPKRETIQQSSSLTSVPPTTFSLTFKMESARKAWENSPNVREKGSPVTSTAPPIATGVSSSASGPSTANYNSFSSASMPQIPVASVTPTASLSGAGTYTTSSLSTKSTTTSDPPNICKVKPQQLQTSSLPSASHFSQLSCMPSLIAQQQQNPQVYVSQSAAAQIPAFYMDTSHLFNTQHARLAPPSLAQQQGFQPGLSQPTSVQQIPIPIYAPLQGQHQAQLSLGAGPAVSQAQELFSSSLQPYRSQPAFMQSSLSQPSVVLSGTAIHNFPTVQHQELAKAQSGLAFQQTSNTQPIPILYEHQLGQASGLGGSQLIDTHLLQARANLTQASNLYSGQVQQPGQTNFYNTAQSPSALQQVTVPLPASQLSLPNFGSTGQPLIALPQTLQPPLQHTTPQAQAQSLSRPAQVSQPFRGLIPAGTQHSMIATTGKMSEMELKAFGSGIDIKPGTPPIAGRSTTPTSSPFRATSTSPNSQSSKMNSIVYQKQFQSAPATVRMTQPFPTQFAPQAKQRAEVLQSTQRFFSEQQQSKQIGGGKAQKVDSDSSKPPETLTDPPGVCQEKVEEKPPPAPSIATKPVRTGPIKPQAIKTEETKS

SEQ ID NO: 818670 - protein, 1128 aa, Homo sapiens
ANSLVIRDCEKEEEQVIQVWNKKNANEKGRSQTSKLPPRFAKKQATGIQQAQSSASVPPLASAPLPPSTSASVPASTSAPLPATLTPVPASTSAPVPASTLAPVLASTSAPVPASPLAPVSASASVSASVPASTSAAAITSSSAPASAPAPTPILASVSTPASVTILASASIPILASALASTSAPTPAPAASSPAAPVITAPTIPASAPTASVPLAPASASAPAPAPTPVSAPNPAPPAPAQTQAQTHKPVQNPLQTTSQSSKQPPPSIRLPSAQTPNGTDYVASGKSIQTPQSHGTLTAELWDNKVAPPAVLNDISKKLGPISPPQPPSVSAWNKPLTSFGSAPSSEGAKNGQESGLEIGTDTIQFGAPASNGNENEVVPVLSEKSADKIPEPKEQRQKQPRAGPIKAQKLPDLSPVENKEHKPGPIGKERSLKNRKVKDAQQVEPEGQEKPSPATVRSTDPVTTKETKAVSEMSTEIGTMISVSSAEYGTNAKESVTDYTTPSSSLPNTVATNNTKMEDTLVNNVPLPNTLPLPKRETIQQSSSLTSVPPTTFSLTFKMESARKAWENSPNVREKGSPVTSTAPPIATGVSSSASGPSTANYNSFSSASMPQIPVASVTPTASLSGAGTYTTSSLSTKSTTTSDPPNICKVKPQQLQTSSLPSASHFSQLSCMPSLIAQQQQNPQVYVSQSAAAQIPAFYMDTSHLFNTQHARLAPPSLAQQQGFQPGLSQPTSVQQIPIPIYAPLQGQHQAQLSLGAGPAVSQAQELFSSSLQPYRSQPAFMQSSLSQPSVVLSGTAIHNFPTVQHQELAKAQSGLAFQQTSNTQPIPILYEHQLGQASGLGGSQLIDTHLLQARANLTQASNLYSGQVQQPGQTNFYNTAQSPSALQQVTVPLPASQLSLPNFGSTGQPLIALPQTLQPPLQHTTPQAQAQSLSRPAQVSQPFRGLIPAGTQHSMIATTGKMSEMELKAFGSGIDIKPGTPPIAGRSTTPTSSPFRATSTSPNSQSSKMNSIVYQKQFQSAPATVRMTQPFPTQFAPQAKQRAEVLQSTQRFFSEQQQSKQIGGGKAQKVDSDSSKPPETLTDPPGVCQEKVEEKPPPAPSIATKPVRTGPIKPQAIKTEETKS

SEQ ID NO: 818671 - protein, 1033 aa, Homo sapiens
MTERCSGPYLEVRGPVSTASPLAPVSASASVSASVPASTSAAAITSSSAPASAPAPTPILASVSTPASVTILASASIPILASALASTSAPTPAPAASSPAAPVITAPTIPASAPTASVPLAPASASAPAPAPTPVSAPNPAPPAPAQTQAQTHKPVQNPLQTTSQSSKQPPPSIRLPSAQTPNGTDYVASGKSIQTPQSHGTLTAELWDNKVAPPAVLNDISKKLGPISPPQPPSVSAWNKPLTSFGSAPSSEGAKNGQESGLEIGTDTIQFGAPASNGNENEVVPVLSEKSADKIPEPKEQRQKQPRAGPIKAQKLPDLSPVENKEHKPGPIGKERSLKNRKVKDAQQVEPEGQEKPSPATVRSTDPVTTKETKAVSEMSTEIGTMISVSSAEYGTNAKESVTDYTTPSSSLPNTVATNNTKMEDTLVNNVPLPNTLPLPKRETIQQSSSLTSVPPTTFSLTFKMESARKAWENSPNVREKGSPVTSTAPPIATGVSSSASGPSTANYNSFSSASMPQIPVASVTPTASLSGAGTYTTSSLSTKSTTTSDPPNICKVKPQQLQTSSLPSASHFSQLSCMPSLIAQQQQNPQVYVSQSAAAQIPAFYMDTSHLFNTQHARLAPPSLAQQQGFQPGLSQPTSVQQIPIPIYAPLQGQHQAQLSLGAGPAVSQAQELFSSSLQPYRSQPAFMQSSLSQPSVVLSGTAIHNFPTVQHQELAKAQSGLAFQQTSNTQPIPILYEHQLGQASGLGGSQLIDTHLLQARANLTQASNLYSGQVQQPGQTNFYNTAQSPSALQQVTVPLPASQLSLPNFGSTGQPLIALPQTLQPPLQHTTPQAQAQSLSRPAQVSQPFRGLIPAGTQHSMIATTGKMSEMELKAFGSGIDIKPGTPPIAGRSTTPTSSPFRATSTSPNSQSSKMNSIVYQKQFQSAPATVRMTQPFPTQFAPQAKQRAEVLQSTQRFFSEQQQSKQIGGGKAQKVDSDSSKPPETLTDPPGVCQEKVEEKPPPAPSIATKPVRTGPIKPQAIKTEETKS

SEQ ID NO: 818672 - protein, 454 aa, Homo sapiens [sequence omitted]

SEQ ID NO: 818673 - protein, 346 aa, Homo sapiens
RKPSEPDTSFLRSLVLDKNTSPYEPTLSAGRRFSGGLAFQQTSNTQPIPILYEHQLGQASGLGGSQLIDTHLLQARANLTQASNLYSGQVQQPGQTNFYNTAQSPSALQQVTVPLPASQLSLPNFGSTGQPLIALPQTLQPPLQHTTPQAQAQSLSRPAQVSQPFRGLIPAGTQHSMIATTGKMSEMELKAFGSGIDIKPGTPPIAGRSTTPTSSPFRATSTSPNSQSSKMNSIVYQKQFQSAPATVRMTQPFPTQFAPQAKQRAEVLQSTQRFFSEQQQSKQIGGGKAQKVDSDSSKPPETLTDPPGVCQEKVEEKPPPAPSIATKPVRTGPIKPQAIKTEETKS

SEQ ID NO: 818674 - protein, 284 aa, Homo sapiens
LQEFCTSTHLLQARANLTQASNLYSGQVQQPGQTNFYNTAQSPSALQQVTVPLPASQLSLPNFGSTGQPLIALPQTLQPPLQHTTPQAQAQSLSRPAQVSQPFRGLIPAGTQHSMIATTGKMSEMELKAFGSGIDIKPGTPPIAGRSTTPTSSPFRATSTSPNSQSSKMNSIVYQKQFQSAPATVRMTQPFPTQFAPQAKQRAEVLQSTQRFFSEQQQSKQIGGGKAQKVDSDSSKPPETLTDPPGVCQEKVEEKPPPAPSIATKPVRTGPIKPQAIKTEETKS

SEQ ID NO: 818675 - protein, 170 aa, Homo sapiens
MIATTGKMSEMELKAFGSGIDIKPGTPPIAGRSTTPTSSPFRATSTSPNSQSSKMNSIVYQKQFQSAPATVRMTQPFPTQFAPQAKQRAEVLQSTQRFFSEQQQSKQIGGGKAQKVDSDSSKPPETLTDPPGVCQEKVEEKPPPAPSIATKPVRTGPIKPQAIKTEETKS

SEQ ID NO: 818676 - protein, 316 aa, Homo sapiens
MSEKSGQSTKAKDGKKYATLSLFNTYKGKSLETQKTTVAARHGLQSLGKVGISRRMPPPANLPSLKAENKGNDPNVNIVPKDGTGWASKQEQHEEEKTPEVPPAQPKPGVAAPPEVAPAPKSWASNKQGGQGDGIQVNSQFQQEFPSLQAAGDQEKKEKETNDDNYGPGPSLRPPNVACWRDGGKAAGSPSSSDQDEKLPGQDESTAGTSEQNDILKVVEKRIACGPPQAKLNGQQAALASQYRAMMPPYMFQQYPRMTYPPLHGPMRFPPSLSETNKGLRGRGPPPSWASEPERPSILSASNFGGGGRCEDVPRS

SEQ ID NO: 818677 - protein, 2820 aa, Homo sapiens
MSEKSGQSTKAKDGKKYATLSLFNTYKGKSLETQKTTVAARHGLQSLGKVGISRRMPPPANLPSLKAENKGNDPNVNIVPKDGTGWASKQEQHEEEKTPEVPPAQPKPGVAAPPEVAPAPKSWASNKQGGQGDGIQVNSQFQQEFPSLQAAGDQEKKEKETNDDNYGPGPSLRPPNVACWRDGGKAAGSPSSSDQDEKLPGQDESTAGTSEQNDILKVVEKRIACGPPQAKLNGQQAALASQYRAMMPPYMFQQYPRMTYPPLHGPMRFPPSLSETNKGLRGRGPPPSWASEPERPSILSASELKELDKFDNLDAEADEGWAGAQMEVDYTEQLNFSDDDEQGSNSPKENNSEDQGSKASENNENKKETDEVSNTKSSSQIPAQPSVAKVPYGKGPSFNQERGTSSHLPPPPKLLAQQHPPPDRQAVPGRPGPFPSKQQVADEDEIWKQRRRQQSEISAAVERARRTATEGEERRMEEQRKAACAEKLKRLDEKLGILEKQPSPEEIREREREKEREREKELEKEQEQEREKEREKDRERQQEKEKELEKEQEKQREMEKERKQEKEKELERQKEKEKELQKMKEQEKECELEKEREKLEEKIEPREPNLEPMVEKQESENSCNKEEEPVFTRQDSNRSEKEATPVVHETEPESGSQPRPAVLSGYFKQFQKSLPPRFQRQQEQMKQQQWQQQQQQGVLPQTVPSQPSSSTVPPPPHRPLYQPMQPHPQHLASMGFDPRWLMMQSYMDPRMMSGRPAMDIPPIHPGMIPPKPLMRRDQMEGSPNSSESFEHIARSARDHAISLSEPRMLWGSDPYPHAEPQQATTPKATEEPEDVRSEAALDQEQITAAYSVEHNQLEAHPKADFIRESSEAQVQKFLSRSVEDVRPHHTDANNQSACFEAPDQKTLSTPQEERISAVESQPSRKRSVSHGSNHTQKPDEQRSEPSAGIPKVTSRCIDSKEPIERPEEKPKKEGFIRSSEGPKPEKVYKSKSETRWGPRPSSNRREEVNDRPVRRSGPIKKPVLRDMKEEREQRKEKEGEKAEKVTEKVVVKPEKTEKKDLPPPPPPPQPPAPIQPQSVPPPIQPEAEKFPSTETATLAQKPSQDTEKPLEPVSTVQVEPAVKTVNQQTMAAPVVKEEKQPEKVISKDLVIERPRPDSRPAVKKESTLPPRTYWKEARERDWFPDQGYRGRGRGEYYSRGRSYRGSYGGRGRGGRGHTRDYPQYRDNKPRAEHIPSGPLRQREESETRSESSDFEVVPKRRRQRGSETDTDSEIHESASDKDSLSKGKLPKREERPENKKPVKPHSSFKPDNHVRIDNRLLEKPYVRDDDKAKPGFLPKGEPTRRGRGGTFRRGGRDPGGRPSRPSTLRRPAYRDNQWNPRQSEVPKPEDGEPPRRHEQFIPIAADKRPPKFERKFDPARERPRRQRPTRPPRQDKPPRFRRLREREAASKSNEVVAVPTNGTVNNVAQEPVNTLGDISGNKTPDLSNQNSSDQANEEWETASESSDFNERRERDEKKNADLNAQTVVKVGENVLPPKREIAKRSFSSQRPVDRQNRRGNNGPPKSGRNFSGPRNERRSGPPSKSGKRGPFDDQPAGTTGVDLINGSSAHHQEGVPNGTGQKNSKDCTGKKREDPKPGPKKPKEKVDALSQFDLNNYASVVIIDDHPEVTVIEDPQSNLNDDGFTEVVSKKQQKRLQDEERRKKEEQVIQVWNKKNANEKGRSQTSKLPPRFAKKQATGIQQAQSSASVPPLASAPLPPSTSASVPASTSAPLPATLTPVPASTSAPVPASTLAPVLASTSAPVPASPLAPVSASASVSASVPASTSAAAITSSSAPASAPAPTPILASVSTPASVTILASASIPILASALASTSAPTPAPAASSPAAPVITAPTIPASAPTASVPLAPASASAPAPAPTPVSAPNPAPPAPAQTQAQTHKPVQNPLQTTSQSSKQPPPSIRLPSAQTPNGTDYVASGKSIQTPQSHGTLTAELWDNKVAPPAVLNDISKKLGPISPPQPPSVSAWNKPLTSFGSAPSSEGAKNGQESGLEIGTDTIQFGAPASNGNENEVVPVLSEKSADKIPEPKEQRQKQPRAGPIKAQKLPDLSPVENKEHKPGPIGKERSLKNRKVKDAQQVEPEGQEKPSPATVRSTDPVTTKETKAVSEMSTEIGTMISVSSAEYGTNAKESVTDYTTPSSSLPNTVATNNTKMEDTLVNNVPLPNTLPLPKRETIQQSSSLTSVPPTTFSLTFKMESARKAWENSPNVREKGSPVTSTAPPIATGVSSSASGPSTANYNSFSSASMPQIPVASVTPTASLSGAGTYTTSSLSTKSTTTSDPPNICKVKPQQLQTSSLPSASHFSQLSCMPSLIAQQQQNPQVYVSQSAAAQIPAFYMDTSHLFNTQHARLAPPSLAQQQGFQPGLSQPTSVQQIPIPIYAPLQGQHQAQLSLGAGPAVSQAQELFSSSLQPYRSQPAFMQSSLSQPSVVLSGTAIHNFPTVQHQELAKAQSGLAFQQTSNTQPIPILYEHQLGQASGLGGSQLIDTHLLQARANLTQASNLYSGQVQQPGQTNFYNTAQSPSALQQVTVPLPASQLSLPNFGSTGQPLIALPQTLQPPLQHTTPQAQAQSLSRPAQVSQPFRGLIPAGTQHSMIATTGKMSEMELKAFGSGIDIKPGTPPIAGRSTTPTSSPFRATSTSPNSQSSKMNSIVYQKQFQSAPATVRMTQPFPTQFAPQAKQRAEVLQSTQRFFSEQQQSKQIGGGKAQKVDSDSSKPPETLTDPPGVCQEKVEEKPPPAPSIATKPVRTGPIKPQAIKTEETKS

SEQ ID NO: 818678 - protein, 2801 aa, Homo sapiens
MSEKSGQSTKAKDGKKYATLSLFNTYKGKSLETQKTTVAARHGLQSLGKVGISRRMPPPANLPSLKAENKGNDPNVNIVPKDGTGWASKQEQHEEEKTPEVPPAQPKPGVAAPPEVAPAPKSWASNKQGGQGDGIQVNSQFQQEFPSLQAAGDQEKKEKETNDDNYGPGPSLRPPNVACWRDGGKAAGSPSSSDQDEKLPGQDESTAGTSEQNDILKVVEKRIACGPPQAKLNGQQAALASQYRAMMPPYMFQQYPRMTYPPLHGPMRFPPSLSETNKGLRGRGPPPSWASEPERPSILSASELKELDKFDNLDAEADEGWAGAQMEVDYTEQLNFSDDDEQGSNSPKENNSEDQGSKASENNENKKETDEVSNTKSSSQIPAQPSVAKVPYGKGPSFNQERGTSSHLPPPPKLLAQQHPPPDRQAVPGRPGPFPSKQQVADEDEIWKQRRRQQSEISAAVERARRTATEGEERRMEEQRKAACAEKLKRLDEKLGILEKQPSPEEIREREREKEREREKELEKEQEQEREKEREKDRERQQEKEKELEKEQEKQREMEKERKQEKEKELERQKEKEKELQKMKEQEKECELEKEREKLEEKIEPREPNLEPMVEKQESENSCNKEEEPVFTRQDSNRSEKEATPVVHETEPESGSQPRPAVLSGYFKQFQKSLPPRFQRQQEQMKQQQWQQQQQQGVLPQTVPSQPSSSTVPPPPHRPLYQPMQPHPQHLASMGFDPRWLMMQSYMDPRMMSGRPAMDIPPIHPGMIPPKPLMRRDQMEGSPNSSESFEHIARSARDHAISLSEPRMLWGSDPYPHAEPQQATTPKATEEPEDVRSEAALDQEQITAAYSVEHNQLEAHPKADFIRESSEAQVQKFLSRSVEDVRPHHTDANNQSACFEAPDQKTLSTPQEERISAVESQPSRKRSVSHGSNHTQKPDEQRSEPSAGIPKVTSRCIDSKEPIERPEEKPKKEGFIRSSEGPKPEKVYKSKSETRWGPRPSSNRREEVNDRPVRRSGPIKKPVLRDMKEEREQRKEKEGEKAEKVTEKVVVKPEKTEKKDLPPPPPPPQPPAPIQPQSVPPPIQPEAEKFPSTETATLAQKPSQDTEKPLEPVSTVQVEPAVKTVNQQTMAAPVVKEEKQPEKVISKDLVIERPRPDSRPAVKKESTLPPRTYWKEARERDWFPDQGYRGRGRGEYYSRGRSYRGSYGGRGRGGRGHTRDYPQYRDNKPRAEHIPSGPLRQREESETRSESSDFEVVPKRRRQRGSETDTDSEIHESASDKDSLSKGKLPKREERPENKKPVKPHSSFKPDNHVRIDNRLLEKPYVRDDDKAKPGFLPKGEPTRRGRGGTFRRGGRDPGGRPSRPSTLRRPAYRDNQWNPRQSEVPKPEDGEPPRRHEQFIPIAADKRPPKFERKFDPARERPRRQRPTRPPRQDKPPRFRRLREREAASKSNEVVAVPTNGTVNNVAQEPVNTLGDISGNKTPDLSNQNSSDQANEEWETASESSDFNERRERDEKKNADLNAQTVVKVGENVLPPKREIAKRSFSSQRPVDRQNRRGNNGPPKSGRNFSGPRNERRSGPPSKSGKRGPFDDQPAGTTGVDLINGSSAHHQEGVPNGTGQKNSKDCTGKKREDPKPGPKKPKEKVDALSQFDLNNYASVVIIDDHPEVTVIEDPQSNLNDDGFTEVVSKKQQKRLQDEERRKKEEQVIQVWNKKNANEKGRSQTSKLPPRFAKKQATGIQQAQSSASVPPLASAPLPPSTSASVPASTSAPLPATLTPVPASTSAASPLAPVSASASVSASVPASTSAAAITSSSAPASAPAPTPILASVSTPASVTILASASIPILASALASTSAPTPAPAASSPAAPVITAPTIPASAPTASVPLAPASASAPAPAPTPVSAPNPAPPAPAQTQAQTHKPVQNPLQTTSQSSKQPPPSIRLPSAQTPNGTDYVASGKSIQTPQSHGTLTAELWDNKVAPPAVLNDISKKLGPISPPQPPSVSAWNKPLTSFGSAPSSEGAKNGQESGLEIGTDTIQFGAPASNGNENEVVPVLSEKSADKIPEPKEQRQKQPRAGPIKAQKLPDLSPVENKEHKPGPIGKERSLKNRKVKDAQQVEPEGQEKPSPATVRSTDPVTTKETKAVSEMSTEIGTMISVSSAEYGTNAKESVTDYTTPSSSLPNTVATNNTKMEDTLVNNVPLPNTLPLPKRETIQQSSSLTSVPPTTFSLTFKMESARKAWENSPNVREKGSPVTSTAPPIATGVSSSASGPSTANYNSFSSASMPQIPVASVTPTASLSGAGTYTTSSLSTKSTTTSDPPNICKVKPQQLQTSSLPSASHFSQLSCMPSLIAQQQQNPQVYVSQSAAAQIPAFYMDTSHLFNTQHARLAPPSLAQQQGFQPGLSQPTSVQQIPIPIYAPLQGQHQAQLSLGAGPAVSQAQELFSSSLQPYRSQPAFMQSSLSQPSVVLSGTAIHNFPTVQHQELAKAQSGLAFQQTSNTQPIPILYEHQLGQASGLGGSQLIDTHLLQARANLTQASNLYSGQVQQPGQTNFYNTAQSPSALQQVTVPLPASQLSLPNFGSTGQPLIALPQTLQPPLQHTTPQAQAQSLSRPAQVSQPFRGLIPAGTQHSMIATTGKMSEMELKAFGSGIDIKPGTPPIAGRSTTPTSSPFRATSTSPNSQSSKMNSIVYQKQFQSAPATVRMTQPFPTQFAPQAKQRAEVLQSTQRFFSEQQQSKQIGGGKAQKVDSDSSKPPETLTDPPGVCQEKVEEKPPPAPSIATKPVRTGPIKPQAIKTEETKS

SEQ ID NO: 818679 - protein, 2775 aa, Homo sapiens
MSEKSGQSTKAKDGKKYATLSLFNTYKGKSLETQKTTVAARHGLQSLGKVGISRRMPPPANLPSLKAENKGNDPNVNIVPKDGTGWASKQEQHEEEKTPEVPPAQPKPGVAAPPEVAPAPKSWASNKQGGQGDGIQVNSQFQQEFPSLQAAGDQEKKEKETNDDNYGPGPSLRPPNVACWRDGGKAAGSPSSSDQDEKLPGQDESTAGTSEQNDILKVVEKRIACGPPQAKLNGQQAALASQYRAMMPPYMFQQYPRMTYPPLHGPMRFPPSLSETNKGLRGRGPPPSWASEPERPSILSASELKELDKFDNLDAEADEGWAGAQMEVDYTEQLNFSDDDEQGSNSPKENNSEDQGSKASENNENKKETDEVSNTKSSSQIPAQPSVAKVPYGKGPSFNQERGTSSHLPPPPKLLAQQHPPPDRQAVPGRPGPFPSKQQVADEDEIWKQRRRQQSEISAAVERARRTATEGEERRMEEQRKAACAEKLKRLDEKLGILEKQPSPEEIREREREKEREREKELEKEQEQEREKEREKDRERQQEKEKELEKEQEKQREMEKERKQEKEKELERQKEKEKELQKMKEQEKECELEKEREKLEEKIEPREPNLEPMVEKQESENSCNKEEEPVFTRQDSNRSEKEATPVVHETEPESGSQPRPAVLSGYFKQFQKSLPPRFQRQQEQMKQQQWQQQQQQGVLPQTVPSQPSSSTVPPPPHRPLYQPMQPHPQHLASMGFDPRWLMMQSYMDPRMMSGRPAMDIPPIHPGMIPPKPLMRRDQMEGSPNSSESFEHIARSARDHAISLSEPRMLWGSDPYPHAEPQQATTPKATEEPEDVRSEAALDQEQITAAYSVEHNQLEAHPKADFIRESSEAQVQKFLSRSVEDVRPHHTDANNQSACFEAPDQKTLSTPQEERISAVESQPSRKRSVSHGSNHTQKPDEQRSEPSAGIPKVTSRCIDSKEPIERPEEKPKKEGFIRSSEGPKPEKVYKSKSETRWGPRPSSNRREEVNDRPVRRSGPIKKPVLRDMKEEREQRKEKEGEKAEKVTEKVVVKPEKTEKKDLPPPPPPPQPPAPIQPQSVPPPIQPEAEKFPSTETATLAQKPSQDTEKPLEPVSTVQVEPAVKTVNQQTMAAPVVKEEKQPEKVISKDLVIERPRPDSRPAVKKESTLPPRTYWKEARERDWFPDQGYRGRGRGEYYSRGRSYRGSYGGRGRGGRGHTRDYPQYRDNKPRAEHIPSGPLRQREESETRSESSDFEVVPKRRRQRGSETDTDSEIHESASDKDSLSKGKLPKREERPENKKPVKPHSSFKPDNHVRIDNRLLEKPYVRDDDKAKPGFLPKGEPTRRGRGGTFRRGGRDPGGRPSRPSTLRRPAYRDNQWNPRQSEVPKPEDGEPPRRHEQFIPIAADKRPPKFERKFDPARERPRRQRPTRPPRQDKPPRFRRLREREAASKSNEVVAVPTNGTVNNVAQEPVNTLGDISGNKTPDLSNQNSSDQANEEWETASESSDFNERRERDEKKNADLNAQTVVKVGENVLPPKREIAKRSFSSQRPVDRQNRRGNNGPPKSGRNFSGPRNERRSGPPSKSGKRGPFDDQPAGTTGVDLINGSSAHHQEGVPNGTGQKNSKDCTGKKREDPKPGPKKPKEKVDALSQFDLNNYASVVIIDDHPEVTVIEDPQSNLNDDGFTEVVSKKQQKRLQDEERRKKEEQVIQVWNKKNANEKGRSQTSKLPPRFAKKQATGIQQAQSSASVPPLASAPLPPSTSASVPASTSAPLPATLTPVPASTSAPVPASTLAPVLASTSAPVPASPLAPVSASASVSASVPASTSAAAITSSSAPASAPAPTPILASVSTPASVTILASASIPILASALASTSAPTPAPAASSPAAPVITAPTIPASAPTASVPLAPASASAPAPAPTPVSAPNPAPPAPAQTQAQTHKPVQNPLQTTSQSSKQPPPSIRLPSAQTPNGTDYVASGKSIQTPQSHGTLTAELWDNKVAPPAVLNDISKKLGPISPPQPPSVSAWNKPLTSFGSAPSSEGAKNGQESGLEIGTDTIQFGAPASNGNENEVVPVLSEKSADKIPEPKEQRQKQPRAGPIKAQKLPDLSPVENKEHKPGPIGKERSLKNRKVKDAQQVEPEGQEKPSPATVRSTDPVTTKETKAVSEMSTEIGTMISVSSAEYGTNAKESVTDYTTPSSSLPNTVATNNTKMEDTLVNNVPLPNTLPLPKRETIQQSSSLTSVPPTTFSLTFKMESARKAWENSPNVREKGSPVTSTAPPIATGVSSSASGPSTANYNSFSSASMPQIPVASVTPTASLSGAGTYTTSSLSTKSTTTSDPPNICKVKPQQLQTSSLPSASHFSQLSCMPSLIAQQQQNPQVYVSQSAAAQIPAFYMDTSHLFNTQHARLAPPSLAQQQGFQPGLSQPTSVQQIPIPIYAPLQGQHQAQLSLGAGPAVSQAQELFSSSLQPYRSQPAFMQSSLSQPSVVLSGTAIHNFPTVQHQELAKAQSGLAFQQTSNTQPIPILYEHQLGQASGLGGSQLIDTHLLQARANLTQASNLYSGQVQQPGQTNFYNTAQSPSALQQVTVPLPASQLSLPNFGSTGQPLIALPQTLQPPLQHTTPQAQAQSLSRPAQVSQPFRGLIPAGTQHSMIATTGKMSEMELKAFGSGIDIKPGTPPIAGRSTTPTSSPFRATSTSPNSQSSKMNSIVYQKQFQSAPATVRMTQPFPTQFAPQKRAVGRGLSHKTFGPRCWQSREQRFFSPRNGSSLNSNRANR

SEQ ID NO: 818680 - protein, 2712 aa, Homo sapiens
SRYEAGWPRDGIQVNVSNKQGGQGDGIQVNSQFQQEFPSLQAAGDQEKKEKETNDDNYGPGPSLRPPNVACWRDGGKAAGSPSSSDQDEKLPGQDESTAGTSEQNDILKVVEKRIACGPPQAKLNGQQAALASQYRAMMPPYMFQQYPRMTYPPLHGPMRFPPSLSETNKGLRGRGPPPSWASEPERPSILSASELKELDKFDNLDAEADEGWAGAQMEVDYTEQLNFSDDDEQGSNSPKENNSEDQGSKASENNENKKETDEVSNTKSSSQIPAQPSVAKVPYGKGPSFNQERGTSSHLPPPPKLLAQQHPPPDRQAVPGRPGPFPSKQQVADEDEIWKQRRRQQSEISAAVERARRTATEGEERRMEEQRKAACAEKLKRLDEKLGILEKQPSPEEIREREREKEREREKELEKEQEQEREKEREKDRERQQEKEKELEKEQEKQREMEKERKQEKEKELERQKEKEKELQKMKEQEKECELEKEREKLEEKIEPREPNLEPMVEKQESENSCNKEEEPVFTRQDSNRSEKEATPVVHETEPESGSQPRPAVLSGYFKQFQKSLPPRFQRQQEQMKQQQWQQQQQQGVLPQTVPSQPSSSTVPPPPHRPLYQPMQPHPQHLASMGFDPRWLMMQSYMDPRMMSGRPAMDIPPIHPGMIPPKPLMRRDQMEGSPNSSESFEHIARSARDHAISLSEPRMLWGSDPYPHAEPQQATTPKATEEPEDVRSEAALDQEQITAAYSVEHNQLEAHPKADFIRESSEAQVQKFLSRSVEDVRPHHTDANNQSACFEAPDQKTLSTPQEERISAVESQPSRKRSVSHGSNHTQKPDEQRSEPSAGIPKVTSRCIDSKEPIERPEEKPKKEGFIRSSEGPKPEKVYKSKSETRWGPRPSSNRREEVNDRPVRRSGPIKKPVLRDMKEEREQRKEKEGEKAEKVTEKVVVKPEKTEKKDLPPPPPPPQPPAPIQPQSVPPPIQPEAEKFPSTETATLAQKPSQDTEKPLEPVSTVQVEPAVKTVNQQTMAAPVVKEEKQPEKVISKDLVIERPRPDSRPAVKKESTLPPRTYWKEARERDWFPDQGYRGRGRGEYYSRGRSYRGSYGGRGRGGRGHTRDYPQYRDNKPRAEHIPSGPLRQREESETRSESSDFEVVPKRRRQRGSETDTDSEIHESASDKDSLSKGKLPKREERPENKKPVKPHSSFKPDNHVRIDNRLLEKPYVRDDDKAKPGFLPKGEPTRRGRGGTFRRGGRDPGGRPSRPSTLRRPAYRDNQWNPRQSEVPKPEDGEPPRRHEQFIPIAADKRPPKFERKFDPARERPRRQRPTRPPRQDKPPRFRRLREREAASKSNEVVAVPTNGTVNNVAQEPVNTLGDISGNKTPDLSNQNSSDQANEEWETASESSDFNERRERDEKKNADLNAQTVVKVGENVLPPKREIAKRSFSSQRPVDRQNRRGNNGPPKSGRNFSGPRNERRSGPPSKSGKRGPFDDQPAGTTGVDLINGSSAHHQEGVPNGTGQKNSKDCTGKKREDPKPGPKKPKEKVDALSQFDLNNYASVVIIDDHPEVTVIEDPQSNLNDDGFTEVVSKKQQKRLQDEERRKKEEQVIQVWNKKNANEKGRSQTSKLPPRFAKKQATGIQQAQSSASVPPLASAPLPPSTSASVPASTSAPLPATLTPVPASTSAPVPASTLAPVLASTSAPVPASPLAPVSASASVSASVPASTSAAAITSSSAPASAPAPTPILASVSTPASVTILASASIPILASALASTSAPTPAPAASSPAAPVITAPTIPASAPTASVPLAPASASAPAPAPTPVSAPNPAPPAPAQTQAQTHKPVQNPLQTTSQSSKQPPPSIRLPSAQTPNGTDYVASGKSIQTPQSHGTLTAELWDNKVAPPAVLNDISKKLGPISPPQPPSVSAWNKPLTSFGSAPSSEGAKNGQESGLEIGTDTIQFGAPASNGNENEVVPVLSEKSADKIPEPKEQRQKQPRAGPIKAQKLPDLSPVENKEHKPGPIGKERSLKNRKVKDAQQVEPEGQEKPSPATVRSTDPVTTKETKAVSEMSTEIGTMISVSSAEYGTNAKESVTDYTTPSSSLPNTVATNNTKMEDTLVNNVPLPNTLPLPKRETIQQSSSLTSVPPTTFSLTFKMESARKAWENSPNVREKGSPVTSTAPPIATGVSSSASGPSTANYNSFSSASMPQIPVASVTPTASLSGAGTYTTSSLSTKSTTTSDPPNICKVKPQQLQTSSLPSASHFSQLSCMPSLIAQQQQNPQVYVSQSAAAQIPAFYMDTSHLFNTQHARLAPPSLAQQQGFQPGLSQPTSVQQIPIPIYAPLQGQHQAQLSLGAGPAVSQAQELFSSSLQPYRSQPAFMQSSLSQPSVVLSGTAIHNFPTVQHQELAKAQSGLAFQQTSNTQPIPILYEHQLGQASGLGGSQLIDTHLLQARANLTQASNLYSGQVQQPGQTNFYNTAQSPSALQQVTVPLPASQLSLPNFGSTGQPLIALPQTLQPPLQHTTPQAQAQSLSRPAQVSQPFRGLIPAGTQHSMIATTGKMSEMELKAFGSGIDIKPGTPPIAGRSTTPTSSPFRATSTSPNSQSSKMNSIVYQKQFQSAPATVRMTQPFPTQFAPQAKQRAEVLQSTQRFFSEQQQSKQIGGGKAQKVDSDSSKPPETLTDPPGVCQEKVEEKPPPAPSIATKPVRTGPIKPQAIKTEETKS

SEQ ID NO: 818681 - protein, 2556 aa, Homo sapiens
SQHFGRPRWAIRLRGLRGRGPPPSWASEPERPSILSASELKELDKFDNLDAEADEGWAGAQMEVDYTEQLNFSDDDEQGSNSPKENNSEDQGSKASENNENKKETDEVSNTKSSSQIPAQPSVAKVPYGKGPSFNQERGTSSHLPPPPKLLAQQHPPPDRQAVPGRPGPFPSKQQVADEDEIWKQRRRQQSEISAAVERARRTATEGEERRMEEQRKAACAEKLKRLDEKLGILEKQPSPEEIREREREKEREREKELEKEQEQEREKEREKDRERQQEKEKELEKEQEKQREMEKERKQEKEKELERQKEKEKELQKMKEQEKECELEKEREKLEEKIEPREPNLEPMVEKQESENSCNKEEEPVFTRQDSNRSEKEATPVVHETEPESGSQPRPAVLSGYFKQFQKSLPPRFQRQQEQMKQQQWQQQQQQGVLPQTVPSQPSSSTVPPPPHRPLYQPMQPHPQHLASMGFDPRWLMMQSYMDPRMMSGRPAMDIPPIHPGMIPPKPLMRRDQMEGSPNSSESFEHIARSARDHAISLSEPRMLWGSDPYPHAEPQQATTPKATEEPEDVRSEAALDQEQITAAYSVEHNQLEAHPKADFIRESSEAQVQKFLSRSVEDVRPHHTDANNQSACFEAPDQKTLSTPQEERISAVESQPSRKRSVSHGSNHTQKPDEQRSEPSAGIPKVTSRCIDSKEPIERPEEKPKKEGFIRSSEGPKPEKVYKSKSETRWGPRPSSNRREEVNDRPVRRSGPIKKPVLRDMKEEREQRKEKEGEKAEKVTEKVVVKPEKTEKKDLPPPPPPPQPPAPIQPQSVPPPIQPEAEKFPSTETATLAQKPSQDTEKPLEPVSTVQVEPAVKTVNQQTMAAPVVKEEKQPEKVISKDLVIERPRPDSRPAVKKESTLPPRTYWKEARERDWFPDQGYRGRGRGEYYSRGRSYRGSYGGRGRGGRGHTRDYPQYRDNKPRAEHIPSGPLRQREESETRSESSDFEVVPKRRRQRGSETDTDSEIHESASDKDSLSKGKLPKREERPENKKPVKPHSSFKPDNHVRIDNRLLEKPYVRDDDKAKPGFLPKGEPTRRGRGGTFRRGGRDPGGRPSRPSTLRRPAYRDNQWNPRQSEVPKPEDGEPPRRHEQFIPIAADKRPPKFERKFDPARERPRRQRPTRPPRQDKPPRFRRLREREAASKSNEVVAVPTNGTVNNVAQEPVNTLGDISGNKTPDLSNQNSSDQANEEWETASESSDFNERRERDEKKNADLNAQTVVKVGENVLPPKREIAKRSFSSQRPVDRQNRRGNNGPPKSGRNFSGPRNERRSGPPSKSGKRGPFDDQPAGTTGVDLINGSSAHHQEGVPNGTGQKNSKDCTGKKREDPKPGPKKPKEKVDALSQFDLNNYASVVIIDDHPEVTVIEDPQSNLNDDGFTEVVSKKQQKRLQDEERRKKEEQVIQVWNKKNANEKGRSQTSKLPPRFAKKQATGIQQAQSSASVPPLASAPLPPSTSASVPASTSAPLPATLTPVPASTSAPVPASTLAPVLASTSAPVPASPLAPVSASASVSASVPASTSAAAITSSSAPASAPAPTPILASVSTPASVTILASASIPILASALASTSAPTPAPAASSPAAPVITAPTIPASAPTASVPLAPASASAPAPAPTPVSAPNPAPPAPAQTQAQTHKPVQNPLQTTSQSSKQPPPSIRLPSAQTPNGTDYVASGKSIQTPQSHGTLTAELWDNKVAPPAVLNDISKKLGPISPPQPPSVSAWNKPLTSFGSAPSSEGAKNGQESGLEIGTDTIQFGAPASNGNENEVVPVLSEKSADKIPEPKEQRQKQPRAGPIKAQKLPDLSPVENKEHKPGPIGKERSLKNRKVKDAQQVEPEGQEKPSPATVRSTDPVTTKETKAVSEMSTEIGTMISVSSAEYGTNAKESVTDYTTPSSSLPNTVATNNTKMEDTLVNNVPLPNTLPLPKRETIQQSSSLTSVPPTTFSLTFKMESARKAWENSPNVREKGSPVTSTAPPIATGVSSSASGPSTANYNSFSSASMPQIPVASVTPTASLSGAGTYTTSSLSTKSTTTSDPPNICKVKPQQLQTSSLPSASHFSQLSCMPSLIAQQQQNPQVYVSQSAAAQIPAFYMDTSHLFNTQHARLAPPSLAQQQGFQPGLSQPTSVQQIPIPIYAPLQGQHQAQLSLGAGPAVSQAQELFSSSLQPYRSQPAFMQSSLSQPSVVLSGTAIHNFPTVQHQELAKAQSGLAFQQTSNTQPIPILYEHQLGQASGLGGSQLIDTHLLQARANLTQASNLYSGQVQQPGQTNFYNTAQSPSALQQVTVPLPASQLSLPNFGSTGQPLIALPQTLQPPLQHTTPQAQAQSLSRPAQVSQPFRGLIPAGTQHSMIATTGKMSEMELKAFGSGIDIKPGTPPIAGRSTTPTSSPFRATSTSPNSQSSKMNSIVYQKQFQSAPATVRMTQPFPTQFAPQAKQRAEVLQSTQRFFSEQQQSKQIGGGKAQKVDSDSSKPPETLTDPPGVCQEKVEEKPPPAPSIATKPVRTGPIKPQAIKTEETKS

SEQ ID NO: 818682 - protein, 2487 aa, Homo sapiens
SIAPISCGIMATERLANYTGGIYAEYQDTTYINHVVSVAGWGITDGRSLLQPSVAKVPYGKGPSFNQERGTSSHLPPPPKLLAQQHPPPDRQAVPGRPGPFPSKQQVADEDEIWKQRRRQQSEISAAVERARRTATEGEERRMEEQRKAACAEKLKRLDEKLGILEKQPSPEEIREREREKEREREKELEKEQEQEREKEREKDRERQQEKEKELEKEQEKQREMEKERKQEKEKELERQKEKEKELQKMKEQEKECELEKEREKLEEKIEPREPNLEPMVEKQESENSCNKEEEPVFTRQDSNRSEKEATPVVHETEPESGSQPRPAVLSGYFKQFQKSLPPRFQRQQEQMKQQQWQQQQQQGVLPQTVPSQPSSSTVPPPPHRPLYQPMQPHPQHLASMGFDPRWLMMQSYMDPRMMSGRPAMDIPPIHPGMIPPKPLMRRDQMEGSPNSSESFEHIARSARDHAISLSEPRMLWGSDPYPHAEPQQATTPKATEEPEDVRSEAALDQEQITAAYSVEHNQLEAHPKADFIRESSEAQVQKFLSRSVEDVRPHHTDANNQSACFEAPDQKTLSTPQEERISAVESQPSRKRSVSHGSNHTQKPDEQRSEPSAGIPKVTSRCIDSKEPIERPEEKPKKEGFIRSSEGPKPEKVYKSKSETRWGPRPSSNRREEVNDRPVRRSGPIKKPVLRDMKEEREQRKEKEGEKAEKVTEKVVVKPEKTEKKDLPPPPPPPQPPAPIQPQSVPPPIQPEAEKFPSTETATLAQKPSQDTEKPLEPVSTVQVEPAVKTVNQQTMAAPVVKEEKQPEKVISKDLVIERPRPDSRPAVKKESTLPPRTYWKEARERDWFPDQGYRGRGRGEYYSRGRSYRGSYGGRGRGGRGHTRDYPQYRDNKPRAEHIPSGPLRQREESETRSESSDFEVVPKRRRQRGSETDTDSEIHESASDKDSLSKGKLPKREERPENKKPVKPHSSFKPDNHVRIDNRLLEKPYVRDDDKAKPGFLPKGEPTRRGRGGTFRRGGRDPGGRPSRPSTLRRPAYRDNQWNPRQSEVPKPEDGEPPRRHEQFIPIAADKRPPKFERKFDPARERPRRQRPTRPPRQDKPPRFRRLREREAASKSNEVVAVPTNGTVNNVAQEPVNTLGDISGNKTPDLSNQNSSDQANEEWETASESSDFNERRERDEKKNADLNAQTVVKVGENVLPPKREIAKRSFSSQRPVDRQNRRGNNGPPKSGRNFSGPRNERRSGPPSKSGKRGPFDDQPAGTTGVDLINGSSAHHQEGVPNGTGQKNSKDCTGKKREDPKPGPKKPKEKVDALSQFDLNNYASVVIIDDHPEVTVIEDPQSNLNDDGFTEVVSKKQQKRLQDEERRKKEEQVIQVWNKKNANEKGRSQTSKLPPRFAKKQATGIQQAQSSASVPPLASAPLPPSTSASVPASTSAPLPATLTPVPASTSAPVPASTLAPVLASTSAPVPASPLAPVSASASVSASVPASTSAAAITSSSAPASAPAPTPILASVSTPASVTILASASIPILASALASTSAPTPAPAASSPAAPVITAPTIPASAPTASVPLAPASASAPAPAPTPVSAPNPAPPAPAQTQAQTHKPVQNPLQTTSQSSKQPPPSIRLPSAQTPNGTDYVASGKSIQTPQSHGTLTAELWDNKVAPPAVLNDISKKLGPISPPQPPSVSAWNKPLTSFGSAPSSEGAKNGQESGLEIGTDTIQFGAPASNGNENEVVPVLSEKSADKIPEPKEQRQKQPRAGPIKAQKLPDLSPVENKEHKPGPIGKERSLKNRKVKDAQQVEPEGQEKPSPATVRSTDPVTTKETKAVSEMSTEIGTMISVSSAEYGTNAKESVTDYTTPSSSLPNTVATNNTKMEDTLVNNVPLPNTLPLPKRETIQQSSSLTSVPPTTFSLTFKMESARKAWENSPNVREKGSPVTSTAPPIATGVSSSASGPSTANYNSFSSASMPQIPVASVTPTASLSGAGTYTTSSLSTKSTTTSDPPNICKVKPQQLQTSSLPSASHFSQLSCMPSLIAQQQQNPQVYVSQSAAAQIPAFYMDTSHLFNTQHARLAPPSLAQQQGFQPGLSQPTSVQQIPIPIYAPLQGQHQAQLSLGAGPAVSQAQELFSSSLQPYRSQPAFMQSSLSQPSVVLSGTAIHNFPTVQHQELAKAQSGLAFQQTSNTQPIPILYEHQLGQASGLGGSQLIDTHLLQARANLTQASNLYSGQVQQPGQTNFYNTAQSPSALQQVTVPLPASQLSLPNFGSTGQPLIALPQTLQPPLQHTTPQAQAQSLSRPAQVSQPFRGLIPAGTQHSMIATTGKMSEMELKAFGSGIDIKPGTPPIAGRSTTPTSSPFRATSTSPNSQSSKMNSIVYQKQFQSAPATVRMTQPFPTQFAPQAKQRAEVLQSTQRFFSEQQQSKQIGGGKAQKVDSDSSKPPETLTDPPGVCQEKVEEKPPPAPSIATKPVRTGPIKPQAIKTEETKS

SEQ ID NO: 818683 - protein, 2405 aa, Homo sapiens
MFQHPPPDRQAVPGRPGPFPSKQQVADEDEIWKQRRRQQSEISAAVERARRTATEGEERRMEEQRKAACAEKLKRLDEKLGILEKQPSPEEIREREREKEREREKELEKEQEQEREKEREKDRERQQEKEKELEKEQEKQREMEKERKQEKEKELERQKEKEKELQKMKEQEKECELEKEREKLEEKIEPREPNLEPMVEKQESENSCNKEEEPVFTRQDSNRSEKEATPVVHETEPESGSQPRPAVLSGYFKQFQKSLPPRFQRQQEQMKQQQWQQQQQQGVLPQTVPSQPSSSTVPPPPHRPLYQPMQPHPQHLASMGFDPRWLMMQSYMDPRMMSGRPAMDIPPIHPGMIPPKPLMRRDQMEGSPNSSESFEHIARSARDHAISLSEPRMLWGSDPYPHAEPQQATTPKATEEPEDVRSEAALDQEQITAAYSVEHNQLEAHPKADFIRESSEAQVQKFLSRSVEDVRPHHTDANNQSACFEAPDQKTLSTPQEERISAVESQPSRKRSVSHGSNHTQKPDEQRSEPSAGIPKVTSRCIDSKEPIERPEEKPKKEGFIRSSEGPKPEKVYKSKSETRWGPRPSSNRREEVNDRPVRRSGPIKKPVLRDMKEEREQRKEKEGEKAEKVTEKVVVKPEKTEKKDLPPPPPPPQPPAPIQPQSVPPPIQPEAEKFPSTETATLAQKPSQDTEKPLEPVSTVQVEPAVKTVNQQTMAAPVVKEEKQPEKVISKDLVIERPRPDSRPAVKKESTLPPRTYWKEARERDWFPDQGYRGRGRGEYYSRGRSYRGSYGGRGRGGRGHTRDYPQYRDNKPRAEHIPSGPLRQREESETRSESSDFEVVPKRRRQRGSETDTDSEIHESASDKDSLSKGKLPKREERPENKKPVKPHSSFKPDNHVRIDNRLLEKPYVRDDDKAKPGFLPKGEPTRRGRGGTFRRGGRDPGGRPSRPSTLRRPAYRDNQWNPRQSEVPKPEDGEPPRRHEQFIPIAADKRPPKFERKFDPARERPRRQRPTRPPRQDKPPRFRRLREREAASKSNEVVAVPTNGTVNNVAQEPVNTLGDISGNKTPDLSNQNSSDQANEEWETASESSDFNERRERDEKKNADLNAQTVVKVGENVLPPKREIAKRSFSSQRPVDRQNRRGNNGPPKSGRNFSGPRNERRSGPPSKSGKRGPFDDQPAGTTGVDLINGSSAHHQEGVPNGTGQKNSKDCTGKKREDPKPGPKKPKEKVDALSQFDLNNYASVVIIDDHPEVTVIEDPQSNLNDDGFTEVVSKKQQKRLQDEERRKKEEQVIQVWNKKNANEKGRSQTSKLPPRFAKKQATGIQQAQSSASVPPLASAPLPPSTSASVPASTSAPLPATLTPVPASTSAPVPASTLAPVLASTSAPVPASPLAPVSASASVSASVPASTSAAAITSSSAPASAPAPTPILASVSTPASVTILASASIPILASALASTSAPTPAPAASSPAAPVITAPTIPASAPTASVPLAPASASAPAPAPTPVSAPNPAPPAPAQTQAQTHKPVQNPLQTTSQSSKQPPPSIRLPSAQTPNGTDYVASGKSIQTPQSHGTLTAELWDNKVAPPAVLNDISKKLGPISPPQPPSVSAWNKPLTSFGSAPSSEGAKNGQESGLEIGTDTIQFGAPASNGNENEVVPVLSEKSADKIPEPKEQRQKQPRAGPIKAQKLPDLSPVENKEHKPGPIGKERSLKNRKVKDAQQVEPEGQEKPSPATVRSTDPVTTKETKAVSEMSTEIGTMISVSSAEYGTNAKESVTDYTTPSSSLPNTVATNNTKMEDTLVNNVPLPNTLPLPKRETIQQSSSLTSVPPTTFSLTFKMESARKAWENSPNVREKGSPVTSTAPPIATGVSSSASGPSTANYNSFSSASMPQIPVASVTPTASLSGAGTYTTSSLSTKSTTTSDPPNICKVKPQQLQTSSLPSASHFSQLSCMPSLIAQQQQNPQVYVSQSAAAQIPAFYMDTSHLFNTQHARLAPPSLAQQQGFQPGLSQPTSVQQIPIPIYAPLQGQHQAQLSLGAGPAVSQAQELFSSSLQPYRSQPAFMQSSLSQPSVVLSGTAIHNFPTVQHQELAKAQSGLAFQQTSNTQPIPILYEHQLGQASGLGGSQLIDTHLLQARANLTQASNLYSGQVQQPGQTNFYNTAQSPSALQQVTVPLPASQLSLPNFGSTGQPLIALPQTLQPPLQHTTPQAQAQSLSRPAQVSQPFRGLIPAGTQHSMIATTGKMSEMELKAFGSGIDIKPGTPPIAGRSTTPTSSPFRATSTSPNSQSSKMNSIVYQKQFQSAPATVRMTQPFPTQFAPQAKQRAEVLQSTQRFFSEQQQSKQIGGGKAQKVDSDSSKPPETLTDPPGVCQEKVEEKPPPAPSIATKPVRTGPIKPQAIKTEETKS

SEQ ID NO: 818684 - protein, 2752 aa, Homo sapiens
MSEKSGQSTKAKDGKKYATLSLFNTYKGKSLETQKTTVAARHGLQSLGKVGISRRMPPPANLPSLKAENKGNDPNVNIVPKDGTGWASKQEQHEEEKTPEVPPAQPKPGVAAPPEVAPAPKSWASNKQGGQGDGIQVNSQFQQEFPSLQAAGDQEKKEKETNDDNYGPGPSLRPPNVACWRDGGKAAGSPSSSDQDEKLPGQDESTAGTSEQNDILKVVEKRIACGPPQAKLNGQQAALASQYRAMMPPYMFQQYPRMTYPPLHGPMRFPPSLSETNKGLRGRGPPPSWASEPERPSILSASELKELDKFDNLDAEADEGWAGAQMEVDYTEQLNFSDDDEQGSNSPKENNSEDQGSKASENNENKKETDEVSNTKSSSQIPAQPSVAKVPYGKGPSFNQERGTSSHLPPPPKLLAQQHPPPDRQAVPGRPGPFPSKQQVADEDEIWKQRRRQQSEISAAVERARRTATEGEERRMEEQRKAACAEKLKRLDEKLGILEKQPSPEEIREREREKEREREKELEKEQEQEREKEREKDRERQQEKEKELEKEQEKQREMEKERKQEKEKELERQKEKEKELQKMKEQEKECELEKEREKLEEKIEPREPNLEPMVEKQESENSCNKEEEPVFTRQDSNRSEKEATPVVHETEPESGSQPRPAVLSGYFKQFQKSLPPRFQRQQEQMKQQQWQQQQQQGVLPQTVPSQPSSSTVPPPPHRPLYQPMQPHPQHLASMGFDPRWLMMQSYMDPRMMSGRPAMDIPPIHPGMIPPKPLMRRDQMEGSPNSSESFEHIARSARDHAISLSEPRMLWGSDPYPHAEPQQATTPKATEEPEDVRSEAALDQEQITAAYSVEHNQLEAHPKADFIRESSEAQVQKFLSRSVEDVRPHHTDANNQSACFEAPDQKTLSTPQEERISAVESQPSRKRSVSHGSNHTQKPDEQRSEPSAGIPKVTSRCIDSKEPIERPEEKPKKEGFIRSSEGPKPEKVYKSKSETRWGPRPSSNRREEVNDRPVRRSGPIKKPVLRDMKEEREQRKEKEGEKAEKVTEKVVVKPEKTEKKDLPPPPPPPQPPAPIQPQSVPPPIQPEAEKFPSTETATLAQKPSQDTEKPLEPVSTVQVEPAVKTVNQQTMAAPVVKEEKQPEKVISKDLVIERPRPDSRPAVKKESTLPPRTYWKEARERDWFPDQGYRGRGRGEYYSRGRSYRGSYGGRGRGGRGHTRDYPQYRDNKPRAEHIPSGPLRQREESETRSESSDFEVVPKRRRQRGSETDTDSEIHESASDKDSLSKGKLPKREERPENKKPVKPHSSFKPDNHVRIDNRLLEKPYVRDDDKAKPGFLPKGEPTRRGRGGTFRRGGRDPGGRPSRPSTLRRPAYRDNQWNPRQSEVPKPEDGEPPRRHEQFIPIAADKRPPKFERKFDPARERPRRQRPTRPPRQDKPPRFRRLREREAASKSNEVVAVPTNGTVNNVAQEPVNTLGDISGNKTPDLSNQNSSDQANEEWETASESSDFNERRERDEKKNADLNAQTVVKVGENVLPPKREIAKRSFSSQRPVDRQNRRGNNGPPKSGRNFSGPRNERRSGPPSKSGKRGPFDDQPAGTTGVDLINGSSAHHQEGVPNGTGQKNSKDCTGKKREDPKPGPKKPKEKVDALSQFDLNNYASVVIIDDHPEVTVIEDPQSNLNDDGFTEVVSKKQQKRLQDEERRKKEEQVIQVWNKKNANEKGRSQTSKLPPRFAKKQATGIQQAQSSASVPPLASAPLPPSTSASVPASTSAPLPATLTPVPASTSAPVPASTLAPVLASTSAPVPASPLAPVSASASVSASVPASTSAAAITSSSAPASAPAPTPILASVSTPASVTILASASIPILASALASTSAPTPAPAASSPAAPVITAPTIPASAPTASVPLAPASASAPAPAPTPVSAPNPAPPAPAQTQAQTHKPVQNPLQTTSQSSKQPPPSIRLPSAQTPNGTDYVASGKSIQTPQSHGTLTAELWDNKVAPPAVLNDISKKLGPISPPQPPSVSAWNKPLTSFGSAPSSEGAKNGQESGLEIGTDTIQFGAPASNGNENEVVPVLSEKSADKIPEPKEQRQKQPRAGPIKAQKLPDLSPVENKEHKPGPIGKERSLKNRKVKDAQQVEPEGQEKPSPATVRSTDPVTTKETKAVSEMSTEIGTMISVSSAEYGTNAKESVTDYTTPSSSLPNTVATNNTKMEDTLVNNVPLPNTLPLPKRETIQQSSSLTSVPPTTFSLTFKMESARKAWENSPNVREKGSPVTSTAPPIATGVSSSASGPSTANYNSFSSASMPQIPVASVTPTASLSGAGTYTTSSLSTKSTTTSDPPNICKVKPQQLQTSSLPSASHFSQLSCMPSLIAQQQQNPQVYVSQSAAAQIPAFYMDTSHLFNTQHARLAPPSLAQQQGFQPGLSQPTSVQQIPIPIYAPLQGQHQAQLSLGAGPAVSQAQELFSSSLQPYRSQPAFMQSSLSQPSVVLSGTAIHNFPTVQHQELAKAQSGLAFQQTSNTQPIPILYEHQLGQASGLGGSQLIDTHLLQARANLTQASNLYSGQVQQPGQTNFYNTAQSPSALQQVTVPLPASQLSLPNFGSTGQPLIALPQTLQPPLQHTTPQAQAQSLSRPAQVSQPFRGLIPAGTQHSMIATTGKMSEMELKAFGSGIDIKPGTPPIAGRSTTPTSSPFRATSTSPNSQSSKMNSIVYQKQFQSAPATVRMTQPFPTQFAPQKRAVGRGLSHKTFGPRCW

SEQ ID NO: 818685 - protein, 2783 aa, Homo sapiens
MSEKSGQSTKAKDGKKYATLSLFNTYKGKSLETQKTTVAARHGLQSLGKVGISRRMPPPANLPSLKAENKGNDPNVNIVPKDGTGWASKQEQHEEEKTPEVPPAQPKPGVAAPPEVAPAPKSWASNKQGGQGDGIQVNSQFQQEFPSLQAAGDQEKKEKETNDDNYGPGPSLRPPNVACWRDGGKAAGSPSSSDQDEKLPGQDESTAGTSEQNDILKVVEKRIACGPPQAKLNGQQAALASQYRAMMPPYMFQQYPRMTYPPLHGPMRFPPSLSETNKGLRGRGPPPSWASEPERPSILSASELKELDKFDNLDAEADEGWAGAQMEVDYTEQLNFSDDDEQGSNSPKENNSEDQGSKASENNENKKETDEVSNTKSSSQIPAQPSVAKVPYGKGPSFNQERGTSSHLPPPPKLLAQQHPPPDRQAVPGRPGPFPSKQQVADEDEIWKQRRRQQSEISAAVERARRTATEGEERRMEEQRKAACAEKLKRLDEKLGILEKQPSPEEIREREREGAGKTKRNGERKKARKRKRTRTAERKGKRTTKDERTEKECELEKEREKLEEKIEPREPNLEPMVEKQESENSCNKEEEPVFTRQDSNRSEKEATPVVHETEPESGSQPRPAVLSGYFKQFQKSLPPRFQRQQEQMKQQQWQQQQQQGVLPQTVPSQPSSSTVPPPPHRPLYQPMQPHPQHLASMGFDPRWLMMQSYMDPRMMSGRPAMDIPPIHPGMIPPKPLMRRDQMEGSPNSSESFEHIARSARDHAISLSEPRMLWGSDPYPHAEPQQATTPKATEEPEDVRSEAALDQEQITAAYSVEHNQLEAHPKADFIRESSEAQVQKFLSRSVEDVRPHHTDANNQSACFEAPDQKTLSTPQEERISAVESQPSRKRSVSHGSNHTQKPDEQRSEPSAGIPKVTSRCIDSKEPIERPEEKPKKEGFIRSSEGPKPEKVYKSKSETRWGPRPSSNRREEVNDRPVRRSGPIKKPVLRDMKEEREQRKEKEGEKAEKVTEKVVVKPEKTEKKDLPPPPPPPQPPAPIQPQSVPPPIQPEAEKFPSTETATLAQKPSQDTEKPLEPVSTVQVEPAVKTVNQQTMAAPVVKEEKQPEKVISKDLVIERPRPDSRPAVKKESTLPPRTYWKEARERDWFPDQGYRGRGRGEYYSRGRSYRGSYGGRGRGGRGHTRDYPQYRDNKPRAEHIPSGPLRQREESETRSESSDFEVVPKRRRQRGSETDTDSEIHESASDKDSLSKGKLPKREERPENKKPVKPHSSFKPDNHVRIDNRLLEKPYVRDDDKAKPGFLPKGEPTRRGRGGTFRRGGRDPGGRPSRPSTLRRPAYRDNQWNPRQSEVPKPEDGEPPRRHEQFIPIAADKRPPKFERKFDPARERPRRQRPTRPPRQDKPPRFRRLREREAASKSNEVVAVPTNGTVNNVAQEPVNTLGDISGNKTPDLSNQNSSDQANEEWETASESSDFNERRERDEKKNADLNAQTVVKVGENVLPPKREIAKRSFSSQRPVDRQNRRGNNGPPKSGRNFSGPRNERRSGPPSKSGKRGPFDDQPAGTTGVDLINGSSAHHQEGVPNGTGQKNSKDCTGKKREDPKPGPKKPKEKVDALSQFDLNNYASVVIIDDHPEVTVIEDPQSNLNDDGFTEVVSKKQQKRLQDEERRKKEEQVIQVWNKKNANEKGRSQTSKLPPRFAKKQATGIQQAQSSASVPPLASAPLPPSTSASVPASTSAPLPATLTPVPASTSAPVPASTLAPVLASTSAPVPASPLAPVSASASVSASVPASTSAAAITSSSAPASAPAPTPILASVSTPASVTILASASIPILASALASTSAPTPAPAASSPAAPVITAPTIPASAPTASVPLAPASASAPAPAPTPVSAPNPAPPAPAQTQAQTHKPVQNPLQTTSQSSKQPPPSIRLPSAQTPNGTDYVASGKSIQTPQSHGTLTAELWDNKVAPPAVLNDISKKLGPISPPQPPSVSAWNKPLTSFGSAPSSEGAKNGQESGLEIGTDTIQFGAPASNGNENEVVPVLSEKSADKIPEPKEQRQKQPRAGPIKAQKLPDLSPVENKEHKPGPIGKERSLKNRKVKDAQQVEPEGQEKPSPATVRSTDPVTTKETKAVSEMSTEIGTMISVSSAEYGTNAKESVTDYTTPSSSLPNTVATNNTKMEDTLVNNVPLPNTLPLPKRETIQQSSSLTSVPPTTFSLTFKMESARKAWENSPNVREKGSPVTSTAPPIATGVSSSASGPSTANYNSFSSASMPQIPVASVTPTASLSGAGTYTTSSLSTKSTTTSDPPNICKVKPQQLQTSSLPSASHFSQLSCMPSLIAQQQQNPQVYVSQSAAAQIPAFYMDTSHLFNTQHARLAPPSLAQQQGFQPGLSQPTSVQQIPIPIYAPLQGQHQAQLSLGAGPAVSQAQELFSSSLQPYRSQPAFMQSSLSQPSVVLSGTAIHNFPTVQHQELAKAQSGLAFQQTSNTQPIPILYEHQLGQASGLGGSQLIDTHLLQARANLTQASNLYSGQVQQPGQTNFYNTAQSPSALQQVTVPLPASQLSLPNFGSTGQPLIALPQTLQPPLQHTTPQAQAQSLSRPAQVSQPFRGLIPAGTQHSMIATTGKMSEMELKAFGSGIDIKPGTPPIAGRSTTPTSSPFRATSTSPNSQSSKMNSIVYQKQFQSAPATVRMTQPFPTQFAPQAKQRAEVLQSTQRFFSEQQQSKQIGGGKAQKVDSDSSKPPETLTDPPGVCQEKVEEKPPPAPSIATKPVRTGPIKPQAIKTEETKS

SEQ ID NO: 818686 - protein, 2500 aa, Homo sapiens
MSEKSGQSTKAKDGKKYATLSLFNTYKGKSLETQKTTVAARHGLQSLGKVGISRRMPPPANLPSLKAENKGNDPNVNIVPKDGTGWASKQEQHEEEKTPEVPPAQPKPGVAAPPEVAPAPKSWASNKQGGQGDGIQVNSQFQQEFPSLQAAGDQEKKEKETNDDNYGPGPSLRPPNVACWRDGGKAAGSPSSSDQDEKLPGQDESTAGTSEQNDILKVVEKRIACGPPQAKLNGQQAALASQYRAMMPPYMFQQYPRMTYPPLHGPMRFPPSLSETNKGLRGRGPPPSWASEPERPSILSASELKELDKFDNLDAEADEGWAGAQMEVDYTEQLNFSDDDEQGSNSPKENNSEDQGSKASENNENKKETDEVSNTKSSSQIPAQPSVAKVPYGKGPSFNQERGTSSHLPPPPKLLAQQHPPPDRQAVPGRPGPFPSKQQVADEDEIWKQRRRQQSEISAAVERARRTATEGEERRMEEQRKAACAEKLKRLDEKLGILEKQPSPEEIREREREKEREREKELEKEQEQEREKEREKDRERQQEKEKELEKEQEKQREMEKERKQEKEKELERQKEKEKELQKMKEQEKECELEKEREKLEEKIEPREPNLEPMVEKQESENSCNKEEEPVFTRQDSNRSEKEATPVVHETEPESGSQPRPAVLSGYFKQFQKSLPPRFQRQQEQMKQQQWQQQQQQGVLPQTVPSQPSSSTVPPPPHRPLYQPMQPHPQHLASMGFDPRWLMMQSYMDPRMMSGRPAMDIPPIHPGMIPPKPLMRRDQMEGSPNSSESFEHIARSARDHAISLSEPRMLWGSDPYPHAEPQQATTPKATEEPEDVRSEAALDQEQITAAYSVEHNQLEAHPKADFIRESSEAQVQKFLSRSVEDVRPHHTDANNQSACFEAPDQKTLSTPQEERISAVESQPSRKRSVSHGSNHTQKPDEQRSEPSAGIPKVTSRCIDSKEPIERPEEKPKKEGFIRSSEGPKPEKVYKSKSETRWGPRPSSNRREEVNDRPVRRSGPIKKPVLRDMKEEREQRKEKEGEKAEKVTEKVVVKPEKTEKKDLPPPPPPPQPPAPIQPQSVPPPIQPEAEKFPSTETATLAQKPSQDTEKPLEPVSTVQVEPAVKTVNQQTMAAPVVKEEKQPEKVISKDLVIERPRPDSRPAVKKESTLPPRTYWKEARERDWFPDQGYRGRGRGEYYSRGRSYRGSYGGRGRGGRGHTRDYPQYRDNKPRAEHIPSGPLRQREESETRSESSDFEVVPKRRRQRGSETDTDSEIHESASDKDSLSKGKLPKREERPENKKPVKPHSSFKPDNHVRIDNRLLEKPYVRDDDKAKPGFLPKGEPTRRGRGGTFRRGGRDPGGRPSRPSTLRRPAYRDNQWNPRQSEVPKPEDGEPPRRHEQFIPIAADKRPPKFERKFDPARERPRRQRPTRPPRQDKPPRFRRLREREAASKSNEVVAVPTNGTVNNVAQEPVNTLGDISGNKTPDLSNQNSSDQANEEWETASESSDFNERRERDEKKNADLNAQTVVKVGENVLPPKREIAKRSFSSQRPVDRQNRRGNNGPPKSGRNFSGPRNERRSGPPSKSGKRGPFDDQPAGTTGVDLINGSSAHHQEGVPNGTGQKNSKDCTGKKREDPKPGPKKPKEKVDALSQFDLNNYASVVIIDDHPEVTVIEDPQSNLNDDGFTEVVSKKQQKRLQDEERRKKEEQVIQVWNKKNANEKGRSQTSKLPPRFAKKQATGIQQAQSSASVPPLASAPLPPSTSASVPASTSAPLPATLTPVPASTSAPVPASTLAPVLASTSAPVPASPLAPVSASASVSASVPASTSAAAITSSSAPASAPAPTPILASVSTPASVTILASASIPILASALASTSAPTPAPAASSPAAPVITAPTIPASAPTASVPLAPASASAPAPAPTPVSAPNPAPPAPAQTQAQTHKPVQNPLQTTSQSSKQPPPSIRLPSAQTPNGTDYVASGKSIQTPQSHGTLTAELWDNKVAPPAVLNDISKKLGPISPPQPPSVSAWNKPLTSFGSAPSSEGAKNGQESGLEIGTDTIQFGAPASNGNENEVVPVLSEKSADKIPEPKEQRQKQPRAGPIKAQKLPDLSPVENKEHKPGPIGKERSLKNRKVKDAQQVEPEGQEKPSPATVRSTDPVTTKETKAVSEMSTEIGTMISVSSAEYGTNAKESVTDYTTPSSSLPNTVATNNTKMEDTLVNNVPLPNTLPLPKRETIQQSSSLTSVPPTTFSLTFKMESARKAWENSPNVREKGSPVTSTAPPIATGVSSSASGPSTANYNSFSSASMPQIPVASVTPTASLSGAGTYTTSSLSTKSTTTSDPPNICKVKPQQLQTSSLPSASHFSQLSCMPSLIAQQQQNPQVYVSQSAAAQIPAFYMDTSHLFNTQHARLAPPSLAQQQGFQPGLSQPTSVQQIPIPIYAPLQGQHQAQLSLGAGPAVSQAQELFSSSLQPYRSQPAFMQSSLSQPSVVLSVRSHRDPLDTT

SEQ ID NO: 818687 - protein, 2438 aa, Homo sapiens
INEKRPDGRVTDSSESFEHIARSARDHAISLSEPRMLWGSDPYPHAEPQQATTPKATEEPEDVRSEAALDQEQITAAYSVEHNQLEAHPKADFIRESSEAQVQKFLSRSVEDVRPHHTDANNQSACFEAPDQKTLSTPQEERISAVESQPSRKRSVSHGSNHTQKPDEGAGKTKRNGERKKARKRKRTRTAERKGKRTTKDERTEKECELEKEREKLEEKIEPREPNLEPMVEKQESENSCNKEEEPVFTRQDSNRSEKEATPVVHETEPESGSQPRPAVLSGYFKQFQKSLPPRFQRQQEQMKQQQWQQQQQQGVLPQTVPSQPSSSTVPPPPHRPLYQPMQPHPQHLASMGFDPRWLMMQSYMDPRMMSGRPAMDIPPIHPGMIPPKPLMRRDQMEGSPNSSESFEHIARSARDHAISLSEPRMLWGSDPYPHAEPQQATTPKATEEPEDVRSEAALDQEQITAAYSVEHNQLEAHPKADFIRESSEAQVQKFLSRSVEDVRPHHTDANNQSACFEAPDQKTLSTPQEERISAVESQPSRKRSVSHGSNHTQKPDEQRSEPSAGIPKVTSRCIDSKEPIERPEEKPKKEGFIRSSEGPKPEKVYKSKSETRWGPRPSSNRREEVNDRPVRRSGPIKKPVLRDMKEEREQRKEKEGEKAEKVTEKVVVKPEKTEKKDLPPPPPPPQPPAPIQPQSVPPPIQPEAEKFPSTETATLAQKPSQDTEKPLEPVSTVQVEPAVKTVNQQTMAAPVVKEEKQPEKVISKDLVIERPRPDSRPAVKKESTLPPRTYWKEARERDWFPDQGYRGRGRGEYYSRGRSYRGSYGGRGRGGRGHTRDYPQYRDNKPRAEHIPSGPLRQREESETRSESSDFEVVPKRRRQRGSETDTDSEIHESASDKDSLSKGKLPKREERPENKKPVKPHSSFKPDNHVRIDNRLLEKPYVRDDDKAKPGFLPKGEPTRRGRGGTFRRGGRDPGGRPSRPSTLRRPAYRDNQWNPRQSEVPKPEDGEPPRRHEQFIPIAADKRPPKFERKFDPARERPRRQRPTRPPRQDKPPRFRRLREREAASKSNEVVAVPTNGTVNNVAQEPVNTLGDISGNKTPDLSNQNSSDQANEEWETASESSDFNERRERDEKKNADLNAQTVVKVGENVLPPKREIAKRSFSSQRPVDRQNRRGNNGPPKSGRNFSGPRNERRSGPPSKSGKRGPFDDQPAGTTGVDLINGSSAHHQEGVPNGTGQKNSKDCTGKKREDPKPGPKKPKEKVDALSQFDLNNYASVVIIDDHPEVTVIEDPQSNLNDDGFTEVVSKKQQKRLQDEERRKKEEQVIQVWNKKNANEKGRSQTSKLPPRFAKKQATGIQQAQSSASVPPLASAPLPPSTSASVPASTSAPLPATLTPVPASTSAPVPASTLAPVLASTSAPVPASPLAPVSASASVSASVPASTSAAAITSSSAPASAPAPTPILASVSTPASVTILASASIPILASALASTSAPTPAPAASSPAAPVITAPTIPASAPTASVPLAPASASAPAPAPTPVSAPNPAPPAPAQTQAQTHKPVQNPLQTTSQSSKQPPPSIRLPSAQTPNGTDYVASGKSIQTPQSHGTLTAELWDNKVAPPAVLNDISKKLGPISPPQPPSVSAWNKPLTSFGSAPSSEGAKNGQESGLEIGTDTIQFGAPASNGNENEVVPVLSEKSADKIPEPKEQRQKQPRAGPIKAQKLPDLSPVENKEHKPGPIGKERSLKNRKVKDAQQVEPEGQEKPSPATVRSTDPVTTKETKAVSEMSTEIGTMISVSSAEYGTNAKESVTDYTTPSSSLPNTVATNNTKMEDTLVNNVPLPNTLPLPKRETIQQSSSLTSVPPTTFSLTFKMESARKAWENSPNVREKGSPVTSTAPPIATGVSSSASGPSTANYNSFSSASMPQIPVASVTPTASLSGAGTYTTSSLSTKSTTTSDPPNICKVKPQQLQTSSLPSASHFSQLSCMPSLIAQQQQNPQVYVSQSAAAQIPAFYMDTSHLFNTQHARLAPPSLAQQQGFQPGLSQPTSVQQIPIPIYAPLQGQHQAQLSLGAGPAVSQAQELFSSSLQPYRSQPAFMQSSLSQPSVVLSGTAIHNFPTVQHQELAKAQSGLAFQQTSNTQPIPILYEHQLGQASGLGGSQLIDTHLLQARANLTQASNLYSGQVQQPGQTNFYNTAQSPSALQQVTVPLPASQLSLPNFGSTGQPLIALPQTLQPPLQHTTPQAQAQSLSRPAQVSQPFRGLIPAGTQHSMIATTGKMSEMELKAFGSGIDIKPGTPPIAGRSTTPTSSPFRATSTSPNSQSSKMNSIVYQKQFQSAPATVRMTQPFPTQFAPQAKQRAEVLQSTQRFFSEQQQSKQIGGGKAQKVDSDSSKPPETLTDPPGVCQEKVEEKPPPAPSIATKPVRTGPIKPQAIKTEETKS

SEQ ID NO: 818688 - protein, 2263 aa, Homo sapiens; identical to SEQ ID NO: 818658

SEQ ID NO: 818689 - protein, 1212 aa, Homo sapiens
MSEKSGQSTKAKDGKKYATLSLFNTYKGKSLETQKTTVAARHGLQSLGKVGISRRMPPPANLPSLKAENKGNDPNVNIVPKDGTGWASKQEQHEEEKTPEVPPAQPKPGVAAPPEVAPAPKSWASNKQGGQGDGIQVNSQFQQEFPSLQAAGDQEKKEKETNDDNYGPGPSLRPPNVACWRDGGKAAGSPSSSDQDEKLPGQDESTAGTSEQNDILKVVEKRIACGPPQAKLNGQQAALASQYRAMMPPYMFQQYPRMTYPPLHGPMRFPPSLSETNKGLRGRGPPPSWASEPERPSILSASELKELDKFDNLDAEADEGWAGAQMEVDYTEQLNFSDDDEQGSNSPKENNSEDQGSKASENNENKKETDEVSNTKSSSQIPAQPSVAKVPYGKGPSFNQERGTSSHLPPPPKLLAQQHPPPDRQAVPGRPGPFPSKQQVADEDEIWKQRRRQQSEISAAVERARRTATEGEERRMEEQRKAACAEKLKRLDEKLGILEKQPSPEEIREREREKEREREKELEKEQEQEREKEREKDRERQQEKEKELEKEQEKQREMEKERKQEKEKELERQKEKEKELQKMKEQEKECELEKEREKLEEKIEPREPNLEPMVEKQESENSCNKEEEPVFTRQDSNRSEKEATPVVHETEPESGSQPRPAVLSGYFKQFQKSLPPRFQRQQEQMKQQQWQQQQQQGVLPQTVPSQPSSSTVPPPPHRPLYQPMQPHPQHLASMGFDPRWLMMQSYMDPRMMSGRPAMDIPPIHPGMIPPKPLMRRDQMEGSPNSSESFEHIARSARDHAISLSEPRMLWGSDPYPHAEPQQATTPKATEEPEDVRSEAALDQEQITAAYSVEHNQLEAHPKADFIRESSEAQVQKFLSRSVEDVRPHHTDANNQSACFEAPDQKTLSTPQEERISAVESQPSRKRSVSHGSNHTQKPDEQRSEPSAGIPKVTSRCIDSKEPIERPEEKPKKEGFIRSSEGPKPEKVYKSKSETRWGPRPSSNRREEVNDRPVRRSGPIKKPVLRDMKEEREQRKEKEGEKAEKVTEKVVVKPEKTEKKDLPPPPPPPQPPAPIQPQSVPPPIQPEAEKFPSTETATLAQKPSQDTEKPLEPVSTVQVEPAVKTVNQQTMAAPVVKEEKQTPEEIREREREKEREREKVLEKEQAQEREGDASESELKQQEKEKELEKEQEKQREMEKERKQEKEKELERQK

SEQ ID NO: 818690 - protein, 1065 aa, Homo sapiens
MSEKSGQSTKAKDGKKYATLSLFNTYKGKSLETQKTTVAARHGLQSLGKVGISRRMPPPANLPSLKAENKGNDPNVNIVPKDGTGWASKQEQHEEEKTPEVPPAQPKPGVAAPPEVAPAPKSWASNKQGGQGDGIQVNSQFQQEFPSLQAAGDQEKKEKETNDDNYGPGPSLRPPNVACWRDGGKAAGSPSSSDQDEKLPGQDESTAGTSEQNDILKVVEKRIACGPPQAKLNGQQAALASQYRAMMPPYMFQQYPRMTYPPLHGPMRFPPSLSETNKGLRGRGPPPSWASEPERPSILSASELKELDKFDNLDAEADEGWAGAQMEVDYTEQLNFSDDDEQGSNSPKENNSEDQGSKASENNENKKETDEVSNTKSSSQIPAQPSVAKVPYGKGPSFNQERGTSSHLPPPPKLLAQQHPPPDRQAVPGRPGPFPSKQQVADEDEIWKQRRRQQSEISAAVERARRTATEGEERRMEEQRKAACAEKLKRLDEKLGILEKQPSPEEIREREREKEREREKELEKEQEQEREKEREKDRERQQEKEKELEKEQEKQREMEKERKQEKEKELERQKEKEKELQKMKEQEKECELEKEREKLEEKIEPREPNLEPMVEKQESENSCNKEEEPVFTRQDSNRSEKEATPVVHETEPESGSQPRPAVLSGYFKQFQKSLPPRFQRQQEQMKQQQWQQQQQQGVLPQTVPSQPSSSTVPPPPHRPLYQPMQPHPQHLASMGFDPRWLMMQSYMDPRMMSGRPAMDIPPIHPGMIPPKPLMRRDQMEGSPNSSESFEHIARSARDHAISLSEPRMLWGSDPYPHAEPQQATTPKATEEPEDVRSEAALDQEQITAAYSVEHNQLEAHPKADFIRESSEAQVQKFLSRSVEDVRPHHTDANNQSACFEAPDQKTLSTPQEERISAVESQPSRKRSVSHGSNHTQKPDEQRSEPSAGIPKVTSRCIDSKEPIERPEEKPKKEGFIRSSEGPKPEKVYKSKSETRWGPRPSSNRREEVNDRPVRRSGPIKKPVLRDMKEEREQRKEKELEKEQEKQREMEKERKQEKEKELERQK

SEQ ID NO: 818691 - protein, 1046 aa, Homo sapiens
MSEKSGQSTKAKDGKKYATLSLFNTYKGKSLETQKTTVAARHGLQSLGKVGISRRMPPPANLPSLKAENKGNDPNVNIVPKDGTGWASKQEQHEEEKTPEVPPAQPKPGVAAPPEVAPAPKSWASNKQGGQGDGIQVNSQFQQEFPSLQAAGDQEKKEKETNDDNYGPGPSLRPPNVACWRDGGKAAGSPSSSDQDEKLPGQDESTAGTSEQNDILKVVEKRIACGPPQAKLNGQQAALASQYRAMMPPYMFQQYPRMTYPPLHGPMRFPPSLSETNKGLRGRGPPPSWASEPERPSILSASELKELDKFDNLDAEADEGWAGAQMEVDYTEQLNFSDDDEQGSNSPKENNSEDQGSKASENNENKKETDEVSNTKSSSQIPAQPSVAKVPYGKGPSFNQERGTSSHLPPPPKLLAQQHPPPDRQAVPGRPGPFPSKQQVADEDEIWKQRRRQQSEISAAVERARRTATEGEERRMEEQRKAACAEKLKRLDEKLGILEKQPSPEEIREREREKEREREKELEKEQEQEREKEREKDRERQQEKEKELEKEQEKQREMEKERKQEKEKELERQKEKEKELQKMKEQEKECELEKEREKLEEKIEPREPNLEPMVEKQESENSCNKEEEPVFTRQDSNRSEKEATPVVHETEPESGSQPRPAVLSGYFKQFQKSLPPRFQRQQEQMKQQQWQQQQQQGVLPQTVPSQPSSSTVPPPPHRPLYQPMQPHPQHLASMGFDPRWLMMQSYMDPRMMSGRPAMDIPPIHPGMIPPKPLMRRDQMEGSPNSSESFEHIARSARDHAISLSEPRMLWGSDPYPHAEPQQATTPKATEEPEDVRSEAALDQEQITAAYSVEHNQLEAHPKADFIRESSEAQVQKFLSRSVEDVRPHHTDANNQSACFEAPDQKTLSTPQEERISAVESQPSRKRSVSHGSNHTQKPDEQRSEPSAGIPKVTSRCIDSKEPIERPEEKPKKEGFIRSSEGPKPEKVYKSKSETRWGPRPSSNRREEVNDRPVRRSGPIKKPVLRDMKEEREQRKEKEESKKKKKN

SEQ ID NO: 818692 - protein, 654 aa, Homo sapiens; identical to SEQ ID NO: 818669

SEQ ID NO: 818693 - protein, 873 aa, Homo sapiens
MDQPLSVDEEGLVLLEQKLSEPKTQINSQLRPMMSELEERARQQRGHLHLLETSIDGILADVKKLGPISPPQPPSVSAWNKPLTSFGSAPSSEGAKNGQESGLEIGTDTIQFGAPASNGNENEVVPVLSEKSADKIPEPKEQRQKQPRAGPIKAQKLPDLSPVENKEHKPGPIGKERSLKNRKVKDAQQVEPEGQEKPSPATVRSTDPVTTKETKAVSEMSTEIGTMISVSSAEYGTNAKESVTDYTTPSSSLPNTVATNNTKMEDTLVNNVPLPNTLPLPKRETIQQSSSLTSVPPTTFSLTFKMESARKAWENSPNVREKGSPVTSTAPPIATGVSSSASGPSTANYNSFSSASMPQIPVASVTPTASLSGAGTYTTSSLSTKSTTTSDPPNICKVKPQQLQTSSLPSASHFSQLSCMPSLIAQQQQNPQVYVSQSAAAQIPAFYMDTSHLFNTQHARLAPPSLAQQQGFQPGLSQPTSVQQIPIPIYAPLQGQHQAQLSLGAGPAVSQAQELFSSSLQPYRSQPAFMQSSLSQPSVVLSGTAIHNFPTVQHQELAKAQSGLAFQQTSNTQPIPILYEHQLGQASGLGGSQLIDTHLLQARANLTQASNLYSGQVQQPGQTNFYNTAQSPSALQQVTVPLPASQLSLPNFGSTGQPLIALPQTLQPPLQHTTPQAQAQSLSRPAQVSQPFRGLIPAGTQHSMIATTGKMSEMELKAFGSGIDIKPGTPPIAGRSTTPTSSPFRATSTSPNSQSSKMNSIVYQKQFQSAPATVRMTQPFPTQFAPQAKQRAEVLQSTQRFFSEQQQSKQIGGGKAQKVDSDSSKPPETLTDPPGVCQEKVEEKPPPAPSIATKPVRTGPIKPQAIKTEETKS

SEQ ID NO: 818694 - protein, 363 aa, Homo sapiens
MSEKSGQSTKAKDGKKYATLSLFNTYKGKSLETQKTTVAARHGLQSLGKVGISRRMPPPANLPSLKAENKGNDPNVNIVPKDGTGWASKQEQHEEEKTPEVPPAQPKPGVAAPPEVAPAPKSWASNKQGGQGDGIQVNSQFQQEFPSLQAAGDQEKKEKETNDDNYGPGPSLRPPNVACWRDGGKAAGSPSSSDQDEKLPGQDESTAGTSEQNDILKVVEKRIACGPPQAKLNGQQAALASQYRAMMPPYMFQQYPRMTYPPLHGPMRFPPSLSETNKGLRGRGPPPSWASEPERPSILSASELKELDKFDNLDAEADEGWAGAQMEVDYTEQLNFSDDDEQGSNSPKENNSEDQGFKTENKT

SEQ ID NO: 818695 - protein, 233 aa, Homo sapiens [sequence omitted]

SEQ ID NO: 818696 - protein, 452 aa, Homo sapiens
SYSNNKSELWVSLIEKAYMKVMGGYDFPGSNSNIDLHALTGWIPERIAMHSDSQTFSKDNSFRMLYQRFHKGDVLITASTGMMTEAEGEKWGLVPTHAYAVLDIREFKGLRFIQLKNPWSHLRWKGRYSENDVKNWTPELQKYLNFDPRTAQKIDNGIFWISWDDLCQYYDVIYLSWNPGLFKESTCIHSTWDAKQGPVKDAYSLANNPQYKLEVQCPQGGAAVWVLLSRHITDKDDFANNREFITMVVYKTDGKKVYYPADPPPYIDGIRINSPHYLTKIKLTTPGTHTFTLVVSQYEKQNTIHYTVRVYSACSFTFSKIPSPYTLSKRINGKWSGQSAGGCGNFQETHKNNPIYQFHIEKTGPLLIELRGPRQYSVGFEVVTVSTLGDPGPHGFLRKSSGDYRCGFCYLELENIPSGIFNIIPSTFLPKQEGPFFLDFNSIIPIKITQLQ

SEQ ID NO: 818697 - protein, 282 aa, Homo sapiens
SYSNNKSELWVSLIEKAYMKVMGGYDFPGSNSNIDLHALTGWIPERIAMHSDSQTFSKDNSFRMLYQRFHKGDVLITASTGMMTEAEGEKWGLVPTHAYAVLDIREFKGLRFIQLKNPWSHLRWKGRYSENDVKNWTPELQKYLNFDPRTAQKIDNGIFWISWDDLCQYYDVIYLSWNPGLFKESTCIHSTWDAKQGPVKDAYSLANNPQYKLEVQCPQGGAAVWVLLSRHITDKDDFANNREFITMVVYKTDGKKVYYPGIFSMQLYFFKDSFTIHLIKTD

SEQ ID NO: 818698 - protein, 340 aa, Homo sapiens
SYSNNKSELWVSLIEKAYMKVMGGYDFPGSNSNIDLHALTGWIPERIAMHSDSQTFSKDNSFRMLYQRFHKGDVLITASTGMMTEAEGEKWGLVPTHAYAVLDIREFKGLRFIQLKNPWSHLRWKGRYSENDVKNWTPELQKYLNFDPRTAQKIDNGIFWISWDDLCQYYDVIYLSWNPGLFKEINMYSQDDFANNREFITMVVYKTDGKKVYYPADPPPYIDGIRINSPHYLTKIKLTTPGTHTFTLVVSQYEKQNTIHYTVRVYSACSFTFSKIPSPYTLSKRINGKWSGQSAGGCGNFQETHKNNPIYQFHIEKTGPLLIELRGPRRSWSPWLSEEI

SEQ ID NO: 818699 - protein, 452 aa, Homo sapiens; identical to SEQ ID NO: 818696

SEQ ID NO: 818700 - protein, 474 aa, Homo sapiens
SYSNNKSELWVSLIEKAYMKVMGGYDFPGSNSNIDLHALTGWIPERIAMHSDSQTFSKDNSFRMLYQRFHKGDVLITASTGMMTEAEGEKWGLVPTHAYAVLDIREFKGLRFIQLKNPWSHLRWKGRYSENDVKNWTPELQKYLNFDPRTAQKIDNGIFWISWDDLCQYYDVIYLSWNPGLFKESTCIHSTWDAKQGPVKDAYSLANNPQYKLEVQCPQGGAAVWVLLSRHITDKDDFANNREFITMVVYKTDGKKVYYPADPPPYIDGIRINSPHYLTKIKLTTPGTHTFTLVVSQYEKQNTIHYTVRVYSACSFTFSKIPSPYTLSKRINGKWSGQSAGGCGNFQETHKNNPIYQFHIEKTGPLLIELRGPRQYSVGFEVVTVSTLGDPGPHGFLRKSSGDYRCGFCYLELENIPSGIFNIIPSTFLPKQEGPFFLDFNSIIAHRGLVVITTSLPVRFAANALAWYTLFPGK

SEQ ID NO: 818701 - protein, 190 aa, Homo sapiens
SYSNNKSELWVSLIEKAYMKVMGGYDFPGSNSNIDLHALTGWIPERIAMHSDSQTFSKDNSFRMLYQRFHKGDVLITASTGMMTEAEGEKWGLVPTHAYAVLDIREFKGLRFIQLKNPWSHLRWKGRYSENDVKNWTPELQKYLNFDPRTAQKIDNGIFWISWDDLCQYYDVIYLSWNPGLFKESTCIHR

SEQ ID NO: 818702 - protein, 1030 aa, Homo sapiens
TSLRKRCCPLAISRPGGRDWNSGESFLFCLRVSLHLAISVLQRAGKALRETAYPPPAAGSALQLCAPENCQRSWVLARRDGPIRRSLALCSFRPLTRRRCGSDGGVGGGRGCRGLGRLGWQLRLVAMEWGSESAAVRRHRVGVERREGAAAAPPPEREARAQEPLVDGCSGGGRTRKRSPGGSGGASRGAGTGLSEVRAALGLALYLIALRTLVQLSLQQLVLRGAAGHRGEFDALQARDYLEHITSIGPRTTGSPENEILTVHYLLEQIKLIEVQSNSLHKISVDVQRPTGSFSIDFLGGFTSYYDNITNVVVKLEPRDGAQHAVLANCHFDSVANSPGASDDAVSCSVMLEVLRVLSTSSEALHHAVIFLFNGAEENVLQASHGFITQHPWASLIRAFINLEAAGVGGKELVFQTGPENPWLVQAYVSAAKHPFASVVAQEVFQSGIIPSDTDFRIYRDFGNIPGIDLAFIENGYIYHTKYDTADRILTDSIQRAGDNILAVLKHLATSDMLAAASKYRHGNMVFFDVLGLFVIAYPSRIGSIINYMVVMGVVLYLGKKFLQPKHKTGNYKKDFLCGLGITLISWFTSLVTVLIIAVFISLIGQSLSWYNHFYVSVCLYGTATVAKIILIHTLAKRFYYMNASAQYLGEVFFDISLFVHCCFLVTLTYQGLCSAFISAVWVAFPLLTKLCVHKDFKQHGAQGKFIAFYLLGMFIPYLYALYLIWAVFEMFTPILGRSGSEIPPDVVLASILAGCTMILSSYFINFIYLAKSTKKTMLTLTLVCAITFLLVCSGTFFPYSSNPANPKPKRVFLQHMTRTFHDLEGNAVKRDSGIWINGFDYTGISHITPHIPEINDSIRAHCEENAPLCGFPWYLPVHFLIRKNWYLPAPEVSPRNPPHFRLISKEQTPWDSIKLTFEATGPSHMSFYVRAHKGSTLSQWSLGNGTPVTSKGGDYFVFYSHGLQASAWQFWIEVQVSEEHPEGMVTVAIAAHYLSGEDKRSPQLDALKEKFPDWTFPSAWVCTYDLFVF

SEQ ID NO: 818703 - protein, 1109 aa, Homo sapiens
TSLRKRCCPLAISRPGGRDWNSGESFLFCLRVSLHLAISVLQRAGKALRETAYPPPAAGSALQLCAPENCQRSWVLARRDGPIRRSLALCSFRPLTRRRCGSDGGVGGGRGCRGLGRLGWQLRLVAMEWGSESAAVRRHRVGVERREGAAAAPPPEREARAQEPLVDGCSGGGRTRKRSPGGSGGASRGAGTGLSEVRAALGLALYLIALRTLVQLSLQQLVLRGAAGHRGEFDALQARYRPLPPGTARASVCGSCAGSGAPHLCAPAPAGPLGLADPSQAARGVEVTLLVLLLGSELPGLGACLSPVKLVVQIGVARDYLEHITSIGPRTTGSPENEILTVHYLLEQIKLIEVQSNSLHKISVDVQRPTGSFSIDFLGGFTSYYDNITNVVVKLEPRDGAQHAVLANCHFDSVANSPGASDDAVSCSVMLEVLRVLSTSSEALHHAVIFLFNGAEENVLQASHGFITQHPWASLIRAFINLEAAGVGGKELVFQTGPENPWLVQAYVSAAKHPFASVVAQEVFQSGIIPSDTDFRIYRDFGNIPGIDLAFIENGYIYHTKYDTADRILTDSIQRAGDNILAVLKHLATSDMLAAASKYRHGNMVFFDVLGLFVIAYPSRIGSIINYMVVMGVVLYLGKKFLQPKHKTGNYKKDFLCGLGITLISWFTSLVTVLIIAVFISLIGQSLSWYNHFYVSVCLYGTATVAKIILIHTLAKRFYYMNASAQYLGEVFFDISLFVHCCFLVTLTYQGLCSAFISAVWVAFPLLTKLCVHKDFKQHGAQGKFIAFYLLGMFIPYLYALYLIWAVFEMFTPILGRSGSEIPPDVVLASILAGCTMILSSYFINFIYLAKSTKKTMLTLTLVCAITFLLVCSGTFFPYSSNPANPKPKRVFLQHMTRTFHDLEGNAVKRDSGIWINGFDYTGISHITPHIPEINDSIRAHCEENAPLCGFPWYLPVHFLIRKNWYLPAPEVSPRNPPHFRLISKEQTPWDSIKLTFEATGPSHMSFYVRAHKGSTLSQWSLGNGTPVTSKGGDYFVFYSHGLQASAWQFWIEVQVSEEHPEGMVTVAIAAHYLSGEDKRSPQLDALKEKFPDWTFPSAWVCTYDLFVF

SEQ ID NO: 818704 - protein, 1030 aa, Homo sapiens; identical to SEQ ID NO: 818702

SEQ ID NO: 818705 - protein, 1030 aa, Homo sapiens; identical to SEQ ID NO: 818702

SEQ ID NO: 818706 - protein, 199 aa, Homo sapiens
  misc_feature (167)..(167): Xaa can be any naturally occurring amino acid
  misc_feature (182)..(182): Xaa can be any naturally occurring amino acid
SQQRRRKQWRPQLGLGLRAASEGGEGSHWIQSLPSKQPRLGAQCLCPSSTSALAERSRAVGGGGMCSEKRQKNDETDDELSLDDLIDRERNRLGTNATKITLESVLARIQGTRMESTNVSDREVIESRTELVNDDDEESDDTNYTQEHAVDESVNQREEMNRVNADXRRDADETLMTVTSLXQSSHILQIKMKRDKSSY

SEQ ID NO: 818707 - protein, 522 aa, Homo sapiens
MSLLNCENSCGSSQSESDCCVAMASSCSAVTKDDSVGGTASTGNLSSSFMEEIQGYDVEFDPPLESKYECPICLMALREAVQTPCGHRFCKACIIKSIRDAGHKCPVDNEILLENQLFPDNFAKREILSLMVKCPNEGCLHKMELRHLEDHQAHCEFALMDCPQCQRPFQKFHINIHILKDCPRRQVSCDNCAASMAFEDKEIHDQNCPLANVICEYCNTILIREQMPNHYDLDCPTAPIPCTFSTFGCHEKMQRNHLARHLQENTQSHMRMLAQAVHSLSVIPDSGYISEVRNFQETIHQLEGRLVRQDHQIRELTAKMETQSMYVSELKRTIRTLEDKVAEIEAQQCNGIYIWKIGNFGMHLKCQEEEKPVVIHSPGFYTGKPGYKLCMRLHLQLPTAQRCANYISLFVHTMQGEYDSHLPWPFQGTIRLTILDQSEAPVRQNHEEIMDAKPELLAFQRPTIPRNPKGFGYVTFMHLEALRQRTFIKDDTLLVRCEVSTRFDMGSLRREGFQPRSTDAGV

SEQ ID NO: 818708 - protein, 522 aa, Homo sapiens; identical to SEQ ID NO: 818707

SEQ ID NO: 818709 - protein, 522 aa, Homo sapiens; identical to SEQ ID NO: 818707

SEQ ID NO: 818710 - protein, 380 aa, Homo sapiens
MELRHLEDHQAHCEFALMDCPQCQRPFQKFHINIHILKDCPRRQVSCDNCAASMAFEDKEIHDQNCPLANVICEYCNTILIREQMPNHYDLDCPTAPIPCTFSTFGCHEKMQRNHLARHLQENTQSHMRMLAQAVHSLSVIPDSGYISEVRNFQETIHQLEGRLVRQDHQIRELTAKMETQSMYVSELKRTIRTLEDKVAEIEAQQCNGIYIWKIGNFGMHLKCQEEEKPVVIHSPGFYTGKPGYKLCMRLHLQLPTAQRCANYISLFVHTMQGEYDSHLPWPFQGTIRLTILDQSEAPVRQNHEEIMDAKPELLAFQRPTIPRNPKGFGYVTFMHLEALRQRTFIKDDTLLVRCEVSTRFDMGSLRREGFQPRSTDAGV

SEQ ID NO: 818711 - protein, 270 aa, Homo sapiens [sequence omitted]

SEQ ID NO: 818712 - protein, 283 aa, Homo sapiens
MSLLNCENSCGSSQSESDCCVAMASSCSAVTKDDSVGGTASTGNLSSSFMEEIQGYDVEFDPPLESKYECPICLMALREAVQTPCGHRFCKACIIKSIRDAGHKCPVDNEILLENQLFPDNFAKREILSLMVKCPNEGCLHKMELRHLEDHQAHCEFALMDCPQCQRPFQKFHINIHILKDCPRRQVSCDNCAASMAFEDKEIHDQNCPLANVICEYCNTILIREQMPNHYDLDCPTAPIPCTFSTFGCHEKMQRKSTLEGNYKENNQVTQCSIVWPQDDTNI

SEQ ID NO: 818713 - protein, 851 aa, Homo sapiens
RRGWAGAPGGRCRRRRHSAAMERPWGAADGLSRWPHGLGLLLLLQLLPPSTLSQDRLDAPPPPAAPLPRWSGPIGVSWGLRAAAAGGAFPRGGRWRRSAPGEDEECGRVRDFVAKLANNTHQHVFDDLRGSVSLSWVGDSTGVILVLTTFHVPLVIMTFGQSKLYRSEDYGKNFKDITDLINNTFIRTEFGMAIGPENSGKVVLTAEVSGGSRGGRIFRSSDFAKNFVQTDLPFHPLTQMMYSPQNSDYLLALSTENGLWVSKNFGGKWEEIHKAVCLAKWGSDNTIFFTTYANGSCKADLGALELWRTSDLGKSFKTIGVKIYSFGLGGRFLFASVMADKDTTRRIHVSTDQGDTWSMAQLPSVGQEQFYSILAANDDMVFMHVDEPGDTGFGTIFTSDDRGIVYSKSLDRHLYTTTGGETDFTNVTSLRGVYITSVLSEDNSIQTMITFDQGGRWTHLRKPENSECDATAKNKNECSLHIHASYSISQKLNVPMAPLSEPNAVGIVIAHGSVGDAISVMVPDVYISDDGGYSWTKMLEGPHYYTILDSGGIIVAIEHSSRPINVIKFSTDEGQCWQTYTFTRDPIYFTGLASEPGARSMNISIWGFTESFLTSQWVSYTIDFKDILERNCEEKDYTIWLAHSTDPEDYEDGCILGYKEQFLRLRKSSVCQNGRDYVVTKQPSICLCSLEDFLCDFGYYRPENDSKCVEQPELKGHDLEFCLYGREEHLTTNGYRKIPGDKCQGGVNPVREVKDLKKKCTSNFLSPEKQNSKSNSVPIILAIVGLMLVTVVAGVLIVKKYVCGGRFLVHRYSVLQQHAEANGVDGVDALDTASHTNKSGYHDDSDEDLLE

SEQ ID NO: 818714 - protein, 851 aa, Homo sapiens; identical to SEQ ID NO: 818713

SEQ ID NO: 818715 - protein, 695 aa, Homo sapiens
MTFGQSKLYRSEDYGKNFKDITDLINNTFIRTEFGMAIGPENSGKVVLTAEVSGGSRGGRIFRSSDFAKNFVQTDLPFHPLTQMMYSPQNSDYLLALSTENGLWVSKNFGGKWEEIHKAVCLAKWGSDNTIFFTTYANGSCKADLGALELWRTSDLGKSFKTIGVKIYSFGLGGRFLFASVMADKDTTRRIHVSTDQGDTWSMAQLPSVGQEQFYSILAANDDMVFMHVDEPGDTGFGTIFTSDDRGIVYSKSLDRHLYTTTGGETDFTNVTSLRGVYITSVLSEDNSIQTMITFDQGGRWTHLRKPENSECDATAKNKNECSLHIHASYSISQKLNVPMAPLSEPNAVGIVIAHGSVGDAISVMVPDVYISDDGGYSWTKMLEGPHYYTILDSGGIIVAIEHSSRPINVIKFSTDEGQCWQTYTFTRDPIYFTGLASEPGARSMNISIWGFTESFLTSQWVSYTIDFKDILERNCEEKDYTIWLAHSTDPEDYEDGCILGYKEQFLRLRKSSVCQNGRDYVVTKQPSICLCSLEDFLCDFGYYRPENDSKCVEQPELKGHDLEFCLYGREEHLTTNGYRKIPGDKCQGGVNPVREVKDLKKKCTSNFLSPEKQNSKSNSVPIILAIVGLMLVTVVAGVLIVKKYVCGGRFLVHRYSVLQQHAEANGVDGVDALDTASHTNKSGYHDDSDEDLLE

SEQ ID NO: 818716 - protein, 611 aa, Homo sapiens [sequence omitted]

SEQ ID NO: 818717 - protein, 262 aa, Homo sapiens
MKEEVESDIPTFPLLVLPIAWQLPPVGGFCAVYFPEQCVSPLGEEKDYTIWLAHSTDPEDYEDGCILGYKEQFLRLRKSSVCQNGRDYVVTKQPSICLCSLEDFLCDFGYYRPENDSKCVEQPELKGHDLEFCLYGREEHLTTNGYRKIPGDKCQGGVNPVREVKDLKKKCTSNFLSPEKQNSKSNSVPIILAIVGLMLVTVVAGVLIVKKYVCGGRFLVHRYSVLQQHAEANGVDGVDALDTASHTNKSGYHDDSDEDLLE

SEQ ID NO: 818718 - protein, 69 aa, Homo sapiens
TGTNAWATSAKLFPQNHPPQKAPLRDSLTRLKSGVGVKVFFVYFNLGFVELLVSDRLKPFITLWEVFDP

SEQ ID NO: 818719 - protein, 851 aa, Homo sapiens; identical to SEQ ID NO: 818713

SEQ ID NO: 818720 - protein, 851 aa, Homo sapiens; identical to SEQ ID NO: 818713

SEQ ID NO: 818721 - protein, 851 aa, Homo sapiens; identical to SEQ ID NO: 818713

SEQ ID NO: 818722 - protein, 312 aa, Homo sapiens
RRGWAGAPGGRCRRRRHSAAMERPWGAADGLSRWPHGLGLLLLLQLLPPSTLSQDRLDAPPPPAAPLPRWSGPIGVSWGLRAAAAGGAFPRGGRWRRSAPGEDEECGRVRDFVAKLANNTHQHVFDDLRGSVSLSWVGDSTGVILVLTTFHVPLVIMTFGQSKLYRSEDYGKNFKDITDLINNTFIRTEFGMAIGPENSGKVVLTAEVSGGSRGGRIFRSSDFAKNFVQTDLPFHPLTQMMYSPQNSDYLLALSTENGLWVSKNFGGKWEEIHKAVCLAKCPCACCSALSLVPFLSMWSFPRLWDSCLPTKV

SEQ ID NO: 818723 - protein, 466 aa, Homo sapiens
RRGWAGAPGGRCRRRRHSAAMERPWGAADGLSRWPHGLGLLLLLQLLPPSTLSQDRLDAPPPPAAPLPRWSGPIGVSWGLRAAAAGGAFPRGGRWRRSAPGEDEECGRVRDFVAKLANNTHQHVFDDLRGSVSLSWVGDSTGVILVLTTFHVPLVIMTFGQSKLYRSEDYGKNFKDITDLINNTFIRTEFGMAIGPENSGKVVLTAEVSGGSRGGRIFRSSDFAKNFVQTDLPFHPLTQMMYSPQNSDYLLALSTENGLWVSKNFGGKWEEIHKAVCLAKWGSDNTIFFTTYANGSCKADLGALELWRTSDLGKSFKTIGVKIYSFGLGGRFLFASVMADKDTTRRIHVSTDQGDTWSMAQLPSVGQEQFYSILAANDDMVFMHVDEPGDTGFGTIFTSDDRGIVYSKSLDRHLYTTTGGETDFTNVTSLRGVYITSVLSEDNSIQTMITCDEGGRHEILESHLTI

SEQ ID NO: 818724 - protein, 167 aa, Homo sapiens
RRGWAGAPGGRCRRRRHSAAMERPWGAADGLSRWPHGLGLLLLLQLLPPSTLSQDRLDAPPPPAAPLPRWSGPIGVSWGLRAAAAGGAFPRGGRWRRSAPGEDEECGRVRDFVAKLANNTHQHVFDDLRGSVSLSWVGDSTGVILVLTTFHVPLVIMTFGQSKLYRR

SEQ ID NO: 818725 - protein, 860 aa, Homo sapiens
RRGWAGAPGGRCRRRRHSAAMERPWGAADGLSRWPHGLGLLLLLQLLPPSTLSQDRLDAPPPPAAPLPRWSGPIGVSWGLRAAAAGGAFPRGGRWRRSAPGEDEECGRVRDFVAKLANNTHQHVFDDLRGSVSLSWVGDSTGVILVLTTFHVPLVIMTFGQSKLYRSEDYGKNFKDITDLINNTFIRTEFGMAIGPENSGKVVLTAEVSGGSRGGRIFRSSDFAKNFVQTDLPFHPLTQMMYSPQNSDYLLALSTENGLWVSKNFGGKWEEIHKAVCLAKWGSDNTIFFTTYANGSCKADLGALELWRTSDLGKSFKTIGVKIYSFGLGGRFLFASVMADKDTTRRIHVSTDQGDTWSMAQLPSVGQEQFYSILAANDDMVFMHVDEPGDTGFGTIFTSDDRGIVYSKSLDRHLYTTTGGETDFTNVTSLRGVYITSVLSEDNSIQTMITFDQGGRWTHLRKPENSECDATAKNKNECSLHIHASYSISQKLNVPMAPLSEPNAVGIVIAHGSVGDAISVMVPDVYISDDGGYSWTKMLEGPHYYTILDSGGIIVAIEHSSRPINVIKFSTDEGQCWQTYTFTRDPIYFTGLASEPGARSMNISIWGFTESFLTSQWVSYTIDFKDILERNCEEKDYTIWLAHSTDPEDYEDGCILGYKEQFLRLRKSSVCQNGRDYVVTKQPSICLCSLEDFLCDFGYYRPENDSKCVEQPELKGHDLEFCLYGREEHLTTNGYRKIPGDKCQGGVNPVREVKDLKKKCTSNFLSPEKQNSKSNSVPIILAIVGLMLVTVVAGVLIVKKYVCGGRTSWNSSSEELDPAWMVEPQYLLHSLWLQLQEINFPLRGTQLCFCCFHQSQKDLH

SEQ ID NO: 818726 - protein, 493 aa, Homo sapiens
MAQLPSVGQEQFYSILAANDDMVFMHVDEPGDTGFGTIFTSDDRGIVYSKSLDRHLYTTTGGETDFTNVTSLRGVYITSVLSEDNSIQTMITFDQGGRWTHLRKPENSECDATAKNKNECSLHIHASYSISQKLNVPMAPLSEPNAVGIVIAHGSVGDAISVMVPDVYISDDGGYSWTKMLEGPHYYTILDSGGIIVAIEHSSRPINVIKFSTDEGQCWQTYTFTRDPIYFTGLASEPGARSMNISIWGFTESFLTSQWVSYTIDFKDILERNCEEKDYTIWLAHSTDPEDYEDGCILGYKEQFLRLRKSSVCQNGRDYVVTKQPSICLCSLEDFLCDFGYYRPENDSKCVEQPELKGHDLEFCLYGREEHLTTNGYRKIPGDKCQGGVNPVREVKDLKKKCTSNFLSPEKQNSKSNSVPIILAIVGLMLVTVVAGVLIVKKYVCGGRFLVHRYSVLQQHAEANGVDGVDALDTASHTNKSGYHDDSDEDLLE

SEQ ID NO: 818727 - protein, 851 aa, Homo sapiens; identical to SEQ ID NO: 818713

SEQ ID NO: 818728 - protein, 570 aa, Homo sapiens
RRGWAGAPGGRCRRRRHSAAMERPWGAADGLSRWPHGLGLLLLLQLLPPSTLSQDRLDAPPPPAAPLPRWSGPIGVSWGLRAAAAGGAFPRGGRWRRSAPGEDEECGRVRDFVAKLANNTHQHVFDDLRGSVSLSWVGDSTGVILVLTTFHVPLVIMTFGQSKLYRSEDYGKNFKDITDLINNTFIRTEFGMAIGPENSGKVVLTAEVSGGSRGGRIFRSSDFAKNFVQTDLPFHPLTQMMYSPQNSDYLLALSTENGLWVSKNFGGKWEEIHKAVCLAKWGSDNTIFFTTYANGSCKADLGALELWRTSDLGKSFKTIGVKIYSFGLGGRFLFASVMADKDTTRRIHVSTDQGDTWSMAQLPSVGQEQFYSILAANDDMVFMHVDEPGDTGFGTIFTSDDRGIVYSKSLDRHLYTTTGGETDFTNVTSLRGVYITSVLSEDNSIQTMITFDQGGRWTHLRKPENSECDATAKNKNECSLHIHASYSISQKLNVPMAPLSEPNAVGIVIAHGSVGDAISVMVPDVYISDDGGYSWTKMLEGPHYYTILDSGGIIVAIEHSSRPINVIKYA

SEQ ID NO: 818729 - protein, 291 aa, Homo sapiens
RRGWAGAPGGRCRRRRHSAAMERPWGAADGLSRWPHGLGLLLLLQLLPPSTLSQDRLDAPPPPAAPLPRWSGPIGVSWGLRAAAAGGAFPRGGRWRRSAPGEDEECGRVRDFVAKLANNTHQHVFDDLRGSVSLSWVGDSTGVILVLTTFHVPLVIMTFGQSKLYRSEDYGKNFKDITDLINNTFIRTEFGMAIGPENSGKVVLTAEVSGGSRGGRIFRSSDFAKNFVQTDLPFHPLTQMMYSPQNSDYLLALSTEPMCLLFSPLSCSLSEHVVLPQAVGQLPSHESVKQY

SEQ ID NO: 818730 - protein, 144 aa, Homo sapiens
RRGWAGAPGGRCRRRRHSAAMERPWGAADGLSRWPHGLGLLLLLQLLPPSTLSQDRLDAPPPPAAPLPRWSGPIGVSWGLRAAAAGGAFPRGGRWRRSAPGEDEECGRVRDFVAKLANNTHQHVFDDLRGSVSLSWVGDSTGVC

SEQ ID NO: 818731 - protein, 217 aa, Homo sapiens
MSSLYYANALFSKYPASSSVFATGAFPEQTSCAFASNPQRPGYGAGSGASFAASMQGLYPGGGGMAGQSAAGVYAAGYGLEPSSFNMHCAPFEQNLSGVCPGDSAKAAGAKEQRDSDLAAESNFRIYPWMRSSGTDRKRGRQTYTRYQTLELEKEFHYNRYLTRRRRIEIAHTLCLTERQIKIWFQNRRMKWKKENKTAGPGTTGQDRAEAEEEEEE

SEQ ID NO: 818732 - protein, 151 aa, Homo sapiens [sequence omitted]

SEQ ID NO: 818733 - protein, 263 aa, Homo sapiens
AEPIIGSARGSVDFPCRRRLPVSAGRGLGQRRLLREKSAPGGRFGGGQVPGAGAASLHADKVCGQRKGPRRVLLPLVNLFPLPFNPPPDVFLFRTGGDVNRLKFINTVKFYCISGPQDLYPGGGAGGQVDSLATSDFPAGHVATRTLASGRGREGAWTGPRPLAPHLPTAAHCRHRRRPGTDRKRGRQTYTRYQTLELEKEFHYNRYLTRRRRIEIAHTLCLTERQIKIWFQNRRMKWKKENKTAGPGTTGQDRAEAEEEEEE

SEQ ID NO: 818734 - protein, 217 aa, Homo sapiens; identical to SEQ ID NO: 818731

SEQ ID NO: 818735 - protein, 217 aa, Homo sapiens; identical to SEQ ID NO: 818731

SEQ ID NO: 818736 - protein, 111 aa, Homo sapiens
CWDYRFEPTAPGRRFLYSLIFLWILCAGTDRKRGRQTYTRYQTLELEKEFHYNRYLTRRRRIEIAHTLCLTERQIKIWFQNRRMKWKKENKTAGPGTTGQDRAEAEEEEEE

SEQ ID NO: 818737 - protein, 200 aa, Homo sapiens
MGNGLSDQTSILSNLPSFQSFHIVILGLDCAGKTTVLYRLQFNEFVNTVPTKGFNTEKIKVTLGNSKTVTFHFWDVGGQEKLRPLWKSYTRCTDGIVFVVDSVDVERMEEAKTELHKITRISENQGVPVLIVANKQDLRNSLSLSEIEKLLAMGELSSSTPWHLQPTCAIIGDGLKEGLEKLHDMIIKRRKMLRQQKKKR

SEQ ID NO: 818738 - protein, 200 aa, Homo sapiens; identical to SEQ ID NO: 818737

SEQ ID NO: 818739 - protein, 200 aa, Homo sapiens; identical to SEQ ID NO: 818737

SEQ ID NO: 818740 - protein, 206 aa, Homo sapiens
MGNGLSDQTSILSNLPSFQSFHIVILGLDCAGKTTVLYRLQFNEFVNTVPTKGFNTEKIKVTLGNSKTVTFHFWDVGGQEKLRPLWKSYTRCTDGIVFVVDSVDVERMEEAKTELHKITRISENQGVPVLIVANKQDLRNSLSLSEIEKLLAMGELSSSTPWHLQPTCAIIGDGLKEGLEKLHDMIIKRRKMLRQQSDFAIEECLR

SEQ ID NO: 818741 - protein, 154 aa, Homo sapiens
MSGFENLNTDFYQTSYSIDDQSQQSYDYGGSGGPYSKQYAGYDYSQQGRFVPPDMMQPQQPYTGQIYQPTQAYTPASPQPFYGNNFEDEPPLLEELGINFDHIWQKTLTVLHPLKVADGSIMNETDLAGPMVFCLAFGATLLLVRFSFQPSGCN

SEQ ID NO: 818742 - protein, 257 aa, Homo sapiens
MSGFENLNTDFYQTSYSIDDQSQQSYDYGGSGGPYSKQYAGYDYSQQGRFVPPDMMQPQQPYTGQIYQPTQAYTPASPQPFYGNNFEDEPPLLEELGINFDHIWQKTLTVLHPLKVADGSIMNETDLAGPMVFCLAFGATLLLAGKIQFGYVYGISAIGCLGMFCLLNLMSMTGVSFGCVASVLGYCLLPMILLSSFAVIFSLQGMVGIILTAGIIGWCSFSASKIFISALAMEGQQLLVAYPCALLYGVFALISVF

SEQ ID NO: 818743 - protein, 257 aa, Homo sapiens; identical to SEQ ID NO: 818742

SEQ ID NO: 818744 - protein, 148 aa, Homo sapiens
MSGFENLNTDFYQTSYSIDDQSQQSYDYGGSGGPYSKQYAGYDYSQQGRFVPPDMMQPQQPYTGQIYQPTQAYTPASPQPFYGNNFEDEPPLLEELGINFDHIWQKTLTVLHPLKVADGSIMNETDLAGPMVFCLAFGATLLLECFVY

SEQ ID NO: 818745 - protein, 400 aa, Homo sapiens
MPLSMRYLFIISVSSVIIFIVFSVFNFGGDPSFQRLNISDPLRLTQVCTSFINGKTRFLWKNKLMIHEKSSCKEYLTQSHYITAPLSKEEADFPLAYIMVIHHHFDTFARLFRAIYMPQNIYCVHVDEKATTEFKDAVEQLLSCFPNAFLASKMEPVVYGGISRLQADLNCIRDLSAFEVSWKYVINTCGQDFPLKTNKEIVQYLKGFKGKNITPGVLPPAHAIGRTKYVHQEHLGKELSYVIRTTALKPPPPHNLTIYFGSAYVALSREFANFVLHDPRAVDLLQWSKDTFSPDEHFWVTLNRIPGVPGSMPNASWTGNLRAIKWSDMEDRHGGCHGHYVHGICIYGNGDLKWLVNSPSLFANKFELNTYPLTVECLELRHRERTLNQSETAIQPSWYF

SEQ ID NO: 818746 - protein, 325 aa, Homo sapiens
MPLSMRYLFIISVSSVIIFIVFSVFNFGGDPSFQRLNISDPLRLTQVCTSFINGKTRFLWKNKLMIHEKSSCKEYLTQSHYITAPLSKEEADFPLAYIMVIHHHFDTFARLFRAIYMPQNIYCVHVDEKATTEFKDAVEQLLSCFPNAFLASKMEPVVYGGISRLQADLNCIRDLSAFEVSWKYVINTCGQDFPLKTNKEIVQYLKGFKGKNITPGVLPPAHAIGRTKYVHQEHLGKELSYVIRTTALKPPPPHNLTIYFGSAYVALSREFANFVLHDPRAVDLLQWSKDTFSPDEHFWVTLNRIPGVDLTLWPRLECRGNIMAH

SEQ ID NO: 818747 - protein, 765 aa, Homo sapiens
MLADLGLIGTIGEDDEVPVEPESDSGDEEEEGPIVLGRRQKALGKNRSADFNPDFVFTEKEGTYDGSWALADVMSQLKKKRAATTLDEKIEKVRKKRKTEDKEAKSGKLEKEKEAKEGSEPKEQEDLQENDEEGSEDEASETDYSSADENILTKADTLKVKDRKKKKKKGQEAGGFFEDASQYDENLSFQDMNLSRPLLKAITAMGFKQPTPIQKACIPVGLLGKDICACAATGTGKTAAFALPVLERLIYKPRQAPVTRVLVLVPTRELGIQVHSVTRQLAQFCNITTCLAVGGLDVKSQEAALRAAPDILIATPGRLIDHLHNCPSFHLSSIEVLILDEADRMLDEYFEEQMKEIIRMCSHHRQTMLFSATMTDEVKDLASVSLKNPVRIFVNSNTDVAPFLRQEFIRIRPNREGDREAIVAALLTRTFTDHVMLFTQTKKQAHRMHILLGLMGLQVGELHGNLSQTQRLEALRRFKDEQIDILVATDVAARGLDIEGVKTVINFTMPNTIKHYVHRVGRTARAGRAGRSVSLVGEDERKMLKEIVKAAKAPVKARILPQDVILKFRDKIEKMEKDVYAVLQLEAEEKEMQQSEAQINTAKRLLEKGKEAVVQEPERSWFQTKEERKKEKIAKALQEFDLALRGKKKRKKFMKDAKKKGEMTAEERSQFEILKAQMFAERLAKRNRRAKRARAMPEEEPVRGPAKKQKQGKKSVFDEELTNTSKKALKQYRAGPSFEERKQLGLPHQRRGGNFKSKSRYKRRK

SEQ ID NO: 818748 - protein, 782 aa, Homo sapiens
ARTYGLGTRPGCVVCDNMLADLGLIGTIGEDDEVPVEPESDSGDEEEEGPIVLGRRQKALGKNRSADFNPDFVFTEKEGTYDGSWALADVMSQLKKKRAATTLDEKIEKVRKKRKTEDKEAKSGKLEKEKEAKEGSEPKEQEDLQENDEEGSEDEASETDYSSADENILTKADTLKVKDRKKKKKKGQEAGGFFEDASQYDENLSFQDMNLSRPLLKAITAMGFKQPTPIQKACIPVGLLGKDICACAATGTGKTAAFALPVLERLIYKPRQAPVTRVLVLVPTRELGIQVHSVTRQLAQFCNITTCLAVGGLDVKSQEAALRAAPDILIATPGRLIDHLHNCPSFHLSSIEVLILDEADRMLDEYFEEQMKEIIRMCSHHRQTMLFSATMTDEVKDLASVSLKNPVRIFVNSNTDVAPFLRQEFIRIRPNREGDREAIVAALLTRTFTDHVMLFTQTKKQAHRMHILLGLMGLQVGELHGNLSQTQRLEALRRFKDEQIDILVATDVAARGLDIEGVKTVINFTMPNTIKHYVHRVGRTARAGRAGRSVSLVGEDERKMLKEIVKAAKAPVKARILPQDVILKFRDKIEKMEKDVYAVLQLEAEEKEMQQSEAQINTAKRLLEKGKEAVVQEPERSWFQTKEERKKEKIAKALQEFDLALRGKKKRKKFMKDAKKKGEMTAEERSQFEILKAQMFAERLAKRNRRAKRARAMPEEEPVRGPAKKQKQGKKSVFDEELTNTSKKALKQYRAGPSFEERKQLGLPHQRRGGNFKSKSRYKRRK

SEQ ID NO: 818749 - protein, 827 aa, Homo sapiens
MVLAQRRRGGCEKLRAGPQAVLASGSGFCDNMLADLGLIGTIGEDDEVPVEPESDSGDEEEEGPIVLGRRQKALGKNRSADFNPDFVFTEKEGTYDGSWALADVMSQLKKKRAATTLDEKIEKVRKKRKTEDKEAKSGKLEKEKEAKEGSEPKEQEDLQENDEEGSEDEASETDYSSADENILTKADTLKVKDRKKKKKKGQEAGGFFEDASQYDENLSFQDMNLSRPLLKAITAMGFKQPTPIQKACIPVGLLGKDICACAATGTGKTAAFALPVLERLIYKPRQAPVTRVLVLVPTRELGIQVHSVTRQLAQFCNITTCLAVGGLDVKSQEAALRAAPDILIATPGRLIDHLHNCPSFHLSSIEVLILDEADSPPVDTAWPHAPTLWLLHLPFPQPGAISCPFRMLDEYFEEQMKEIIRMCSHHRQTMLFSATMTDEVKDLASVSLKNPVRIFVNSNTDVAPFLRQEFIRIRPNREGDREAIVAALLTRTFTDHVMLFTQTKKQAHRMHILLGLMGLQVGELHGNLSQTQRLEALRRFKDEQIDILVATDVAARGLDIEGVKTVINFTMPNTIKHYVHRVGRTARAGRAGRSVSLVGEDERKMLKEIVKAAKAPVKARILPQDVILKFRDKIEKMEKDVYAVLQLEAEEKEMQQSEAQINTAKRLLEKGKEAVVQEPERSWFQTKEERKKEKIAKALQEFDLALRGKKKRKKFMKDAKKKGEMTAEERSQFEILKAQMFAERLAKRNRRAKRARAMPEEEPVRGPAKKQKQGKKSVFDEELTNTSKKALKQYRAGPSFEERKQLGLPHQRRGGNFKSKSRYKRRK

SEQ ID NO: 818750 - protein, 807 aa, Homo sapiens
MVLAQRRRGGCEKLRAGPQAVLASGSGFCDNMLADLGLIGTIGEDDEVPVEPESDSGDEEEEGPIVLGRRQKALGKNRSADFNPDFVFTEKEGTYDGSWALADVMSQLKKKRAATTLDEKIEKVRKKRKTEDKEAKSGKLEKEKEAKEGSEPKEQEDLQENDEEGSEDEASETDYSSADENILTKADTLKVKDRKKKKKKGQEAGGFFEDASQYDENLSFQDMNLSRPLLKAITAMGFKQPTPIQKACIPVGLLGKDICACAATGTGKTAAFALPVLERLIYKPRQAPVTRVLVLVPTRELGIQVHSVTRQLAQFCNITTCLAVGGLDVKSQEAALRAAPDILIATPGRLIDHLHNCPSFHLSSIEVLILDEADRMLDEYFEEQMKEIIRMCSHHRQTMLFSATMTDERAEETWLCAWQVKDLASVSLKNPVRIFVNSNTDVAPFLRQEFIRIRPNREGDREAIVAALLTRTFTDHVMLFTQTKKQAHRMHILLGLMGLQVGELHGNLSQTQRLEALRRFKDEQIDILVATDVAARGLDIEGVKTVINFTMPNTIKHYVHRVGRTARAGRAGRSVSLVGEDERKMLKEIVKAAKAPVKARILPQDVILKFRDKIEKMEKDVYAVLQLEAEEKEMQQSEAQINTAKRLLEKGKEAVVQEPERSWFQTKEERKKEKIAKALQEFDLALRGKKKRKKFMKDAKKKGEMTAEERSQFEILKAQMFAERLAKRNRRAKRARAMPEEEPVRGPAKKQKQGKKSVFDEELTNTSKKALKQYRAGPSFEERKQLGLPHQRRGGNFKSKSRYKRRK

SEQ ID NO: 818751 - protein, 760 aa, Homo sapiens
MLADLGLIGTIGEDDEVPVEPESDSGDEEEEGPIVLGRRQKALGKNRSADFNPDFVFTEKEGTYDGSWALADVMSQLKKKRAATTLDEKIEKVRKKRKTEDKEAKSGKLEKEKEAKEGSEPKEQEDLQENDEEGSEDEASETDYSSADENILTKADTLKVKDRKKKKKKGQEAGGFFEDASQYDENLSFQDMNLSRPLLKAITAMGFKQPTPIQKACIPVGLLGKDICACAATGTGKTAAFALPVLERLIYKPRQAPVTRVLVLVPTRELGIQVHSVTRQLAQFCNITTCLAVGGLDVKSQEAALRAAPDILIATPGRLIDHLHNCPSFHLSSIEVLILDEADRMLDEYFEEQMKEIIRMCSHHRQTMLFSATMTDEVKDLASVSLKNPVRIFVNSNTDVAPFLRQEFIRIRPNREGDREAIVAALLTRTFTDHVMLFTQTKKQAHRMHILLGLMGLQVGELHGNLSQTQRLEALRRFKDEQIDILVATDVAARGLDIEGVKTVINFTMPNTIKHYVHRVGRTARAGRAGRSVSLVGEDERKMLKEIVKAAKAPVKARILPQDVILKFRDKIEKMEKDVYAVLQLEAEEKEMQQSEAQINTAKRLLEKGKEAVVQEPERSWFQTKEERKKEKIAKALQEFDLALRGKKKRKKFMKDAKKKGEMTAEERSQFEILKAQMFAERLAKRNRRAKRARAMPEEEPVRGPAKKQKQGKKSVFDEELTNTSKKALKQYRAGPSFEERKQLGLPHQRRGGNFKSKSR

SEQ ID NO: 818752 - protein, 745 aa, Homo sapiens
MVLAQRRRGGCEKLRAGPQAVLASGSGFCDNMLADLGLIGTIGEDDEVPVEPESDSGDEEEEGPIVLGRRQKALGKNRSADFNPDFVFTEKEGTYDGSWALADVMSQLKKKRAATTLDEKIEKVRKKRKTEDKEAKSGKLEKEKEAKEGSEPKEQEDLQENDEEGSEDEASETDYSSADENILTKADTLKVKDRKKKKKKGQEAGGFFEDASQYDENLSFQDMNLSRPLLKAITAMGFKQPTPIQKACIPVGLLGKDICACAATGTGKTAAFALPVLERLIYKPRQAPVTRVLVLVPTRELGIQVHSVTRQLAQFCNITTCLAVGGLDVKSQEAALRAAPDILIATPGRLIDHLHNCPSFHLSSIEVLILDEADRMLDEYFEEQMKEIIRMCSHHRQTMLFSATMTDEVKDLASVSLKNPVRIFVNSNTDVAPFLRQEFIRIRPNREGDREAIVAALLTRTFTDHVMLFTQTKKQAHRMHILLGLMGLQVGELHGNLSQTQRLEALRRFKDEQIDILVATDVAARGLDIEGVKTVINFTMPNTIKHYVHRVGRTARAGRAGRSVSLVGEDERKMLKEIVKAAKAPVKARILPQDVILKFRDKIEKMEKDVYAVLQLEAEEKEMQQSEAQINTAKRLLEKGKEAVVQEPERSWFQTKEERKKEKIAKALQEFDLALRGKKKRKKFMKDAKKKGEMTVSGLPFGVWAHSVGWVRVAWCVPHSHLPTPPRQRKGLSLKSSRRRCLLNG

SEQ ID NO: 818753 - protein, 462 aa, Homo sapiens
MVLAQRRRGGCEKLRAGPQAVLASGSGFCDNMLADLGLIGTIGEDDEVPVEPESDSGDEEEEGPIVLGRRQKALGKNRSADFNPDFVFTEKEGTYDGSWALADVMSQLKKKRAATTLDEKIEKVRKKRKTEDKEAKSGKLEKEKEAKEGSEPKEQEDLQENDEEGSEDEASETDYSSADENILTKADTLKVKDRKKKKKKGQEAGGFFEDASQYDENLSFQDMNLSRPLLKAITAMGFKQPTPIQKACIPVGLLGKDICACAATGTGKTAAFALPVLERLIYKPRQAPVTRVLVLVPTRELGIQVHSVTRQLAQFCNITTCLAVGGLDVKSQEAALRAAPDILIATPGRLIDHLHNCPSFHLSSIEVLILDEADRMLDEYFEEQMKEIIRMCSHHRQTMLFSATMTDEVKDLASVSLKNPVRIFVNSNTDVAPFLRQEFIRIRPNREGDREAIVAGNQLHNA

SEQ ID NO: 818754 - protein, 852 aa, Homo sapiens
MVLAQRRRGGCEKLRAGPQAVLASGSGFCDNMLADLGLIGTIGEDDEVPVEPESDSGDEEEEGPIVLGRRQKALGKNRSADFNPDFVFTEKEGTYDGSWALADVMSQLKKKRAATTLDEKIEKVRKKRKTEDKEAKSGKLEKEKEAKEGSEPKEQEDLQENDEEGSEDEASETDYSSADENILTKAGKFFTMLPQSVLICETRLTMVTPQRLKCGIGTWTVSSRMQVLCKSEPWSSAKFFSIDTLKVKDRKKKKKKGQEAGGFFEDASQYDENLSFQDMNLSRPLLKAITAMGFKQPTPIQKACIPVGLLGKDICACAATGTGKTAAFALPVLERLIYKPRQAPVTRVLVLVPTRELGIQVHSVTRQLAQFCNITTCLAVGGLDVKSQEAALRAAPDILIATPGRLIDHLHNCPSFHLSSIEVLILDEADRMLDEYFEEQMKEIIRMCSHHRQTMLFSATMTDEVKDLASVSLKNPVRIFVNSNTDVAPFLRQEFIRIRPNREGDREAIVAALLTRTFTDHVMLFTQTKKQAHRMHILLGLMGLQVGELHGNLSQTQRLEALRRFKDEQIDILVATDVAARGLDIEGVKTVINFTMPNTIKHYVHRVGRTARAGRAGRSVSLVGEDERKMLKEIVKAAKAPVKARILPQDVILKFRDKIEKMEKDVYAVLQLEAEEKEMQQSEAQINTAKRLLEKGKEAVVQEPERSWFQTKEERKKEKIAKALQEFDLALRGKKKRKKFMKDAKKKGEMTAEERSQFEILKAQMFAERLAKRNRRAKRARAMPEEEPVRGPAKKQKQGKKSVFDEELTNTSKKALKQYRAGPSFEERKQLGLPHQRRGGNFKSKSRYKRRK

SEQ ID NO: 818755 - protein, 598 aa, Homo sapiens
MVLAQRRRGGCEKLRAGPQAVLASGSGFCDNMLADLGLIGTIGEDDEVPVEPESDSGDEEEEGPIVLGRRQKALGKNRSADFNPDFVFTEKEGTYDGSWALADVMSQLKKKRAATTLDEKIEKVRKKRKTEDKEAKSGKLEKEKEAKEGSEPKEQEDLQENDEEGSEDEASETDYSSADENILTKADTLKVKDRKKKKKKGQEAGGFFEDASQYDENLSFQDMNLSRPLLKAITAMGFKQPTPIQKACIPVGLLGKDICACAATGTGKTAAFALPVLERLIYKPRQAPVTRVLVLVPTRELGIQVHSVTRQLAQFCNITTCLAVGGLDVKSQEAALRAAPDILIATPGRLIDHLHNCPSFHLSSIEVLILDEADRMLDEYFEEQMKEIIRMCSHHRQTMLFSATMTDEEKDVYAVLQLEAEEKEMQQSEAQINTAKRLLEKGKEAVVQEPERSWFQTKEERKKEKIAKALQEFDLALRGKKKRKKFMKDAKKKGEMTAEERSQFEILKAQMFAERLAKRNRRAKRARAMPEEEPVRGPAKKQKQGKKSVFDEELTNTSKKALKQYRAGPSFEERKQLGLPHQRRGGNFKSKSRYKRRK

SEQ ID NO: 818756 - protein, 509 aa, Homo sapiens
MVLAQRRRGGCEKLRAGPQAVLASGSGFCDNMLADLGLIGTIGEDDEVPVEPESDSGDEEEEGPIVLGRRQKALGKNRSADFNPDFVFTEKEGTYDGSWALADVMSQLKKKRAATTLDEKIEKVRKKRKTEDKEAKSGKLEKEKEAKEGSEPKEQEDLQENDEEGSEDEASETDYSSADENILTKADTLKVKDRKKKKKKGQEAGGFFEDASQYDENLSFQDMNLSRPLLKAITAMGFKQPTPIQKACIPVGLLGKDICACAATGTGKTAAFALPVLERLIYKPRQAPVTRVLVLVPTRELGIQVHSVTRQLAQFCNITTCLAVGGLDVKSQEAALRAAPDILIATPGRLIDHLHNCPSFHLSSIEVLILDEADRMLDEYFEEQMKEIIRMCSHHRQTMLFSATMTDEVKDLASVSLKNPVRIFVNSNTDVAPFLRQEFIRIRPNREGDREAIVAALLTRTFTDHVMLFTQTKKQAHPIQKACIPVGLLGKDICACAATGTVQLPVLGV

SEQ ID NO: 818757 - protein, 588 aa, Homo sapiens
FTGLSVGPSAARVSRPRLQGPFQAHGASQAMPHPPIQKACIPVGLLGKDICACAATGTGKTAAFALPVLERLIYKPRQAPVTRVLVLVPTRELGIQVHSVTRQLAQFCNITTCLAVGGLDVKSQEAALRAAPDILIATPGRLIDHLHNCPSFHLSSIEVLILDEADRMLDEYFEEQMKEIIRMCSHHRQTMLFSATMTDEVKDLASVSLKNPVRIFVNSNTDVAPFLRQEFIRIRPNREGDREAIVAALLTRTFTDHVMLFTQTKKQAHRMHILLGLMGLQVGELHGNLSQTQRLEALRRFKDEQIDILVATDVAARGLDIEGVKTVINFTMPNTIKHYVHRVGRTARAGRAGRSVSLVGEDERKMLKEIVKAAKAPVKARILPQDVILKFRDKIEKMEKDVYAVLQLEAEEKEMQQSEAQINTAKRLLEKGKEAVVQEPERSWFQTKEERKKEKIAKALQEFDLALRGKKKRKKFMKDAKKKGEMTAEERSQFEILKAQMFAERLAKRNRRAKRARAMPEEEPVRGPAKKQKQGKKSVFDEELTNTSKKALKQYRAGPSFEERKQLGLPHQRRGGNFKSKSRYKRRK

SEQ ID NO: 818758 - protein, 573 aa, Homo sapiens
MPGLPLFVNPFYFLPLDVILKFRDKIEKMEKDVYAVLQLEAEEKEMQQSEAQINTAKRLLEKGKEAVVQEPERSWFQTKEERKKEKIAKALQEFDLALRGKKKRKKFMKEAALRAAPDILIATPGRLIDHLHNCPSFHLSSIEVLILDEADRMLDEYFEEQMKEIIRMCSHHRQTMLFSATMTDEVKDLASVSLKNPVRIFVNSNTDVAPFLRQEFIRIRPNREGDREAIVAALLTRTFTDHVMLFTQTKKQAHRMHILLGLMGLQVGELHGNLSQTQRLEALRRFKDEQIDILVATDVAARGLDIEGVKTVINFTMPNTIKHYVHRVGRTARAGRAGRSVSLVGEDERKMLKEIVKAAKAPVKARILPQDVILKFRDKIEKMEKDVYAVLQLEAEEKEMQQSEAQINTAKRLLEKGKEAVVQEPERSWFQTKEERKKEKIAKALQEFDLALRGKKKRKKFMKDAKKKGEMTAEERSQFEILKAQMFAERLAKRNRRAKRARAMPEEEPVRGPAKKQKQGKKSVFDEELTNTSKKALKQYRAGPSFEERKQLGLPHQRRGGNFKSKSRYKRRK

SEQ ID NO: 818759 - protein, 402 aa, Homo sapiens
MVLAQRRRGGCEKLRAGPQAVLASGSGFCDNMLADLGLIGTIGEDDEVPVEPESDSGDEEEEGPIVLGRRQKALGKNRSADFNPDFVFTEKEGTYDGSWALADVMSQLKKKRAATTLDEKIEKVRKKRKTEDKEAKSGKLEKEKEAKEGSEPKEQEDLQENDEEGSEDEASETDYSSADENILTKADTLKVKDRKKKKKKGQEAGGFFEDASQYDENLSFQDMNLSRPLLKAITAMGFKQPTPIQKACIPVGLLGKDICACAATGTVKLALCPGCLERLIYNPAGPVTAVLCYAHRKLASGALVQDSGARSGTYPLAGCGRNKSETPGEALRESARIYRHHHKAGTKNPKEGSHTQRSNQGRHRKADKSVRSTHSEKARRVITPENICTDTQERRNKHRVND

SEQ ID NO: 818760 - protein, 450 aa, Homo sapiens
MVLAQRRRGGCEKLRAGPQAVLASGSGFCDNMLADLGLIGTIGEDDEVPVEPESDSGDEEEEGPIVLGRRQKALGKNRSADFNPDFVFTEKEGTYDGSWALADVMSQLKKKRAATTLDEKIEKVRKKRKTERMHILLGLMGLQVGELHGNLSQTQRLEALRRFKDEQIDILVATDVAARGLDIEGVKTVINFTMPNTIKHYVHRVGRTARAGRAGRSVSLVGEDERKMLKEIVKAAKAPVKARILPQDVILKFRDKIEKMEKDVYAVLQLEAEEKEMQQSEAQINTAKRLLEKGKEAVVQEPERSWFQTKEERKKEKIAKALQEFDLALRGKKKRKKFMKDAKKKGEMTAEERSQFEILKAQMFAERLAKRNRRAKRARAMPEEEPVRGPAKKQKQGKKSVFDEELTNTSKKALKQYRAGPSFEERKQLGLPHQRRGGNFKSKSRYKRRK

SEQ ID NO: 818761 - protein, 320 aa, Homo sapiens
MPCSVLCWLRLLWSIIRGGCLDEQLFVTVSRRFKDEQIDILVATDVAARGLDIEGVKTVINFTMPNTIKHYVHRVGRTARAGRAGRSVSLVGEDERKMLKEIVKAAKAPVKARILPQDVILKFRDKIEKMEKDVYAVLQLEAEEKEMQQSEAQINTAKRLLEKGKEAVVQEPERSWFQTKEERKKEKIAKALQEFDLALRGKKKRKKFMKDAKKKGEMTAEERSQFEILKAQMFAERLAKRNRRAKRARAMPEEEPVRGPAKKQKQGKKSVFDEELTNTSKKALKQYRAGPSFEERKQLGLPHQRRGGNFKSKSRYKRRK

SEQ ID NO: 818762 - protein, 447 aa, Homo sapiens
MPGLPLFVNPFYFLPLDVILKFRDKIEKMEKDVYAVLQLEAEEKEMQQSEAQINTAKRLLEKGKEAVVQEPERSWFQTKEERKKEKIAKALQEFDLALRGKKKRKKFMKEAALRAAPDILIATPGRLIDHLHNCPSFHLSSIEVLILDEADRMLDEYFEEQMKEIIRMCSHHRQTMLFSATMTDEVKDLASVSLKNPVRIFVNSNTDVAPFLRQEFIRIRPNREGDREAIVAALLTRTFTDHVMLFTQTKKQAHRMHILLGLMGLQVGELHGNLSQTQRLEALRRFKDEQIDILVATDVAARGLDIEGVKTVINFTMPNTIKHYVHRVGRTARAGRAGRSVSLVGEDERKMLKEIVKAAKAPVKARILPQDVILKFRDKIEKMEKDVYAVLQLEAEEKEMQQSEAQINTAKRLLEKGKEAVVQEPERSWFQTKEERKKEKSRGKVSV

SEQ ID NO: 818763 - protein, 553 aa, Homo sapiens
MVLAQRRRGGCEKLRAGPQAVLASGSGFCDNMLADLGLIGTIGEDDEVPVEPESDSGDEEEEGPIVLGRRQKALGKNRSADFNPDFVFTEKEGTYDGSWALADVMSQLKKKRAATTLDEKIEKVRKKRKTEDKEAKSGKLEKEKEAKEGSEPKEQEDLQENDEEGSEDEASETDYSSADENILTKADTLKVKDRKKKKKKGQEAGGFFEDASQYDENLSFQDMNLSRPLLKAITAMWLQSRPQPGSKKGPLHTWWGSYWGQRTFLCPCWQHTWGHRLKLADICGLAVFGSVMNSTKTPAKVPRSPAVAWMHSGQPARRLGHFQVVTSWSTKNKRGTQGSGKHQPPGPWVGWDGNSGMCVKGSPTRKATASDTRHRRPLTQCYVTLGPTPQSARGYTLEMSSLHIERGDLWPISTTVTHSGHLQRRCPTITWDQKAAVHERTPRDETYSWNGGTHNRNGGQNNRPQEGLSHHGQPYKTTSGLSYRGHRQERAAEKAKKIAGHLQTHRRQNKAGGGTMVSNKTTRHEYADPERERERIIERKASYEWDEEPGTPA

SEQ ID NO: 818764 - protein, 191 aa, Homo sapiens
MEKDVYAVLQLEAEEKEMQQSEAQINTAKRLLEKGKEAVVQEPERSWFQTKEERKKEKIAKALQEFDLALRGKKKRKKFMKDAKKKGEMTAEERSQFEILKAQMFAERLAKRNRRAKRARAMPEEEPVRGPAKKQKQGKKSVFDEELTNTSKKALKQYRAGPSFEERKQLGLPHQRRGGNFKSKSRYKRRK

SEQ ID NO: 818765 - protein, 121 aa, Homo sapiens
ARTYGLGTRPGCVVCDNMLADLGLIGTIGEDDEVPVEPESDSGDEEEEGPIVLGRRQKALGKNRSADFNPDFVFTEKEGTYDGSWALADVMSQLKKKRAATTLDEKIEKVPLKPSGSSRYT

SEQ ID NO: 818766 - protein, 176 aa, Homo sapiens
KASETKQGTVKMQHKQQLRRMKRRKIPGKPKKTLQEVRTNPKGKKPGKERKTMGNPAKSPKKEHSVPSDKQVKAKTERAKEEIGAVSSKKAVPGKKEEKTTKTVEQEIRKEKSGKTSSILKDKEPIKGKEEKVPASLKEKEPETKKDEKMSKAGKEVKPKLHNTRKQQEEKPEPPN

SEQ ID NO: 818767 - protein, 110 aa, Homo sapiens
KASETKQGTVKMQHKQQLRRMKRRKIPGKPKKTLQEVRTNPKGKKPGKERKTMGNPAKSPKKEHSVPSDKQVKAKTERAKEEIGAVSSKKAVPGKKEEKTTKTVEQGKKK

SEQ ID NO: 818768 - protein, 151 aa, Homo sapiens
MPRERSLGGPPDLLCAQKTCPSSAPRGGPRRTSGEATGTLEGAVDPPFQPHARSLGGKALNTAGHSTALSPKFSLTPCAPATTGSDNMTRGGAGVQVTVPEGASGKYLGGSSPAQALSPYPGHQIFHQGRSKSLSASTALSLAAILSPLFL

SEQ ID NO: 818769 - protein, 74 aa, Homo sapiens
ISSTHAVGDNMTRGGAGVQVTVPEGASGKYLGGSSPAQALSPYPGHQIFHQGRSKSLSASTALSLAAILSPLFL

SEQ ID NO: 818770 - protein, 319 aa, Homo sapiens
STLVEAREVGDAEVPLPDGESEASRPPRVHGPPTETLPTPRERNLASPSPSTLVEAREVGEATGGPELSGVPRGESEETGSSEGAPSLLPATRAPEGTRELEAPSEDNSGRTAPAGTSVQAQPVLPTDSASRGGVAVVPASGDCVPSPCHNGGTCLEEEEGVRCLCLPGYGGDLCDVGLRFCNPGWDAFQGACYKHFSTRRSWEEAETQCRMYGAHLASISTPEEQDFINTVPEYQGPGLSDGTSKGHLVGRMGSPGQWNGNRAADGNRRRTGGRGGRQAQEEAGTQSNGKGAWAHTRGNWAGEDNVNHKKTQDRQQEK

SEQ ID NO: 818771 - protein, 159 aa, Homo sapiens
LSKNIRGQALRRGEGRARVEGECVSSPGPSSAPRGGPRRTSGEATGTLEGAVDPPFQPHARSLGGKALNTAGHSTALSPKFSLTPCAPATTGSDNMTRGGAGVQVTVPEGASGKYLGGSSPAQALSPYPGHQIFHQGRSKSLSASTALSLAAILSPLFL

SEQ ID NO: 818772 - protein, 911 aa, Homo sapiens
MAQLFLPLLAALVLAQAPAALADVLEGDSSEDRAFRVRIAGDAPLQGVLGGALTIPCHVHYLRPPPSRRAVLGSPRVKWTFLSRGREAEVLVARGVRVKVNEAYRFRVALPAYPASLTDVSLALSELRPNDSGIYRCEVQHGIDDSSDAVEVKVKGVVFLYREGSARYAFSFSGAQEACARIGAHIATPEQLYAAYLGGYEQCDAGWLSDQTVRYPIQTPREACYGDMDGFPGVRNYGVVDPDDLYDVYCYAEDLNGELFLGDPPEKLTLEEARAYCQERGAEIATTGQLYAAWDGGLDHCSPGWLADGSVRYPIVTPSQRCGGGLPGVKTLFLFPNQTGFPNKHSRFNVYCFRDSAQPSAIPEASNPASNPASDGLEAIVTVTETLEELQLPQEATESESRGAIYSIPIMEDGGGGSSTPEDPAEAPRTLLEFETQSMVPPTGFSEEEGKALEEEEKYEDEEEKEEEEEEEEVEDEALWAWPSELSSPGPEASLPTEPAAQEESLSQAPARAVLQPGASPLPDGESEASRPPRVHGPPTETLPTPRERNLASPSPSTLVEAREVGEATGGPELSGVPRGESEETGSSEGAPSLLPATRAPEGTRELEAPSEDNSGRTAPAGTSVQAQPVLPTDSASRGGVAVVPASGDCVPSPCHNGGTCLEEEEGVRCLCLPGYGGDLCDVGLRFCNPGWDAFQGACYKHFSTRRSWEEAETQCRMYGAHLASISTPEEQDFINNRYREYQWIGLNDRTIEGDFLWSDGVPLLYENWNPGQPDSYFLSGENCVVMVWHDQGQWSDVPCNYHLSYTCKMGLVSCGPPPELPLAQVFGRPRLRYEVDTVLRYRCREGLAQRNLPLIRCQENGRWEAPQISCVPRRPARALHPEEDPEGRQGRLLGRWKALLIPPSSPMPGP

SEQ ID NO: 818773 - protein, 1210 aa, Homo sapiens
MELGLGHSSELTEDSGFGSEKKSLAGKMGIRNRESMVDVKVGDFWSQDMCEPTWVWYGAGGKSILKSNPIFPSHVPLSACSMAQLFLPLLAALVLAQAPAALADVLEGDSSGKQPHLGSPSLSCSALTNCFQAYGPQEERELEGCGEASRLEHLEIRAELWASGGLEKSWGRTREGHWVQGFGPLRWRIGDPEARRWERGGTGRNPEGGPKGSRLGNWAGGLRGRGWRTLGCGLGILERKWKTLRAGQGILGAELTGRLWGMGLETVGVVLEDLEVGLQDPGPWPLAPGPRGAGESWGRKEGSWSGAWRPPGGTLRVDSVKFQPAPPFTEDRAFRVRIAGDAPLQGVLGGALTIPCHVHYLRPPPSRRAVLGSPRVKWTFLSRGREAEVLVARGVRVKVNEAYRFRVALPAYPASLTDVSLALSELRPNDSGIYRCEVQHGIDDSSDAVEVKVKGVVFLYREGSARYAFSFSGAQEACARIGAHIATPEQLYAAYLGGYEQCDAGWLSDQTVRYPIQTPREACYGDMDGFPGVRNYGVVDPDDLYDVYCYAEDLNGELFLGDPPEKLTLEEARAYCQERGAEIATTGQLYAAWDGGLDHCSPGWLADGSVRYPIVTPSQRCGGGLPGVKTLFLFPNQTGFPNKHSRFNVYCFRDSAQPSAIPEASNPASNPASDGLEAIVTVTETLEELQLPQEATESESRGAIYSIPIMEDGGGGSSTPEDPAEAPRTLLEFETQSMVPPTGFSEEEGKALEEEEKYEDEEEKEEEEEEEEVEDEALWAWPSELSSPGPEASLPTEPAAQEESLSQAPARAVLQPGASPLPDGESEASRPPRVHGPPTETLPTPRERNLASPSPSTLVEAREVGEATGGPELSGVPRGESEETGSSEGAPSLLPATRAPEGTRELEAPSEDNSGRTAPAGTSVQAQPVLPTDSASRGGVAVVPASGDCVPSPCHNGGTCLEEEEGVRCLCLPGYGGDLCDVGLRFCNPGWDAFQGACYKHFSTRRSWEEAETQCRMYGAHLASISTPEEQDFINNRYREYQWIGLNDRTIEGDFLWSDGVPLLYENWNPGQPDSYFLSGENCVVMVWHDQGQWSDVPCNYHLSYTCKMGLVSCGPPPELPLAQVFGRPRLRYEVDTVLRYRCREGLAQRNLPLIRCQENGRWEAPQISCVPRRPARALHPEEDPEGRQGRLLGRWKALLIPPSSPMPGP

SEQ ID NO: 818774 - protein, 1226 aa, Homo sapiens
MELGLGHSSELTEDSGFGSEKKSLAGKMGIRNRESMVDVKVGDFWSQDMCEPTWVWYGAGGKSILKSNPIFPSHVPLSACSMAQLFLPLLAALVLAQAPAALADVLEGDSSGKQPHLGSPSLSCSALTNCFQAYGPQEERELEGCGEASRLEHLEIRAELWASGGLEKSWGRTREGHWVQGFGPLRWRIGDPEARRWERGGTGRNPEGGPKGSRLGNWAGGLRGRGWRTLGCGLGILERKWKTLRAGQGILGAELTGRLWGMGLETVGVVLEDLEVGLQDPGPWPLAPGPRGAGESWGRKEGSWSGAWRPPGGTLRVDSVKFQPAPPFTEDRAFRVRIAGDAPLQGVLGGALTIPCHVHYLRPPPSRRAVLGSPRVKWTFLSRGREAEVLVARGVRVKVNEAYRFRVALPAYPASLTDVSLALSELRPNDSGIYRCEVQHGIDDSSDAVEVKVKGGGHSTHNQLKSLMLQRVVFLYREGSARYAFSFSGAQEACARIGAHIATPEQLYAAYLGGYEQCDAGWLSDQTVRYPIQTPREACYGDMDGFPGVRNYGVVDPDDLYDVYCYAEDLNGELFLGDPPEKLTLEEARAYCQERGAEIATTGQLYAAWDGGLDHCSPGWLADGSVRYPIVTPSQRCGGGLPGVKTLFLFPNQTGFPNKHSRFNVYCFRDSAQPSAIPEASNPASNPASDGLEAIVTVTETLEELQLPQEATESESRGAIYSIPIMEDGGGGSSTPEDPAEAPRTLLEFETQSMVPPTGFSEEEGKALEEEEKYEDEEEKEEEEEEEEVEDEALWAWPSELSSPGPEASLPTEPAAQEESLSQAPARAVLQPGASPLPDGESEASRPPRVHGPPTETLPTPRERNLASPSPSTLVEAREVGEATGGPELSGVPRGESEETGSSEGAPSLLPATRAPEGTRELEAPSEDNSGRTAPAGTSVQAQPVLPTDSASRGGVAVVPASGDCVPSPCHNGGTCLEEEEGVRCLCLPGYGGDLCDVGLRFCNPGWDAFQGACYKHFSTRRSWEEAETQCRMYGAHLASISTPEEQDFINNRYREYQWIGLNDRTIEGDFLWSDGVPLLYENWNPGQPDSYFLSGENCVVMVWHDQGQWSDVPCNYHLSYTCKMGLVSCGPPPELPLAQVFGRPRLRYEVDTVLRYRCREGLAQRNLPLIRCQENGRWEAPQISCVPRRPARALHPEEDPEGRQGRLLGRWKALLIPPSSPMPGP

SEQ ID NO: 818775 - protein, 911 aa, Homo sapiens; identical to SEQ ID NO: 818772

SEQ ID NO: 818776 - protein, 911 aa, Homo sapiens; identical to SEQ ID NO: 818772

SEQ ID NO: 818777 - protein, 911 aa, Homo sapiens; identical to SEQ ID NO: 818772

SEQ ID NO: 818778 - protein, 911 aa, Homo sapiens; identical to SEQ ID NO: 818772

SEQ ID NO: 818779 - protein, 949 aa, Homo sapiens
MGLETVGVVLEDLEVGLQDPGPWPLAPGPRGAGESWGRKEGSWSGAWRPPGGTLRVDSVKFQPAPPFTEDRAFRVRIAGDAPLQGVLGGALTIPCHVHYLRPPPSRRAVLGSPRVKWTFLSRGREAEVLVARGVRVKVNEAYRFRVALPAYPASLTDVSLALSELRPNDSGIYRCEVQHGIDDSSDAVEVKVKGVVFLYREGSARYAFSFSGAQEACARIGAHIATPEQLYAAYLGGYEQCDAGWLSDQTVRYPIQTPREACYGDMDGFPGVRNYGVVDPDDLYDVYCYAEDLNGELFLGDPPEKLTLEEARAYCQERGAEIATTGQLYAAWDGGLDHCSPGWLADGSVRYPIVTPSQRCGGGLPGVKTLFLFPNQTGFPNKHSRFNVYCFRDSAQPSAIPEASNPASNPASDGLEAIVTVTETLEELQLPQEATESESRGAIYSIPIMEDGGGGSSTPEDPAEAPRTLLEFETQSMVPPTGFSEEEGKALEEEEKYEDEEEKEEEEEEEEVEDEALWAWPSELSSPGPEASLPTEPAAQEESLSQAPARAVLQPGASPLPDGESEASRPPRVHGPPTETLPTPRERNLASPSPSTLVEAREVGEATGGPELSGVPRGESEETGSSEGAPSLLPATRAPEGTRELEAPSEDNSGRTAPAGTSVQAQPVLPTDSASRGGVAVVPASGDCVPSPCHNGGTCLEEEEGVRCLCLPGYGGDLCDVGLRFCNPGWDAFQGACYKHFSTRRSWEEAETQCRMYGAHLASISTPEEQDFINNRYREYQWIGLNDRTIEGDFLWSDGVPLLYENWNPGQPDSYFLSGENCVVMVWHDQGQWSDVPCNYHLSYTCKMGLVSCGPPPELPLAQVFGRPRLRYEVDTVLRYRCREGLAQRNLPLIRCQENGRWEAPQISCVPRRPARALHPEEDPEGRQGRLLGRWKALLIPPSSPMPGP

SEQ ID NO: 818780 - protein, 949 aa, Homo sapiens; identical to SEQ ID NO: 818779

SEQ ID NO: 818781 - protein, 1243 aa, Homo sapiens
MELGLGHSSELTEDSGFGSEKKSLAGKMGIRNRESMVDVKVGDFWSQDMCEPTWVWYGAGGKSILKSNPIFPSHVPLSACSMAQLFLPLLAALVLAQAPAALADVLEGDSSGKQPHLGSPSLSCSALTNCFQAYGPQEERELEGCGEASRLEHLEIRAELWASGGLEKSWGRTREGHWVQGFGPLRWRIGDPEARRWERGGTGRNPEGGPKGSRLGNWAGGLRGRGWRTLGCGLGILERKWKTLRAGQGILGAELTGRLWGMGLETVGVVLEDLEVGLQDPGPWPLAPGPRGAGESWGRKEGSWSGAWRPPGGTLRVDSVKFQPAPPFTEDRAFRVRIAGDAPLQGVLGGALTIPCHVHYLRPPPSRRAVLGSPRVKWTFLSRGREAEVLVARGVRVKVNEAYRFRVALPAYPASLTDVSLALSELRPNDSGIYRCEVQHGIDDSSDAVEVKVKGVVFLYREGSARYAFSFSGAQEACARIGAHIATPEQLYAAYLGGYEQCDAGWLSDQTVRYPIQTPREACYGDMDGFPGVRNYGVVDPDDLYDVYCYAEDLNGELFLGDPPEKLTLEEARAYCQERGAEIATTGQLYAAWDGGLDHCSPGWLADGSVRYPIVTPSQRCGGGLPGVKTLFLFPNQTGFPNKHSRFNVYCFRDSAQPSAIPEASNPASNPASDGLEAIVTVTETLEELQLPQVLCHCDDSLYSIRGWVGGWVGGLRDGRRLGRVSEATESESRGAIYSIPIMEDGGGGSSTPEDPAEAPRTLLEFETQSMVPPTGFSEEEGKALEEEEKYEDEEEKEEEEEEEEVEDEALWAWPSELSSPGPEASLPTEPAAQEESLSQAPARAVLQPGASPLPDGESEASRPPRVHGPPTETLPTPRERNLASPSPSTLVEAREVGEATGGPELSGVPRGESEETGSSEGAPSLLPATRAPEGTRELEAPSEDNSGRTAPAGTSVQAQPVLPTDSASRGGVAVVPASGDCVPSPCHNGGTCLEEEEGVRCLCLPGYGGDLCDVGLRFCNPGWDAFQGACYKHFSTRRSWEEAETQCRMYGAHLASISTPEEQDFINNRYREYQWIGLNDRTIEGDFLWSDGVPLLYENWNPGQPDSYFLSGENCVVMVWHDQGQWSDVPCNYHLSYTCKMGLVSCGPPPELPLAQVFGRPRLRYEVDTVLRYRCREGLAQRNLPLIRCQENGRWEAPQISCVPRRPARALHPEEDPEGRQGRLLGRWKALLIPPSSPMPGP

SEQ ID NO: 818782 - protein, 764 aa, Homo sapiens
  misc_feature (1)..(1): Xaa can be any naturally occurring amino acid
XDIVDRAVGVVFLYREGSARYAFSFSGAQEACARIGAHIATPEQLYAAYLGGYEQCDAGWLSDQTVRYPIQTPREACYGDMDGFPGVRNYGVVDPDDLYDVYCYAEDLNGELFLGDPPEKLTLEEARAYCQERGAEIATTGQLYAAWDGGLDHCSPGWLADGSVRYPIVTPSQRCGGGLPGVKTLFLFPNQTGFPNKHSRFNVYCFRDSAQPSAIPEASNPASNPASDGLEAIVTVTETLEELQLPQEATESESRGAIYSIPIMEDGGGGSSTPEDPAEAPRTLLEFETQSMVPPTGFSEEEGKALEEEEKYEDEEEKEEEEEEEEVEDEALWAWPSELSSPGPEASLPTEPAAQEESLSQAPARAVLQPGASPLPDGESEASRPPRVHGPPTETLPTPRERNLASPSPSTLVEAREVGEATGGPELSGVPRGESEETGSSEGAPSLLPATRAPEGTRELEAPSEDNSGRTAPAGTSVQAQPVLPTDSASRGGVAVVPASGDCVPSPCHNGGTCLEEEEGVRCLCLPGYGGDLCDVGLRFCNPGWDAFQGACYKHFSTRRSWEEAETQCRMYGAHLASISTPEEQDFINNRYREYQWIGLNDRTIEGDFLWSDGVPLLYENWNPGQPDSYFLSGENCVVMVWHDQGQWSDVPCNYHLSYTCKMGLVSCGPPPELPLAQVFGRPRLRYEVDTVLRYRCREGLAQRNLPLIRCQENGRWEAPQISCVPRRPARALHPEEDPEGRQGRLLGRWKALLIPPSSPMPGP

SEQ ID NO: 818783 - protein, 1121 aa, Homo sapiens
MELGLGHSSELTEDSGFGSEKKSLAGKMGIRNRESMVDVKVGDFWSQDMCEPTWVWYGAGGKSILKSNPIFPSHVPLSACSMAQLFLPLLAALVLAQAPAALADVLEGDSSGKQPHLGSPSLSCSALTNCFQAYGPQEERELEGCGEASRLEHLEIRAELWASGGLEKSWGRTREGHWVQGFGPLRWRIGDPEARRWERGGTGRNPEGGPKGSRLGNWAGGLRGRGWRTLGCGLGILERKWKTLRAGQGILGAELTGRLWGMGLETVGVVLEDLEVGLQDPGPWPLAPGPRGAGESWGRKEGSWSGAWRPPGGTLRVDSVKFQPAPPFTEDRAFRVRIAGDAPLQGVLGGALTIPCHVHYLRPPPSRRAVLGSPRVKWTFLSRGREAEVLVARGVRVKVNEAYRFRVALPAYPASLTDVSLALSELRPNDSGIYRCEVQHGIDDSSDAVEVKVKGVVFLYREGSARYAFSFSGAQEACARIGAHIATPEQLYAAYLGGYEQCDAGWLSDQTVRYPIQTPREACYGDMDGFPGVRNYGVVDPDDLYDVYCYAEDLNGELFLGDPPEKLTLEEARAYCQERGAEIATTGQLYAAWDGGLDHCSPGWLADGSVRYPIVTPSQRCGGGLPGVKTLFLFPNPVCAFLEFETQSMVPPTGFSEEEGKALEEEEKYEDEEEKEEEEEEEEVEDEALWAWPSELSSPGPEASLPTEPAAQEESLSQAPARAVLQPGASPLPDGESEASRPPRVHGPPTETLPTPRERNLASPSPSTLVEAREVGEATGGPELSGVPRGESEETGSSEGAPSLLPATRAPEGTRELEAPSEDNSGRTAPAGTSVQAQPVLPTDSASRGGVAVVPASGDCVPSPCHNGGTCLEEEEGVRCLCLPGYGGDLCDVGLRFCNPGWDAFQGACYKHFSTRRSWEEAETQCRMYGAHLASISTPEEQDFINNRYREYQWIGLNDRTIEGDFLWSDGVPLLYENWNPGQPDSYFLSGENCVVMVWHDQGQWSDVPCNYHLSYTCKMGLVSCGPPPELPLAQVFGRPRLRYEVDTVLRYRCREGLAQRNLPLIRCQENGRWEAPQISCVPRRPARALHPEEDPEGRQGRLLGRWKALLIPPSSPMPGP

SEQ ID NO: 818784 - protein, 1224 aa, Homo sapiens
MELGLGHSSELTEDSGFGSEKKSLAGKMGIRNRESMVDVKVGDFWSQDMCEPTWVWYGAGGKSILKSNPIFPSHVPLSACSMAQLFLPLLAALVLAQAPAALADVLEGDSSGKQPHLGSPSLSCSALTNCFQAYGPQEERELEGCGEASRLEHLEIRAELWASGGLEKSWGRTREGHWVQGFGPLRWRIGDPEARRWERGGTGRNPEGGPKGSRLGNWAGGLRGRGWRTLGCGLGILERKWKTLRAGQGILGAELTGRLWGMGLETVGVVLEDLEVGLQDPGPWPLAPGPRGAGESWGRKEGSWSGAWRPPGGTLRVDSVKFQPAPPFTEDRAFRVRIAGDAPLQGVLGGALTIPCHVHYLRPPPSRRAVLGSPRVKWTFLSRGREAEVLVARGVRVKVNEAYRFRVALPAYPASLTDVSLALSELRPNDSGIYRCEVQHGIDDSSDAVEVKVKGVVFLYREGSARYAFSFSGAQEACARIGAHIATPEQLYAAYLGGYEQCDAGWLSDQTVRYPIQTPREACYGDMDGFPGVRNYGVVDPDDLYDVYCYAEDLNGELFLGDPPEKLTLEEARAYCQERGAEIATTGQLYAAWDGGLDHCSPGWLADGSVRYPIVTPSQRCGGGLPGVKTLFLFPNQTGFPNKHSRFNVYCFRDSAQPSAIPEASNPASNPASDGLEAIVTVTETLEELQLPQEATESESRGAIYSIPIMEDGGGGSSTPEDPAEAPRTLLEFETQSMVPPTGFSEEEGKALEEEEKYEDEEEKEEEEEEEEVEDEALWAWPSELSSPGPEASLPTEPAAQEESLSQAPARAVLQPGASPLPDGESEASRPPRVHGPPTETLPTPRERNLASPSPSTLVEAREVGEATGGPELSGVPRGESEETGSSEGAPSLLPATRAPEGTRELEAPSEDNSGRTAPAGTSVQAQPVLPTDSASRGGVAVVPASGDCVPSPCHNGGTCLEEEEGVRCLCLPGYGGDLCDVGLRFCNPGWDAFQGACYKHFSTRRSWEEAETQCRMYGAHLASISTPEEQDFINNRYREYQWIGLNDRTIEGDFLWSDGVPLLYENWNPGQPDSYFLSGENCVVMVWHDQGQWSDVPCNYHLSYTCKMGLVSCGPPPELPLAQVFGRPRLRYEVDTVLRYRCREGLAQRNLPLIRCQENGRWEAPQISCVPRRPARALHPEEDPEGRQGRLLGRWKAPVIDLVNDVQCPYRARPPVTRHTRLS

SEQ ID NO: 818785 - protein, 447 aa, Homo sapiens
YGIVDPRALVEDEALWAWPSELSSPGPEASLPTEPAAQEESLSQAPARAVLQPGASPLPDGESEASRPPRVHGPPTETLPTPRERNLASPSPSTLVEAREVGEATGGPELSGVPRGESEETGSSEGAPSLLPATRAPEGTRELEAPSEDNSGRTAPAGTSVQAQPVLPTDSASRGGVAVVPASGDCVPSPCHNGGTCLEEEEGVRCLCLPGYGGDLCDVGLRFCNPGWDAFQGACYKHFSTRRSWEEAETQCRMYGAHLASISTPEEQDFINNRYREYQWIGLNDRTIEGDFLWSDGVPLLYENWNPGQPDSYFLSGENCVVMVWHDQGQWSDVPCNYHLSYTCKMGLVSCGPPPELPLAQVFGRPRLRYEVDTVLRYRCREGLAQRNLPLIRCQENGRWEAPQISCVPRRPARALHPEEDPEGRQGRLLGRWKALLIPPSSPMPGP

SEQ ID NO: 818786 - protein, 439 aa, Homo sapiens
NLEDPKFTEYSSELSSPGPEASLPTEPAAQEESLSQAPARAVLQPGASPLPDGESEASRPPRVHGPPTETLPTPRERNLASPSPSTLVEAREVGEATGGPELSGVPRGESEETGSSEGAPSLLPATRAPEGTRELEAPSEDNSGRTAPAGTSVQAQPVLPTDSASRGGVAVVPASGDCVPSPCHNGGTCLEEEEGVRCLCLPGYGGDLCDVGLRFCNPGWDAFQGACYKHFSTRRSWEEAETQCRMYGAHLASISTPEEQDFINNRYREYQWIGLNDRTIEGDFLWSDGVPLLYENWNPGQPDSYFLSGENCVVMVWHDQGQWSDVPCNYHLSYTCKMGLVSCGPPPELPLAQVFGRPRLRYEVDTVLRYRCREGLAQRNLPLIRCQENGRWEAPQISCVPRRPARALHPEEDPEGRQGRLLGRWKALLIPPSSPMPGP

SEQ ID NO: 818787 - protein, 1403 aa, Homo sapiens
MELGLGHSSELTEDSGFGSEKKSLAGKMGIRNRESMVDVKVGDFWSQDMCEPTWVWYGAGGKSILKSNPIFPSHVPLSACSMAQLFLPLLAALVLAQAPAALADVLEGDSSGKQPHLGSPSLSCSALTNCFQAYGPQEERELEGCGEASRLEHLEIRAELWASGGLEKSWGRTREGHWVQGFGPLRWRIGDPEARRWERGGTGRNPEGGPKGSRLGNWAGGLRGRGWRTLGCGLGILERKWKTLRAGQGILGAELTGRLWGMGLETVGVVLEDLEVGLQDPGPWPLAPGPRGAGESWGRKEGSWSGAWRPPGGTLRVDSVKFQPAPPFTEDRAFRVRIAGDAPLQGVLGGALTIPCHVHYLRPPPSRRAVLGSPRVKWTFLSRGREAEVLVARGVRVKVNEAYRFRVALPAYPASLTDVSLALSELRPNDSGIYRCEVQHGIDDSSDAVEVKVKGVVFLYREGSARYAFSFSGAQEACARIGAHIATPEQLYAAYLGGYEQCDAGWLSDQTVRYPIQTPREACYGDMDGFPGVRNYGVVDPDDLYDVYCYAEDLNGELFLGDPPEKLTLEEARAYCQERGAEIATTGQLYAAWDGGLDHCSPGWLADGSVRYPIVTPSQRCGGGLPGVKTLFLFPNQTGFPNKHSRFNVYCFRDSAQPSAIPEASNPASNPASDGLEAIVTVTETLEELQLPQEATESESRGAIYSIPIMEDGGGGSSTPEDPAEAPRTLLEFETQSMVPPTGFSEEEGKALEEEEKYEDEEEKEEEEEEEEVEDEALWAWPSELSSPGPEASLPTEPAAQEESLSQAPARAVLQPGASPLPDGESEASRPPRVHGPPTETLPTPRERNLASPSPSTLVEAREVGEATGGPELSGVPRGESEETGSSEGAPSLLPATRAPEGTRELEAPSEDNSGRTAPAGTSVQAQPVLPTDSASRGGVAVVPASGDCVPSPCHNGGTCLEEEEGVRCLCLPGYGGDLCDVGLRFCNPGWDAFQGACYKHFSTRRSWEEAETQCRMYGAHLASISTPEEQDFINSGLGDRAGGAPAICSHSLSLAYTAFLINPCTYSLVFSSVHSLTHSFTPLLILSPFPPYCLGSGLRERRVEVRAVECACVGRAAVQGAASNPSNLPALRPPSASSNSNSNLVESFDSFSKTPLFQPGLILPYSPTPIPLLSIWPLSRGWGRRTRQGRVLDRGEGFPRQSPQTARERGTAAICWRLRSLHAFVSLDRYREYQWIGLNDRTIEGDFLWSDGVPLLYENWNPGQPDSYFLSGENCVVMVWHDQGQWSDVPCNYHLSYTCKMGLVSCGPPPELPLAQVFGRPRLRYEVDTVLRYRCREGLAQRNLPLIRCQENGRWEAPQISCVPRRPARALHPEEDPEGRQGRLLGRWKALLIPPSSPMPGP

SEQ ID NO: 818788 - protein, 194 aa, Homo sapiens [sequence omitted]

SEQ ID NO: 818789 - protein, 985 aa, Homo sapiens
MELGLGHSSELTEDSGFGSEKKSLAGKMGIRNRESMVDVKVGDFWSQDMCEPTWVWYGAGGKSILKSNPIFPSHVPLSACSMAQLFLPLLAALVLAQAPAALADVLEGDSSGKQPHLGSPSLSCSALTNCFQAYGPQEERELEGCGEASRLEHLEIRAELWASGGLEKSWGRTREGHWVQGFGPLRWRIGDPEARRWERGGTGRNPEGGPKGSRLGNWAGGLRGRGWRTLGCGLGILERKWKTLRAGQGILGAELTGRLWGMGLETVGVVLEDLEVGLQDPGPWPLAPGPRGAGESWGRKEGSWSGAWRPPGGTLRVDSVKFQPAPPFTEDRAFRVRIAGDAPLQGVLGGALTIPCHVHYLRPPPSRRAVLGSPRVKWTFLSRGREAEVLVARGVRVKVNEAYRFRVALPAYPASLTDVSLALSELRPNDSGIYRCEVQHGIDDSSDAVEVKVKGVVFLYREGSARYAFSFSGAQEACARIGAHIATPEQLYAAYLGGYEQCDAGWLSDQTVRYPIQTPREACYGDMDGFPGVRNYGVVDPDDLYDVYCYAEDLNGELFLGDPPEKLTLEEARAYCQERGAEIATTGQLYAAWDGGLDHCSPGWLADGSVRYPIVTPSQRCGGGLPGVKTLFLFPNQTGFPNKHSRFNVYCFRDSAQPSAIPEASNPASNPASDGLEAIVTVTETLEELQLPQEATESESRGAIYSIPIMEDGGGGSSTPEDPAEAPRTLLEFETQSMVPPTGFSEEEGKALEEEEKYEDEEEKEEEEEEEEVEDEALWAWPSELSSPGPEASLPTEPAAQEESLSQAPARAVLQPGASPLPDGESEASRPPRVHGPPTETLPTPRERNLASPSPSTLVEAREVGEATGGPELSGVPRGESEETGSSEGAPSLLPATRAPEGTRELEAPSEDNSGRTAPAGTSVQAQPVLPTDSASRGGVAVVPASGDCVPSPCHNGGTCLEEEEGVRCLCLPGYGGDLCDVGEC

SEQ ID NO: 818790 - protein, 1067 aa, Homo sapiens
MELGLGHSSELTEDSGFGSEKKSLAGKMGIRNRESMVDVKVGDFWSQDMCEPTWVWYGAGGKSILKSNPIFPSHVPLSACSMAQLFLPLLAALVLAQAPAALADVLEGDSSGKQPHLGSPSLSCSALTNCFQAYGPQEERELEGCGEASRLEHLEIRAELWASGGLEKSWGRTREGHWVQGFGPLRWRIGDPEARRWERGGTGRNPEGGPKGSRLGNWAGGLRGRGWRTLGCGLGILERKWKTLRAGQGILGAELTGRLWGMGLETVGVVLEDLEVGLQDPGPWPLAPGPRGAGESWGRKEGSWSGAWRPPGGTLRVDSVKFQPAPPFTEDRAFRVRIAGDAPLQGVLGGALTIPCHVHYLRPPPSRRAVLGSPRVKWTFLSRGREAEVLVARGVRVKVNEAYRFRVALPAYPASLTDVSLALSELRPNDSGIYRCEVQHGIDDSSDAVEVKVKGVVFLYREGSARYAFSFSGAQEACARIGAHIATPEQLYAAYLGGYEQCDAGWLSDQTVRYPIQTPREACYGDMDGFPGVRNYGVVDPDDLYDVYCYAEDLNGELFLGDPPEKLTLEEARAYCQERGAEIATTGQLYAAWDGGLDHCSPGWLADGSVRYPIVTPSQRCGGGLPGVKTLFLFPNQTGFPNKHSRFNVYCFRDSAQPSAIPEASNPASNPASDGLEAIVTVTETLEELQLPQEATESESRGAIYSIPIMEDGGGGSSTPEDPAEAPRTLLEFETQSMVPPTGFSEEEGKALEEEEKYEDEEEKEEEEEEEEVEDEALWAWPSELSSPGPEASLPTEPAAQEESLSQAPARAVLQPGASPLPDGESEASRPPRVHGPPTETLPTPRERNLASPSPSTLVEVTVSPAPATMVGHAWRRRKGSAAYVCLAMGGTCAMLASASATPAGTPSRAPATSTFPHEGAGRRQRPSAGCTARIWPASAHPRNRTSSTTGTGSTSGSDSTTGPSKATSCGRMASPCSMRTGTLGSLTATSCLERTAWSWCGMIRDNGVTCPATTTCPTPARWGWCPVGRHRSCPWLKCSAAHGCAMRWTLCFATGAGKDWPSAICR

SEQ ID NO: 818791 - protein, 1121 aa, Homo sapiens
MELGLGHSSELTEDSGFGSEKKSLAGKMGIRNRESMVDVKVGDFWSQDMCEPTWVWYGAGGKSILKSNPIFPSHVPLSACSMAQLFLPLLAALVLAQAPAALADVLEGDSSGKQPHLGSPSLSCSALTNCFQAYGPQEERELEGCGEASRLEHLEIRAELWASGGLEKSWGRTREGHWVQGFGPLRWRIGDPEARRWERGGTGRNPEGGPKGSRLGNWAGGLRGRGWRTLGCGLGILERKWKTLRAGQGILGAELTGRLWGMGLETVGVVLEDLEVGLQDPGPWPLAPGPRGAGESWGRKEGSWSGAWRPPGGTLRVDSVKFQPAPPFTEDRAFRVRIAGDAPLQGVLGGALTIPCHVHYLRPPPSRRAVLGSPRVKWTFLSRGREAEVLVARGVRVKVNEAYRFRVALPAYPASLTDVSLALSELRPNDSGIYRCEVQHGIDDSSDAVEVKVKGVVFLYREGSARYAFSFSGAQEACARIGAHIATPEQLYAAYLGGYEQCDAGWLSDQTVRYPIQTPREACYGDMDGFPGVRNYGVVDPDDLYDVYCYAEDLNGELFLGDPPEKLTLEEARAYCQERGAEIATTGQLYAAWDGGLDHCSPGWLADGSVRYPIVTPSQRCGGGLPGVKTLFLFPNQTGFPNKHSRFNVYCFRDSAQPSAIPEASNPASNPASDGLEAIVTVTETLEELQLPQEATESESRGAIYSIPIMEDGGGGSSTPEDPAEAPRTLLEFETQSMVPPTGFSEEEGKALEEEEKYEDEEEKEEEEEEEEVEDEALWAWPSELSSPGPEASLPTEPAAQEESLSQAPARAVLQPGASPLPDGESEASRPPRVHGPPTETLPTPRERNLASPSPSTLVEAREVGEATGGPELSGVPRGESEETGSSEGAPSLLPATRAPEGTRELEAPSEDNSGRTAPAGTSVQAQPVLPTDSASRGGVAVVPASDRYREYQWIGLNDRTIEGDFLWSDGVPLLYENWNPGQPDSYFLSGENCVVMVWHDQGQWSDVPCNYHLSYTCKMGLVSCGPPPELPLAQVFGRPRLRYEVDTVLRYRCREGLAQRNLPLIRCQENGRWEAPQISCVPRRPARALHPEEDPEGRQGRLLGRWKALLIPPSSPMPGP

SEQ ID NO: 818792 - protein, 153 aa, Homo sapiens
MEVVGVVRCVYTRACLHTHTHTHTERERERERERERPGLNSLGWVYEDCEGDGHPGSDRNDVTRGKFPEQLKKFKTRAEIQTLELKQRGGCCGVKGTDRMTAELSGLELEEVEERVGSGEAVLTCVRSRRPSWKRPGEYGVPGGRDSLEGRRG

SEQ ID NO: 818793 - protein, 671 aa, Homo sapiens
MAQLFLPLLAALVLAQAPAALADVLEGDSSEDRAFRVRIAGDAPLQGVLGGALTIPCHVHYLRPPPSRRAVLGSPRVKWTFLSRGREAEVLVARGVRVKVNEAYRFRVALPAYPASLTDVSLALSELRPNDSGIYRCEVQHGIDDSSDAVEVKVKGVVFLYREGSARYAFSFSGAQEACARIGAHIATPEQLYAAYLGGYEQCDAGWLSDQTVRYPIQTPREACYGDMDGFPGVRNYGVVDPDDLYDVYCYAEDLNGELFLGDPPEKLTLEEARAYCQERGAEIATTGQLYAAWDGGLDHCSPGWLADGSVRYPIVTPSQRCGGGLPGVKTLFLFPNQTGFPNKHSRFNVYCFRDSAQPSAIPEASNPASNPASDGLEAIVTVTETLEELQLPQEATESESRGAIYSIPIMEDGGGGSSTPEDPAEAPRTLLEFETQSMVPPTGFSEEEGKALEEEEKYEDEEEKEEEEEEEEVEDEALWAWPSELSSPGPEASLPTEPAAQEESLSQAPARAVLQPGASPLPDGESEASRPPRVHGPPTETLPTPRERNLASPSPSTLVEAREVGEATGGPELSGVPRGESEETGSSEGAPSLLPATRAPEGTRELEAPSEDNSGRTAPAGTSVQAQPVLPTDSASRGGVAVVPASGNSAQGSTALSILLLFFPLQLWVT

SEQ ID NO: 818794 - protein, 153 aa, Homo sapiens; identical to SEQ ID NO: 818792

SEQ ID NO: 818795 - protein, 122 aa, Homo sapiens [sequence omitted]

SEQ ID NO: 818796 - protein, 204 aa, Homo sapiens
RTYVDHGVCRMYGAHLASISTPEEQDFINNRYREYQWIGLNDRTIEGDFLWSDGVPLLYENWNPGQPDSYFLSGENCVVMVWHDQGQWSDVPCNYHLSYTCKMGLVSCGPPPELPLAQVFGRPRLRYEVDTVLRYRCREGLAQRNLPLIRCQENGRWEAPQISCVPRRPARALHPEEDPEGRQGRLLGRWKALLIPPSSPMPGP

SEQ ID NO: 818797 - protein, 153 aa, Homo sapiens; identical to SEQ ID NO: 818792

SEQ ID NO: 818798 - protein, 153 aa, Homo sapiens; identical to SEQ ID NO: 818792

SEQ ID NO: 818799 - protein, 154 aa, Homo sapiens
DNGVTCPATTMTTQFSPDSYFLSGENCVVMVWHDQGQWSDVPCNYHLSYTCKMGLVSCGPPPELPLAQVFGRPRLRYEVDTVLRYRCREGLAQRNLPLIRCQENGRWEAPQISCVPRRPARALHPEEDPEGRQGRLLGRWKALLIPPSSPMPGP

SEQ ID NO: 818800 - protein, 140 aa, Homo sapiens
VTCDTALNVGENCVVMVWHDQGQWSDVPCNYHLSYTCKMGLVSCGPPPELPLAQVFGRPRLRYEVDTVLRYRCREGLAQRNLPLIRCQENGRWEAPQISCVPRRPARALHPEEDPEGRQGRLLGRWKALLIPPSSPMPGP

SEQ ID NO: 818801 - protein, 116 aa, Homo sapiens
DRWCVMHYTVYTCKMGLVSCGPPPELPLAQVFGRPRLRYEVDTVLRYRCREGLAQRNLPLIRCQENGRWEAPQISCVPRRPARALHPEEDPEGRQGRLLGRWKALLIPPSSPMPGP

SEQ ID NO: 818802 - protein, 179 aa, Homo sapiens
MAQLFLPLLAALVLAQAPAALADVLEGDSSEDRAFRVRIAGDAPLQGVLGGALTIPCHVHYLRPPPSRRAVLGSPRVKWTFLSRGREAEVLVARGVRVKVNEAYRFRVALPAYPASLTDVSLALSELRPNDSGIYRCEVQHGIDDSSDAVEVKVKGGRFLLAEKGAPGPRLLPLSSFYF

SEQ ID NO: 818803 - protein, 112 aa, Homo sapiens
TPIPLLSIWPLSRGWGRRTRQGRVLDRGEGFPRQSPQTARERGTAAICWRLRSLHAFVSLDRYREYQWIGLNDRTIEGDFLWSDGVPLVRGPSRTPPSSSLPLSTSVPYHPH

SEQ ID NO: 818804 - protein, 77 aa, Homo sapiens
DGGLDHCSPGWLADGSVRYPIVTPSQRCGGGLPGVKTLFLFPNQTGFPNKHSRFNVYCFRGEPTSLQKLRPISERQS

SEQ ID NO: 818805 - protein, 95 aa, Homo sapiens
DEGTGEACPGFPWETRVEGATSCLITQPSLLHPGELFLGDPPEKLTLEEARAYCQERGAEIATTGQLYAAWDGGLDHCSPGWLADGSVRYPIVTP

SEQ ID NO: 818806 - protein, 458 aa, Homo sapiens
LRECRTAEWLLAKMAVAIAAARVWRLNRGLSQAALLLLRQPGARGLARSHPPRQQQQFSSLDDKPQFPGASAEFIDKLEFIQPNVISGIPIYRVMDRQGQIINPSEDPHLPKEKVLKLYKSMTLLNTMDRILYESQRQGRISFYMTNYGEEGTHVGSAAALDNTDLVFGQYREAGVLMYRDYPLELFMAQCYGNISDLGKGRQMPVHYGCKERHFVTISSPLATQIPQAVGAAYAAKRANANRVVICYFGEGAASEGDAHAGFNFAATLECPIIFFCRNNGYAISTPTSEQYRGDGIAARGPGYGIMSIRVDGNDVFAVYNATKEARRRAVAENQPFLIEAMTYRIGHHSTSDDSSAYRSVDEVNYWDKQDHPISRLRHYLLSQGWWDEEQEKAWRKQSRRKVMEAFEQAERKPKPNPNLLFSDVYQEMPAQLRKQQESLARHLQTYGEHYPLDHFDK

SEQ ID NO: 818807 - protein, 458 aa, Homo sapiens; identical to SEQ ID NO: 818806

SEQ ID NO: 818808 - protein, 475 aa, Homo sapiens
LRECRTAEWLLAKMAVAIAAARVWRLNRGLSQAALLLLRQPGARGLARSHPPRQQQQFSSLDDKPQFPGASAEFIDKLEFIQPNVISGIPIYRVMDRQGQIINPSEDPHLPKEKVLKLYKSMTLLNTMDRILYESQRQGRISFYMTNYGEEGTHVGSAAALDNTDLVFGQYREAGVLMYRDYPLELFMAQCYGNISDLGKGRQMPVHYGCKERHFVTISSPLATQIPQAVGAAYAAKRANANRVVICYFGEGAASEGDAHAGFNFAATLECPIIFFCRNNGYAISTPTSEQYRGDGIAARGPGYGIMSIRVDGNDVFAVYNATKEARRRAVAENQPFLIEAMTYRIGHHSTSDDSSAYRSVDEVNYWDKQDHPISRLRHYLLSQGWWDEEQEKAWRKQSRRKTCIRRCPPSSASSRSLWPATCRPTGSTTHWITSISETCSAHPHPSSATPRGSPTLRGAGGPDSTPLSSPVSSL

SEQ ID NO: 818809 - protein, 458 aa, Homo sapiens; identical to SEQ ID NO: 818806

SEQ ID NO: 818810 - protein, 150 aa, Homo sapiens
MATSVTWARGARCLSTTAARNATSSLSPLHWPRRSLRRWGRRTQPSGPMPTGSSSVTSARGQPVRGTPMPASTSLPHLSAPSSSSAGTMATPSPRPPLSSIAAMALQHEAPGMASCQSAWMVMMCLPYTTPQRRPDGGLWQRTSPFSSRP

SEQ ID NO: 818811 - protein, 480 aa, Homo sapiens
MAVAIAAARVWRLNRGLSQAALLLLRQPGARGLARSHPPRQQQQFSSLDDKPQFPGASAEFIDKLEFIQPNVISGIPIYRVMDRQGQIINPSEDPHVRGGSPTSRAPHAQAPCLSPLWSQLPHVYLCLHPQLPKEKVLKLYKSMTLLNTMDRILYESQRQGRISFYMTNYGEEGTHVGSAAALDNTDLVFGQYREAGVLMYRDYPLELFMAQCYGNISDLGKGRQMPVHYGCKERHFVTISSPLATQIPQAVGAAYAAKRANANRVVICYFGEGAASEGDAHAGFNFAATLECPIIFFCRNNGYAISTPTSEQYRGDGIAARGPGYGIMSIRVDGNDVFAVYNATKEARRRAVAENQPFLIEAMTYRIGHHSTSDDSSAYRSVDEVNYWDKQDHPISRLRHYLLSQGWWDEEQEKAWRKQSRRKVMEAFEQAERKPKPNPNLLFSDVYQEMPAQLRKQQESLARHLQTYGEHYPLDHFDK

SEQ ID NO: 818812 - protein, 476 aa, Homo sapiens
MAVAIAAARVWRLNRGLSQAALLLLRQPGARGLARSHPPRQQQQFSSLDDKPQFPGASAEFIDKLEFIQPNVISGIPIYRVMDRQGQIINPSEDPHLPKEKVLKLYKSMTLLNTMDRILYESQRQGRISFYMTNYGEEGTHVGSAAALDNTDLVFGQYREAEARPHHVAQAGLQLLGSSDPPTSASQSAGITGVLMYRDYPLELFMAQCYGNISDLGKGRQMPVHYGCKERHFVTISSPLATQIPQAVGAAYAAKRANANRVVICYFGEGAASEGDAHAGFNFAATLECPIIFFCRNNGYAISTPTSEQYRGDGIAARGPGYGIMSIRVDGNDVFAVYNATKEARRRAVAENQPFLIEAMTYRIGHHSTSDDSSAYRSVDEVNYWDKQDHPISRLRHYLLSQGWWDEEQEKAWRKQSRRKVMEAFEQAERKPKPNPNLLFSDVYQEMPAQLRKQQESLARHLQTYGEHYPLDHFDK

SEQ ID NO: 818813 - protein, 287 aa, Homo sapiens
MVQGVLMYRDYPLELFMAQCYGNISDLGKGRQMPVHYGCKERHFVTISSPLATQIPQAVGAAYAAKRANANRVVICYFGEGAASEGDAHAGFNFAATLECPIIFFCRNNGYAISTPTSEQYRGDGIAARGPGYGIMSIRVDGNDVFAVYNATKEARRRAVAENQPFLIEAMTYRIGHHSTSDDSSAYRSVDEVNYWDKQDHPISRLRHYLLSQGWWDEEQEKAWRKQSRRKVMEAFEQAERKPKPNPNLLFSDVYQEMPAQLRKQQESLARHLQTYGEHYPLDHFDK

SEQ ID NO: 818814 - protein, 458 aa, Homo sapiens; identical to SEQ ID NO: 818806

SEQ ID NO: 818815 - protein, 405 aa, Homo sapiens
LRECRTAEWLLAKMAVAIAAARVWRLNRGLSQAALLLLRQPGARGLARSHPPRQQQQFSSLDDKPQFPGASAEFIDKLEFIQPNVISGIPIYRVMDRQGQIINPSEDPHLPKEKVLKLYKSMTLLNTMDRILYESQRQGRISFYMTNYGEEGTHVGSAAALDNTDLVFGQYREAGVLMYRDYPLELFMAQCYGNISDLGKGRQMPVHYGCKERHFVTISSPLATQIPQAVGAAYAAKRANANRVVICYFGEGAASEGDAHAGFNFAATLECPIIFFCRNNGYAISTPTSEQYRGDGIAARGPGYGIMSIRVDGNDVFAVYNATKEARRRAVAENQPFLIEAMTYRIGHHSTSDDSSAYRSVDEVNYWDKQDHPISRLRHYLLSQGWWDEEQEKAWRKQSRRKRWI

SEQ ID NO: 818816 - protein, 413 aa, Homo sapiens
HRSQVLIAPVHWTMLAQLPSGPIGESPDMSYWHSIAWPNVISGIPIYRVMDRQGQIINPSEDPHLPKEKVLKLYKSMTLLNTMDRILYESQRQGRISFYMTNYGEEGTHVGSAAALDNTDLVFGQYREAGVLMYRDYPLELFMAQCYGNISDLGKGRQMPVHYGCKERHFVTISSPLATQIPQAVGAAYAAKRANANRVVICYFGEGAASEGDAHAGFNFAATLECPIIFFCRNNGYAISTPTSEQYRGDGIAARGPGYGIMSIRVDGNDVFAVYNATKEARRRAVAENQPFLIEAMTYRIGHHSTSDDSSAYRSVDEVNYWDKQDHPISRLRHYLLSQGWWDEEQEKAWRKQSRRKVMEAFEQAERKPKPNPNLLFSDVYQEMPAQLRKQQESLARHLQTYGEHYPLDHFDK

SEQ ID NO: 818817 - protein, 255 aa, Homo sapiens
MPVHYGCKERHFVTISSPLATQIPQAVGAAYAAKRANANRVVICYFGEGAASEGDAHAGFNFAATLECPIIFFCRNNGYAISTPTSEQYRGDGIAARGPGYGIMSIRVDGNDVFAVYNATKEARRRAVAENQPFLIEAMTYRIGHHSTSDDSSAYRSVDEVNYWDKQDHPISRLRHYLLSQGWWDEEQEKAWRKQSRRKVMEAFEQAERKPKPNPNLLFSDVYQEMPAQLRKQQESLARHLQTYGEHYPLDHFDK

SEQ ID NO: 818818 - protein, 170 aa, Homo sapiens
LRECRTAEWLLAKMAVAIAAARVWRLNRGLSQAALLLLRQPGARGLARSHPPRQQQQFSSLDDKPQFPGASAEFIDKLEFIQPNVISGIPIYRVMDRQGQIINPSEDPHLPKEKVLKLYKSMTLLNTMDRILYESQRQSPVVTVPSPRGWVRAHSGLEAHPQLPREVAPL

SEQ ID NO: 818819 - protein, 120 aa, Homo sapiens
MDDSKVVGGKVKKPGKRGRKPAKIDLKAKLERSRQSARECRARKKLRYQYLEELVSSRERAICALREELEMYKQWCMAMDQGKIPSEIKALLTGEEQNKSQQNSSRHTKAGKTDANSNSW

SEQ ID NO: 818820 - protein, 120 aa, Homo sapiens; identical to SEQ ID NO: 818819

SEQ ID NO: 818821 - protein, 102 aa, Homo sapiens
MDDSKVVGGKVKKPGKRGRKPAKIDLKAKLERSRQSARECRARKKLRYQYLEELVSSRERAICALREELEMYKQWCMAMDQGQQNSSRHTKAGKTDANSNSW

SEQ ID NO: 818822 - protein, 74 aa, Homo sapiens
RTAAEGAIPCAALPPTLRSRRLSRASVNTQRLSWRGRRRRRRRREAFGAASRVRSAIPELVPRPRDSGIREANC

SEQ ID NO: 818823 - protein, 120 aa, Homo sapiens; identical to SEQ ID NO: 818819

SEQ ID NO: 818824 - protein, 120 aa, Homo sapiens; identical to SEQ ID NO: 818819

SEQ ID NO: 818825 - protein, 137 aa, Homo sapiens
MTGPPRVDVIVSVISIRAARYGCEKTTEGVRAFYVNVLNEEQRKRLCENIAGHLKDAQIFIQKKAVKNFTEVHPDYGSHIQALLDKYNAEKPKNAIHTFVQSGSHLAAKGEGKSVRPGPCTCAAKLSVHPCNPLITG

SEQ ID NO: 818826 - protein, 550 aa, Homo sapiens
MADSRDPASDQMQHWKEQRAAQKADVLTTGAGNPVGDKLNVITVGPRGPLLVQDVVFTDEMAHFDRERIPERVVHAKGAGAFGYFEVTHDITKYSKAKVFEHIGKKTPIAVRFSTVAGESGSADTVRDPRGFAVKFYTEDGNWDLVGNNTPIFFIRDPILFPSFIHSQKRNPQTHLKDPDMVWDFWSLRPESLHQVSFLFSDRGIPDGHRHMNGYGSHTFKLVNANGEAVYCKFHYKTDQGIKNLSVEDAARLSQEDPDYGIRDLFNAIATGKYPSWTFYIQVMTFNQAETFPFNPFDLTKVWPHKDYPLIPVGKLVLNRNPVNYFAEVEQIAFDPSNMPPGIEASPDKMLQGRLFAYPDTHRHRLGPNYLHIPVNCPYRARVANYQRDGPMCMQDNQGGAPNYYPNSFGAPEQQPSALEHSIQYSGEVRRFNTANDDNVTQVRAFYVNVLNEEQRKRLCENIAGHLKDAQIFIQKKAVKNFTEVHPDYGSHIQALLDKYNAEKPKNAIHTFVQSGSHLAAKGEGKSVRPGPCTCAAKLSVHPCNPLITG

SEQ ID NO: 818827 - protein, 550 aa, Homo sapiens; identical to SEQ ID NO: 818826

SEQ ID NO: 818828 - protein, 550 aa, Homo sapiens; identical to SEQ ID NO: 818826

SEQ ID NO: 818829 - protein, 531 aa, Homo sapiens
MADSRDPASDQMQHWKEQRAAQKADVLTTGAGNPVGDKLNVITVGPRGPLLVQDVVFTDEMAHFDRERIPERVVHAKGAGAFGYFEVTHDITKYSKAKVFEHIGKKTPIAVRFSTVAGESGSADTVRDPRGFAVKFYTEDGNWDLVGNNTPIFFIRDPILSSFIHSRSLRPESLHQVSFLFSDRGIPDGHRHMNGYGSHTFKLVNANGEAVYCKFHYKTDQGIKNLSVEDAARLSQEDPDYGIRDLFNAIATGKYPSWTFYIQVMTFNQAETFPFNPFDLTKVWPHKDYPLIPVGKLVLNRNPVNYFAEVEQIAFDPSNMPPGIEASPDKMLQGRLFAYPDTHRHRLGPNYLHIPVNCPYRARVANYQRDGPMCMQDNQGGAPNYYPNSFGAPEQQPSALEHSIQYSGEVRRFNTANDDNVTQVRAFYVNVLNEEQRKRLCENIAGHLKDAQIFIQKKAVKNFTEVHPDYGSHIQALLDKYNAEKPKNAIHTFVQSGSHLAAKGEGKSVRPGPCTCAAKLSVHPCNPLITG

SEQ ID NO: 818830 - protein, 536 aa, Homo sapiens
MADSRDPASDQMQHWKEQRAAQKADVLTTGAGNPVGDKLNVITVGPRGPLLVQDVVFTDEMAHFDRERIPERVVHAKGAGAFGYFEVTHDITKYSKAKVFEHIGKKTPIAVRFSTVAGESGSADTVRDPRGFAVKFYTEDGNWDLVGNNTPIFFIRDPILFPSFIHSQKRNPQTHLKDPDMVWDFWSLRPESLHQVSFLFSDRGIPDGHRHMNGYGSHTFKLVNANGEAVYCKFHYKTDQGIKNLSVEDAARLSQEDPDYGIRDLFNAIATGKYPSWTFYIQVMTFNQAETFPFNPFDLTKVWPHKDYPLIPVGKLVLNRNPVNYFAEVEQIAFDPSNMPPGIEASPDKMLQGPNYLHIPVNCPYRARVANYQRDGPMCMQDNQGGAPNYYPNSFGAPEQQPSALEHSIQYSGEVRRFNTANDDNVTQVRAFYVNVLNEEQRKRLCENIAGHLKDAQIFIQKKAVKNFTEVHPDYGSHIQALLDKYNAEKPKNAIHTFVQSGSHLAAKGEGKSVRPGPCTCAAKLSVHPCNPLITG

SEQ ID NO: 818831 - protein, 267 aa, Homo sapiens
MTFNQAETFPFNPFDLTKVWPHKDYPLIPVGKLVLNRNPVNYFAEVEQIAFDPSNMPPGIEASPDKMLQGRLFAYPDTHRHRLGPNYLHIPVNCPYRARVANYQRDGPMCMQDNQGGAPNYYPNSFGAPEQQPSALEHSIQYSGEVRRFNTANDDNVTQVRAFYVNVLNEEQRKRLCENIAGHLKDAQIFIQKKAVKNFTEVHPDYGSHIQALLDKYNAEKPKNAIHTFVQSGSHLAAKGEGKSVRPGPCTCAAKLSVHPCNPLITG

SEQ ID NO: 818832 - protein, 531 aa, Homo sapiens
MADSRDPASDQMQHWKEQRAAQKADVLTTGAGNPVGDKLNVITVGPRGPLLVQDVVFTDEMAHFDRERIPERVVHAKGAGAFGYFEVTHDITKYSKAKVFEHIGKKTPIAVRFSTVAGESGSADTVRDPRGFAVKFYTEDGNWDLVGNNTPIFFIRDPILFPSFIHSQKRNPQTHLKDPDMVWDFWSLRPESLHQVSFLFSDRGIPDGHRHMNGYGSHTFKLVNANGEAVYCKFHYKTDQGIKNLSVEDAARLSQEDPDYGIRDLFNAIATGKYPSWTFYIQVMTFNQAETFPFNPFDLTKVWPHKDYPLIPVGKLVLNRNPVNYFAEVEQIAFDPSNMPPGIEASPDKMLQGRLFAYPDTHRHRLGPNYLHIPVNCPYRGAPNYYPNSFGAPEQQPSALEHSIQYSGEVRRFNTANDDNVTQVRAFYVNVLNEEQRKRLCENIAGHLKDAQIFIQKKAVKNFTEVHPDYGSHIQALLDKYNAEKPKNAIHTFVQSGSHLAAKGEGKSVRPGPCTCAAKLSVHPCNPLITG

SEQ ID NO: 818833 - protein, 550 aa, Homo sapiens; identical to SEQ ID NO: 818826

SEQ ID NO: 818834 - protein, 215 aa, Homo sapiens
MLYVTAPSQCLLYLLLQGRLFAYPDTHRHRLGPNYLHIPVNCPYRARVANYQRDGPMCMQDNQGGAPNYYPNSFGAPEQQPSALEHSIQYSGEVRRFNTANDDNVTQVRAFYVNVLNEEQRKRLCENIAGHLKDAQIFIQKKAVKNFTEVHPDYGSHIQALLDKYNAEKPKNAIHTFVQSGSHLAAKGEGKSVRPGPCTCAAKLSVHPCNPLITG

SEQ ID NO: 818835 - protein, 215 aa, Homo sapiens; identical to SEQ ID NO: 818834

SEQ ID NO: 818836 - protein, 215 aa, Homo sapiens; identical to SEQ ID NO: 818834

SEQ ID NO: 818837 - protein, 550 aa, Homo sapiens; identical to SEQ ID NO: 818826

SEQ ID NO: 818838 - protein, 550 aa, Homo sapiens; identical to SEQ ID NO: 818826

SEQ ID NO: 818839 - protein, 176 aa, Homo sapiens
MEKNYRVADDEYCKSIGSYRGSCVRGAPNYYPNSFGAPEQQPSALEHSIQYSGEVRRFNTANDDNVTQVRAFYVNVLNEEQRKRLCENIAGHLKDAQIFIQKKAVKNFTEVHPDYGSHIQALLDKYNAEKPKNAIHTFVQSGSHLAAKGEGKSVRPGPCTCAAKLSVHPCNPLITG

SEQ ID NO: 818840 - protein, 511 aa, Homo sapiens
MADSRDPASDQMQHWKEQRAAQKADVLTTGAGNPVGDKLNVITVGPRGPLLVQDVVFTDEMAHFDRERIPERVVHAKGAGAFGYFEVTHDITKYSKAKVFEHIGKKTPIAVRFSTVAGESGSADTVRDPRGFAVKFYTEDGNWDLVGNNTPIFFIRDPILFPSFIHSQKRNPQTHLKDPDMVWDFWSLRPESLHQVSFLFSDRGIPDGHRHMNGYGSHTFKLVNANGEAVYCKFHYKTDQGIKNLSVEDAARLSQEDPDYGIRDLFNAIATGKYPSWTFYIQVMTFNQAETFPFNPFDLTKVWPHKDYPLIPVGKLVLNRNPVNYFAEVEQIAFDPSNMPPGIEASPDKMLQGRLFAYPDTHRHRLGPNYLHIPVNCPYRARVANYQRDGPMCMQDNQGGAPNYYPNSFGAPEQQPSALEHSIQYSGEVRRFNTANDDNVTQVRAFYVNVLNEEQRKRLCENIAGHLKDAQIFIQKKAVSLCKLKGVLCWLRKTVQLCGRTLKRKCHFCFT

SEQ ID NO: 818841 - protein, 358 aa, Homo sapiens
MADSRDPASDQMQHWKEQRAAQKADVLTTGAGNPVGDKLNVITVGPRGPLLVQDVVFTDEMAHFDRERIPERVVHAKGAGAFGYFEVTHDITKYSKAKVFEHIGKKTPIAVRFSTVAGESGSADTVRDPRGFAVKFYTEDGNWDLVGNNTPIFFIRDPILFPSFIHSQKRNPQTHLKDPDMVWDFWSLRPESLHQVSFLFSDRGIPDGHRHMNGYGSHTFKLVNANGEAVYCKFHYKTDQGIKNLSVEDAARLSQEDPDYGIRDLFNAIATGKYPSWTFYIQVMTFNQAETFPFNPFDLTKVWPHKDYPLIPVGKLVLNRNPVNYFAEVEQIAFDPSNMPPGIEASPDKMLQQVSLVD

SEQ ID NO: 818842 - protein, 175 aa, Homo sapiens
MADSRDPASDQMQHWKEQRAAQKADVLTTGAGNPVGDKLNVITVGPRGPLLVQDVVFTDEMAHFDRERIPERVVHAKGAGAFGYFEVTHDITKYSKAKVFEHIGKKTPIAVRFSTVAGESGSADTVRDPRGFAVKFYTEDGNWDLVGNNTPIFFVQGMPILVSILLFHHSDFLEP

SEQ ID NO: 818843 - protein, 530 aa, Homo sapiens
MTRDFKPGDLIFAKMKGYPHWPARVDEVPDGAVKPPTNKLPIFFFGTHETAFLGPKDIFPYSENKEKYGKPNKRKGFNEGLWEIDNNPKVKFSSQQAATKQSNASSDVEVEEKETSVSKEDTDHEEKASNEDVTKAVDITTPKAARRGRKRKAEKQVETEEAGVVTTATASVNLKVSPKRGRPAATEVKIPKPRGRPKMVKQPCPSESDIITEEDKSKKKGQEEKQPKKQPKKDEEGQKEEDKPRKEPDKKEGKKEVESKRKNLAKTGVTSTSDSEEEGDDQEGEKKRKGGRNFQTAHRRNMLKGQHEKEAADRKRKQEEQMETEQQNKDEGKKPEVKKVEKKRETSMDSRLQRIHAEIKNSLKIDNLDVNRCIEALDELASLQVTMQQAQKHTEMITTLKKIRRFKVSQVIMEKSTMLYNKFKNMFLVGEGDSVITQVLNKSLAEQRQHEEANKTKDQGKKGPNKKLEKEQTGSKTLNGGSDAQDGNQPQHNGESNEDSKDNHEASTKKKPSSEERETEISLKDSTLDN

SEQ ID NO: 818844 - protein, 333 aa, Homo sapiens
MTRDFKPGDLIFAKMKGYPHWPARVDEVPDGAVKPPTNKLPIFFFGTHETAFLGPKDIFPYSENKEKYGKPNKRKGFNEGLWEIDNNPKVKFSSQQAATKQSNASSDVEVEEKETSVSKEDTDHEEKASNEDVTKAVDITTPKAARRGRKRKAEKQVETEEAGVVTTATASVNLKVSPKRGRPAATEVKIPKPRGRPKMVKQPCPSESDIITEEDKSKKKGQEEKQPKKQPKKDEEGQKEEDKPRKEPDKKEGKKEVESKRKNLAKTGVTSTSDSEEEGDDQEGEKKRKGGRNFQTAHRRNMLKGQHEKEAADRKRKQEEQMETEHQTTCNLQ

SEQ ID NO: 818845 - protein, 333 aa, Homo sapiens; identical to SEQ ID NO: 818844

SEQ ID NO: 818846 - protein, 153 aa, Homo sapiens
MCILATEVKIPKPRGRPKMVKQPCPSESDIITEEDKSKKKGQEEKQPKKQPKKDEEGQKEEDKPRKEPDKKEGKKEVESKRKNLAKTGVTSTSDSEEEGDDQEGEKKRKGGRNFQTAHRRNMLKGQHEKEAADRKRKQEEQMETEHQTTCNLQ

SEQ ID NO: 818847 - protein, 245 aa, Homo sapiens
MQQETVPVPVPSEKTKQPKECFLIQPKERKENTTKTRKRRKKKITDVLAKSEPKPGLPEDLQKLMKDYYSSRRLVIELEELNLPDSCFLKANDLTHSLSSYLKEICPKWVKLRKNHSEKKSVLMLIICSSAVRALELIRSMTAFRGDGKVIKLFAKHIKVQAQVKLLEKRVVHLGVGTPGRIKELVKQGGLNLSPLKFLVFDWNWRDQKLRRMMDIPEIRKEVFELLEMGVLSLCKSESLKLGLF

SEQ ID NO: 818848 - protein, 279 aa, Homo sapiens
MADDLGDEWWENQPTGAGSSPEASDGEGEGDTEVMQQETVPVPVPSEKTKQPKECFLIQPKERKENTTKTRKRRKKKITDVLAKSEPKPGLPEDLQKLMKDYYSSRRLVIELEELNLPDSCFLKANDLTHSLSSYLKEICPKWVKLRKNHSEKKSVLMLIICSSAVRALELIRSMTAFRGDGKVIKLFAKHIKVQAQVKLLEKRVVHLGVGTPGRIKELVKQGGLNLSPLKFLVFDWNWRDQKLRRMMDIPEIRKEVFELLEMGVLSLCKSESLKLGLF

SEQ ID NO: 818849 - protein, 73 aa, Homo sapiens
FEFGTQSVYTKELVKQGGLNLSPLKFLVFDWNWRDQKLRRMMDIPEIRKEVFELLEMGVLSLCKSESLKLGLF

SEQ ID NO: 818850 - protein, 186 aa, Homo sapiens
MLTSQGSNPPVLDLSRRALLITTATDSCFLKANDLTHSLSSYLKEICPKWVKLRKNHSEKKSVLMLIICSSAVRALELIRSMTAFRGDGKVIKLFAKHIKVQAQVKLLEKRVVHLGVGTPGRIKELVKQGGLNLSPLKFLVFDWNWRDQKLRRMMDIPEIRKEVFELLEMGVLSLCKSESLKLGLF

SEQ ID NO: 818851 - protein, 284 aa, Homo sapiens
KTKKTTNKGGGEGGLAATTLLISTATEASDGEGEGDTEVMQQETVPVPVPSEKTKQPKECFLIQPKERKENTTKTRKRRKKKITDVLAKSEPKPGLPEDLQKLMKDYYSSRRLVIELEELNLPDSCFLKANDLTHSLSSYLKEICPKWVKLRKNHSEKKSVLMLIICSSAVRALELIRSMTAFRGDGKVIKLFAKHIKVQAQVKLLEKRVVHLGVGTPGRIKELVKQGGLNLSPLKFLVFDWNWRDQKLRRMMDIPEIRKEVFELLEMGVLSLCKSESLKLGLF

SEQ ID NO: 818852 - protein, 245 aa, Homo sapiens; identical to SEQ ID NO: 818847

SEQ ID NO: 818853 - protein, 245 aa, Homo sapiens; identical to SEQ ID NO: 818847

SEQ ID NO: 818854 - protein, 400 aa, Homo sapiens
GSSSFDRELEREKERQRLEREAKEREKERRRSRSIDRGLERRRSRSRERHRSRSRSRDRKGDRRDRDREREKENERGRRRDRDYDKERGNEREKERERSRERSKEQRSRGEVEEKKHKEDKDDRRHRDDKRDSKKEKKTSSPEASDGEGEGDTEVMQQETVPVPVPSEKTKQPKECFLIQPKERKENTTKTRKRRKKKITDVLAKSEPKPGLPEDLQKLMKDYYSSRRLVIELEELNLPDSCFLKANDLTHSLSSYLKEICPKWVKLRKNHSEKKSVLMLIICSSAVRALELIRSMTAFRGDGKVIKLFAKHIKVQAQVKLLEKRVVHLGVGTPGRIKELVKQGGLNLSPLKFLVFDWNWRDQKLRRMMDIPEIRKEVFELLEMGVLSLCKSESLKLGLF

SEQ ID NO: 818855 - protein, 245 aa, Homo sapiens; identical to SEQ ID NO: 818847

SEQ ID NO: 818856 - protein, 279 aa, Homo sapiens; identical to SEQ ID NO: 818848

SEQ ID NO: 818857 - protein, 181 aa, Homo sapiens [sequence omitted]

SEQ ID NO: 818858 - protein, 279 aa, Homo sapiens; identical to SEQ ID NO: 818848

SEQ ID NO: 818859 - protein, 279 aa, Homo sapiens; identical to SEQ ID NO: 818848

SEQ ID NO: 818860 - protein, 279 aa, Homo sapiens; identical to SEQ ID NO: 818848

SEQ ID NO: 818861 - protein, 279 aa, Homo sapiens; identical to SEQ ID NO: 818848

SEQ ID NO: 818862 - protein, 167 aa, Homo sapiens
KTKKTTNKGGGEGGLAATTLLISTATVCPKWVKLRKNHSEKKSVLMLIICSSAVRALELIRSMTAFRGDGKVIKLFAKHIKVQAQVKLLEKRVVHLGVGTPGRIKELVKQGGLNLSPLKFLVFDWNWRDQKLRRMMDIPEIRKEVFELLEMGVLSLCKSESLKLGLF

SEQ ID NO: 818863 - protein, 262 aa, Homo sapiens
MADDLGDEWWENQPTGAGSSPEASDGEGEGDTEVMQQETVPVPVPSEKTKQPKECFLIQPKERKENTTKTRKRRKKKITDVLAKSEPKPGLPEDLQKLMKDYYSSRRLVIELEELNLPDSCFLKANDLTHSLSSYLKEICPKWVKLRKNHSEKKSVLMLIICSSAVRALELIRSMTAFRGDGKVIKLFAKHIKVQAQVKLLEKRVVHLGVGTPGRIKELVKQGGLNLSPLKFLVFDWNWRDQKLRRMMDIPEIKKVVWWYSP

SEQ ID NO: 818864 - protein, 128 aa, Homo sapiens
LLLLNSRLLDDHLQLGRPTPGASMTAFRGDGKVIKLFAKHIKVQAQVKLLEKRVVHLGVGTPGRIKELVKQGGLNLSPLKFLVFDWNWRDQKLRRMMDIPEIRKEVFELLEMGVLSLCKSESLKLGLF

SEQ ID NO: 818865 - protein, 215 aa, Homo sapiens
MADDLGDEWWENQPTGAGSSPEASDGEGEGDTEVMQQETVPVPVPSEKTKQPKECFLIQPKERKENTTKTRKRRKKKITDVLAKSEPKPGLPEDLQKLMKDYYSSRRLVIELEELNLPDSCFLKANDLTHSLSSYLKEICPKWVKLRKNHSEKKSVLMLIICSSAVRALELIRSMTAFRGDGKVIKLFAKHIKPGAGKVAGEACGAPGCMNFREN

SEQ ID NO: 818866 - protein, 323 aa, Homo sapiens
IKHKRRRTRGGGRGAICNDSLNLHRYRVSILPYSDGYQNWRQNPPGFGLLRDSIGFLHDAFLGDLQEASDGEGEGDTEVMQQETVPVPVPSEKTKQPKECFLIQPKERKENTTKTRKRRKKKITDVLAKSEPKPGLPEDLQKLMKDYYSSRRLVIELEELNLPDSCFLKANDLTHSLSSYLKEICPKWVKLRKNHSEKKSVLMLIICSSAVRALELIRSMTAFRGDGKVIKLFAKHIKPGAGKVAGKPVVHLGVGTSGRIKELGKQGGLNLSPLKFLVFDWNWRDQKLRRMMDIPEIRKEVFELLEMGVLSLCKSESLKLGLF

SEQ ID NO: 818867 - protein, 173 aa, Homo sapiens
MADDLGDEWWENQPTGAGSSPEASDGEGEGDTEVMQQETVPVPVPSEKTKQPKECFLIQPKERKENTTKTRKRRKKKITDVLAKSEPKPGLPEDLQKLMKDYYSSRRLVIELEELNLPDSCFLKANDLTHSLSSYLKEICPKWVKLRKNHSEKKSVLMLIICSSAVRALELIR

SEQ ID NO: 818868 - protein, 815 aa, Homo sapiens
MAGGHCGSFPAAAAGSGEIVQLNVGGTRFSTSRQTLMWIPDSFFSSLLSGRISTLRDETGAIFIDRDPAAFAPILNFLRTKELDLRGVSINVLRHEAEFYGITPLVRRLLLCEELERSSCGSVLFHGYLPPPGIPSRKINNTVRSADSRNGLNSTEGEARGNGTQPVLSGTGEETVRLGFPVDPRKVLIVAGHHNWIVAAYAHFAVCYRIKESSGWQQVFTSPYLDWTIERVALNAKVVGGPHGDKDKMVAVASESSIILWSVQDGGSGSEIGVFSLGVPVDALFFIGNQLVATSHTGKVGVWNAVTQHWQVQDVVPITSYDTAGSFLLLGCNNGSIYYIDMQKFPLRMKDNDLLVTELYHDPSNDAITALSVYLTPKTSVSGNWIEIAYGTSSGAVRVIVQHPETVGSGPQLFQTFTVHRSPVTKIMLSEKHLVSVCADNNHVRTWTVTRFRGMISTQPGSTPLASFKILSLEETESHGSYSSGNDIGPFGERDDQQVFIQKVVPITNKLFVRLSSTGKRICEIQAVDCTTISSFTVRECEGSSRMGSRPRRYLFTGHTNGSIQMWDLTTAMDMVNKSEDKDVGGPTEEELLKLLDQCDLSTSRCATPNISPATSVVQHSHLRESNSSLQLQHHDTTHEAATYGSMRPYRESPLLARARRTESFHSYRDFQTINLNRNVERAVPENGNLGPIQAEVKGATGECNISERKSPGVEIKSLRELDSGLEVHKIAEGFSESKKRSSEDENENKIEFRKKGGFEGGGFLGRKKVPYLASSPSTSDGGTDSPGTASPSPTKTTPSPRHKKSDSSGQEYSL

SEQ ID NO: 818869 - protein, 480 aa, Homo sapiens
MAGGHCGSFPAAAAGSGEIVQLNVGGTRFSTSRQTLMWIPDSFFSSLLSGRISTLRDETGAIFIDRDPAAFAPILNFLRTKELDLRGVSINVLRHEAEFYGITPLVRRLLLCEELERSSCGSVLFHGYLPPPGIPSRKINNTVRSADSRNGLNSTEGEARGNGTQPVLSGTGEETVRLGFPVDPRKVLIVAGHHNWIVAAYAHFAVCYRIKESSGWQQVFTSPYLDWTIERVALNAKVVGGPHGDKDKMVAVASESSIILWSVQDGGSGSEIGVFSLGVPVDALFFIGNQLVATSHTGKVGVWNAVTQHWQVQDVVPITSYDTAGSFLLLGCNNGSIYYIDMQKFPLRMKDNDLLVTELYHDPSNDAITALSVYLTPKTSVSGNWIEIAYGTSSGAVRVIVQHPETVGSGPQLFQTFTVHRSPVTKIMLSEKHLVSVCADNNHVLDVDSNTIQRNDLYSARFYSFSVIQDTIPGGDRKSW

SEQ ID NO: 818870 - protein, 815 aa, Homo sapiens; identical to SEQ ID NO: 818868

SEQ ID NO: 818871 - protein, 568 aa, Homo sapiens
MKAGDELRTTAVKESSTIFRQLGKNDQFSFKKLTVAPEYVGEVKMETGITGKVGVWNAVTQHWQVQDVVPITSYDTAGSFLLLGCNNGSIYYIDMQKFPLRMKDNDLLVTELYHDPSNDAITALSVYLTPKTSVSGNWIEIAYGTSSGAVRVIVQHPETVGSGPQLFQTFTVHRSPVTKIMLSEKHLVSVCADNNHVRTWTVTRFRGMISTQPGSTPLASFKILSLEETESHGSYSSGNDIGPFGERDDQQVFIQKVVPITNKLFVRLSSTGKRICEIQAVDCTTISSFTVRECEGSSRMGSRPRRYLFTGHTNGSIQMWDLTTAMDMVNKSEDKDVGGPTEEELLKLLDQCDLSTSRCATPNISPATSVVQHSHLRESNSSLQLQHHDTTHEAATYGSMRPYRESPLLARARRTESFHSYRDFQTINLNRNVERAVPENGNLGPIQAEVKGATGECNISERKSPGVEIKSLRELDSGLEVHKIAEGFSESKKRSSEDENENKIEFRKKGGFEGGGFLGRKKVPYLASSPSTSDGGTDSPGTASPSPTKTTPSPRHKKSDSSGQEYSL

SEQ ID NO: 818872 - protein, 815 aa, Homo sapiens; identical to SEQ ID NO: 818868

SEQ ID NO: 818873 - protein, 492 aa, Homo sapiens
TGYRSNQPSSILRHCYIDMQKFPLRMKDNDLLVTELYHDPSNDAITALSVYLTPKTSVSGNWIEIAYGTSSGAVRVIVQHPETVGSGPQLFQTFTVHRSPVTKIMLSEKHLVSVCADNNHVRTWTVTRFRGMISTQPGSTPLASFKILSLEETESHGSYSSGNDIGPFGERDDQQVFIQKVVPITNKLFVRLSSTGKRICEIQAVDCTTISSFTVRECEGSSRMGSRPRRYLFTGHTNGSIQMWDLTTAMDMVNKSEDKDVGGPTEEELLKLLDQCDLSTSRCATPNISPATSVVQHSHLRESNSSLQLQHHDTTHEAATYGSMRPYRESPLLARARRTESFHSYRDFQTINLNRNVERAVPENGNLGPIQAEVKGATGECNISERKSPGVEIKSLRELDSGLEVHKIAEGFSESKKRSSEDENENKIEFRKKGGFEGGGFLGRKKVPYLASSPSTSDGGTDSPGTASPSPTKTTPSPRHKKSDSSGQEYSL

SEQ ID NO: 818874 - protein, 815 aa, Homo sapiens; identical to SEQ ID NO: 818868

SEQ ID NO: 818875 - protein, 815 aa, Homo sapiens; identical to SEQ ID NO: 818868

SEQ ID NO: 818876 - protein, 240 aa, Homo sapiens
MAGGHCGSFPAAAAGSGEIVQLNVGGTRFSTSRQTLMWIPDSFFSSLLSGRISTLRDETGAIFIDRDPAAFAPILNFLRTKELDLRGVSINVLRHEAEFYGITPLVRRLLLCEELERSSCGSVLFHGYLPPPGIPSRKINNTVRSADSRNGLNSTEGEARGNGTQPVLSGTGEETVRLGFPVDPRKVLIVAGHHNWIVAAYAHFAVCYRVFWLGTVGHACNPSTLGGRDGWSSRSARPTW

SEQ ID NO: 818877 - protein, 700 aa, Homo sapiens
MSRRTRCEDLDELHYQDTDSDVPEQRDSKCKVKWTHEEDEQLRALVRQFGQQDWKFLASHFPNRTDQQCQYRWLRVLNPDLVKGPWTKEEDQKVIELVKKYGTKQWTLIAKHLKGRLGKQCRERWHNHLNPEVKKSCWTEEEDRIICEAHKVLGNRWAEIAKMLPGRTDNAVKNHWNSTIKRKVDTGGFLSESKDCKPPVYLLLELEDKDGLQSAQPTEGQGSLLTNWPSVPPTIKEEENSEEELAAATTSKEQEPIGTDLDAVRTPEPLEEFPKREDQEGSPPETSLPYKWVVEAANLLIPAVGSSLSEALDLIESDPDAWCDLSKFDLPEEPSAEDSINNSLVQLQASHQQQVLPPRQPSALVPSVTEYRLDGHTISDLSRSSRGELIPISPSTEVGGSGIGTPPSVLKRQRKRRVALSPVTENSTSLSFLDSCNSLTPKSTPVKTLPFSPSQFLNFWNKQDTLELESPSLTSTPVCSQKVVVTTPLHRDKTPLHQKHAAFVTPDQKYSMDNTPHTPTPFKNALEKYGPLKPLPQTPHLEEDLKEVLRSEAGIELIIEDDIRPEKQKRKPGLRRSPIKKVRKSLALDIVDEDVKLMMSTLPKSLSLPTTAPSNSSSLTLSGIKEDNSLLNQGFLQAKPEKAAVAQKPRSHFTTPAPMSSAWKTVACGGTRDQLFMQEKARQLLGRLKPSHTSRTLILS

SEQ ID NO: 818878 - protein, 700 aa, Homo sapiens; identical to SEQ ID NO: 818877

SEQ ID NO: 818879 - protein, 700 aa, Homo sapiens; identical to SEQ ID NO: 818877

SEQ ID NO: 818880 - protein, 700 aa, Homo sapiens; identical to SEQ ID NO: 818877

SEQ ID NO: 818881 - protein, 695 aa, Homo sapiens
MNEAVLLDWALSRAALRFSARMCAEPLSFWCWQDEQLRALVRQFGQQDWKFLASHFPNRTDQQCQYRWLRVLNPDLVKGPWTKEEDQKVIELVKKYGTKQWTLIAKHLKGRLGKQCRERWHNHLNPEVKKSCWTEEEDRIICEAHKVLGNRWAEIAKMLPGRTDNAVKNHWNSTIKRKVDTGGFLSESKDCKPPVYLLLELEDKDGLQSAQPTEGQGSLLTNWPSVPPTIKEEENSEEELAAATTSKEQEPIGTDLDAVRTPEPLEEFPKREDQEGSPPETSLPYKWVVEAANLLIPAVGSSLSEALDLIESDPDAWCDLSKFDLPEEPSAEDSINNSLVQLQASHQQQVLPPRQPSALVPSVTEYRLDGHTISDLSRSSRGELIPISPSTEVGGSGIGTPPSVLKRQRKRRVALSPVTENSTSLSFLDSCNSLTPKSTPVKTLPFSPSQFLNFWNKQDTLELESPSLTSTPVCSQKVVVTTPLHRDKTPLHQKHAAFVTPDQKYSMDNTPHTPTPFKNALEKYGPLKPLPQTPHLEEDLKEVLRSEAGIELIIEDDIRPEKQKRKPGLRRSPIKKVRKSLALDIVDEDVKLMMSTLPKSLSLPTTAPSNSSSLTLSGIKEDNSLLNQGFLQAKPEKAAVAQKPRSHFTTPAPMSSAWKTVACGGTRDQLFMQEKARQLLGRLKPSHTSRTLILS

SEQ ID NO: 818882 - protein, 676 aa, Homo sapiens
MSRRTRCEDLDELHYQDTDSDVPEQRDSKCKVKWTHEENRTDQQCQYRWLRVLNPDLVKGPWTKEEDQKVIELVKKYGTKQWTLIAKHLKGRLGKQCRERWHNHLNPEVKKSCWTEEEDRIICEAHKVLGNRWAEIAKMLPGRTDNAVKNHWNSTIKRKVDTGGFLSESKDCKPPVYLLLELEDKDGLQSAQPTEGQGSLLTNWPSVPPTIKEEENSEEELAAATTSKEQEPIGTDLDAVRTPEPLEEFPKREDQEGSPPETSLPYKWVVEAANLLIPAVGSSLSEALDLIESDPDAWCDLSKFDLPEEPSAEDSINNSLVQLQASHQQQVLPPRQPSALVPSVTEYRLDGHTISDLSRSSRGELIPISPSTEVGGSGIGTPPSVLKRQRKRRVALSPVTENSTSLSFLDSCNSLTPKSTPVKTLPFSPSQFLNFWNKQDTLELESPSLTSTPVCSQKVVVTTPLHRDKTPLHQKHAAFVTPDQKYSMDNTPHTPTPFKNALEKYGPLKPLPQTPHLEEDLKEVLRSEAGIELIIEDDIRPEKQKRKPGLRRSPIKKVRKSLALDIVDEDVKLMMSTLPKSLSLPTTAPSNSSSLTLSGIKEDNSLLNQGFLQAKPEKAAVAQKPRSHFTTPAPMSSAWKTVACGGTRDQLFMQEKARQLLGRLKPSHTSRTLILS

SEQ ID NO: 818883 - protein, 676 aa, Homo sapiens; identical to SEQ ID NO: 818882

SEQ ID NO: 818884 - protein, 643 aa, Homo sapiens
MPVQVAESFESRPCQGAMDQRGRPKKVTAGTVPVHTVIELVKKYGTKQWTLIAKHLKGRLGKQCRERWHNHLNPEVKKSCWTEEEDRIICEAHKVLGNRWAEIAKMLPGRTDNAVKNHWNSTIKRKVDTGGFLSESKDCKPPVYLLLELEDKDGLQSAQPTEGQGSLLTNWPSVPPTIKEEENSEEELAAATTSKEQEPIGTDLDAVRTPEPLEEFPKREDQEGSPPETSLPYKWVVEAANLLIPAVGSSLSEALDLIESDPDAWCDLSKFDLPEEPSAEDSINNSLVQLQASHQQQVLPPRQPSALVPSVTEYRLDGHTISDLSRSSRGELIPISPSTEVGGSGIGTPPSVLKRQRKRRVALSPVTENSTSLSFLDSCNSLTPKSTPVKTLPFSPSQFLNFWNKQDTLELESPSLTSTPVCSQKVVVTTPLHRDKTPLHQKHAAFVTPDQKYSMDNTPHTPTPFKNALEKYGPLKPLPQTPHLEEDLKEVLRSEAGIELIIEDDIRPEKQKRKPGLRRSPIKKVRKSLALDIVDEDVKLMMSTLPKSLSLPTTAPSNSSSLTLSGIKEDNSLLNQGFLQAKPEKAAVAQKPRSHFTTPAPMSSAWKTVACGGTRDQLFMQEKARQLLGRLKPSHTSRTLILS

SEQ ID NO: 818885 - protein, 642 aa, Homo sapiens
HEGYWYCTTSTLKVAELFATIHVLTGHGPPEEDQKVIELVKKYGTKQWTLIAKHLKGRLGKQCRERWHNHLNPEVKKSCWTEEEDRIICEAHKVLGNRWAEIAKMLPGRTDNAVKNHWNSTIKRKVDTGGFLSESKDCKPPVYLLLELEDKDGLQSAQPTEGQGSLLTNWPSVPPTIKEEENSEEELAAATTSKEQEPIGTDLDAVRTPEPLEEFPKREDQEGSPPETSLPYKWVVEAANLLIPAVGSSLSEALDLIESDPDAWCDLSKFDLPEEPSAEDSINNSLVQLQASHQQQVLPPRQPSALVPSVTEYRLDGHTISDLSRSSRGELIPISPSTEVGGSGIGTPPSVLKRQRKRRVALSPVTENSTSLSFLDSCNSLTPKSTPVKTLPFSPSQFLNFWNKQDTLELESPSLTSTPVCSQKVVVTTPLHRDKTPLHQKHAAFVTPDQKYSMDNTPHTPTPFKNALEKYGPLKPLPQTPHLEEDLKEVLRSEAGIELIIEDDIRPEKQKRKPGLRRSPIKKVRKSLALDIVDEDVKLMMSTLPKSLSLPTTAPSNSSSLTLSGIKEDNSLLNQGFLQAKPEKAAVAQKPRSHFTTPAPMSSAWKTVACGGTRDQLFMQEKARQLLGRLKPSHTSRTLILS

SEQ ID NO: 818886 - protein, 709 aa, Homo sapiens
MSRRTRCEDLDELHYQDTDSDVPEQRDSKCKVKWTHEEDEQLRALVRQFGQQDWKFLASHFPNRTDQQCQYRWLRVLNPDLVKGPWTKEEDQKVIELVKKYGTKQWTLIAKHLKGRLGKQCRERWHNHLNPEVKKSCWTEEEDRIICEAHKVLGNRWAEIAKMLPGRFKAPAAPCRTDNAVKNHWNSTIKRKVDTGGFLSESKDCKPPVYLLLELEDKDGLQSAQPTEGQGSLLTNWPSVPPTIKEEENSEEELAAATTSKEQEPIGTDLDAVRTPEPLEEFPKREDQEGSPPETSLPYKWVVEAANLLIPAVGSSLSEALDLIESDPDAWCDLSKFDLPEEPSAEDSINNSLVQLQASHQQQVLPPRQPSALVPSVTEYRLDGHTISDLSRSSRGELIPISPSTEVGGSGIGTPPSVLKRQRKRRVALSPVTENSTSLSFLDSCNSLTPKSTPVKTLPFSPSQFLNFWNKQDTLELESPSLTSTPVCSQKVVVTTPLHRDKTPLHQKHAAFVTPDQKYSMDNTPHTPTPFKNALEKYGPLKPLPQTPHLEEDLKEVLRSEAGIELIIEDDIRPEKQKRKPGLRRSPIKKVRKSLALDIVDEDVKLMMSTLPKSLSLPTTAPSNSSSLTLSGIKEDNSLLNQGFLQAKPEKAAVAQKPRSHFTTPAPMSSAWKTVACGGTRDQLFMQEKARQLLGRLKPSHTSRTLILS

SEQ ID NO: 818887 - protein, 561 aa, Homo sapiens
MSCTTRTQIQMCRSRGIASARSNGPMRRTDNAVKNHWNSTIKRKVDTGGFLSESKDCKPPVYLLLELEDKDGLQSAQPTEGQGSLLTNWPSVPPTIKEEENSEEELAAATTSKEQEPIGTDLDAVRTPEPLEEFPKREDQEGSPPETSLPYKWVVEAANLLIPAVGSSLSEALDLIESDPDAWCDLSKFDLPEEPSAEDSINNSLVQLQASHQQQVLPPRQPSALVPSVTEYRLDGHTISDLSRSSRGELIPISPSTEVGGSGIGTPPSVLKRQRKRRVALSPVTENSTSLSFLDSCNSLTPKSTPVKTLPFSPSQFLNFWNKQDTLELESPSLTSTPVCSQKVVVTTPLHRDKTPLHQKHAAFVTPDQKYSMDNTPHTPTPFKNALEKYGPLKPLPQTPHLEEDLKEVLRSEAGIELIIEDDIRPEKQKRKPGLRRSPIKKVRKSLALDIVDEDVKLMMSTLPKSLSLPTTAPSNSSSLTLSGIKEDNSLLNQGFLQAKPEKAAVAQKPRSHFTTPAPMSSAWKTVACGGTRDQLFMQEKARQLLGRLKPSHTSRTLILS

SEQ ID NO: 818888 - protein, 523 aa, Homo sapiens
MSRRTRCEDLDELHYQDTDSDVPEQRDSKCKVKWTHEEDEQLRALVRQFGQQDWKFLASHFPNRTDQQCQYRWLRVLNPDLVKGPWTKEEDQKVIELVKKYGTKQWTLIAKHLKGRLGKQCRERWHNHLNPEVKKSCWTEEEDRIICEAHKVLGNRWAEIAKMLPGRTDNAVKNHWNSTIKRKVDTGGFLSESKDCKPPVYLLLELEDKDGLQSAQPTEGQGSLLTNWPSVPPTIKEEENSEEELAAATTSKEQEPIGTDLDAVRTPEPLEEFPKREDQEGSPPETSLPYKWVVEAANLLIPAVGSSLSEALDLIESDPDAWCDLSKFDLPEEPSAEDSINNSLVQLQASHQQQVLPPRQPSALVPSVTEYRLDGHTISDLSRSSRGELIPISPSTEVGGSGIGTPPSVLKRQRKRRVALSPVTENSTSLSFLDSCNSLTPKSTPVKTLPFSPSQFLNFWNKQDTLELESPSLTSTPVCSQKVVVTTPLHRDKTPLHQKHAACGGAPSRKSGSLWLLTLWMRM

SEQ ID NO: 818889 - protein, 459 aa, Homo sapiens
SPHLSSTPSINSPSPADDYVAPAPPLICLVGPPKREDQEGSPPETSLPYKWVVEAANLLIPAVGSSLSEALDLIESDPDAWCDLSKFDLPEEPSAEDSINNSLVQLQASHQQQVLPPRQPSALVPSVTEYRLDGHTISDLSRSSRGELIPISPSTEVGGSGIGTPPSVLKRQRKRRVALSPVTENSTSLSFLDSCNSLTPKSTPVKTLPFSPSQFLNFWNKQDTLELESPSLTSTPVCSQKVVVTTPLHRDKTPLHQKHAAFVTPDQKYSMDNTPHTPTPFKNALEKYGPLKPLPQTPHLEEDLKEVLRSEAGIELIIEDDIRPEKQKRKPGLRRSPIKKVRKSLALDIVDEDVKLMMSTLPKSLSLPTTAPSNSSSLTLSGIKEDNSLLNQGFLQAKPEKAAVAQKPRSHFTTPAPMSSAWKTVACGGTRDQLFMQEKARQLLGRLKPSHTSRTLILS

SEQ ID NO: 818890 - protein, 562 aa, Homo sapiens
MSRRTRCEDLDELHYQDTDSDVPEQRDSKCKVKWTHEEDEQLRALVRQFGQQDWKFLASHFPNRTDQQCQYRWLRVLNPDLVKGPWTKEEDQKVIELVKKYGTKQWTLIAKHLKGRLGKQCRERWHNHLNPEVKKSCWTEEEDRIICEAHKVLGNRWAEIAKMLPGRTDNAVKNHWNSTIKRKVDTGGFLSESKDCKPPVYLLLELEDKDGLQSAQPTEGQGSLLTNWPSVPPTIKEEENSEEELAAATTSKEQEPIGTDLDAVRTPEPLEEFPKREDQEGSPPETSLPYKWVVEAANLLIPAVGSSLSEALDLIESFLNFWNKQDTLELESPSLTSTPVCSQKVVVTTPLHRDKTPLHQKHAAFVTPDQKYSMDNTPHTPTPFKNALEKYGPLKPLPQTPHLEEDLKEVLRSEAGIELIIEDDIRPEKQKRKPGLRRSPIKKVRKSLALDIVDEDVKLMMSTLPKSLSLPTTAPSNSSSLTLSGIKEDNSLLNQGFLQAKPEKAAVAQKPRSHFTTPAPMSSAWKTVACGGTRDQLFMQEKARQLLGRLKPSHTSRTLILS

SEQ ID NO: 818891 - protein, 705 aa, Homo sapiens
MSRRTRCEDLDELHYQDTDSDVPEQRDSKCKVKWTHEEDEQLRALVRQFGQQDWKFLASHFPNRTDQQCQYRWLRVLNPDLVKGPWTKEEDQKVIELVKKYGTKQWTLIAKHLKGRLGKQCRERWHNHLNPEVKKSCWTEEEDRIICEAHKVLGNRWAEIAKMLPGRTDNAVKNHWNSTIKRKVDTGGFLSESKDCKPPVYLLLELEDKDGLQSAQPTEGQGSLLTNWPSVPPTIKEEENSEEELAAATTSKEQEPIGTDLDAVRTPEPLEEFPKREDQEGSPPETSLPYKWVVEAANLLIPAVGSSLSEALDLIESDPDAWCDLSKFDLPEEPSAEDSINNSLVQLQASHQQQVLPPRQPSALVPSVTEYRLDGHTISDLSRSSRGELIPISPSTEVGGSGIGTPPSVLKRQRKRRVALSPVTENSTSLSFLDSCNSLTPKSTPVKTLPFSPSQFLNFWNKQDTLELESPSLTSTPVCSQKVVVTTPLHRDKTPLHQKHAAFVTPDQKYSMDNTPHTPTPFKNALEKYGPLKPLPQTPHLEEDLKEVLRSEAGIELIIEDDIRPEKQKRKPGLRRSPIKKVRKSLALDIVDEDVKLMMSTLPKSLSLPTTAPSNSSSLTLSGIKEDNSLLNQGFLQAKPEKAAVAQKPRSHFTTPAPMSSAWKTVACGGTREPSATSPSPDSQVEATGPCAALLPSPAVGGSWC

SEQ ID NO: 818892 - protein, 612 aa, Homo sapiens
MSRRTRCEDLDELHYQDTDSDVPEQRDSKCKVKWTHEEDEQLRALVRQFGQQDWKFLASHFPNRTDQQCQYRWLRVLNPDLVKGPWTKEEDQKVIELVKKYGTKQWTLIAKHLKGRLGKQCRERWHNHLNPEVKKSCWTEEEDRIICEAHKVLGNRWAEIAKMLPGRTDNAVKNHWNSTIKRKVDTGGFLSESKDCKPPVYLLLELEDKDGLQSAQPTEGQGSLLTNWPSVPPTIKEEENSEEELAAATTSKEQEPIGTDLDAVRTPEPLEEFPKREDQEGSPPETSLPYKWVVEAANLLIPAVGSSLSEALDLIESDPDAWCDLSKFDLPEEPSAEDSINNSLVQLQASHQQQVLPPRQPSALVPSVTEYRLDGHTISDLSRSSRGELIPISPSTEVGGSGIGTPPSVLKRQRKRRVALSPVTENSTSLSFLDSCNSLTPKSTPVKTLPFSPSQFLNFWNKQDTLELESPSLTSTPVCSQKVVVTTPLHRDKTPLHQKHAAFVTPDQKYSMDNTPHTPTPFKNALEKYGPLKPLPQTPHLEEDLKEVLRSEAGIELIIEDDIRPEKQKRKPGLRRSPIKKVRKSLALDIVDEDVKLMMSTLPKSLSLRNGL

SEQ ID NO: 818893 - protein, 670 aa, Homo sapiens
MSRRTRCEDLDELHYQDTDSDVPEQRDSKCKVKWTHEEDEQLRALVRQFGQQDWKFLASHFPNRTDQQCQYRWLRVLNPDLVKGPWTKEEDQKVIELVKKYGTKQWTLIAKHLKGRLGKQCRERWHNHLNPEVKKSCWTEEEDRIICEAHKVLGNRWAEIAKMLPGRTDNAVKNHWNSTIKRKVDTGGFLSESKDCKPPVYLLLELEDKDGLQSAQPTEGQGSLLTNWPSVPPTIKEEENSEEELAAATTSKEQEPIGTDLDAVRTPEPLEEFPKREDQEGSPPETSLPYKWVVEAANLLIPAVGSSLSEALDLIESDPDAWCDLSKFDLPEEPSAEDSINNSLVQLQASHQQQVLPPRQPSALVPSVTEYRLDGHTISDLSRSSRGELIPISPSTEVGGSGIGTPPSVLKRQRKRRVALSPVTENSTSLSFLDSCNSLTPKSTPVKTLPFSPSQFLNFWNKQDTLELESPSLTSTPVCSQKVVVTTPLHRDKTPLHQKHAAFVTPDQKYSMDNTPHTPTPFKNALEKYGPLKPLPQTPHLEEDLKEVLRSEAGIELIIEDDIRPEKQKRKPGLRRSPIKKVRKSLALDIVDEDVKLMMSTLPKSLSLPDNCPFKLIIEDDIRPEKQKRKPGLRRSPIKKVRKSLALDIVDEDVKLMMSTLPKSLSTRAT

SEQ ID NO: 818894 - protein, 391 aa, Homo sapiens
GTRVPQGGQIYSGTSCTEAVVDTVLCRWFLREVKFTQVTPSHQQQVLPPRQPSALVPSVTEYRLDGHTISDLSRSSRGELIPISPSTEVGGSGIGTPPSVLKRQRKRRVALSPVTENSTSLSFLDSCNSLTPKSTPVKTLPFSPSQFLNFWNKQDTLELESPSLTSTPVCSQKVVVTTPLHRDKTPLHQKHAAFVTPDQKYSMDNTPHTPTPFKNALEKYGPLKPLPQTPHLEEDLKEVLRSEAGIELIIEDDIRPEKQKRKPGLRRSPIKKVRKSLALDIVDEDVKLMMSTLPKSLSLPTTAPSNSSSLTLSGIKEDNSLLNQGFLQAKPEKAAVAQKPRSHFTTPAPMSSAWKTVACGGTRDQLFMQEKARQLLGRLKPSHTSRTLILS

SEQ ID NO: 818895 - protein, 312 aa, Homo sapiens
MPVQVAESFESRPCQGAMDQRGRPKRKRRVALSPVTENSTSLSFLDSCNSLTPKSTPVKTLPFSPSQFLNFWNKQDTLELESPSLTSTPVCSQKVVVTTPLHRDKTPLHQKHAAFVTPDQKYSMDNTPHTPTPFKNALEKYGPLKPLPQTPHLEEDLKEVLRSEAGIELIIEDDIRPEKQKRKPGLRRSPIKKVRKSLALDIVDEDVKLMMSTLPKSLSLPTTAPSNSSSLTLSGIKEDNSLLNQGFLQAKPEKAAVAQKPRSHFTTPAPMSSAWKTVACGGTRDQLFMQEKARQLLGRLKPSHTSRTLILS

SEQ ID NO: 818896 - protein, 502 aa, Homo sapiens
MSRRTRCEDLDELHYQDTDSDVPEQRDSKCKVKWTHEEDEQLRALVRQFGQQDWKFLASHFPNRTDQQCQYRWLRVLNPDLVKGPWTKEEDQKVIELVKKYGTKQWTLIAKHLKGRLGKQCRERWHNHLNPEVKKSCWTEEEDRIICEAHKVLGNRWAEIAKMLPGRTDNAVKNHWNSTIKRKVDTGGFLSESKDCKPPVYLLLELEDKDGLQSAQPTEGQGSLLTNWPSVPPTIKEEENSEEELAAATTSKEQEPIGTDLDAVRTPEPLEEFPKREDQEGSPPETSLPYKWVVEAANLLIPAVGSSLSEALDLIESDPDAWCDLSKFDLPEEPSAEDSINNSLVQLQASHQQQVLPPRQPSALVPSVTEYRLDGHTISDLSRSSRGELIPISPSTEVGGSGIGTPPSVLKRQRKRRVALSPVTENSTSLSFLDSCNSLTPKSTPVKTLPFSPSQFLNFWNKQDTLELESPSLTSTPVCSQKVVVTTPLHRDKTPLHQKHAA

SEQ ID NO: 818897 - protein, 489 aa, Homo sapiens
MSRRTRCEDLDELHYQDTDSDVPEQRDSKCKVKWTHEEDEQLRALVRQFGQQDWKFLASHFPNRTDQQCQYRWLRVLNPDLVKGPWTKEEDQKVIELVKKYGTKQWTLIAKHLKGRLGKQCRERWHNHLNPEVKKSCWTEEEDRIICEAHKVLGNRWAEIAKMLPGRTDNAVKNHWNSTIKRKVDTGGFLSESKDCKPPVYLLLELEDKDGLQSAQPTEGQGSLLTNWPSVPPTIKEEENSEEELAAATTSKEQEPIGTDLDAVRTPEPLEEFPKREDQEGSPPETSLPYKWVVEAANLLIPAVGSSLSEALDLIESDPDAWCDLSKFDLPEEPSAEDSINNSLVQLQASHQQQVLPPRQPSALVPSVTEYRLDGHTISDLSRSSRGELIPISPSTEVGGSGIGTPPSVLKRQRKRRVALSPVTENSTSLSFLDSCNSLTPKSTPVKTLPFSPSQFCLQFDSGNGPGVGPLIPPWARGPPARNPPKLLA

SEQ ID NO: 818898 - protein, 231 aa, Homo sapiens
NLRLGTRLGGGTFWLHTGVDVSEVALQHQKHAAFVTPDQKYSMDNTPHTPTPFKNALEKYGPLKPLPQTPHLEEDLKEVLRSEAGIELIIEDDIRPEKQKRKPGLRRSPIKKVRKSLALDIVDEDVKLMMSTLPKSLSLPTTAPSNSSSLTLSGIKEDNSLLNQGFLQAKPEKAAVAQKPRSHFTTPAPMSSAWKTVACGGTRDQLFMQEKARQLLGRLKPSHTSRTLILS

SEQ ID NO: 818899 - protein, 236 aa, Homo sapiens
MAGPWESRSSAACPRQQLVVVNGACEICILASGLLPALPRTAQLQLGWSHSPTHTQPECGASRGLPRAYPQPQTPHLEEDLKEVLRSEAGIELIIEDDIRPEKQKRKPGLRRSPIKKVRKSLALDIVDEDVKLMMSTLPKSLSLPTTAPSNSSSLTLSGIKEDNSLLNQGFLQAKPEKAAVAQKPRSHFTTPAPMSSAWKTVACGGTRDQLFMQEKARQLLGRLKPSHTSRTLILS

SEQ ID NO: 818900 - protein, 123 aa, Homo sapiens
SGIKEEFEGAVVGKDRDLGSVDIISFTSSSTPTTAPSNSSSLTLSGIKEDNSLLNQGFLQAKPEKAAVAQKPRSHFTTPAPMSSAWKTVACGGTRDQLFMQEKARQLLGRLKPSHTSRTLILS

SEQ ID NO: 818901 - protein, 249 aa, Homo sapiens
MSRRTRCEDLDELHYQDTDSDVPEQRDSKCKVKWTHEEDEQLRALVRQFGQQDWKFLASHFPNRTDQQCQYRWLRVLNPDLVKGPWTKEEDQKVIELVKKYGTKQWTLIAKHLKGRLGKQCRERWHNHLNPEVKKSCWTEEEDRIICEAHKVLGNRWAEIAKMLPGRTDNAVKNHWNSTIKRKVDTGGFLSESKDCKPPVYLLLELEDKDGLQSAQPTEGQGSLLTNWPSVPPTIKEEENSEEELAARP

SEQ ID NO: 818902 - protein, 124 aa, Homo sapiens
WCCTGRAVHGHVSLSSVLLTVEEAHSQEVTCPGSQGMWRENKKALASRGGRLITLPFPGQDHQGLLGTHSPCLDGNPLASSQMSSAWKTVACGGTRDQLFMQEKARQLLGRLKPSHTSRTLILS

SEQ ID NO: 818903 - protein, 142 aa, Homo sapiens
MTSHYVIAIFALMSFCLATAGPEPGALCELSPVSASHPVQALMESFTVLSGCASRGTTGLPQEVHVLNLRTAGQGPGQLQREHSGPQKLLHIAQELLHTEETYVKRMNLLDQVFCTRLDGCGDPSRSHSWAYSLTISSIQRF

SEQ ID NO: 818904 - protein, 850 aa, Homo sapiens [sequence omitted]

SEQ ID NO: 818905 - protein, 850 aa, Homo sapiens [sequence omitted]

SEQ ID NO: 818906 - protein, 850 aa, Homo sapiens [sequence omitted]

SEQ ID NO: 818907 - protein, 628 aa, Homo sapiens
MSSQPQNEEVHIIELITPNSNPYSAFQVDITIDIRPSQEDLEVVKNLILILKCKKSVNWVIKSFDVKGSLKIIAPNSIGFGKESERSMTMTKSIRDDIPSTQGNLVKWALDNGYSPITSYTMAPVANRFHLRLENNEEMGDEEVHTIPPELRILLDPGALPALQNPPIRGGEGQNGGLPFPFPDISRRVWNEEGEDGLPRPKDPVIPSIQLFPGLREPEEVQGSVDIALSVKCDNEKMIVAVEKDSFQASGYSGMDVTLLDPTCKAKMNGTHFVLESPLNGCGTRPRWSALDGVVYYNSIVIQVPALGDSSGWPDGYEDLESGDNGFPGDMDEGDASLFTRPEIVVFNCSLQQVRNPSSFQEQPHGNITFNMELYNTDLFLVPSQGVFSVPENGHVYVEVSVTKAEQELGFAIQTCFISPYSNPDRMSHYTIIENICPKDESVKFYSPKRVHFPIPQADMDKKRFSFVFKPVFNTSLLFLQCELTLCTKMEKHPQKLPKCVPPDEACTSLDASIIWAMMQNKKTFTKPLAVIHHEAESKEKGPSMKEPNPISPPIFHGLDTLTVMGIAFAAFVIGALLTGALWYIYSHTGETAGRQQVPTSPPASENSSAAHSIGSTQSTPCSSSSTA

SEQ ID NO: 818908 - protein, 624 aa, Homo sapiens
EIVATFWHVGLNFAFVFHHSAFQVDITIDIRPSQEDLEVVKNLILILKCKKSVNWVIKSFDVKGSLKIIAPNSIGFGKESERSMTMTKSIRDDIPSTQGNLVKWALDNGYSPITSYTMAPVANRFHLRLENNEEMGDEEVHTIPPELRILLDPGALPALQNPPIRGGEGQNGGLPFPFPDISRRVWNEEGEDGLPRPKDPVIPSIQLFPGLREPEEVQGSVDIALSVKCDNEKMIVAVEKDSFQASGYSGMDVTLLDPTCKAKMNGTHFVLESPLNGCGTRPRWSALDGVVYYNSIVIQVPALGDSSGWPDGYEDLESGDNGFPGDMDEGDASLFTRPEIVVFNCSLQQVRNPSSFQEQPHGNITFNMELYNTDLFLVPSQGVFSVPENGHVYVEVSVTKAEQELGFAIQTCFISPYSNPDRMSHYTIIENICPKDESVKFYSPKRVHFPIPQADMDKKRFSFVFKPVFNTSLLFLQCELTLCTKMEKHPQKLPKCVPPDEACTSLDASIIWAMMQNKKTFTKPLAVIHHEAESKEKGPSMKEPNPISPPIFHGLDTLTVMGIAFAAFVIGALLTGALWYIYSHTGETAGRQQVPTSPPASENSSAAHSIGSTQSTPCSSSSTA

SEQ ID NO: 818909 - protein, 400 aa, Homo sapiens
MSSQPQNEEVHIIELITPNSNPYSAFQVDITIDIRPSQEDLEVVKNLILILKCKKSVNWVIKSFDVKGSLKIIAPNSIGFGKESERSMTMTKSIRDDIPSTQGNLVKWALDNGYSPITSYTMAPVANRFHLRLENNEEMGDEEVHTIPPELRILLDPGALPALQNPPIRGGEGQNGGLPFPFPDISRRVWNEEGEDGLPRPKDPVIPSIQLFPGLREPEEVQGSVDIALSVKCDNEKMIVAVEKDSFQASGYSGMDVTLLDPTCKAKMNGTHFVLESPLNGCGTRPRWSALDGVVYYNSIVIQVPALGDSSGWPDGYEDLESGDNGFPGDMDEGDASLFTRPEIVVFNCSLQQVRNPSSFQEQPHGNITFNMELYNTDRCFSKKDYYQFPNTILLSSGFS

SEQ ID NO: 818910 - protein, 701 aa, Homo sapiens
MSAVSTPSYLLFTPFSPSKMSYLNSSKEVTYTLMSKILLSFYFPFNKSSGKACHLDSKKLCNIKKCYILEKYLAESPQEITTFYLSGSLMFPHIYPEYCKCGTESFLIGSYLSQACSLGVFLKCLTRVTGSHIYHSYNMNNCYIKNYQGDDFRKQVNFLQRLIKILGQINFRLKCTNLPKRKKKKKNRKEFQGLMCLLYQPPSVFLVLLPHHLRQTDNFKDEVEGVLNWESGELGSNPKFSHKYSCETLASHLTFLSLGFLILKVRDSADVSKISFNSNLYSEYEFNIHLVLCPALFVNSSCLLSLFGLCILITSQNYHSTVFISKPKTARIQGLWTGSVNFFWSKLYSRCREGTHSNYTKDIDIAGVVSLFILLNLNVELYSNNLFIGRKIARLGIMHVTNEDIVHKKGNISFLSSWAKYLITVNVCLWKLFACADGGKHGVPGRFKGRTVRNGQDNTFCFGRNFSWDKFPKAWIIGYEIKQIDGEKTSIVFKKYKSILFKEDKLKIKTKIKHNLGRLQELKDSMNCCEGQNQMWKLGSLRKGKAERMISQAINKELFSCAMFYDALSTDPLVLSCPQRLRLASIQSCPLILLSERTEGIQSFQSLKSRVCSSLPSNHITLCRYRIYDVLRLLMKLSLSGRMTCPWDNSPFSWSFQKYLFLGSAPGSTSTATFYSAQSSLCKARHSTNMLLASEENPWKS

SEQ ID NO: 818911 - protein, 701 aa, Homo sapiens; identical to SEQ ID NO: 818910

SEQ ID NO: 818912 - protein, 489 aa, Homo sapiens
MEQPHDEKDPASKRPHPVCLFVLPALRTHPSAQLGPLGGDAMIPTFTALLCLGLSLGPRTHMQAGPLPKPTLWAEPGSVISWGNSVTIWCQGTLEAREYRLDKEESPAPWDRQNPLEPKNKARFSIPSMTEDYAGRYRCYYRSPVGWSQPSDPLELVMTGAYSKPTLSALPSPLVTSGKSVTLLCQSRSPMDTFLLIKERAAHPLLHLRSEHGAQQHQAEFPMSPVTSVHGGTYRCFSSHGFSHYLLSHPSDPLELIVSGSLEGPRPSPTRSVSTAAGPEDQPLMPTGSVPHSGLRRHWEVLIGVLVVSILLLSLLLFLLLQHWRQGKHRTLAQRQADFQRPPGAAEPEPKDGGLQRRSSPAADVQGENFCAAVKNTQPEDGVEMDTRQSPHDEDPQAVTYAKVKHSRPRREMASPPSPLSGEFLDTKDRQAEEDRQMDTEAAASEAPQDVTYAQLHSFTLRQKATEPPPSQEGASPAEPSVYATLAIH

SEQ ID NO: 818913 - protein, 454 aa, Homo sapiens
LVRPGSMGSTFTALLCLGLSLGPRTHMQAGPLPKPTLWAEPGSVISWGNSVTIWCQGTLEAREYRLDKEESPAPWDRQNPLEPKNKARFSIPSMTEDYAGRYRCYYRSPVGWSQPSDPLELVMTGAYSKPTLSALPSPLVTSGKSVTLLCQSRSPMDTFLLIKERAAHPLLHLRSEHGAQQHQAEFPMSPVTSVHGGTYRCFSSHGFSHYLLSHPSDPLELIVSGSLEGPRPSPTRSVSTAAGPEDQPLMPTGSVPHSGLRRHWEVLIGVLVVSILLLSLLLFLLLQHWRQGKHRTLAQRQADFQRPPGAAEPEPKDGGLQRRSSPAADVQGENFCAAVKNTQPEDGVEMDTRQSPHDEDPQAVTYAKVKHSRPRREMASPPSPLSGEFLDTKDRQAEEDRQMDTEAAASEAPQDVTYAQLHSFTLRQKATEPPPSQEGASPAEPSVYATLAIH

SEQ ID NO: 818914 - protein, 753 aa, Homo sapiens
MEQPHDEKDPASKRPHPVCLFVLPALRTHPSAQLGPLGGDAMIPTFTALLCLGLSLGPRTHMQAGPLPKPTLWAEPGSVISWGNSVTIWCQGTLEAREYRLDKEESPAPWDRQNPLEPKNKARFSIPSMTEDYAGRYRCYYRSPVGWSQPSDPLELVMTGAYSKPTLSALPSPLVTSGKSVTLLCQSRSPMDTFLLIKERAAHPLLHLRSEHGAQQHQAEFPMSPVTSVHGGTYRCFSSHGFSHYLLSHPSDPLELIVSGSLEGPRPSPTRSVSTAAGPEDQPLMPTGSVPHSGLRRHWEVLIGVLVVSILLLSLLLFLLLQHWRQGKHRTLAQRQADFQRPPGAAEPEPKDGGLQRRSSPAADVQGENFCAAVKNTQPEDGVEMDTRHRHGGPLLVQHAASCLLGPHSLLLSWDLMGLLPGPLPAPHPLFGHLVVRELPRPQEDDEEMNHSSPLGSPSFIHLVSVPRELTVDGAPHGSCRHSREQSRPRLLSSPRGGRQNANKCIVSRSATCCKEHKPGKGQRVWGSGASLNGKGGLSAQLSSEKPGRRGPRDPLMDEPLQAEETAVQRPRGSSELLQEGRVRLQPNGQGQSEEQRPEPQGGSGQTLHGLRASLRFRQERDVIGSPWEQWGKLTPGSQEDSRTPPTTVSLQQSPHDEDPQAVTYAKVKHSRPRREMASPPSPLSGEFLDTKDRQAEEDRQMDTEAAASEAPQDVTYAQLHSFTLRQKATEPPPSQEGASPAEPSVYATLAIH

SEQ ID NO: 818915 - protein, 361 aa, Homo sapiens
MTEDYAGRYRCYYRSPVGWSQPSDPLELVMTGAYSKPTLSALPSPLVTSGKSVTLLCQSRSPMDTFLLIKERAAHPLLHLRSEHGAQQHQAEFPMSPVTSVHGGTYRCFSSHGFSHYLLSHPSDPLELIVSGSLEGPRPSPTRSVSTAAGPEDQPLMPTGSVPHSGLRRHWEVLIGVLVVSILLLSLLLFLLLQHWRQGKHRTLAQRQADFQRPPGAAEPEPKDGGLQRRSSPAADVQGENFCAAVKNTQPEDGVEMDTRQSPHDEDPQAVTYAKVKHSRPRREMASPPSPLSGEFLDTKDRQAEEDRQMDTEAAASEAPQDVTYAQLHSFTLRQKATEPPPSQEGASPAEPSVYATLAIH

SEQ ID NO: 818916 - protein, 784 aa, Homo sapiens
MEQPHDEKDPASKRPHPVCLFVLPALRTHPSAQLGPLGGDAMIPTFTALLCLGLSLGPRTHMQAGPLPKPTLWAEPGSVISWGNSVTIWCQGTLEAREYRLDKEESPAPWDRQNPLEPKNKARFSIPSMTEDYAGRYRCYYRSPVGWSQPSDPLELVMTGAYSKPTLSALPSPLVTSGKSVTLLCQSRSPMDTFLLIKERAAHPLLHLRSEHGAQQHQAEFPMSPVTSVHGGTYRCFSSHGFSHYLLSHPSDPLELIVSGSLEGPRPSPTRSVSTAAGPEDQPLMPTGSVPHSGLRRHWEVLIGVLVVSILLLSLLLFLLLQHWRQGKHRTLAQRQADFQRPPGAAEPEPKDGGLQRRSSPAADVQGENFCAAVKNTQPEDGVEMDTRVRTRPCPRHQRPPGARSNPAGLLCPPSPGSQHRHGGPLLVQHAASCLLGPHSLLLSWDLMGLLPGPLPAPHPLFGHLVVRELPRPQEDDEEMNHSSPLGSPSFIHLVSVPRELTVDGAPHGSCRHSREQSRPRLLSSPRGGRQNANKCIVSRSATCCKEHKPGKGQRVWGSGASLNGKGGLSAQLSSEKPGRRGPRDPLMDEPLQAEETAVQRPRGSSELLQEGRVRLQPNGQGQSEEQRPEPQGGSGQTLHGLRASLRFRQERDVIGSPWEQWGKLTPGSQEDSRTPPTTVSLQQSPHDEDPQAVTYAKVKHSRPRREMASPPSPLSGEFLDTKDRQAEEDRQMDTEAAASEAPQDVTYAQLHSFTLRQKATEPPPSQEGASPAEPSVYATLAIH

SEQ ID NO: 818917 - protein, 766 aa, Homo sapiens
MEQPHDEKDPASKRPHPVCLFVLPALRTHPSAQLGPLGGDAMIPTFTALLCLGLSLGPRTHMQAGPLPKPTLWAEPGSVISWGNSVTIWCQGTLEAREYRLDKEESPAPWDRQNPLEPKNKARFSIPSMTEDYAGRYRCYYRSPVGWSQPSDPLELVMTGAYSKPTLSALPSPLVTSGKSVTLLCQSRSPMDTFLLIKERAAHPLLHLRSEHGAQQHQAEFPMSPVTSVHGGTYRCFSSHGFSHYLLSHPSDPLELIVSGSLEGPRPSPTRSVSTAAGPEDQPLMPTGSVPHSGLRRHWEVLIGVLVVSILLLSLLLFLLLQHWRQGKHRTLAQRQADFQRPPGAAEPEPKDGGLQRRSSPAADVQGENFCAAVKNTQPEDGVEMDTRVRTRPCPRHQRPPGARSNPAGLLCPPSPGSQHRHGGPLLVQHAASCLLGPHSLLLSWDLMGLLPGPLPAPHPLFGHLVVRELPRPQEDDEEMNHSSPLGSPSFIHLVSVPRELTVDGAPHGSCRHSREQSRPRLLSSPRGGRQNANKCIVSRSATCCKEHKPGKGQRVWGSGASLNGKGGLSAQLSSEKPGRRGPRDPLMDEPLQAEETAVQRPRGSSELLQEGRVRLQPNGQGQSEEQRPEPQGGSGQTLHGLRASLRFRQERDVIGSPWEQWGKLTPGSQEDSRTPPTTVSLQQSPHDEDPQAVTYAKVKHSRPRREMASPPSPLSGEFLDTKDRQAEEDRQMDTEVSPFLSRPPGLPHPHHVPSLSLSPAAGCCI

SEQ ID NO: 818918 - protein, 692 aa, Homo sapiens
MKIFCSRANPTTGSVEWLEEDEHYDYHQEIARSSYADMLHDKDRNVKYYQGIRAAVSRVKDRGQKALVLDIGTGTGLLSMMAVTAGADFCYAIEVFKPMADAAVKIVEKNGFSDKIKVINKHSTEVTVGPEGDMPCRANILVTELFDTELIGEGALPSYEHAHRHLVEENCEAVPHRATVYAQLVESGRMWSWNKLFPIHVQTSLGEQVIVPPVDVESCPGAPSVCDIQLNQVSPADFTVLSDVLPMFSIDFSKQVSSSAACHSRRFEPLTSGRAQVVLSWWDIEMDPEGKIKCTMAPFWAHSDPEEMQWRDHWMQCVYFLPQEEPVVQGSALYLVAHHDDYCVWYSLQRTSPEKNERVRQMRPVCDCQAHLLWNRPRFGEINDQDRTDRYVQALRTVLKPDSVCLCVSDGSLLSVLAHHLGVEQVFTVESSAASHKLLRKIFKANHLEDKINIIEKRPELLTNEDLQGRKVSLLLGEPFFTTSLLPWHNLYFWYVRTAVDQHLGPGAMVMPQAASLHAVVVEFRDLWRIRSPCGDCEGFDVHIMDDMIKRALDFRESREAEPHPLWEYPCRSLSEPWQILTFDFQQPVPLQPLCAEGTVELRRPGQSHAAVLWMEYHLTPECTLSTGLLEPADPEGGCCWNPHCKQAVYFFSPAPDPRALLGGPRTVSYAVEFHPDTGDIIMEFRHADTPD

SEQ ID NO: 818919 - protein, 166 aa, Homo sapiens
QAGERYLCLAAGCLCSPQAPFCSQRALDFRESREAEPHPLWEYPCRSLSEPWQILTFDFQQPVPLQPLCAEGTVELRRPGQSHAAVLWMEYHLTPECTLSTGLLEPADPEGGCCWNPHCKQAVYFFSPAPDPRALLGGPRTVSYAVEFHPDTGDIIMEFRHADTPD

SEQ ID NO: 818920 - protein, 692 aa, Homo sapiens; identical to SEQ ID NO: 818918

SEQ ID NO: 818921 - protein, 612 aa, Homo sapiens
MAVTAGADFCYAIEVFKPMADAAVKIVEKNGFSDKIKVINKHSTEVTVGPEGDMPCRANILVTELFDTELIGEGALPSYEHAHRHLVEENCEAVPHRATVYAQLVESGRMWSWNKLFPIHVQTSLGEQVIVPPVDVESCPGAPSVCDIQLNQVSPADFTVLSDVLPMFSIDFSKQVSSSAACHSRRFEPLTSGRAQVVLSWWDIEMDPEGKIKCTMAPFWAHSDPEEMQWRDHWMQCVYFLPQEEPVVQGSALYLVAHHDDYCVWYSLQRTSPEKNERVRQMRPVCDCQAHLLWNRPRFGEINDQDRTDRYVQALRTVLKPDSVCLCVSDGSLLSVLAHHLGVEQVFTVESSAASHKLLRKIFKANHLEDKINIIEKRPELLTNEDLQGRKVSLLLGEPFFTTSLLPWHNLYFWYVRTAVDQHLGPGAMVMPQAASLHAVVVEFRDLWRIRSPCGDCEGFDVHIMDDMIKRALDFRESREAEPHPLWEYPCRSLSEPWQILTFDFQQPVPLQPLCAEGTVELRRPGQSHAAVLWMEYHLTPECTLSTGLLEPADPEGGCCWNPHCKQAVYFFSPAPDPRALLGGPRTVSYAVEFHPDTGDIIMEFRHADTPD

SEQ ID NO: 818922 - protein, 692 aa, Homo sapiens; identical to SEQ ID NO: 818918

SEQ ID NO: 818923 - protein, 618 aa, Homo sapiens
MKIFCSRANPTTGSVEWLEEDEHYDYHQEIARSSYADMLHDKDRNVKYYQGIRAAVSRVKDRGQKALVLDIGTGTGLLSMMAVTAGADFCYAIEVFKPMADAAVKIVEKNGFSDKIKVINKHSTEVTVGPEGDMPCRANILVTELFDTELIGEGALPSYEHAHRHLVEENCEAVPHRATVYAQLVESGRMWSWNKLFPIHVQTSLGEQVIVPPVDVESCPGAPSVCDIQLNQVSPADFTVLSDVLPMFSIDFSKQVSSSAACHSRRFEPLTSGRAQVVLSWWDIEMDPEGKIKCTMAPFWAHSDPEEMQWRDHWMQCVYFLPQEEPVVQGSALYLVAHHDDYCVWYSLQRTSPEKNERVRQMRPVCDCQAHLLWNRPRFGEINDQDRTDRYVQALRTVSLLLGEPFFTTSLLPWHNLYFWYVRTAVDQHLGPGAMVMPQAASLHAVVVEFRDLWRIRSPCGDCEGFDVHIMDDMIKRALDFRESREAEPHPLWEYPCRSLSEPWQILTFDFQQPVPLQPLCAEGTVELRRPGQSHAAVLWMEYHLTPECTLSTGLLEPADPEGGCCWNPHCKQAVYFFSPAPDPRALLGGPRTVSYAVEFHPDTGDIIMEFRHADTPD

SEQ ID NO: 818924 - protein, 104 aa, Homo sapiens
MKIFCSRANPTTGSVEWLEEDEHYDYHQEIARSSYADMLHDKDRNVKYYQGIRAAVSRVKDRGQKALVLDIGTGTGLLSMMAVTAGADFCYAIEVSLEAEAAPL

SEQ ID NO: 818925 - protein, 105 aa, Homo sapiens
MKIFCSRANPTTGSVEWLEEDEHYDYHQEIARSSYADMLHDKDRNVKYYQGIRAAVSRVKDRGQKALVLDIGTGTGLLSMMAVTAGADFCYAIEVSHSLQVCVLH

SEQ ID NO: 818926 - protein, 867 aa, Homo sapiens
VPPRRRCSVGSSGSPGSGPGLSVGVPSISLLLKAARAAAMAEAALLLLPEAAAERDAREKLALWDRRPDTTAPLTDRQTDSVLELKAAAENLPVPAELPIEDLCSLTSQSLPIELTSVVPESTEDILLKGFTSLGMEEERIETAQQFFSWFAKLQTQMDQDEGTKYRQMRDYLSGFQEQCDAILNDVNSALQHLESLQKQYLFVSNKTGTLHEACEQLLKEQSELVDLAENIQQKLSYFNELETINTKLNSPTLSVNSDGFIPMLAKLDDCITYISSHPNFKDYPIYLLKFKQCLSKALHLMKTYTVNTLQTLTSQLLKRDPSSVPNADNAFTLFYVKFRAAAPKVRTLIEQIELRSEKIPEYQQLLNDIHQCYLDQRELLLGPSIACTVAELTSQNNRDHCALVRSGCAFMVHVCQDEHQLYNEFFTKPTSKLDELLEKLCVSLYDVFRPLIIHVIHLETLSELCGILKNEVLEDHVQNNAEQLGAFAAGVKQMLEDVQERLVYRTHIYIQTDITGYKPAPGDLAYPDKLVMMEQIAQSLKDEQKKVPSEASFSDVHLEEGESNSLTKSGSTESLNPRPQTTISPADLHGMWYPTVRRTLVCLSKLYRCIDRAVFQGLSQEALSACIQSLLGASESISKNKTQIDGQLFLIKHLLILREQIAPFHTEFTIKEISLDLKKTRDAAFKILNPMTVPRFFRLNSNNALIEFLLEGTPEIREHYLDSKKDVDRHLKSACEQFIQQQTKLFVEQLEEFMTKVSALKTMASQGGPKYTLSQQPWAQPAKVNDLAATAYKTIKTKLPVTLRSMSLYLSNKDTEFILFKPVRNNIQQVFQKFHALLKEEFSPEDIQIIACPSMEQLSLLLSVSK

SEQ ID NO: 818927 - protein, 867 aa, Homo sapiens; identical to SEQ ID NO: 818926

SEQ ID NO: 818928 - protein, 682 aa, Homo sapiens
VPPRRRCSVGSSGSPGSGPGLSVGVPSISLLLKAARAAAMAEAALLLLPEAAAERDAREKLALWDRRPDTTAPLTDRQTDSVLELKAAAENLPVPAELPIEDLCSLTSQSLPIELTSVVPESTEDILLKGFTSLGMEEERIETAQQFFSWFAKLQTQMDQDEGTKYRQMRDYLSGFQEQCDAILNDVNSALQHLESLQKQYLFVSNKTGTLHEACEQLLKEQSELVDLAENIQQKLSYFNELETINTKLNSPTLSVNSDGFIPMLAKLDDCITYISSHPNFKDYPIYLLKFKQCLSKALHLMKTYTVNTLQTLTSQLLKRDPSSVPNADNAFTLFYVKFRAAAPKVRTLIEQIELRSEKIPEYQQLLNDIHQCYLDQRELLLGPSIACTVAELTSQNNRDHCALVRSGCAFMVHVCQDEHQLYNEFFTKPTSKLDELLEKLCVSLYDVFRPLIIHVIHLETLSELCGILKNEVLEDHVQNNAEQLGAFAAGVKQMLEDVQERLVYRTHIYIQTDITGYKPAPGDLAYPDKLVMMEQIAQSLKDEQKKVPSEASFSDVHLEEGESNSLTKSGSTESLNPRPQTTISPADLHGMWYPTVRRTLVCLSKLYRCIDRAVFQGLSQEALSACIQSLLGASESISKNKTQIDGQLFLIKHLLILREQIAPFHTEFTIKAASFLVQKEF

SEQ ID NO: 818929 - protein, 106 aa, Homo sapiens
ELRYQFDGDSPSSEASFSDVHLEEGESNSLTKSGSTESLNPRPQTTISPADLHGMWYPTVRRTLVCLSKLYRCIDRAVFQGLSQEALSACIQSLLGASESISKNKV

SEQ ID NO: 818930 - protein, 133 aa, Homo sapiens
VPPRRRCSVGSSGSPGSGPGLSVGVPSISLLLKAARAAAMAEAALLLLPEAAAERDAREKLALWDRRPDTTAPLTDRQTDSVLELKAAAENLPVPAEDMVPEVDLKSMKAQVEISLAQLSNSFIPWIIKVVCS

SEQ ID NO: 818931 - protein, 867 aa, Homo sapiens; identical to SEQ ID NO: 818926

SEQ ID NO: 818932 - protein, 643 aa, Homo sapiens
VPPRRRCSVGSSGSPGSGPGLSVGVPSISLLLKAARAAAMAEAALLLLPEAAAERDAREKLALWDRRPDTTAPLTDRQTDSVLELKAAAENLPVPAELPIEDLCSLTSQSLPIELTSVVPESTEDILLKGFTSLGMEEERIETAQQFFSWFAKLQTQMDQDEGTKYRQMRDYLSGFQEQCDAILNDVNSALQHLESLQKQYLFVSNKTGTLHEACEQLLKEQSELVDLAENIQQKLSYFNELETINTKLNSPTLSVNSDGFIPMLAKLDDCITYISSHPNFKDYPIYLLKFKQCLSKALHLMKTYTVNTLQTLTSQLLKRDPSSVPNADNAFTLFYVKFRAAAPKVRTLIEQIELRSEKIPEYQQLLNDIHQCYLDQRELLLGPSIACTVAELTSQNNRDHCALVRSGCAFMVHVCQDEHQLYNEFFTKPTSKLDELLEKLCVSLYDVFRPLIIHVIHLETLSELCGILKNEVLEDHVQNNAEQLGAFAAGVKQMLEDVQERLVYRTHIYIQTDITGYKPAPGDLAYPDKLVMMEQIAQSLKDEQKKVPSEASFSDVHLEEGESNSLTKSGSTESLNPRPQTTISPADLHGMWYPTVRRTLVCLSKLYRCIDRAVFQGLSQEALSACIQSLLGASESISKNKV

SEQ ID NO: 818933 - protein, 483 aa, Homo sapiens
VPPRRRCSVGSSGSPGSGPGLSVGVPSISLLLKAARAAAMAEAALLLLPEAAAERDAREKLALWDRRPDTTAPLTDRQTDSVLELKAAAENLPVPAELPIEDLCSLTSQSLPIELTSVVPESTEDILLKGFTSLGMEEERIETAQQFFSWFAKLQTQMDQDEGTKYRQMRDYLSGFQEQCDAILNDVNSALQHLESLQKQYLFVSNKTGTLHEACEQLLKEQSELVDLAENIQQKLSYFNELETINTKLNSPTLSVNSDGFIPMLAKLDDCITYISSHPNFKDYPIYLLKFKQCLSKALHLMKTYTVNTLQTLTSQLLKRDPSSVPNADNAFTLFYVKFRAAAPKVRTLIEQIELRSEKIPEYQQLLNDIHQCYLDQRELLLGPSIACTVAELTSQNNRDHCALVRSGCAFMVHVCQDEHQLYNEFFTKPTSKLDELLEKLCVSLYDVFRPLIIHVIHLETLSELCGILKNEVLEDHVQNNGK

SEQ ID NO: 818934 - protein, 815 aa, Homo sapiens [sequence omitted]

SEQ ID NO: 818935 - protein, 538 aa, Homo sapiens
AQVILPPRLLSSWEYRHTPPRPQLPPHVRIWDSVTLNTLHVIGIGFFDRAVTCIAFSKSNGGTNLCAVDDSNDHVLSVWDWQKEEKLADVKCSNEAVFAADFHPTDTNIIVTCGKSHLYFWTLEGSSLNKKQGLFEKQEKPKFVLCVTFSENGDTITGDSSGNILVWGKGTNRISYAVQGAHEGGIFALCMLRDGTLVSGGGKDRKLISWSGNYQKLRKTEIPEQFGPIRTVAEGKGDVILIGTTRNFVLQGTLSGDFTPITQGHTDELWGLAIHASKPQFLTCGHDKHATLWDAVGHRPVWDKIIEDPAQSSGFHPSGSVVAVGTLTGRWFVFDTETKDLVTVHTDGNEQLSVMRYSPDGNFLAIGSHDNCIYIYGVSDNGRKYTRVGKCSGHSSFITHLDWSVNSQFLVSNSGDYEILYWVPSACKQVVSVETTRDIEWATYTCTLGFHVFGVWPEGSDGTDINAVCRAHEKKLLSTGDDFGKVHLFSYPCSQFRAPSHIYGGHSSHVTNVDFLCEDSHLISTGGKDTSIMQWRVI

SEQ ID NO: 818936 - protein, 348 aa, Homo sapiens
MLRDGTLVSGGGKDRKLISWSGNYQKLRKTEIPEQFGPIRTVAEGKGDVILIGTTRNFVLQGTLSGDFTPITQGHTDELWGLAIHASKPQFLTCGHDKHATLWDAVGHRPVWDKIIEDPAQSSGFHPSGSVVAVGTLTGRWFVFDTETKDLVTVHTDGNEQLSVMRYSPDGNFLAIGSHDNCIYIYGVSDNGRKYTRVGKCSGHSSFITHLDWSVNSQFLVSNSGDYEILYWVPSACKQVVSVETTRDIEWATYTCTLGFHVFGVWPEGSDGTDINAVCRAHEKKLLSTGDDFGKVHLFSYPCSQFRAPSHIYGGHSSHVTNVDFLCEDSHLISTGGKDTSIMQWRVI

SEQ ID NO: 818937 - protein, 197 aa, Homo sapiens
MEDGFSSYSSLYDTSSLLQFCNDDSASAASSMEVTDRIASLEQRVQMQEDDIQLLKSALADVVRRLNITEEQQAVLNRKGPTKARPLMQTLPLRTTVNNGTVLPKKPTGSLPSPSGVRKETAVPATKSNIKRTSSSERVSPGGRRESNGDSRGNRNRTGSTSSSSSGKKNSERKSRPGVVAHSCNPSTSAGRSGWIT

SEQ ID NO: 818938 - protein, 151 aa, Homo sapiens
MQKRPSGARLFQQPMGSAPSSSSAFCLIAACDLEGRGAEGDTETDRGQAPGGSEAGKWDKMVYISNGQVLDSRSQSPWRLSLITDFFWGIAEFVVLFFKTLLQQDVKKRRSYGNSSDSRYDDGRGPPGNPPRRMGRINHLRGPSPPPMAGG

SEQ ID NO: 818939 - protein, 151 aa, Homo sapiens; identical to SEQ ID NO: 818938

SEQ ID NO: 818940 - protein, 98 aa, Homo sapiens
  misc_feature (4)..(4): Xaa can be any naturally occurring amino acid
IRHXGDKMVYISNGQVLDSRSQSPWRLSLITDFFWGIAEFVVLFFKTLLQQDVKKRRSYGNSSDSRYDDGRGPPGNPPRRMGRINHLRGPSPPPMAGG

SEQ ID NO: 818941 - protein, 151 aa, Homo sapiens; identical to SEQ ID NO: 818938

SEQ ID NO: 818942 - protein, 110 aa, Homo sapiens
RVRGRVGAPGGSEAGKWDKMVYISNGQVLDSRSQSPWRLSLITDFFWGIAEFVVLFFKTLLQQDVKKRRSYGNSSDSRYDDGRGPPGNPPRRMGRINHLRGPSPPPMAGG

SEQ ID NO: 818943 - protein, 110 aa, Homo sapiens; identical to SEQ ID NO: 818942

SEQ ID NO: 818944 - protein, 151 aa, Homo sapiens; identical to SEQ ID NO: 818938

SEQ ID NO: 818945 - protein, 98 aa, Homo sapiens; identical to SEQ ID NO: 818940
  misc_feature (4)..(4): Xaa can be any naturally occurring amino acid

SEQ ID NO: 818946 - protein, 71 aa, Homo sapiens
PGLQDSARGIAEFVVLFFKTLLQQDVKKRRSYGNSSDSRYDDGRGPPGNPPRRMGRINHLRGPSPPPMAGG

SEQ ID NO: 818947 - protein, 117 aa, Homo sapiens
MQKRPSGARLFQQPMGSAPSSSSAFCLIAACDLEGRGAEGDTETDRGQAPGGSEAGKWDKMVYISNGQVLDSRSQSPWRLSLITDFFWGIAEFVVLFFKTLLQQDVKATRKPSPKNG

SEQ ID NO: 818948 - protein, 151 aa, Homo sapiens; identical to SEQ ID NO: 818938

SEQ ID NO: 818949 - protein, 110 aa, Homo sapiens
VNFVVCQLFALLAAIWFRTYLHSSKTSSFIRHVVATLLGLYLALFCFGWYALHFLVQSGISYCIMIIIGVENMHNYCFVFALGYLTVCQVTRVYIFDYGQYSADFSGSLG

SEQ ID NO: 818950 - protein, 476 aa, Homo sapiens
GGRAAASPSSSSPGTARAGERRGRPERRGPAMATTSTTGSTLLQPLSNAVQLPIDRYCFVFALGYLTVCQVTRVYIFDYGQYSADFSGPMMIITQKITSLACEIHDGMFRKDEELTSSQRDLAVRRMPSLLEYLSYNCNFMGILAGPLCSYKDYITFIEGRSYHITQSGENGKEETQYERTEPSPNTAVVQKLLVCGLSLLFHLTICTTLPVEYNIDEHFQATASWPTKIIYLYISLLAARPKYYFAWTLADAINNAAGFGFRGYDENGAARWDLISNLRIQQIEMSTSFKMFLDNWNIQTALWLKRVCYERTSFSPTIQTFILSAIWHGVYPGYYLTFLTGVLMTLAARAMRNNFRHYFIEPSQLKLFYDVITWIVTQVAISYTVVPFVLLSIKPSLTFYSSWYYCLHILGILVLLLLPVKKTQRRKNTHENIQLSQSKKFDEGENSLGQNSFSTTNNVCNQNQEIASRHSSLKQ

SEQ ID NO: 818951 - protein, 495 aa, Homo sapiens
VNFVVCQLFALLAAIWFRTYLHSSKTSSFIRHVVATLLGLYLALFCFGWYALHFLVQSGISYCIMIIIGVENMHNYCFVFALGYLTVCQVTRVYIFDYGQYSADFSGPMMIITQKITSLACEIHDGMFRKDEELTSSQRDLAVRRMPSLLEYLSYNCNFMGILAGPLCSYKDYITFIEGRSYHITQSGENGKEETQYERTEPSPNTAVVQKLLVCGLSLLFHLTICTTLPVEYNIDEHFQATASWPTKIIYLYISLLAARPKYYFAWTLADAINNAAGFGFRGYDENGAARWDLISNLRIQQIEMSTSFKMFLDNWNIQTALWLKRVCYERTSFSPTIQTFILSAIWHGVYPGYYLTFLTGVLMTLAARAMRNNFRHYFIEPSQLKLFYDVITWIVTQVAISYTVVPFVLLSIKPSLTFYSSWYYCLHILGILVLLLLPVKKTQRRKNTHENIQLSQSKKFDEGENSLGQNSFSTTNNVCNQNQEIASRHSSLKQ

SEQ ID NO: 818952 - protein, 392 aa, Homo sapiens
GGRAAASPSSSSPGTARAGERRGRPERRGPAMATTSTTGSTLLQPLSNAVQLPIDRYCFVFALGYLTVCQVTRVYIFDYGQYSADFSGPMMIITQKITSLACEIHDGMFRKDEELTSSQRDLAVRRMPSLLEYLSYNCNFMGILAGPLCSYKDYITFIEGRSYHITQSGENGKEETQYERTEPSPNTAVVQKLLVCGLSLLFHLTICTTLPVEYNIDEHFQATASWPTKIIYLYISLLAARPKYYFAWTLADAINNAAGFGFRGYDENGAARWDLISNLRIQQIEMSTSFKMFLDNWNIQTALWLKRVCYERTSFSPTIQTFILSAIWHGVYPGYYLTFLTGVLMTLAARAVSIKNFILQFNGPLELLKRLSTSLLQGRPSFLGRGQYCPFH

SEQ ID NO: 818953 - protein, 509 aa, Homo sapiens
VNFVVCQLFALLAAIWFRTYLHSSKTSSFIRHVVATLLGLYLALFCFGWYALHFLVQSGISYCIMIIIGVENMHNYCFVFALGYLTVCQVTRVYIFDYGQYSADFSGPMMIITQKITSLACEIHDGMFRKDEELTSSQRDLAVRRMPSLLEYLSYNCNFMGILAGPLCSYKDYITFIEGRSYHITQSGENGKEETQYERTEPSPNVSHEIYLEPLQHVLTAVVQKLLVCGLSLLFHLTICTTLPVEYNIDEHFQATASWPTKIIYLYISLLAARPKYYFAWTLADAINNAAGFGFRGYDENGAARWDLISNLRIQQIEMSTSFKMFLDNWNIQTALWLKRVCYERTSFSPTIQTFILSAIWHGVYPGYYLTFLTGVLMTLAARAMRNNFRHYFIEPSQLKLFYDVITWIVTQVAISYTVVPFVLLSIKPSLTFYSSWYYCLHILGILVLLLLPVKKTQRRKNTHENIQLSQSKKFDEGENSLGQNSFSTTNNVCNQNQEIASRHSSLKQ

SEQ ID NO: 818954 - protein, 299 aa, Homo sapiens
ACLACTRPRVQSPVTSTICGLSLLFHLTICTTLPVEYNIDEHFQATASWPTKIIYLYISLLAARPKYYFAWTLADAINNAAGFGFRGYDENGAARWDLISNLRIQQIEMSTSFKMFLDNWNIQTALWLKRVCYERTSFSPTIQTFILSAIWHGVYPGYYLTFLTGVLMTLAARAMRNNFRHYFIEPSQLKLFYDVITWIVTQVAISYTVVPFVLLSIKPSLTFYSSWYYCLHILGILVLLLLPVKKTQRRKNTHENIQLSQSKKFDEGENSLGQNSFSTTNNVCNQNQEIASRHSSLKQ

SEQ ID NO: 818955 - protein, 134 aa, Homo sapiens
ANVFVSLFQMRNNFRHYFIEPSQLKLFYDVITWIVTQVAISYTVVPFVLLSIKPSLTFYSSWYYCLHILGILVLLLLPVKKTQRRKNTHENIQLSQSKKFDEGENSLGQNSFSTTNNVCNQNQEIASRHSSLKQ

SEQ ID NO: 818956 - protein, 476 aa, Homo sapiens; identical to SEQ ID NO: 818950

SEQ ID NO: 818957 - protein, 476 aa, Homo sapiens; identical to SEQ ID NO: 818950

SEQ ID NO: 818958 - protein, 309 aa, Homo sapiens
GGRAAASPSSSSPGTARAGERRGRPERRGPAMATTSTTGSTLLQPLSNAVQLPIDRYCFVFALGYLTVCQVTRVYIFDYGQYSADFSGPMMIITQKITSLACEIHDGMFRKDEELTSSQRDLAVRRMPSLLEYLSYNCNFMGILAGPLCSYKDYITFIEGRSYHITQSGENGKEETQYERTEPSPNTAVVQKLLVCGLSLLFHLTICTTLPVEYNIDEHFQATASWPTKIIYLYISLLAARPKYYFAWTLADAINNAAGFGFRGYDENGAARWDLISNLRIQQIEMSTSFKMFLDNWNIQTALWLKRIF

SEQ ID NO: 818959 - protein, 476 aa, Homo sapiens; identical to SEQ ID NO: 818950

SEQ ID NO: 818960 - protein, 371 aa, Homo sapiens
GGRAAASPSSSSPGTARAGERRGRPERRGPAMATTSTTGSTLLQPLSNAVQLPIDRYCFVFALGYLTVCQVTRVYIFDYGQYSADFSGPMMIITQKITSLACEIHDGMFRKDEELTSSQRDLAVRRMPSLLEYLSYNCNFMGILAGPLCSYKDYITFIEGRSYHITQSGENGKEETQYERTEPSPNTAVVQKLLVCGLSLLFHLTICTTLPVEYNIDEHFQATASWPTKIIYLYISLLAARPKYYFAWTLADAINNAAGFGFRGYDENGAARWDLISNLRIQQIEMSTSFKMFLDNWNIQTALWLKRVCYERTSFSPTIQTFILSAIWHGVYPGYYLTFLTGVLMTLAARAMRNNLDIISLNRIAAESSRA

SEQ ID NO: 818961 - protein, 582 aa, Homo sapiens
MSPAPRPSRCLLLPLLTLGTALASLGSAQSSSFSPEAWLQQYGYLPPGDLRTHTQRSPQSLSAAIAAMQKFYGLQVTGKADADTMKAMRRPRCGVPDKFGAEIKANVRRKRYAIQGLKWQHNEITFCIQNYTPKVGEYATYEAIRKAFRVWESATPLRFREVPYAYIREGHEKQADIMIFFAEGFHGDSTPFDGEGGFLAHAYFPGPNIGGDTHFDSAEPWTVRNEDLNGNDIFLVAVHELGHALGLEHSSDPSAIMAPFYQWMDTENFVLPDDDRRGIQQLYGGESGFPTKMPPQPRTTSRPSVPDKPKNPTYGPNICDGNFDTVAMLRGEMFVFKERWFWRVRNNQVMDGYPMPIGQFWRGLPASINTAYERKDGKFVFFKGDKHWVFDEASLEPGYPKHIKELGRGLPTDKIDAALFWMPNGKTYFFRGNKYYRFNEELRAVDSEYPKNIKVWEGIPESPRGSFMGSDEVFTYFYKGNKYWKFNNQKLKVEPGYPKSALRDWMGCPSGGRPDEGTEEETEVIIIEVDEEGGGAVSAAAVVLPVLLLLLVLAVGLAVFFFRRHGTPRRLLYCQRSLLDKV

SEQ ID NO: 818962 - protein, 582 aa, Homo sapiens; identical to SEQ ID NO: 818961

SEQ ID NO: 818963 - protein, 582 aa, Homo sapiens; identical to SEQ ID NO: 818961

SEQ ID NO: 818964 - protein, 582 aa, Homo sapiens; identical to SEQ ID NO: 818961

SEQ ID NO: 818965 - protein, 582 aa, Homo sapiens; identical to SEQ ID NO: 818961

SEQ ID NO: 818966 - protein, 582 aa, Homo sapiens; identical to SEQ ID NO: 818961

SEQ ID NO: 818967 - protein, 582 aa, Homo sapiens; identical to SEQ ID NO: 818961

SEQ ID NO: 818968 - protein, 507 aa, Homo sapiens
MTGKADADTMKAMRRPRCGVPDKFGAEIKANVRRKRYAIQGLKWQHNEITFCIQNYTPKVGEYATYEAIRKAFRVWESATPLRFREVPYAYIREGHEKQADIMIFFAEGFHGDSTPFDGEGGFLAHAYFPGPNIGGDTHFDSAEPWTVRNEDLNGNDIFLVAVHELGHALGLEHSSDPSAIMAPFYQWMDTENFVLPDDDRRGIQQLYGGESGFPTKMPPQPRTTSRPSVPDKPKNPTYGPNICDGNFDTVAMLRGEMFVFKERWFWRVRNNQVMDGYPMPIGQFWRGLPASINTAYERKDGKFVFFKGDKHWVFDEASLEPGYPKHIKELGRGLPTDKIDAALFWMPNGKTYFFRGNKYYRFNEELRAVDSEYPKNIKVWEGIPESPRGSFMGSDEVFTYFYKGNKYWKFNNQKLKVEPGYPKSALRDWMGCPSGGRPDEGTEEETEVIIIEVDEEGGGAVSAAAVVLPVLLLLLVLAVGLAVFFFRRHGTPRRLLYCQRSLLDKV

SEQ ID NO: 818969 - protein, 393 aa, Homo sapiens
MRGCNWVHLGLSGLECPEPPEVRVQRLRYVRVSTLNKIRFLLARKSSERLPIGYNLGLEHSSDPSAIMAPFYQWMDTENFVLPDDDRRGIQQLYGGESGFPTKMPPQPRTTSRPSVPDKPKNPTYGPNICDGNFDTVAMLRGEMFVFKERWFWRVRNNQVMDGYPMPIGQFWRGLPASINTAYERKDGKFVFFKGDKHWVFDEASLEPGYPKHIKELGRGLPTDKIDAALFWMPNGKTYFFRGNKYYRFNEELRAVDSEYPKNIKVWEGIPESPRGSFMGSDEVFTYFYKGNKYWKFNNQKLKVEPGYPKSALRDWMGCPSGGRPDEGTEEETEVIIIEVDEEGGGAVSAAAVVLPVLLLLLVLAVGLAVFFFRRHGTPRRLLYCQRSLLDKV

SEQ ID NO: 818970 - protein, 582 aa, Homo sapiens; identical to SEQ ID NO: 818961

SEQ ID NO: 818971 - protein, 334 aa, Homo sapiens
MPKRRDILAIVLIVLPWTLLITVWHQSTLAPLLAVHKDEGSDPRRETPPGADPREYCTSDRDIVEVVRTEYVYTRPPPWSDTLPTIHVVTPTYSRPVQKAELTRMANTLLHVPNLHWLVVEDAPRRTPLTARLLRDTGLNYTHLHVETPRNYKLRGDARDPRIPRGTMQRNLALRWLRETFPRNSSQPGVVYFADDDNTYSLELFEEMRSTRRVSVWPVAFVGGLRYEAPRVNGAGKVVGWKTVFDPHRPFAIDMAGFAVNLRLILQRSQAYFKLRGVKGGYQESSLLRELVTLNDLEPKAANCTKILVWHTRTEKPVLVNEGKKGFTDPSVEI

SEQ ID NO: 818972 - protein, 347 aa, Homo sapiens
MGNEEPWVQPALEMPKRRDILAIVLIVLPWTLLITVWHQSTLAPLLAVHKDEGSDPRRETPPGADPREYCTSDRDIVEVVRTEYVYTRPPPWSDTLPTIHVVTPTYSRPVQKAELTRMANTLLHVPNLHWLVVEDAPRRTPLTARLLRDTGLNYTHLHVETPRNYKLRGDARDPRIPRGTMQRNLALRWLRETFPRNSSQPGVVYFADDDNTYSLELFEEMRSTRRVSVWPVAFVGGLRYEAPRVNGAGKVVGWKTVFDPHRPFAIDMAGFAVNLRLILQRSQAYFKLRGVKGGYQESSLLRELVTLNDLEPKAANCTKILVWHTRTEKPVLVNEGKKGFTDPSVEI

SEQ ID NO: 818973 - protein, 347 aa, Homo sapiens; identical to SEQ ID NO: 818972

SEQ ID NO: 818974 - protein, 2477 aa, Homo sapiens
MKSNQERSNECLPPKKREIPATSRSSEEKAPTLPSDNHRVEGTAWLPGNPGGRGHGGGRHGPAGTSVELGLQQGIGLHKALSTGLDYSPPSAPRSVPVATTLPAAYATPQPGTPVSPVQYAHLPHTFQFIGSSQYSGTYASFIPSQLIPPTANPVTSAVASAAGATTPSQRSQLEAYSTLLANMGSLSQTPGHKAEQQQQQQQQQQQQHQHQQQQQQQQQQQQQQQHLSRAPGLITPGSPPPAQQNQYVHISSSPQNTGRTASPPAIPVHLHPHQTMIPHTLTLGPPSQVVMQYADSGSHFVPREATKKAESSRLQQAIQAKEVLNGEMEKSRRYGAPSSADLGLGKAGGKSVPHPYESRHVVVHPSPSDYSSRDPSGVRASVMVLPNSNTPAADLEVQQATHREASPSTLNDKSGLHLGKPGHRSYALSPHTVIQTTHSASEPLPVGLPATAFYAGTQPPVIGYLSGQQQAITYAGSLPQHLVIPGTQPLLIPVGSTDMEASGAAPAIVTSSPQFAAVPHTFVTTALPKSENFNPEALVTQAAYPAMVQAQIHLPVVQSVASPAAAPPTLPPYFMKGSIIQLANGELKKVEDLKTEDFIQSAEISNDLKIDSSTVERIEDSHSPGVAVIQFAVGEHRAQVSVEVLVEYPFFVFGQGWSSCCPERTSQLFDLPCSKLSVGDVCISLTLKNLKNGSVKKGQPVDPASVLLKHSKADGLAGSRHRYAEQENGINQGSAQMLSENGELKFPEKMGLPAAPFLTKIEPSKPAATRKRRWSAPESRKLEKSEDEPPLTLPKPSLIPQEVKICIEGRSNVGKRGSVGERKRGSPLSFVSRLLYCRLKYTQYLHVIFLILGFCSNLVIRVTAGVSQETGAYAFSTSVCQGAGGRKGTAGAVRAPGIPGEERNGASQCLPSLAAQKQPGALTPASVRRKVPWEESCRGAGLHACGGAQALWRRVRVSFSLPPSASLSCYRHGPGGFRAVSSWGSHVQNQHQEPSFRASRRRVRWQIWKVNHLKEHFSPPTYFTIKATFNCIDIYFPLWGLTALIYIFFKEQLPHAGFHFCFLLVQRCHQGVVVDREAPAVMAPHGVRGVGGGGEGESEHPRWFLCSVRKTNQVIALTSSQEVDANCPSVRATEALHVEFAKSFCLRTLVLFIVHDYGQLGCHFFFFSDSSVTEELDFEDEHDITIFKHLKILFTLYYQASWSLIQQVLYLTLNSLGKKQKQKKLSCFLFFNTVTTFQLCRIAEEQDIESFNVVKGMNVNYELVCDNKLTTKYYLTGGTFHFDAENQFKAYAELAEKLREKGWRREYSFLSSVFLFKMNFYRTLRFAHIEFITCVIFLQFLSNNIVGKVWGTERAEINVAKFLSNLPKLYGHFIRLCSFENSFWSFYHICHKKPGLSGLLETLRIFFRFIERVFHKDIYICEQDFVLNNYFIIVVINVIFRMAFFFYSKSNRDLMFGTNPERVFHSFYTFHSQRSEISFVGFECIFKVTLKKSFISREKFLNILTWMAATKLNKYLTFLLPHENSTFFVSQIKKKIWYQPTFWLSSIHLHLGFTRTNDFYKPFSGVYQKHLNRFRIAENSSLTFLEFHYPLSMLAESWVGSFLQSYCLFSAVFFKRFCSENLLNLPYILLRALAIIRFCFSFCFLAFDGKRNTGCHIDFVLINITIYNSCGLRKTHTTFWLTSSIELTGSTKPTLRWENTHGLEQEEHHHNFCGSISGIGIKNNWFFLNTCPISFSCFFSMCNTFCANRVCPVCYIVKAHSLLAFSLFGGSSPFWPEQGWREGARRERASHLSPAADAECWGGEPSGAPCVCRHVAERASQGDPGEEPQCPLSPHGIVNVECGEEGGRFISKTHSGAMYLESTHFPRSFLQVGRPLLGVCVLETWSPASEPGREVWPVVCVRSERVGQWLWRGPPATHGHHSLVAAFSSNRKNAQRAGASCLQTLAGPEAPRAASVTASVYQTLTMTGVEILRCRSAYKDQPCASVLCPLCNIYRQPSFVLSFLFSIFKLVTAGLLRLQWNTITKKLVRAKRKKYTINKKPTNKNLSFYGISKYIKGLFLRMFNLRIISVCLGHTGAEGGGRDTEMDATYLRSFKVEIQIEFFIWTFRIIFYVGQLFVFPNSPSLVWDDLISVVVDPISNLEFEPLCFLLGECVGFFPPTRKWQHPSFSPKGTLRNLSHLFLRDGAGVCVVTLTCPEAALGLLWSRVVQFQGMFGFPASCGLLLRYRIDCNIMLHVQDDTVAPSNHKIHSLHSLIFTEICCQKFIFVVVALDFVLFCFLRKRLTIPFNICDYYRKPISFIERKISNAFEDTNTVLFQIWVRKQSSRYRRPGFLSCVGCHGYCFMNHKQLNRLVCCLLKPFAFNLHQVKTGPADSMAQFGFFGGDVKGENYTFFFFKWRGGLCFHICFYPRISEIENLRTHQVINIQRIYFFIKHMHLLLCWVGFLSFPRTVLCFWHRETPNNLHTSTPELRFLLHR

SEQ ID NO: 818975 - protein, 136 aa, Homo sapiens
EEERAEYTADIISTTVAEPYRTCFTAGGSKTSPVEQQPEQQQPQDIVSLPLPPLPHATPDPFTLYRASCIKSPGWSIQAADLFVILVQQSPPPLPLQGSASHVRSQNRKCWWTSLLAPRSSLEVPGTWCLCRSKCL

SEQ ID NO: 818976 - protein, 114 aa, Homo sapiens
EEERAEYTADIISTTVAEPYRTCFTAGGSKTSPVEQQPEQQQPQDIVSLPLPPLPHATPDPFTLYSHRTESAGGHLFLPQDLRWKSPGLGVFAVQSVYELARRHNVSPFYSGPP

SEQ ID NO: 818977 - protein, 2478 aa, Homo sapiens
MKSNQERSNECLPPKKREIPATSRSSEEKAPTLPSDNHRVEGTAWLPGNPGGRGHGGGRHGPAGTSVELGLQQGIGLHKALSTGLDYSPPSAPRSVPVATTLPAAYATPQPGTPVSPVQYAHLPHTFQFIGSSQYSGTYASFIPSQLIPPTANPVTSAVASAAGATTPSQRSQLEAYSTLLANMGSLSQTPGHKAEQQQQQQQQQQQQHQHQQQQQQQQQQQQQQQHLSRAPGLITPGSPPPAQQNQYVHISSSPQNTGRTASPPAIPVHLHPHQTMIPHTLTLGPPSQVVMQYADSGSHFVPREATKKAESSRLQQAIQAKEVLNGEMEKSRRYGAPSSADLGLGKAGGKSVPHPYESRHVVVHPSPSDYSSRDPSGVRASVMVLPNSNTPAADLEVQQATHREASPSTLNDKSGLHLGKPGHRSYALSPHTVIQTTHSASEPLPVGLPATAFYAGTQPPVIGYLSGQQQAITYAGSLPQHLVIPGTQPLLIPVGSTDMEASGAAPAIVTSSPQFAAVPHTFVTTALPKSENFNPEALVTQAAYPAMVQAQIHLPVVQSVASPAAAPPTLPPYFMKGSIIQLANGELKKVEDLKTEDFIQSAEISNDLKIDSSTVERIEDSHSPGVAVIQFAVGEHRAQVSVEVLVEYPFFVFGQGWSSCCPERTSQLFDLPCSKLSVGDVCISLTLKNLKNGSVKKGQPVDPASVLLKHSKADGLAGSRHRYAEQENGINQGSAQMLSENGELKFPEKMGLPAAPFLTKIEPSKPAATRKRRWSAPESRKLEKSEDEPPLTLPKPSLIPQEVKICIEGRSNVGKYEAAWGKGNVALPYHLYPDYCTEAKITQYLHVIFLILGFCSNLVIRVTAGVSQETGAYAFSTSVCQGAGGRKGTAGAVRAPGIPGEERNGASQCLPSLAAQKQPGALTPASVRRKVPWEESCRGAGLHACGGAQALWRRVRVSFSLPPSASLSCYRHGPGGFRAVSSWGSHVQNQHQEPSFRASRRRVRWQIWKVNHLKEHFSPPTYFTIKATFNCIDIYFPLWGLTALIYIFFKEQLPHAGFHFCFLLVQRCHQGVVVDREAPAVMAPHGVRGVGGGGEGESEHPRWFLCSVRKTNQVIALTSSQEVDANCPSVRATEALHVEFAKSFCLRTLVLFIVHDYGQLGCHFFFFSDSSVTEELDFEDEHYITIFKHLKILFTLYYQASWSLIQQVLYLTLNSLGKKQKQKKLSCFLFFNTVTTFQLCRIAEEQDIESFNVVKGMNVNYELVCDNEMTTKYYLTGGTFHFDAENQFKAYAELAEKLREKGWRREYSFLSSVFLFKMNFERTLRFAHIEFITCVIFLQFLSNNIVGKVWGTERAYINVAKFLSNLPKLYGHFIRLCSFENSFWSFYHICHKKPGLSGLLETLRIFFRFIERVFHKDIYICEQDFVLNNYFIIVVINVIFRMAFFFYSKSNRDLMFGTNPERVFHSFETFHSQRSEISFVGFECIFKVTLKKSFISREKFLNILTWMAATKLNKYLTFLLPPLKIVLSSFHKLKKKSGINPHFGCLSIHLHLGFTRTNDFYKPFSGVYQKHLNRFRIAENSSLTFLEFHYPLSMLAESWVGSFLQSYCLFSAVFFKRFCSENLLNLPYILLRALAIIRFCFSFCFLAFDGKRNTGCHIDFVLINITIYNSCGLRKTHTTFWLTSSIELTGSTKPTLRWENTHGLEQEEHHHNFCGSISGIGIKNNWFFLNTCPISFSCFFSMCNTFCANRVCPVCYIVKAHSLLAFSLFGGSSPFWPEQGWREGARRERASHLSPAADAECWGGEPSGAPCVCRHVAERASQGDPGEEPQCPLSPHGIVNVECGEEGGRFISKTHSGAMYLESTHFPRSFLQVGRPLLGVCVLETWSPASEPGREVWPVVCVRSERVGQWLWRGPPATHGHHSLVAAFSSNRKNAQRAGASCLQTLAGPEAPRAASVTASVQQTLTMTGVEILRCRSAYKDQPCASVLCPLCNIYRQPSFVLSFLFSIFKLVTAGLLRLQWNTITKKLVRAKRKKYTINKKPTNKNLSFYGISKYIKGLFLRMFNLRIISVCLGHTGAEGGGRDTEMDATYLRSFKVEIQIEFFIWTFRIIFYVGQLFVFPNSPSLVWDDLISVVVDPISNLEFEPLCFLLGECVGFFPPTRKWQHPSFSPKGTLRNLSHLFLRDGAGVCVVTLTCPEAALGLLWSRVVQFQGMFGFPASCGLLLRYRIDCNIMLHVQDDTVAPSNHKIHSLHSLIFTEICCQKFIFVVVALDFVLFCFLRKRLTIPFNICDYYRKPISFIERKISNAFEDTNTVLFQIWVRKQSSRYRRPGFLSCVGCHGYCFMNHKQLNRLVCCLLKPFALQFAQVKTGPADSMAQFGFFGGDVKGENYTFFFFKWRGGLCFHICFEPRISEIENLRTHQVINIQRIYFFIKHMHLLLCWVGFLSFPRTVLCFWHRETPNNLHTSTPELRFLLHR

SEQ ID NO: 818978 - protein, 2478 aa, Homo sapiens
MKSNQERSNECLPPKKREIPATSRSSEEKAPTLPSDNHRVEGTAWLPGNPGGRGHGGGRHGPAGTSVELGLQQGIGLHKALSTGLDYSPPSAPRSVPVATTLPAAYATPQPGTPVSPVQYAHLPHTFQFIGSSQYSGTYASFIPSQLIPPTANPVTSAVASAAGATTPSQRSQLEAYSTLLANMGSLSQTPGHKAEQQQQQQQQQQQQHQHQQQQQQQQQQQQQQQHLSRAPGLITPGSPPPAQQNQYVHISSSPQNTGRTASPPAIPVHLHPHQTMIPHTLTLGPPSQVVMQYADSGSHFVPREATKKAESSRLQQAIQAKEVLNGEMEKSRRYGAPSSADLGLGKAGGKSVPHPYESRHVVVHPSPSDYSSRDPSGVRASVMVLPNSNTPAADLEVQQATHREASPSTLNDKSGLHLGKPGHRSYALSPHTVIQTTHSASEPLPVGLPATAFYAGTQPPVIGYLSGQQQAITYAGSLPQHLVIPGTQPLLIPVGSTDMEASGAAPAIVTSSPQFAAVPHTFVTTALPKSENFNPEALVTQAAYPAMVQAQIHLPVVQSVASPAAAPPTLPPYFMKGSIIQLANGELKKVEDLKTEDFIQSAEISNDLKIDSSTVERIEDSHSPGVAVIQFAVGEHRAQVSVEVLVEYPFFVFGQGWSSCCPERTSQLFDLPCSKLSVGDVCISLTLKNLKNGSVKKGQPVDPASVLLKHSKADGLAGSRHRYAEQENGINQGSAQMLSENGELKFPEKMGLPAAPFLTKIEPSKPAATRKRRWSAPESRKLEKSEDEPPLTLPKPSLIPQEVKICIEGRSNVGKYEAAWGKGNVALPYHLYPDYCTEAKITQYLHVIFLILGFCSNLVIRVTAGVSQETGAYAFSTSVCQGAGGRKGTAGAVRAPGIPGEERNGASQCLPSLAAQKQPGALTPASVRRKVPWEESCRGAGLHACGGAQALWRRVRVSFSLPPSASLSCYRHGPGGFRAVSSWGSHVQNQHQEPSFRASRRRVRWQIWKVNHLKEHFSPPTYFTIKATFNCIDIYFPLWGLTALIYIFFKEQLPHAGFHFCFLLVQRCHQGVVVDREAPAVMAPHGVRGVGGGGEGESEHPRWFLCSVRKTNQVIALTSSQEVDANCPSVRATEALHVEFAKSFCLRTLVLFIVHDYGQLGCHFFFFSDSSVTEELDFEDEHDITIFKHLKILFTLYYQASWSLIQQVLYLTLNSLGKKQKQKKLSCFLFFNTVTTFQLCRIAEEQDIESFNVVKGMNVNYELVCDNEMTTKYYLTGGTFHFDAENQFKAYAELAEKLREKGWRREYSFLSSVFLFKMNFERTLRFAHIEFITCVIFLQFLSNNIVGKVWGTERALINVAKFLSNLPKLYGHFIRLCSFENSFWSFYHICHKKPGLSGLLETLRIFFRFIERVFHKDIYICEQDFVLNNYFIIVVINVIFRMAFFFLFKIKSRFNVWYKTQKGYFIVFKPFIPRDPKYHLWVLNASLKCFKKKFYKREKFLNILTWMAATKLNKYLTFLLPPLKIVLSSFHKLKKKSGINPHFGCLSIHLHLGFTRTNDFYKPFSGVYQKHLNRFRIAENSSLTFLEFHYPLSMLAESWVGSFLQSYCLFSAVFFKRFCSENLLNLPYILLRALAIIRFCFSFCFLAFDGKRNTGCHIDFVLINITIYNSCGLRKTHTTFWLTSSIELTGSTKPTLRWENTHGLEQEEHHHNFCGSISGIGIKNNWFFLNTCPISFSCFFSMCNTFCANRVCPVCYIVKAHSLLAFSLFGGSSPFWPEQGWREGARRERASHLSPAADAECWGGEPSGAPCVCRHVAERASQGDPGEEPQCPLSPHGIVNVECGEEGGRFISKTHSGAMYLESTHFPRSFLQVGRPLLGVCVLETWSPASEPGREVWPVVCVRSERVGQWLWRGPPATHGHHSLVAAFSSNRKNAQRAGASCLQTLAGPEAPRAASVTASVQQTLTMTGVEILRCRSAYKDQPCASVLCPLCNIYRQPSFVLSFLFSIFKLVTAGLLRLQWNTITKKLVRAKRKKYTINKKPTNKNLSFYGISKYIKGLFLRMFNLRIISVCLGHTGAEGGGRDTEMDATYLRSFKVEIQIEFFIWTFRIIFYVGQLFVFPNSPSLVWDDLISVVVDPISNLEFEPLCFLLGECVGFFPPTRKWQHPSFSPKGTLRNLSHLFLRDGAGVCVVTLTCPEAALGLLWSRVVQFQGMFGFPASCGLLLRYRIDCNIMLHVQDDTVAPSNHKIHSLHSLIFTEICCQKFIFVVVALDFVLFCFLRKRLTIPFNICDYYRKPISFIERKISNAFEDTNTVLFQIWVRKQSSRYRRPGFLSCVGCHGYCFMNHKQLNRLVCCLLKPFALQFAQVKTGPADSMAQFGFFGGDVKGENYTFFFFKWRGGLCFHICFYPRISEIENLRTHQVINIQRIYFFIKHMHLLLCWVGFLSFPRTVLCFWHRETPNNLHTSTPELRFLLHR

SEQ ID NO: 818979 - protein, 2477 aa, Homo sapiens
MKSNQERSNECLPPKKREIPATSRSSEEKAPTLPSDNHRVEGTAWLPGNPGGRGHGGGRHGPAGTSVELGLQQGIGLHKALSTGLDYSPPSAPRSVPVATTLPAAYATPQPGTPVSPVQYAHLPHTFQFIGSSQYSGTYASFIPSQLIPPTANPVTSAVASAAGATTPSQRSQLEAYSTLLANMGSLSQTPGHKAEQQQQQQQQQQQQHQHQQQQQQQQQQQQQQQHLSRAPGLITPGSPPPAQQNQYVHISSSPQNTGRTASPPAIPVHLHPHQTMIPHTLTLGPPSQVVMQYADSGSHFVPREATKKAESSRLQQAIQAKEVLNGEMEKSRRYGAPSSADLGLGKAGGKSVPHPYESRHVVVHPSPSDYSSRDPSGVRASVMVLPNSNTPAADLEVQQATHREASPSTLNDKSGLHLGKPGHRSYALSPHTVIQTTHSASEPLPVGLPATAFYAGTQPPVIGYLSGQQQAITYAGSLPQHLVIPGTQPLLIPVGSTDMEASGAAPAIVTSSPQFAAVPHTFVTTALPKSENFNPEALVTQAAYPAMVQAQIHLPVVQSVASPAAAPPTLPPYFMKGSIIQLANGELKKVEDLKTEDFIQSAEISNDLKIDSSTVERIEDSHSPGVAVIQFAVGEHRAQVSVEVLVEYPFFVFGQGWSSCCPERTSQLFDLPCSKLSVGDVCISLTLKNLKNGSVKKGQPVDPASVLLKHSKADGLAGSRHRYAEQENGINQGSAQMLSENGELKFPEKMGLPAAPFLTKIEPSKPAATRKRRWSAPESRKLEKSEDEPPLTLPKPSLIPQEVKICIEGRSNVGKYEAAWGKGNVALPYHLYPDYCTEAKITQYLHVIFLILGFCSNLVIRVTAGVSQETGAYAFSTSVCQGAGGRKGTAGAVRAPGIPGEERNGASQCLPSLAAQKQPGALTPASVRRKVPWEESCRGAGLHACGGAQALWRRVRVSFSLPPSASLSCYRHGPGGFRAVSSWGSHVQNQHQEPSFRASRRRVRWQIWKVNHLKEHFSPPTYFTIKATFNCIDIYFPLWGLTALIYIFFKEQLPHAGFHFCFLLVQRCHQGVVVDREAPAVMAPHGVRGVGGGGEGESEHPRWFLCSVRKTNQVIALTSSQEVDANCPSVRATEALHVEFAKSFCLRTLVLFIVHDYGQLGCHFFFFSDSSVTEELDFEDEHDITIFKHLKILFTLYYQASWSLIQQVLYLTLNSLGKKQKQKKLSCFLFFNTVTTFQLCRIAEEQDIESFNVVKGMNVNYELVCDNEMTTKYYLTGGTFHFDVWNQFKAYAELAEKLREKGWRREYSFLSSVFLFKMNFERTLRFAHIEFITCVIFLQFLSNNIVGKVWGTERAEINVAKFLSNLPKLYGHFIRLCSFENSFWSFYHICHKKPGLSGLLETLRIFFRFIERVFHKDIYICEQDFVLNNYFIIVVINVIFRMAFFFYSKSNRDLMFGTNPERVFHSFETFHSQRSEISFVGFECIFKVTLKKSFISREKFLNILTWMAATKLNKYLTFLFPIENSTFFVSQIKKKIWYQPTFWLSSIHLHLGFTRTNDFYKPFSGVYQKHLNRFRIAENSSLTFLEFHYPLSMLAESWVGSFLQSYCLFSAVFFKRFCSENLLNLPYILLRALAIIRFCFSFCFLAFDGKRNTGCHIDFVLINITIYNSCGLRKTHTTFWLTSSIELTGSTKPTLRWENTHGLEQEEHHHNFCGSISGIGIIKYWFFLNTCPISFSCFFSMCNTFCANRVCPVCYIVKAHSLLAFSLFGGSSPFWPEQGWREGARRERASHLSPAADAECWGGEPSGAPCVCRHVAERASQGDPGEEPQCPLSPHGIVNVECGEEGGRFISKTHSGAMYLESTHFPRSFLQVGRPLLGVCVLETWSPASEPGREVWPVVCVRSERVGQWLWRGPPATHGHHSLVAAFSSNRKNAQRAGASCLQTLAGPEAPRAASVTASVQQTLTMTGVEILRCRSAYKDQPCASVLCPLCNIYRQPSFVLSFLFSIFKLVTAGLLRLQWNTITKKLVRAKKKKIILLIRNQQTRTSLSRDFKIYKMMFLRMFNLRIISVCLGHTGAEGGGRDTEMDATYLRSFKVEIQIEFFIWTFRIIFYVGQLFVFPNSPSLVWDDLISVVVDPISNLDCEPLCFLLGECVGFFPPTRKWQHPSFSPKGTLRNLSHLFLRDGAGVCVVTLTCPEAALGLLWSRVVQFQGMFGFPASCGLLLRYRIDCNIMLHVQDDTVAPSNHKIHSLHSLIFTEICCQKFIFVVVALDFVLFCFLRKRLTIPFNICDYYRKPISFIERKISNAFEDTNTVLFQIWVRKQSSRYRRPGFLSCVGCHGYCFMNHKQLNRLVCCLLKPFAFNLHQVKTGPADSMAQFGFFGGDVKGENYTFFFFKWRGGLCFHICFEPRISEIENLRTHQVINIQRIYFFIKHMHLLLCWVGFLSFPRTVLCFWHRETPNNLHTSTPELRFLLHR

SEQ ID NO: 818980 - protein, 2477 aa, Homo sapiens
MKSNQERSNECLPPKKREIPATSRSSEEKAPTLPSDNHRVEGTAWLPGNPGGRGHGGGRHGPAGTSVELGLQQGIGLHKALSTGLDYSPPSAPRSVPVATTLPAAYATPQPGTPVSPVQYAHLPHTFQFIGSSQYSGTYASFIPSQLIPPTANPVTSAVASAAGATTPSQRSQLEAYSTLLANMGSLSQTPGHKAEQQQQQQQQQQQQHQHQQQQQQQQQQQQQQQHLSRAPGLITPGSPPPAQQNQYVHISSSPQNTGRTASPPAIPVHLHPHQTMIPHTLTLGPPSQVVMQYADSGSHFVPREATKKAESSRLQQAIQAKEVLNGEMEKSRRYGAPSSADLGLGKAGGKSVPHPYESRHVVVHPSPSDYSSRDPSGVRASVMVLPNSNTPAADLEVQQATHREASPSTLNDKSGLHLGKPGHRSYALSPHTVIQTTHSASEPLPVGLPATAFYAGTQPPVIGYLSGQQQAITYAGSLPQHLVIPGTQPLLIPVGSTDMEASGAAPAIVTSSPQFAAVPHTFVTTALPKSENFNPEALVTQAAYPAMVQAQIHLPVVQSVASPAAAPPTLPPYFMKGSIIQLANGELKKVEDLKTEDFIQSAEISNDLKIDSSTVERIEDSHSPGVAVIQFAVGEHRAQVSVEVLVEYPFFVFGQGWSSCCPERTSQLFDLPCSKLSVGDVCISLTLKNLKNGSVKKGQPVDPASVLLKHSKADGLAGSRHRYAEQENGINQGSAQMLSENGELKFPEKMGLPAAPFLTKIEPSKPAATRKRRWSAPESRKLEKSEDEPPLTLPKPSLIPQEVKICIEGRSNVGKYEAAWGKGNVALPYHLYPDYCTVAKITQYLHVIFLILGFCSNLVIRVTAGVSQETGAYAFSTSVCQGAGGRKGTAGAVRAPGIPGEERNGASQCLPSLAAQKQPGALTPASVRRKVPWEESCRGAGLHACGGAQALWRRVRVSFSLPPSASLSCYRHGPGGFRAVSSWGSHVQNQHQEPSFRASRRRVRWQIWKVNHLKEHFSPPTYFTIKATFNCIDIYFPLWGLTALIYIFFKEQLPHAGFHFCFLLVQRCHQGVVVDREAPAVMAPHGVRGVGGGGEGESEHPRWFLCSVRKTNQVIALTSSQEVDANCPSVRATEALHVEFAKSFCLRTLVLFIVHDYGQLGCHFFFFSDSSVTEELDFEDEHDITIFKHLKILFTLYYQASWSLIQQVLYLTLNSLGKKQKQKKLSCFLFFNTVTTFQLCRIAEEQDIESFNVVKGMNVNYELVCDNEMTTKYYLTGGTFHFDVWNQFKAYAELAEKLREKGWRREYSFLSSVFLFKMNFERTLRFAHIEFITCVIFLQFLSNNIVGKVWGTERAEINVAKFLSNLPKLYGHFIRLCSFENSFWSFYHICHKKPGLSGLLETLRIFFRFIERVFHKDIYICEQDFVLNNYFIIVVINVIFRMAFFFYSKSNRDLMFGTNPERVFHSFETFHSQRSEISFVGFECIFKVTLKKSFISREKFLNILTWMAATKLNKYLTFLFPIENSTFFVSQIKKKIWYQPTFWLSSIHLHLGFTRTNDFYKPFSGVYQKHLNRFRIAENSSLTFLEFHYPLSMLAESWVGSFLQSYCLFSAVFFKRFCSENLLNLPYILLRALAIIRFCFSFCFLAFDGKRNTGCHIDFVLINITIYNSCGLRKTHTTFWLTSSIELTGSTKPTLRWENTHGLEQEEHHHNFCGSISGIGIKNNWFFLNTCPISFSCFFSMCNTFCANRVRPVCYIVKAHSLLAFSLFGGSSPFWPEQGWREGARRERASHLSPAADAECWGGEPSGAPCVCRHVAERASQGDPGEEPQCPLSPHGIVNVECGEEGGRFISKTHSGAMYLESTHFPRSFLQVGRPLLGVCVLETWSPASEPGREVWPVVCVRSERVGQWLWRGPPATHGHHSLVAAFSSNRKNAQRAGASCLQTLAGPEAPRAASVTASVQQTLTMTGVEILRCRSAYKDQPCASVLCPLCNIYRQPSFVLSFLFSIFKLVTAGLLRLQWNTITKKLVRAKEKNNTINKKPTNKNLSFYGISKYIKGLFLRMFNLRIISVCLGHTGAEGGGRDTEMDATYLRSFKVEIQIEFFIWTFRIIFYVGQLFVFPNSPSLVWDDLISVVVDPISNLEFEPLCFLLGECVGFFPPTRKWQHPSFSPKGTLRNLSHLFLRDGAGVCVVQLTCPEAALGLLWSRVVQFQGMFGFPASCGLLLRYRIDCNIMLHVQDDTVAPSNHKIHSLHSLIFTEICCQKFIFVVVALDFVLFCFLRKRLTIPFNICDYYRKPISFIERKISNAFEDTNTVLFQIWVRKQSSRYRRPGFLSCVGCHGYCFMNHKQLNRLVCCLLKPFAFNLHQVKTGPADSMAQFGFFGGDVKGENYTFFFFKWRGGLCFHICFEPRISEIENLRTHQVINIQRIYFFIKHMHLLLCWVGFLSFPRTVLCFWHRETPNNLHTSTPELRFLLHR

SEQ ID NO: 818981 - protein, 2478 aa, Homo sapiens; identical to SEQ ID NO: 818977

SEQ ID NO: 818982 - protein, 2478 aa, Homo sapiens; identical to SEQ ID NO: 818977

SEQ ID NO: 818983 - protein, 137 aa, Homo sapiens
TNKWRLSAHVCSCFFPDTAIQFVIRAMTGVCLKISAFELDTCAFSSVNTALFGGVSSSPQPELLNSKPKLVSAERRFQDSPVSICGDLQIRQSSFPASGVLAPEPSLRLVLLDVLISDHYPPYASHRPRENRHQNLG

SEQ ID NO: 818984 - protein, 136 aa, Homo sapiens; identical to SEQ ID NO: 818975

SEQ ID NO: 818985 - protein, 816 aa, Homo sapiens
MKSNQERSNECLPPKKREIPATSRSSEEKAPTLPSDNHRVEGTAWLPGNPGGRGHGGGRHGPAGTSVELGLQQGIGLHKALSTGLDYSPPSAPRSVPVATTLPAAYATPQPGTPVSPVQYAHLPHTFQFIGSSQYSGTYASFIPSQLIPPTANPVTSAVASAAGATTPSQRSQLEAYSTLLANMGSLSQTPGHKAEQQQQQQQQQQQQHQHQQQQQQQQQQQQQQQHLSRAPGLITPGSPPPAQQNQYVHISSSPQNTGRTASPPAIPVHLHPHQTMIPHTLTLGPPSQVVMQYADSGSHFVPREATKKAESSRLQQAIQAKEVLNGEMEKSRRYGAPSSADLGLGKAGGKSVPHPYESRHVVVHPSPSDYSSRDPSGVRASVMVLPNSNTPAADLEVQQATHREASPSTLNDKSGLHLGKPGHRSYALSPHTVIQTTHSASEPLPVGLPATAFYAGTQPPVIGYLSGQQQAITYAGSLPQHLVIPGTQPLLIPVGSTDMEASGAAPAIVTSSPQFAAVPHTFVTTALPKSENFNPEALVTQAAYPAMVQAQIHLPVVQSVASPAAAPPTLPPYFMKGSIIQLANGELKKVEDLKTEDFIQSAEISNDLKIDSSTVERIEDSHSPGVAVIQFAVGEHRAQVSVEVLVEYPFFVFGQGWSSCCPERTSQLFDLPCSKLSVGDVCISLTLKNLKNGSVKKGQPVDPASVLLKHSKADGLAGSRHRYAEQENGINQGSAQMLSENGELKFPEKMGLPAAPFLTKIEPSKPAATRKRRWSAPESRKLEKSEDEPPLTLPKPSLIPQEVKICIEGRSNVGK

SEQ ID NO: 818986 - protein, 598 aa, Homo sapiens
SAAARLPAEVRAPSRGWRGASGFRGAKPGAPSPAELGASMAPTLQQAYRRRWWMACTAVLENLFFSAVLLGWGSLLIILKNEGFYSSTCPAESSTNTTQDEQRRWPGCDQQDEMLNLGFTIGSFVLSATTLPLGILMDRFGPRPVRLVGSACFTASCTLMALASRDVEALSPLIFLALSLNGFGGICLTFTSLTLPNMFGNLRSTLMALMIGSYASSAITFPGIKLIYDAGVAFVVIMFTWSGLACLIFLNCTLNWPIEAFPAPEEVNYTKKIKLSGLALDHKVTGDLFYTHVTTMGQRLSQKAPSLEDGSDAFMSPQDVRGTSENLPERSVPLRKSLCSPTFLWSLLTMGMTQLRIIFYMAAVNKMLEYLVTGGQEHETNEQQQKVAETVGFYSSVFGAMQLLCLLTCPLIGYIMDWRIKDCVDAPTQGTVLGDARDGVATKSIRPRYCKIQKLTNAISAFTLTNLLLVGFGITCLINNLHLQFVTFVLHTIVRGFFHSACGSLYAAVFPSNHFGTLTGLQSLISAVFALLQQPLFMAMVGPLKGEPFWVNLGLLLFSLLGFLLPSYLFYYRARLQQEYAANGMGPLKVLSGSEVTA

SEQ ID NO: 818987 - protein, 111 aa, Homo sapiens
MAPTLQQAYRRRWWMACTAVLENLFFSAVLLGWGSLLIILKNEGFYSSTCPAESSTNTTQDEQRRWPGCDQQDEMLNLGFTIGSFVLSATTLPLGILMDRFGPRPVRLVGR

SEQ ID NO: 818988 - protein, 598 aa, Homo sapiens; identical to SEQ ID NO: 818986

SEQ ID NO: 818989 - protein, 575 aa, Homo sapiens
MRIPSPPGRSDWLGASMAPTLQQAYRRRWWMACTAVLENLFFSAVLLGWGSLLIILKNEGFYSSTCPAESSTNTTQDEQRRWPGCDQQDEMLNLGFTIGSFVLSATTLPLGILMDRFGPRPVRLVGSACFTASCTLMALASRDVEALSPLIFLALSLNGFGGICLTFTSLTLPNMFGNLRSTLMALMIGSYASSAITFPGIKLIYDAGVAFVVIMFTWSGLACLIFLNCTLNWPIEAFPAPEEVNYTKKIKLSGLALDHKVTGDLFYTHVTTMGQRLSQKAPSLEDGSDAFMSPQDVRGTSENLPERSVPLRKSLCSPTFLWSLLTMGMTQLRIIFYMAAVNKMLEYLVTGGQEHETNEQQQKVAETVGFYSSVFGAMQLLCLLTCPLIGYIMDWRIKDCVDAPTQGTVLGDARDGVATKSIRPRYCKIQKLTNAISAFTLTNLLLVGFGITCLINNLHLQFVTFVLHTIVRGFFHSACGSLYAAVFPSNHFGTLTGLQSLISAVFALLQQPLFMAMVGPLKGEPFWVNLGLLLFSLLGFLLPSYLFYYRARLQQEYAANGMGPLKVLSGSEVTA

SEQ ID NO: 818990 - protein, 559 aa, Homo sapiens
MAPTLQQAYRRRWWMACTAVLENLFFSAVLLGWGSLLIILKNEGFYSSTCPAESSTNTTQDEQRRWPGCDQQDEMLNLGFTIGSFVLSATTLPLGILMDRFGPRPVRLVGSACFTASCTLMALASRDVEALSPLIFLALSLNGFGGICLTFTSLTLPNMFGNLRSTLMALMIGSYASSAITFPGIKLIYDAGVAFVVIMFTWSGLACLIFLNCTLNWPIEAFPAPEEVNYTKKIKLSGLALDHKVTGDLFYTHVTTMGQRLSQKAPSLEDGSDAFMSPQDVRGTSENLPERSVPLRKSLCSPTFLWSLLTMGMTQLRIIFYMAAVNKMLEYLVTGGQEHETNEQQQKVAETVGFYSSVFGAMQLLCLLTCPLIGYIMDWRIKDCVDAPTQGTVLGDARDGVATKSIRPRYCKIQKLTNAISAFTLTNLLLVGFGITCLINNLHLQFVTFVLHTIVRGFFHSACGSLYAAVFPSNHFGTLTGLQSLISAVFALLQQPLFMAMVGPLKGEPFWVNLGLLLFSLLGFLLPSYLFYYRARLQQEYAANGMGPLKVLSGSEVTA

SEQ ID NO: 818991 - protein, 585 aa, Homo sapiens
SAAARLPAEVRAPSRGWRGASGFRGAKPGAPSPAELGASMAPTLQQAYRRRWWMACTAVLENLFFSAVLLGWGSLLIILKNEGFYSSTCPAESSTNTTQDEQRRWPGCDQQDEMLNLGFTIGSFVLSATTLPLGILMDRFGPRPVRLVGSACFTASCTLMALASRDVEALSPLIFLALSLNGFGGICLTFTSLTLPNMFGNLRSTLMALMIGSYASSAITFPGIKLIYDAGVAFVVIMFTWSGLACLIFLNCTLNWPIEAFPAPEEVNYTKKIKLSGLALDHKVTGDLFYTHVTTMGQRLSQKAPSLEDGSDAFMSPQDVRGTSENLPEILWSLLTMGMTQLRIIFYMAAVNKMLEYLVTGGQEHETNEQQQKVAETVGFYSSVFGAMQLLCLLTCPLIGYIMDWRIKDCVDAPTQGTVLGDARDGVATKSIRPRYCKIQKLTNAISAFTLTNLLLVGFGITCLINNLHLQFVTFVLHTIVRGFFHSACGSLYAAVFPSNHFGTLTGLQSLISAVFALLQQPLFMAMVGPLKGEPFWVNLGLLLFSLLGFLLPSYLFYYRARLQQEYAANGMGPLKVLSGSEVTA

SEQ ID NO: 818992 - protein, 598 aa, Homo sapiens
ATGRWGRRVALNLPFFLPASRGLSWRESPDMGPRCFRARSAPCCPLGTWADADFLPSSPALSALAGLGASMAPTLQQAYRRRWWMACTAVLENLFFSAVLLGWGSLLIILKNEGFYSSTCPAESSTNTTQDEQRRWPGCDQQDEMLNLGFTIGSFVLSATTLPLGILMDRFGPRPVRLVGSACFTASCTLMALASRDVEALSPLIFLALSLNGFGGICLTFTSLTLIYDAGVAFVVIMFTWSGLACLIFLNCTLNWPIEAFPAPEEVNYTKKIKLSGLALDHKVTGDLFYTHVTTMGQRLSQKAPSLEDGSDAFMSPQDVRGTSENLPERSVPLRKSLCSPTFLWSLLTMGMTQLRIIFYMAAVNKMLEYLVTGGQEHETNEQQQKVAETVGFYSSVFGAMQLLCLLTCPLIGYIMDWRIKDCVDAPTQGTVLGDARDGVATKSIRPRYCKIQKLTNAISAFTLTNLLLVGFGITCLINNLHLQFVTFVLHTIVRGFFHSACGSLYAAVFPSNHFGTLTGLQSLISAVFALLQQPLFMAMVGPLKGEPFWVNLGLLLFSLLGFLLPSYLFYYRARLQQEYAANGMGPLKVLSGSEVTA

SEQ ID NO: 818993 - protein, 485 aa, Homo sapiens
MLNLGFTIGSFVLSATTLPLGILMDRFGPRPVRLVGSACFTASCTLMALASRDVEALSPLIFLALSLNGFGGICLTFTSLTLPNMFGNLRSTLMALMIGSYASSAITFPGIKLIYDAGVAFVVIMFTWSGLACLIFLNCTLNWPIEAFPAPEEVNYTKKIKLSGLALDHKVTGDLFYTHVTTMGQRLSQKAPSLEDGSDAFMSPQDVRGTSENLPERSVPLRKSLCSPTFLWSLLTMGMTQLRIIFYMAAVNKMLEYLVTGGQEHETNEQQQKVAETVGFYSSVFGAMQLLCLLTCPLIGYIMDWRIKDCVDAPTQGTVLGDARDGVATKSIRPRYCKIQKLTNAISAFTLTNLLLVGFGITCLINNLHLQFVTFVLHTIVRGFFHSACGSLYAAVFPSNHFGTLTGLQSLISAVFALLQQPLFMAMVGPLKGEPFWVNLGLLLFSLLGFLLPSYLFYYRARLQQEYAANGMGPLKVLSGSEVTA

SEQ ID NO: 818994 - protein, 401 aa, Homo sapiens
MFGNLRSTLMALMIGSYASSAITFPGIKLIYDAGVAFVVIMFTWSGLACLIFLNCTLNWPIEAFPAPEEVNYTKKIKLSGLALDHKVTGDLFYTHVTTMGQRLSQKAPSLEDGSDAFMSPQDVRGTSENLPERSVPLRKSLCSPTFLWSLLTMGMTQLRIIFYMAAVNKMLEYLVTGGQEHETNEQQQKVAETVGFYSSVFGAMQLLCLLTCPLIGYIMDWRIKDCVDAPTQGTVLGDARDGVATKSIRPRYCKIQKLTNAISAFTLTNLLLVGFGITCLINNLHLQFVTFVLHTIVRGFFHSACGSLYAAVFPSNHFGTLTGLQSLISAVFALLQQPLFMAMVGPLKGEPFWVNLGLLLFSLLGFLLPSYLFYYRARLQQEYAANGMGPLKVLSGSEVTA

SEQ ID NO: 818995 - protein, 613 aa, Homo sapiens
SAAARLPAEVRAPSRGWRGASGFRGAKPGAPSPAELGASMAPTLQQAYRRRWWMACTAVLENLFFSAVLLGWGSLLIILKNEGFYSSTCPAVPGVMCWALPSPSSAESSTNTTQDEQRRWPGCDQQDEMLNLGFTIGSFVLSATTLPLGILMDRFGPRPVRLVGSACFTASCTLMALASRDVEALSPLIFLALSLNGFGGICLTFTSLTLPNMFGNLRSTLMALMIGSYASSAITFPGIKLIYDAGVAFVVIMFTWSGLACLIFLNCTLNWPIEAFPAPEEVNYTKKIKLSGLALDHKVTGDLFYTHVTTMGQRLSQKAPSLEDGSDAFMSPQDVRGTSENLPERSVPLRKSLCSPTFLWSLLTMGMTQLRIIFYMAAVNKMLEYLVTGGQEHETNEQQQKVAETVGFYSSVFGAMQLLCLLTCPLIGYIMDWRIKDCVDAPTQGTVLGDARDGVATKSIRPRYCKIQKLTNAISAFTLTNLLLVGFGITCLINNLHLQFVTFVLHTIVRGFFHSACGSLYAAVFPSNHFGTLTGLQSLISAVFALLQQPLFMAMVGPLKGEPFWVNLGLLLFSLLGFLLPSYLFYYRARLQQEYAANGMGPLKVLSGSEVTA

SEQ ID NO: 818996 - protein, 303 aa, Homo sapiens
MGQRLSQKAPSLEDGSDAFMSPQDVRGTSENLPERSVPLRKSLCSPTFLWSLLTMGMTQLRIIFYMAAVNKMLEYLVTGGQEHETNEQQQKVAETVGFYSSVFGAMQLLCLLTCPLIGYIMDWRIKDCVDAPTQGTVLGDARDGVATKSIRPRYCKIQKLTNAISAFTLTNLLLVGFGITCLINNLHLQFVTFVLHTIVRGFFHSACGSLYAAVFPSNHFGTLTGLQSLISAVFALLQQPLFMAMVGPLKGEPFWVNLGLLLFSLLGFLLPSYLFYYRARLQQEYAANGMGPLKVLSGSEVTA

SEQ ID NO: 818997 - protein, 303 aa, Homo sapiens; identical to SEQ ID NO: 818996

SEQ ID NO: 818998 - protein, 509 aa, Homo sapiens
SAAARLPAEVRAPSRGWRGASGFRGAKPGAPSPAELGASMAPTLQQAYRRRWWMACTAVLENLFFSAVLLGWGSLLIILKNEGFYSSTCPAESSTNTTQDEQRRWPGCDQQDEMLNLGFTIGSFVLSATTLPLGILMDRFGPRPVRLVGSACFTASCTLMALASRDVEALSPLIFLALSLNGFGGICLTFTSLTLPNMFGNLRSTLMALMIGSYASSAITFPGIKLIYDAGVAFVVIMFTWSGLACLIFLNCTLNWPIEAFPAPEEVNYTKKIKLSGLALDHKVTGDLFYTHVTTMGQRLSQKAPSLEDGSDAFMSPQDVRGTSENLPERSVPLRKSLCSPTFLWSLLTMGMTQLRIIFYMAAVNKMLEYLVTGGQEHETNEQQQKVAETVGFYSSVFGAMQLLCLLTCPLIGYIMDWRIKDCVDAPTQGTVLGDARDGVATKSIRPRYCKIQKLTNAISAFTLTNLLLVGFGITCLINNLHLQFVTFVLHTIVRGFFHSACGSLYAAV

SEQ ID NO: 818999 - protein, 274 aa, Homo sapiens
SAAARLPAEVRAPSRGWRGASGFRGAKPGAPSPAELGASMAPTLQQAYRRRWWMACTAVLENLFFSAVLLGWGSLLIILKNEGFYSSTCPAESSTNTTQDEQRRWPGCDQQDEMLNLGFTIGSFVLSATTLPLGILMDRFGPRPVRLVGSACFTASCTLMALASRDVEALSPLIFLALSLNGFGGICLTFTSLTLPNMFGNLRSTLMALMIGSYASSAITFPGIKLIYDAGVAFVVIMFTWSGLACLIFLNCTLNWPIEAFPAPEEVNYTGRSS

SEQ ID NO: 819000 - protein, 248 aa, Homo sapiens
MRIPSPPGRSDWLGASMAPTLQQAYRRRWWMACTAVLENLFFSAVLLGWGSLLIILKNEGFYSSTCPAESSTNTTQDEQRRWPGCDQQDEMLNLGFTIGSFVLSATTLPLGILMDRFGPRPVRLVGSACFTASCTLMALASRDVEALSPLIFLALSLNGFGGICLTFTSLTGRGCYQIHQTTLLQDPKAHQCHQCLHPDQPAACGFWHHLSHQQLTPPVCDLCPAHHCSRFLPLSLWESLCCSVSLLG

SEQ ID NO: 819001 - protein, 197 aa, Homo sapiens
MRIPSPPGRSDWLGASMAPTLQQAYRRRWWMACTAVLENLFFSAVLLGWGSLLIILKNEGFYSSTCPAESSTNTTQDEQRRWPGCDQQDEMLNLGFTIGSFVLSATTLPLGILMDRFGPRPVRLVGSACFTASCTLMALASRDVEALSPLIFLALSLNGFGGICLTFTSLTVSVTGLAWQQSSPEWGEGRVSGVRAV

SEQ ID NO: 819002 - protein, 329 aa, Homo sapiens
AVRLRYSPIAVVMVGEAGRDLRRRRAVAVTAEKMAVLAPLIALVYSVPRLSRWLAQPYYLLSALLSAAFLLVRKLPPLCHGLPTQREDGNPCDFDWREVEILMFLSAIVMMKNRRSITVEQHIGNIFMFSKVANTILFFRLDIRMGLLYITLCIVFLMTCKPPLYMGPEYIKYFNDKTIDEELERDKRVTWIVEFFANWSNDCQSFAPIYADLSLKYNCTGLNFGKVDVGRYTDVSTRYKVSTSPLTKQLPTLILFQGGKEAMRRPQIDKKGRAVSWTFSEENVIREFNLNELYQRAKKLSKAGDNIPEEQPVASTPTTVSDGENKKDK

SEQ ID NO: 819003 - protein, 136 aa, Homo sapiens
AVRLRYSPIAVVMVGEAGRDLRRRRAVAVTAEKMAVLAPLIALVYSVPRLSRWLAQPYYLLSALLSAAFLLVRKLPPLCHGLPTQREDGNPCDFDWREVEILMFLSAIVMMKNRRSTLSFLLPPCCGGWDASSMIF

SEQ ID NO: 819004 - protein, 100 aa, Homo sapiens
SVYYCPCGDLSKPGLACSGLRYNCTGLNFGKVDVGRYTDVSTRYKVSTSPLTKQLPTLILFQGGKEAMRRPQIDKKGRAVSWTFSEVPERKGRCMKGAEQ

SEQ ID NO: 819005 - protein, 329 aa, Homo sapiens; identical to SEQ ID NO: 819002

SEQ ID NO: 819006 - protein, 329 aa, Homo sapiens; identical to SEQ ID NO: 819002

SEQ ID NO: 819007 - protein, 329 aa, Homo sapiens; identical to SEQ ID NO: 819002

SEQ ID NO: 819008 - protein, 329 aa, Homo sapiens; identical to SEQ ID NO: 819002

SEQ ID NO: 819009 - protein, 329 aa, Homo sapiens; identical to SEQ ID NO: 819002

SEQ ID NO: 819010 - protein, 329 aa, Homo sapiens; identical to SEQ ID NO: 819002

SEQ ID NO: 819011 - protein, 329 aa, Homo sapiens; identical to SEQ ID NO: 819002

SEQ ID NO: 819012 - protein, 329 aa, Homo sapiens; identical to SEQ ID NO: 819002

SEQ ID NO: 819013 - protein, 329 aa, Homo sapiens; identical to SEQ ID NO: 819002

SEQ ID NO: 819014 - protein, 329 aa, Homo sapiens; identical to SEQ ID NO: 819002

SEQ ID NO: 819015 - protein, 329 aa, Homo sapiens; identical to SEQ ID NO: 819002

SEQ ID NO: 819016 - protein, 329 aa, Homo sapiens; identical to SEQ ID NO: 819002

SEQ ID NO: 819017 - protein, 287 aa, Homo sapiens
LGDQRIPEAQKGSQPYYLLSALLSAAFLLVRKLPPLCHGLPTQREDGNPCDFDWREVEILMFLSAIVMMKNRRSITVEQHIGNIFMFSKVANTILFFRLDIRMGLLYITLCIVFLMTCKPPLYMGPEYIKYFNDKTIDEELERDKRVTWIVEFFANWSNDCQSFAPIYADLSLKYNCTGLNFGKVDVGRYTDVSTRYKVSTSPLTKQLPTLILFQGGKEAMRRPQIDKKGRAVSWTFSEENVIREFNLNELYQRAKKLSKAGDNIPEEQPVASTPTTVSDGENKKDK

SEQ ID NO: 819018 - protein, 202 aa, Homo sapiens
MFSKVANTILFFRLDIRMGLLYITLCIVFLMTCKPPLYMGPEYIKYFNDKTIDEELERDKRVTWIVEFFANWSNDCQSFAPIYADLSLKYNCTGLNFGKVDVGRYTDVSTRYKVSTSPLTKQLPTLILFQGGKEAMRRPQIDKKGRAVSWTFSEENVIREFNLNELYQRAKKLSKAGDNIPEEQPVASTPTTVSDGENKKDK

SEQ ID NO: 819019 - protein, 279 aa, Homo sapiens
MVGEAGRDLRRRRAVAVTAEKMAVLAPLIALVYSVPRLSRWLAQPYYLLSALLSAAFLLVRKLPPLCHGLPTQREDGNPCDFDWREVEILMFLSAIVMMKNRRSMFLMTCKPPLYMGPEYIKYFNDKTIDEELERDKRVTWIVEFFANWSNDCQSFAPIYADLSLKYNCTGLNFGKVDVGRYTDVSTRYKVSTSPLTKQLPTLILFQGGKEAMRRPQIDKKGRAVSWTFSEENVIREFNLNELYQRAKKLSKAGDNIPEEQPVASTPTTVSDGENKKDK

SEQ ID NO: 819020 - protein, 202 aa, Homo sapiens; identical to SEQ ID NO: 819018

SEQ ID NO: 819021 - protein, 336 aa, Homo sapiens
AVRLRYSPIAVVMVGEAGRDLRRRRAVAVTAEKMAVLAPLIALVYSVPRLSRWLAQPYYLLSALLSAAFLLVRKLPPLCHGLPTQREDGNPCDFDWREVEILMFLSAIVMMKNRRSITVEQHIGNIFMFSKVANTILFFRLDIRMGLLYITLCIVFLMTCKPPLYMGPEYIKYFNDKTIDEELERDKRVTWIVEFFANWSNDCQSFAPIYADLSLKYNCTGLNFGKVDVGRYTDVSTRELSGPCRYKVSTSPLTKQLPTLILFQGGKEAMRRPQIDKKGRAVSWTFSEENVIREFNLNELYQRAKKLSKAGDNIPEEQPVASTPTTVSDGENKKDK

SEQ ID NO: 819022 - protein, 329 aa, Homo sapiens; identical to SEQ ID NO: 819002

SEQ ID NO: 819023 - protein, 329 aa, Homo sapiens; identical to SEQ ID NO: 819002

SEQ ID NO: 819024 - protein, 329 aa, Homo sapiens; identical to SEQ ID NO: 819002

SEQ ID NO: 819025 - protein, 209 aa, Homo sapiens
MFSKVANTILFFRLDIRMGLLYITLCIVFLMTCKPPLYMGPEYIKYFNDKTIDEELERDKRVTWIVEFFANWSNDCQSFAPIYADLSLKYNCTGLNFGKVDVGRYTDVSTRELSGPCRYKVSTSPLTKQLPTLILFQGGKEAMRRPQIDKKGRAVSWTFSEENVIREFNLNELYQRAKKLSKAGDNIPEEQPVASTPTTVSDGENKKDK

SEQ ID NO: 819026 - protein, 107 aa, Homo sapiens
MVGEAGRDLRRRRAVAVTAEKMAVLAPLIALVYSVPRLSRWLAQPYYLLSALLSAAFLLVRKLPPLCHGLPTQREDGNPCDFDWREVEILMFLSAIVMMKNRRSSTK

SEQ ID NO: 819027 - protein, 102 aa, Homo sapiens
GCCKLGSGRHARTSGLVTLGKQLPTLILFQGGKEAMRRPQIDKKGRAVSWTFSEENVIREFNLNELYQRAKKLSKAGDNIPEEQPVASTPTTVSDGENKKDK

SEQ ID NO: 819028 - protein, 71 aa, Homo sapiens
AVSRGSLSLIAQERTGCLMDFSEENVIREFNLNELYQRAKKLSKAGDNIPEEQPVASTPTTVSDGENKKDK

SEQ ID NO: 819029 - protein, 329 aa, Homo sapiens; identical to SEQ ID NO: 819002

SEQ ID NO: 819030 - protein, 283 aa, Homo sapiens
MVGEAGRDLRRRRAVAVTAEKMAVLAPLIALVYSVPRLSRWLAQPYYLLSALLSAAFLLVRKLPPLCHGLPTQREDGNPCDFDWREVEILMFLSAIVMMKNRRSITVEQHIGNIFMFSKVANTILFFRLDIRMGLLYITLCIVFLMTCKPPLYMGPEYIKYFNDKTIDEELERDKRVTWIVEFFANWSNDCQSFAPIYADLSLKYNCTGLNFGKVDVGRYTDVSTRYKVSTSPLTKQLPTLILFQGGKEAMRRPQIDKKGRAVSWTFSEVPERKGRCMKGAEQ

SEQ ID NO: 819031 - protein, 241 aa, Homo sapiens
MVGEAGRDLRRRRAVAVTAEKMAVLAPLIALVYSVPRLSRWLAQPYYLLSALLSAAFLLVRKLPPLCHGLPTQREDGNPCDFDWREVEILMFLSAIVMMKNRRSITVEQHIGNIFMFSKVANTILFFRLDIRMGLLYITLCIVFLMTCKPPLYMGPEYIKYFNDKTIDEELERDKRVTWIVEFFANWSNDCQSFAPIYADLSLKYNCTGLNFGKVDVGRYTDVSTRKGGHITPHQATPQSK

SEQ ID NO: 819032 - protein, 139 aa, Homo sapiens
AVRLRYSPIAVVMVGEAGRDLRRRRAVAVTAEKMAVLAPLIALVYSVPRLSRWLAQPYYLLSALLSAAFLLVRKLPPLCHGLPTQREDGNPCDFDWREVEILMFLSAIVMMKNRRSSKFSSLLRLKVRSNALWRCFASC

SEQ ID NO: 819033 - protein, 197 aa, Homo sapiens
MDPPAGFVRAGNPAVAAPQSPLSPEGAHFRAAHHPRSTGSRCPGSLQPSRPLVANWLQSLPEMPVDFTGYWKMLVNENFEEYLRALDVNVALRKIANLLKPDKEIVQDGDHMIIRTLSTFRNYIMDFQVGKEFEEDLTGIDDRKCMTTVSWDGDKLQCVQKGEKEGRGWTQWIEGDELHLEMRVEGVVCKQVFKKVQ

SEQ ID NO: 819034 - protein, 197 aa, Homo sapiens; identical to SEQ ID NO: 819033

SEQ ID NO: 819035 - protein, 220 aa, Homo sapiens
MDPPAGFVRAGNPAVAAPQSPLSPEGAHFRAAHHPRSTGSRCPGSLQPSRPLVANWLQSLPEMPVDFTGYWKMLVNENFEEYLRALDVNVALRKIANLLKPDKEIVQDGDHMIIRTLSTFRNYIMDFQVGKEFEEDLTGIDDRKCMTTVSWDGDKLQCVQKGEKEGRGWTQWIEGDELHLEIKVTCVLCKHFIEQGAKLARLTTYDEWITTKFSPGIPCS

SEQ ID NO: 819036 - protein, 157 aa, Homo sapiens
MDPPAGFVRAGNPAVAAPQSPLSPEGAHFRAAHHPRSTGSRCPGSLQPSRPLVANWLQSLPEMPVDFTGYWKMLVNENFEEYLRALDVNVALRKIANLLKPDKEIVQDGDHMIIRTLSTFRNYIMDFQVGKEFEEDLTGIDDRKCMAGVQSRDLSSL

SEQ ID NO: 819037 - protein, 180 aa, Homo sapiens
MDPPAGFVRAGNPAVAAPQSPLSPEGAHFRAAHHPRSTGSRCPGSLQPSRPLVANWLQSLPEMPVDFTGYWKMLVNENFEEYLRALDVNVALRKIANLLKPDKEIVQDGDHMIIRTLSTFRNYIMDFQVGKEFEEDLTGIDDRKCMTTVSWDGDKLQCVQKGEKEGRGWTQWIEGDELHL

SEQ ID NO: 819038 - protein, 243 aa, Homo sapiens
MDPPAGFVRAGNPAVAAPQSPLSPEGAHFRAAHHPRSTGSRCPGSLQPSRPLVANWLQSLPEMPVDFTGYWKMLVNENFEEYLRALDVNVALRKIANLLKPDKEIVQDGDHMIIRTLSTFRNYIMDFQVGKEFEEDLTGIDDRKCMTTVSWDGDKLQCVQKGEKEGRGWTQWIEGDELHLPGRFLGWVRPGPQRPWSLLRSRWTLEKGTMDGPWFCSKASLPRAWKRCLGDFKNQAMYFQGLG

SEQ ID NO: 819039 - protein, 170 aa, Homo sapiens
MGNEASYPLEMCSHFDADEIKRLGKRFKKLDLDNSGSLSVEEFMSLPELQQNPLVQRVIDIFDTDGNGEVDFKEFIEGVSQFSVKGDKEQKLRFAFRIYDMDKDGYISNGELFQVLKMMVGNNLKDTQLQQIVDKTIINADKDGDGRISFEEFCAVVGGLDIHKKMVVDV

SEQ ID NO: 819040 - protein, 170 aa, Homo sapiens; identical to SEQ ID NO: 819039

SEQ ID NO: 819041 - protein, 170 aa, Homo sapiens; identical to SEQ ID NO: 819039

SEQ ID NO: 819042 - protein, 170 aa, Homo sapiens; identical to SEQ ID NO: 819039

SEQ ID NO: 819043 - protein, 111 aa, Homo sapiens
MTNSSSAEYRPGPLVNAWTLFPLPGIAGEQLVRMQPEAEAGRSRGPRRSRRDKTCRPQLCALQWQHWVPCTATVDGYRGALPSAEWKENPWKLYPVPTISKTCSPAPGSHL

SEQ ID NO: 819044 - protein, 966 aa, Homo sapiens
AAAMWCLHCNSERTQSLLELELDSGVEGEAPSSETGTSLDSPSAYPQGPLVPGSSLSPDHYEHTSVGAYGLYSGPPGQQQRTRRPKLQHSTSILRKQAEEEAIKRSRSLSESYELSSDLQDKQVEMLERKYGGRLVTRHAARTIQTAFRQYQMNKNFERLRSSMSENRMSRRIVLSNMRMQFSFEGPEKVHSSYFEGKQVSVTNDGSQLGALVSPECGDLSEPTTLKSPAPSSDFADAITELEDAFSRQVKSLAESIDDALNCRSLHTEEAPALDAARARDTEPQTALHGMDHRKLDEMTASYSDVTLYIDEEELSPPLPLSQAGDRPSSTESDLRLRAGGAAPDYWALAHKEDKADTDTSCRSTPSLERQEQRLRVEHLPLLTIEPPSDSSVDLSDRSERGSLKRQSAYERSLGGQQGSPKHGPHSGAPKSLPREEPELRPRPPRPLDSHLAINGSANRQSKSESDYSDGDNDSINSTSNSNDTINCSSESSSRDSLREQTLSKQTYHKEARNSWDSPAFSNDVIRKRHYRIGLNLFNKKPEKGVQYLIERGFVPDTPVGVAHFLLQRKGLSRQMIGEFLGNRQKQFNRDVLDCVVDEMDFSTMELDEALRKFQAHIRVQGEAQKVERLIEAFSQRYCICNPGVVRQFRNPDTIFILAFAIILLNTDMYSPNVKPERKMKLEDFIKNLRGVDDGEDIPREMLMGIYERIRKRELKTNEDHVSQVQKVEKLIVGKKPIGSLHPGLGCVLSLPHRRLVCYCRLFEVPDPNKPQKLGLHQREIFLFNDLLVVTKIFQKKKNSVTYSFRQSFSLYGMQVLLFENQYYPNGIRLTSSVPGADIKVLINFNAPNPQDRKKFTDDLRESIAEVQEMEKHRIESELEKQKGVVRPSMSQCSSLKKESGNGTLSRACLDDSYASGEGLKRSALSSSLRDLSEAGKRGRRSSAGSLESNVEFQPFEPLQPSVLCS

SEQ ID NO: 819045 - protein, 992 aa, Homo sapiens
LQLSERAVTQCAELPRSSAACRDKSEGESSQERQLRSSLDTGSSLSTDRYSVEGEAPSSETGTSLDSPSAYPQGPLVPGSSLSPDHYEHTSVGAYGLYSGPPGQQQRTRRPKLQHSTSILRKQAEEEAIKRSRSLSESYELSSDLQDKQVEMLERKYGGRLVTRHAARTIQTAFRQYQMNKNFERLRSSMSENRMSRRIVLSNMRMQFSFEGPEKVHSSYFEGKQVSVTNDGSQLGALVSPECGDLSEPTTLKSPAPSSDFADAITELEDAFSRQVKSLAESIDDALNCRSLHTEEAPALDAARARDTEPQTALHGMDHRKLDEMTASYSDVTLYIDEEELSPPLPLSQAGDRPSSTESDLRLRAGGAAPDYWALAHKEDKADTDTSCRSTPSLERQEQRLRVEHLPLLTIEPPSDSSVDLSDRSERGSLKRQSAYERSLGGQQGSPKHGPHSGAPKSLPREEPELRPRPPRPLDSHLAINGSANRQSKSESDYSDGDNDSINSTSNSNDTINCSSESSSRDSLREQTLSKQTYHKEARNSWDSPAFSNDVIRKRHYRIGLNLFNKKPEKGVQYLIERGFVPDTPVGVAHFLLQRKGLSRQMIGEFLGNRQKQFNRDVLDCVVDEMDFSTMELDEALRKFQAHIRVQGEAQKVERLIEAFSQRYCICNPGVVRQFRNPDTIFILAFAIILLNTDMYSPNVKPERKMKLEDFIKNLRGVDDGEDIPREMLMGIYERIRKRELKTNEDHVSQVQKVEKLIVGKKPIGSLHPGLGCVLSLPHRRLVCYCRLFEVPDPNKPQKLGLHQREIFLFNDLLVVTKIFQKKKNSVTYSFRQSFSLYGMQVLLFENQYYPNGIRLTSSVPGADIKVLINFNAPNPQDRKKFTDDLRESIAEVQEMEKHRIESELEKQKGVVRPSMSQCSSLKKESGNGTLSRACLDDSYASGEGLKRSALSSSLRDLSEAGKRGRRSSAGSLESNVEFQPFEPLQPSVLCS

SEQ ID NO: 819046 - protein, 962 aa, Homo sapiens
RSQPGCGCLWQEAPTHSTGPSVEGEAPSSETGTSLDSPSAYPQGPLVPGSSLSPDHYEHTSVGAYGLYSGPPGQQQRTRRPKLQHSTSILRKQAEEEAIKRSRSLSESYELSSDLQDKQVEMLERKYGGRLVTRHAARTIQTAFRQYQMNKNFERLRSSMSENRMSRRIVLSNMRMQFSFEGPEKVHSSYFEGKQVSVTNDGSQLGALVSPECGDLSEPTTLKSPAPSSDFADAITELEDAFSRQVKSLAESIDDALNCRSLHTEEAPALDAARARDTEPQTALHGMDHRKLDEMTASYSDVTLYIDEEELSPPLPLSQAGDRPSSTESDLRLRAGGAAPDYWALAHKEDKADTDTSCRSTPSLERQEQRLRVEHLPLLTIEPPSDSSVDLSDRSERGSLKRQSAYERSLGGQQGSPKHGPHSGAPKSLPREEPELRPRPPRPLDSHLAINGSANRQSKSESDYSDGDNDSINSTSNSNDTINCSSESSSRDSLREQTLSKQTYHKEARNSWDSPAFSNDVIRKRHYRIGLNLFNKKPEKGVQYLIERGFVPDTPVGVAHFLLQRKGLSRQMIGEFLGNRQKQFNRDVLDCVVDEMDFSTMELDEALRKFQAHIRVQGEAQKVERLIEAFSQRYCICNPGVVRQFRNPDTIFILAFAIILLNTDMYSPNVKPERKMKLEDFIKNLRGVDDGEDIPREMLMGIYERIRKRELKTNEDHVSQVQKVEKLIVGKKPIGSLHPGLGCVLSLPHRRLVCYCRLFEVPDPNKPQKLGLHQREIFLFNDLLVVTKIFQKKKNSVTYSFRQSFSLYGMQVLLFENQYYPNGIRLTSSVPGADIKVLINFNAPNPQDRKKFTDDLRESIAEVQEMEKHRIESELEKQKGVVRPSMSQCSSLKKESGNGTLSRACLDDSYASGEGLKRSALSSSLRDLSEAGKRGRRSSAGSLESNVEFQPFEPLQPSVLCS

SEQ ID NO: 819047 - protein, 975 aa, Homo sapiens
LQLSERAVTQCAELPRSSAACRDKSEGESSQERSVEGEAPSSETGTSLDSPSAYPQGPLVPGSSLSPDHYEHTSVGAYGLYSGPPGQQQRTRRPKLQHSTSILRKQAEEEAIKRSRSLSESYELSSDLQDKQVEMLERKYGGRLVTRHAARTIQTAFRQYQMNKNFERLRSSMSENRMSRRIVLSNMRMQFSFEGPEKVHSSYFEGKQVSVTNDGSQLGALVSPECGDLSEPTTLKSPAPSSDFADAITELEDAFSRQVKSLAESIDDALNCRSLHTEEAPALDAARARDTEPQTALHGMDHRKLDEMTASYSDVTLYIDEEELSPPLPLSQAGDRPSSTESDLRLRAGGAAPDYWALAHKEDKADTDTSCRSTPSLERQEQRLRVEHLPLLTIEPPSDSSVDLSDRSERGSLKRQSAYERSLGGQQGSPKHGPHSGAPKSLPREEPELRPRPPRPLDSHLAINGSANRQSKSESDYSDGDNDSINSTSNSNDTINCSSESSSRDSLREQTLSKQTYHKEARNSWDSPAFSNDVIRKRHYRIGLNLFNKKPEKGVQYLIERGFVPDTPVGVAHFLLQRKGLSRQMIGEFLGNRQKQFNRDVLDCVVDEMDFSTMELDEALRKFQAHIRVQGEAQKVERLIEAFSQRYCICNPGVVRQFRNPDTIFILAFAIILLNTDMYSPNVKPERKMKLEDFIKNLRGVDDGEDIPREMLMGIYERIRKRELKTNEDHVSQVQKVEKLIVGKKPIGSLHPGLGCVLSLPHRRLVCYCRLFEVPDPNKPQKLGLHQREIFLFNDLLVVTKIFQKKKNSVTYSFRQSFSLYGMQVLLFENQYYPNGIRLTSSVPGADIKVLINFNAPNPQDRKKFTDDLRESIAEVQEMEKHRIESELEKQKGVVRPSMSQCSSLKKESGNGTLSRACLDDSYASGEGLKRSALSSSLRDLSEAGKRGRRSSAGSLESNVEFQPFEPLQPSVLCS

SEQ ID NO: 819048 - protein, 1114 aa, Homo sapiens
AAAMWCLHCNSERTQSLLELELDSGVEGEAPSSETGTSLDSPSAYPQGPLVPGSSLSPDHYEHTSVGAYGLYSGPPGQQQRTRRPKLQHSTSILRKQAEEEAIKRSRSLSESYELSSDLQDKQVEMLERKYGGRLVTRHAARTIQTAFRQYQMNKNFERLRSSMSENRMSRRIVLSNMRMQFSFEGPEKVHSSYFEGKQVSVTNDGSQLGALVSPECGDLSEPTTLKSPAPSSDFADAITELEDAFSRQVKSLAESIDDALNCRSLHTEEAPALDAARARDTEPQTALHGMDHRKLDEMTASYSDVTLYIDEEELSPPLPLSQAGDRPSSTESDLRLRAGGAAPDYWALAHKEDKADTDTSCRSTPSLERQEQRLRVEHLPLLTIEPPSDSSVDLSDRSERGSLKRQSAYERSLGGQQGSPKHGPHSGAPKSLPREEPELRPRPPRPLDSHLAINGSANRQSKSESDYSDGDNDSINSTSNSNDTINCSSESSSRDSLREQTLSKQTYHKEARNSWDSPAFSNDVIRKRHYRIGLNLFNKKPEKGVQYLIERGFVPDTPVGVAHFLLQRKGLSRQMIGEFLGNRQKQFNRDVLDCVVDEMDFSTMELDEALRKFQAHIRVQGEAQKVERLIEAFSQRYCICNPGVVRQFRNPDTIFILAFAIILLNTDMYSPNVKPERKMKLEDFIKNLRGVDDGEDIPREMLMGIYERIRKRELKTNEDHVSQVQKVEKLIVGKKPIGSLHPGLGCVLSLPHRRLVCYCRLFEVPDPNKPQKLGLHQREIFLFNDLLVVTKIFQKKKNSVTYSFRQSFSLYGMQVLLFENQYYPNGIRLTSSVPGADIKVLINFNAPNPQDRKKFTDDLRESIAEVQEMEKHRIESELEKQKGVVRPSMSQCSSLKKESGNGTLSRACLDDSYASGEGLKRSALSSSLRDLSEAGAIISSPHMRRRATSTRECPSRPHQTMPNSSSLLGSLFGSKRGKPPPQAHLPSAPALATPPPTGGPASLAALCGWPPPGAPRGAAAAAMHGHHTQYCHMQNPPPYHHHHHHHPPQHIQHAHQYHHGPHGGHPAYGAHAHGHPPLPSAHVGHTVHHHGQPPAPPPPTSSKAKPSGISTIV

SEQ ID NO: 819049 - protein, 164 aa, Homo sapiens [sequence omitted]

SEQ ID NO: 819050 - protein, 1114 aa, Homo sapiens; identical to SEQ ID NO: 819048

SEQ ID NO: 819051 - protein, 1114 aa, Homo sapiens; identical to SEQ ID NO: 819048

SEQ ID NO: 819052 - protein, 1114 aa, Homo sapiens; identical to SEQ ID NO: 819048

SEQ ID NO: 819053 - protein, 1114 aa, Homo sapiens; identical to SEQ ID NO: 819048

SEQ ID NO: 819054 - protein, 107 aa, Homo sapiens
  misc_feature (15)..(15): Xaa can be any naturally occurring amino acid
  misc_feature (18)..(18): Xaa can be any naturally occurring amino acid
RRPLARSCSCLVSVXSFXASVISLRSPYQQICKPSTLLISRESKYSNLEFSLFKNVTLTRPPVSSHWRGISLVSAQKETAWDRVIGSRLGCQGSALVSPTHQFSGLF

SEQ ID NO: 819055 - protein, 156 aa, Homo sapiens
PRLARRGRVGPGGRSFFLGRHTRAPHSAHSTDFLQASEVSFCFICKLIKSLWKIHCWVPEAGVMLPTSCLGKQKLPVSWCPRVSFMGLSPLEIPPVRATASGSCHHIPWEGRQEEAEGPRMSAWSLLTVRTPLAHLSQVTQIIAVTYRIADRSRRR

SEQ ID NO: 819056 - protein, 1114 aa, Homo sapiens; identical to SEQ ID NO: 819048

SEQ ID NO: 819057 - protein, 1209 aa, Homo sapiens
AAAMWCLHCNSERTQSLLELELDSGVEGEAPSSETGTSLDSPSAYPQGPLVPGSSLSPDHYEHTSVGAYGLYSGPPGQQQRTRRPKLQHSTSILRKQAEEEAIKRSRSLSESYELSSDLQDKQVEMLERKYGGRLVTRHAARTIQTAFRQYQMNKNFERLRSSMSENRMSRRIVLSNMRMQFSFEGPEKVHSSYFEGKQVSVTNDGSQLGALVSPECGDLSEPTTLKSPAPSSDFADAITELEDAFSRQVKSLAESIDDALNCRSLHTEEAPALDAARARDTEPQTALHGMDHRKLDEMTASYSDVTLYIDEEELSPPLPLSQAGDRPSSTESDLRLRAGGAAPDYWALAHKEDKADTDTSCRSTPSLERQEQRLRVEHLPLLTIEPPSDSSVDLSDRSERGSLKRQSAYERSLGGQQGSPKHGPHSGAPKSLPREEPELRPRPPRPLDSHLAINGSANRQSKSESDYSDGDNDSINSTSNSNDTINCSSESSSRDSLREQTLSKQTYHKEARNSWDSPAFSNDVIRKRHYRIGLNLFNKKPEKGVQYLIERGFVPDTPVGVAHFLLQRKGLSRQMIGEFLGNRQKQFNRDVLDCVVDEMDFSTMELDEALRKFQAHIRVQGEAQKVERLIEAFSQRYCICNPGVVRQFRNPDTIFILAFAIILLNTDMYSPNVKPERKMKLEDFIKNLRGVDDGEDIPREMLMGIYERIRKRELKTNEDHVSQVQKVEKLIVGKKPIGSLHPGLGCVLSLPHRRLVCYCRLFEVPDPNKPQKLGLHQREIFLFNDLLVVTKIFQKKKNSVTYSFRQSFSLYGMQVLLFENQYYPNGIRLTSSVPGADIKVLINFNAPNPQDRKKFTDDLRESIAEVQEMEKHRIESELEKQKGVVRPSMSQCSSLKKESGNGTLSRACLDDSYASGEGLKRSALSSSLRDLSEAGKSLARTTLLAQRMQDRGRASAFRACITRGRACGEASAAFPLTFRKAEQRVTYRKGAPKRHRETGPKRQKERHCTRISWGSHPHFPFLLPGVLFTCLLIWEVALARVSRRLCPVLSAAAASLCFMLMNELARNPLICLAPPCPLSPVLLSLRGLLSWETRASSSPEAIEQQPGLAPGSGKALVGTVMLWLFLCFCVCLICCQLFNPQASSTPETAYIPGSGAPGAARLRGFCQQLWPRLSLVGQERKEALADRWVPARAAAGCVAAQGVYGRVS

SEQ ID NO: 819058 - protein, 882 aa, Homo sapiens
AAAMWCLHCNSERTQSLLELELDSGVEGEAPSSETGTSLDSPSAYPQGPLVPGSSLSPDHYEHTSVGAYGLYSGPPGQQQRTRRPKLQHSTSILRKQAEEEAIKRSRSLSESYELSSDLQDKQVEMLERKYGGRLVTRHAARTIQTAFRQYQMNKNFERLRSSMSENRMSRRIVLSNMRMQFSFEGPEKVHSSYFEGKQVSVTNDGSQLGALVSPECGDLSEPTTLKSPAPSSDFADAITELEDAFSRQVKSLAESIDDALNCRSLHTEEAPALDAARARDTEPQTALHGMDHRKLDEMTASYSDVTLYIDEEELSPPLPLSQAGDRPSSTESDLRLRAGGAAPDYWALAHKEDKADTDTSCRSTPSLERQEQRLRVEHLPLLTIEPPSDSSVDLSDRSERGSLKRQSAYERSLGGQQGSPKHGPHSGAPKSLPREEPELRPRPPRPLDSHLAINGSANRQSKSESDYSDGDNDSINSTSNSNDTINCSSESSSRDSLREQTLSKQTYHKEARNSWDSPAFSNDVIRKRHYRIGLNLFNKKPEKGVQYLIERGFVPDTPVGVAHFLLQRKGLSRQMIGEFLGNRQKQFNRDVLDCVVDEMDFSTMELDEALRKFQAHIRVQGEAQKVERLIEAFSQRYCICNPGVVRQFRNPDTIFILAFAIILLNTDMYSPNVKPERKMKLEDFIKNLRGVDDGEDIPREMLMGIYERIRKRELKTNEDHVSQVQKVEKLIVGKKPIGSLHPGLGCVLSLPHRRLVCYCRLFEVPDPNKPQKLGLHQREIFLFNDLLVVTKIFQKKKNSVTYSFRQSFSLYGMQVLLFENQCKSAPRACLEERMSQLTLFLLAASRTEPRGASTLTPVLSPESRLQLGAPVSCRHRPSRGP

SEQ ID NO: 819059 - protein, 508 aa, Homo sapiens
VQYKTSQCQYHEEELRQLLPHDTRAGWWKSGDQKENLLKRRRKKKTPKKKIKKSTHTKKPAREGGGKAGPFKKAITTTFAARMPLLWLRGFLLASCWIIVRSSPTPGSEGHSAAPDCPSCALAALPKDVPNSQPEMVEAVKKHILNMLHLKKRPDVTQPVPKAALLNAIRKLHVGKVGENGYVEIEDDIGRRAEMNELMEQTSEIITFAESGTARKTLHFEISKEGSDLSVVERAEVWLFLKVPKANRTRTKVTIRLFQQQKHPQGSLDTGEEAEEVGLKGERSELLLSEKVVDARKSTWHVFPVSSSIQRLLDQGKSSLDVRIACEQCQESGASLVLLGKKKKKEEEGEGKKKGGGEGGAGADEEKEQSHRPFLMLQARQSEDHPHRRRRRGLECDGKVNICCKKQFFVSFKDIGWNDWIIAPSGYHANYCEGECPSHIAGTSGSSLSFHSTVINHYRMRGHSPFANLKSCCVPTKLRPMSMLYYDDGQNIIKKDIQNMIVEECGCS

SEQ ID NO: 819060 - protein, 426 aa, Homo sapiens
MPLLWLRGFLLASCWIIVRSSPTPGSEGHSAAPDCPSCALAALPKDVPNSQPEMVEAVKKHILNMLHLKKRPDVTQPVPKAALLNAIRKLHVGKVGENGYVEIEDDIGRRAEMNELMEQTSEIITFAESGTARKTLHFEISKEGSDLSVVERAEVWLFLKVPKANRTRTKVTIRLFQQQKHPQGSLDTGEEAEEVGLKGERSELLLSEKVVDARKSTWHVFPVSSSIQRLLDQGKSSLDVRIACEQCQESGASLVLLGKKKKKEEEGEGKKKGGGEGGAGADEEKEQSHRPFLMLQARQSEDHPHRRRRRGLECDGKVNICCKKQFFVSFKDIGWNDWIIAPSGYHANYCEGECPSHIAGTSGSSLSFHSTVINHYRMRGHSPFANLKSCCVPTKLRPMSMLYYDDGQNIIKKDIQNMIVEECGCS

SEQ ID NO: 819061 - protein, 426 aa, Homo sapiens; identical to SEQ ID NO: 819060

SEQ ID NO: 819062 - protein, 360 aa, Homo sapiens
KSIKAILSLQAVQKQFQPMGCHLLTPIQEGLSQKTPACLKFTVHVNVGINRCACFLLCCLSSSGTARKTLHFEISKEGSDLSVVERAEVWLFLKVPKANRTRTKVTIRLFQQQKHPQGSLDTGEEAEEVGLKGERSELLLSEKVVDARKSTWHVFPVSSSIQRLLDQGKSSLDVRIACEQCQESGASLVLLGKKKKKEEEGEGKKKGGGEGGAGADEEKEQSHRPFLMLQARQSEDHPHRRRRRGLECDGKVNICCKKQFFVSFKDIGWNDWIIAPSGYHANYCEGECPSHIAGTSGSSLSFHSTVINHYRMRGHSPFANLKSCCVPTKLRPMSMLYYDDGQNIIKKDIQNMIVEECGCS

SEQ ID NO: 819063 - protein, 207 aa, Homo sapiens
MIQSRLVEEWGPEREFAEEEKDQKENLLKRRRKKKTPKKKIKKSTHTKKPAREGGGKAGPFKKAITTTFAARMPLLWLRGFLLASCWIIVRSSPTPGSEGHSAAPDCPSCALAALPKDVPNSQPEMVEAVKKHILNMLHLKKRPDVTQPVPKAALLNAIRKLHVGKVGENGYVEIEDDIGRRAEMNELMEQTSEIITFAESGWCWHW

SEQ ID NO: 819064 - protein, 373 aa, Homo sapiens
ICARRRRTAVGGAHARRWNSPGDSRSAALASECLATGQREMWRLMSRFNAFKRTNTILHHLRMSKHTDAAEEVLLEKKGCAGVITLNRPKFLNALTLNMIRQIYPQLKKWEQDPETFLIIIKGAGGKAFCAGGDIRVISEAEKAKQKIAPVFFREEYMLNNAVGSCQKPYVALIHGITMGGGVGLSVHGQFRVATEKCLFAMPETAIGLFPDVGGGYFLPRLQGKLGYFLALTGFRLKGRDVYRAGIATHFVDSEKLAMLEEDLLALKSPSKENIASVLENYHTESKIDRDKSFILEEHMDKINSCFSANTVEEIIENLQQDGSSFALEQLKVINKMSPTSLKITLRQLMEGSSKTLQEVLTMEYRLSQACMF

SEQ ID NO: 819065 - protein, 355 aa, Homo sapiens
  misc_feature (355)..(355): Xaa can be any naturally occurring amino acid
ICARRRRTAVGGAHARRWNSPGDSRSAALASECLATGQREMWRLMSRFNAFKRTNTILHHLRMSKHTDAAEEVLLEKKGCAGVITLNRPKFLNALTLNMIRQIYPQLKKWEQDPETFLIIIKGAGGKAFCAGGDIRVISEAEKAKQKIAPVFFREEYMLNNAVGSCQKPYVALIHGITMGGGVGLSVHGQFRVATEKCLFAMPETAIGLFPDVGGGYFLPRLQGKLGYFLALTGFRLKGRDVYRAGIATHFVDSEKLAMLEEDLLALKSPSKENIASVLENYHTESKIDRDKSFILEEHMDKINSCFSANTVEEIIENLQQDGSSFALEQLKVINKCLHISRDHELAQSLVNVAX

SEQ ID NO: 819066 - protein, 220 aa, Homo sapiens
ICARRRRTAVGGAHARRWNSPGDSRSAALASECLATGQREMWRLMSRFNAFKRTNTILHHLRMSKHTDAAEEVLLEKKGCAGVITLNRPKFLNALTLNMIRQIYPQLKKWEQDPETFLIIIKGAGGKAFCAGGDIRVISEAEKAKQKIAPVFFREEYMLNNAVGSCQKPYVALIHGITMGGVVSSVHGQFYVLPASSSSSAPLYPALRPFLPLPLPFLRP

SEQ ID NO: 819067 - protein, 76 aa, Homo sapiens
SAANPTSQCQPLGGSEAAAEEEQGEGCQIREPDFFPSPGNPFRFPGSRRDICGPGTCMCVRAKERKNGSAQTHRPA

SEQ ID NO: 819068 - protein, 112 aa, Homo sapiens
ICARRRRTAVGGAHARRWNSPGDSRSAALASECLATGQREMWRLMSRFNAFKRTNTILHHLRMSKHTDAAEEVLYGVNPGGGACSEPRSRHCTPAWATERDSVSKKKKKKKR

SEQ ID NO: 819069 - protein, 421 aa, Homo sapiens
ICARRRRTAVGGAHARRWNSPGDSRSAALASECLATGQREMWRLMSRFNAFKRTNTILHHLRMSKHTDAAEEVLLEKKGCAGVITLNRPKFLNALTLNMIRQIYPQLKKWEQDPETFLIIIKGAGGKAFCAGGDIRVISEAEKAKQKIAPVFFREEYMLNNAVGSCQKPYVALIHGITMGGGVGLSVHGQFRVATEKCLFAMPETAIGLFPDVGGGYFLPRLQGKLGYFLALTGFRLKGRDVYRAGIATHFVDSEKLAMLEEDLLALKSPSKENIASVLENYHTESKIDRDKSFILEEHMDKINSCFSANTVEEIIENLQQDGSSFALEQLKVINKMSPTSLKITLRQLMEGSSKTLQEVLTMEYRLSQACMRGHDFHEGVRAVLIDKDQSPKWKPADLKEVTEEDLNNHFKSLGSSDLKF

SEQ ID NO: 819070 - protein, 421 aa, Homo sapiens; identical to SEQ ID NO: 819069

SEQ ID NO: 819071 - protein, 421 aa, Homo sapiens; identical to SEQ ID NO: 819069

SEQ ID NO: 819072 - protein, 373 aa, Homo sapiens; identical to SEQ ID NO: 819064

SEQ ID NO: 819073 - protein, 421 aa, Homo sapiens; identical to SEQ ID NO: 819069

SEQ ID NO: 819074 - protein, 421 aa, Homo sapiens; identical to SEQ ID NO: 819069

SEQ ID NO: 819075 - protein, 435 aa, Homo sapiens
SAANPTSQCQPLGGRRRRRRRSRGRAVKFGSQIFSLLLAIPSASPAPGVTSAGRGPACVCARRSGRMAVLKLTDQRMSKHTDAAEEVLLEKKGCAGVITLNRPKFLNALTLNMIRQIYPQLKKWEQDPETFLIIIKGAGGKAFCAGGDIRVISEAEKAKQKIAPVFFREEYMLNNAVGSCQKPYVALIHGITMGGGVGLSVHGQFRVATEKCLFAMPETAIGLFPDVGGGYFLPRLQGKLGYFLALTGFRLKGRDVYRAGIATHFVDSEKLAMLEEDLLALKSPSKENIASVLENYHTESKIDRDKSFILEEHMDKINSCFSANTVEEIIENLQQDGSSFALEQLKVINKMSPTSLKITLRQLMEGSSKTLQEVLTMEYRLSQACMRGHDFHEGVRAVLIDKDQSPKWKPADLKEVTEEDLNNHFKSLGSSDLKF

SEQ ID NO: 819076 - protein, 403 aa, Homo sapiens
ICARRRRTAVGGAHARRWNSPGDSRSAALASECLATGQREMWRLMSRFNAFKRTNTILHHLRMSKHTDAAEEVLLEKKGCAGVITLNRPKFLNALTLNMIRQIYPQLKKWEQDPETFLIIIKGAGGKAFCAGGDIRVISEAEKAKQKIAPVFFREEYMLNNAVGSCQKPYVALIHGITMGGGVGLSVHGQFRVATEKCLFAMPETAIGLFPDVGGGYFLPRLQGKLGYFLALTGFRLKGRDVYRAGIATHFVDSEKLAMLEEDLLALKSPSKENIASVLENYHTESKIDRDKSFILEEHMDKINSCFSANTVEEIIENLQQDGSSFALEQLKVINKMSPTSLKITLRQLMEGSSKTLQEVLTMEYRLSQACMRGHDFHEGVRAGKWQMGTYHFGEMGFVSICC

SEQ ID NO: 819077 - protein, 220 aa, Homo sapiens
MPETAIGLFPDVGGGYFLPRLQGKLGYFLALTGFRLKGRDVYRAGIATHFVDSEKLAMLEEDLLALKSPSKENIASVLENYHTESKIDRDKSFILEEHMDKINSCFSANTVEEIIENLQQDGSSFALEQLKVINKMSPTSLKITLRQLMEGSSKTLQEVLTMEYRLSQACMRGHDFHEGVRAVLIDKDQSPKWKPADLKEVTEEDLNNHFKSLGSSDLKF

SEQ ID NO: 819078 - protein, 163 aa, Homo sapiens
MLEEDLLALKSPSKENIASVLENYHTESKIDRDKSFILEEHMDKINSCFSANTVEEIIENLQQDGSSFALEQLKVINKMSPTSLKITLRQLMEGSSKTLQEVLTMEYRLSQACMRGHDFHEGVRAVLIDKDQSPKWKPADLKEVTEEDLNNHFKSLGSSDLKF

SEQ ID NO: 819079 - protein, 1078 aa, Homo sapiens
SAANPTSQCQPLGGRRRRRRRSRGRAVKFGSQIFSLLLAIPSASPAPGVTSAGRGPACVCARRSGRMAVLKLTDQPPLVQAIFSGDPEEIRMLIHKTEDVNTLDSEKRTPLHVAAFLGDAEIIELLILSGARVNAKDNMWLTPLHRAVASRSEEAVQVLIKHSADVNARDKNWQTPLHVAAANKAVKCAEVIIPLLSSVNVSDRGGRTALHHAALNGHVEMVNLLLGQRGKISMHLTRRTGVLCTGQHTWAILDVVALLINHGAEVTCKDKKGYTPLHAAASNGQINVVKHLLNLGVEIDEINVYGNTALHIACYNGQDAVVNELIDYGANVNQPNNNGFTPLHFAAASTHGALCLELLVNNGADVNIQSKDGKSPLHMTAVHGRFTRSQTLIQNGGEIDCVDKDGNTPLHVAARYGHELLINTLITSGADTAKCGIHSMFPLHLAALNAHSDCCRKLLSSGQKYSIVSLFSNEHVLSAGFEIDTPDKFGRTCLHAAAAGGNVECIKLLQSSGADFHKKDKCGRTPLHYAAANCHFHCIETLVTTGANVNETDDWGRTALHYAAASDMDRNKTILGNAHDNSEELERARELKEKEATLCLEFLLQNDANPSIRDKEGYNSIHYAAAYGHRQCLELLLERTNSGFEESDSGATKSPLHLAAYNGHHQALEVLLQSLVDLDIRDEKGRTALDLAAFKGHTECVEALINQGASIFVKDNVTKRTPLHASVINGHTLCLRLLLEIADNPEAVDVKDAKGQTPLMLAVAYGHIDAVSLLLEKEANVDTVDILGCTALHRGIMTGHEECVQMLLEQEVSILCKDSRGRTPLHYAAARGHATWLSELLQMALSEEDCCFKDNQGYTPLHWACYNGNENCIEVLLEQKCFRKFIGNPFTPLHCAIINDHGNCASLLLGAIDSSIVSCRDDKGRTPLHAAAFADHVECLQLLLRHSAPVNAVDNSGKTALMMAAENGQAGAVDILVNSAQADLTVKDKDLNTPLHLACSKGHEKCALLILDKIQDESLINEKNNALQTPLHVAARNGLKVVVEELLAKGACVLAVDENASRSNGPRSTPGTAVQKEE

SEQ ID NO: 819080 - protein, 986 aa, Homo sapiens [sequence omitted]

SEQ ID NO: 819081 - protein, 166 aa, Homo sapiens
MLAMLEEDLLALKSPSKENIASVLENYHTESKIDRDKSFILEEHMDKINSCFSANTVEEIIENLQQDGSSFALEQLKVINKMSPTSLKITLRQLMEGSSKTLQEVLTMEYRLSQACMRGHDFHEGVRAVLIDKDQSPKWKPADLKEVTEEDLNNHFKSLGSSDLKF

SEQ ID NO: 819082 - protein, 263 aa, Homo sapiens
ICARRRRTAVGGAHARRWNSPGDSRSAALASECLATGQREMWRLMSRFNAFKRTNTILHHLRMSKHTDAAEEVLLEKKGCAGVITLNRPKFLNALTLNMIRQIYPQLKKWEQDPETFLIIIKGAGGKAFCAGGDIRVISEAEKAKQKIAPVFFREEYMLNNAVGSCQKPYVALIHGITMGGGVGLSVHGQFRVATEKCLFAMPETAIGLFPDVGGGYFLPRLQGKLGYFLALTGFRLKGRDVYRAGIATHFVDSEKNGDDTIT

SEQ ID NO: 819083 - protein, 1061 aa, Homo sapiens
SAANPTSQCQPLGGRRRRRRRSRGRAVKFGSQIFSLLLAIPSASPAPGVTSAGRGPACVCARRSGRMAVLKLTDQPPLVQAIFSGDPEEIRMLIHKTEDVNTLDSEKRTPLHVAAFLGDAEIIELLILSGARVNAKDNMWLTPLHRAVASRSEEAVQVLIKHSADVNARDKNWQTPLHVAAANKAVKCAEVIIPLLSSVNVSDRGGRTALHHAALNGHVEMVNLLLGQRGKISMHLTRRTGVLCTGQHTWAILDVVALLINHGAEVTCKDKKGYTPLHAAASNGQINVVKHLLNLGVEIDEINVYGNTALHIACYNGQDAVVNELIDYGANVNQPNNNGFTPLHFAAASTHGALCLELLVNNGADVNIQSKDGKSPLHMTAVHGRFTRSQTLIQNGGEIDCVDKDGNTPLHVAARYGHELLINTLITSGADTAKCGIHSMFPLHLAALNAHSDCCRKLLSSGQKYSIVSLFSNEHVLSAGFEIDTPDKFGRTCLHAAAAGGNVECIKLLQSSGADFHKKDKCGRTPLHYAAANCHFHCIETLVTTGANVNETDDWGRTALHYAAASDMDRNKTILGNAHDNSEELERARELKEKEATLCLEFLLQNDANPSIRDKEGYNSIHYAAAYGHRQCLELLLERTNSGFEESDSGATKSPLHLAAYNGHHQALEVLLQSLVDLDIRDEKGRTALDLAAFKGHTECVEALINQGASIFVKDNVTKRTPLHASVINGHTLCLRLLLEIADNPEAVDVKDAKGQTPLMLAVAYGHIDAVSLLLEKEANVDTVDILGCTALHRGIMTGHEECVQMLLEQEVSILCKDSRGRTPLHYAAARGHATWLSELLQMALSEEDCCFKDNQGYTPLHWACYNGNENCIEVLLEQKCFRKFIGNPFTPLHCAIINDHGNCASLLLGAIDSSIVSCRDDKGRTPLHAAAFADHVECLQLLLRHSAPVNAVDNSGKTALMMAAENGQAGAVDILVNSAQADLTVKDKDLNTPLHLACSKGHEKCALLILDKIQDESLINEKNNALQTPLHVAARNGLKVVVEELLAKGACVLAVDENGC

SEQ ID NO: 819084 - protein, 434 aa, Homo sapiens
SAANPTSQCQPLGGRRRRRRRSRGRAVKFGSQIFSLLLAIPSASPAPGVTSAGRGPACVCARRSGRMAVLKLTDQPPLVQAIFSGDPEEIRMLIHKTEDVNTLDSEKRTPLHVAAFLGDAEIIELLILSGARVNAKDNMWLTPLHRAVASRSEEAVQVLIKHSADVNARDKNWQTPLHVAAANKAVKCAEVIIPLLSSVNVSDRGGRTALHHAALNGHVEMVNLLLGQRGKISMHLTRRTGVLCTGQHTWAILDVVALLINHGAEVTCKDKKGYTPLHAAASNGQINVVKHLLNLGVEIDEINVYGNTALHIACYNGQDAVVNELIDYGANVNQPNNNGFTPLHFAAASTHGALCLELLVNNGADVNIQSKDGKSPLHMTAVHGRFTRSQTLIQNGGEIDCVDKDGNTPLHVAARYGHELLINTLITSGADTAK

SEQ ID NO: 819085 - protein, 243 aa, Homo sapiens
ICARRRRTAVGGAHARRWNSPGDSRSAALASECLATGQREMWRLMSRFNAFKRTNTILHHLRMSKHTDAAEEVLLEKKGCAGVITLNRPKFLNALTLNMIRQIYPQLKKWEQDPETFLIIIKGAGGKAFCAGGDIRVISEAEKAKQKIAPVFFREEYMLNNAVGSCQKPYVALIHGITMGGGVGLSVHGQFRVATEKCLFAMPETAIGMVPLKGGGKVLLFGQRVPKGRKLRGTFPLGHKNEG

SEQ ID NO: 819086 - protein, 671 aa, Homo sapiens
SAANPTSQCQPLGGRRRRRRRSRGRAVKFGSQIFSLLLAIPSASPAPGVTSAGRGPACVCARRSGRMAVLKLTDQPPLVQAIFSGDPEEIRMLIHKTEDVNTLDSEKRTPLHVAAFLGDAEIIELLILSGARVNAKDNMWLTPLHRAVASRSEEAVQVLIKHSADVNARDKNWQTPLHVAAANKAVKCAEVIIPLLSSVNVSDRGGRTALHHAALNGHVEMVNLLLGQRGKISMHLTRRTGVLCTGQHTWAILDVVALLINHGAEVTCKDKKGYTPLHAAASNGQINVVKHLLNLGVEIDEINVYGNTALHIACYNGQDAVVNELIDYGANVNQPNNNGFTPLHFAAASTHGALCLELLVNNGADVNIQSKDGKSPLHMTAVHGRFTRSQTLIQNGGEIDCVDKDGNTPLHVAARYGHELLINTLITSGADTAKCGIHSMFPLHLAALNAHSDCCRKLLSSGQKYSIVSLFSNEHVLSAGFEIDTPDKFGRTCLHAAAAGGNVECIKLLQSSGADFHKKDKCGRTPLHYAAANCHFHCIETLVTTGANVNETDDWGRTALHYAAASDMDRNKTILGNAHDNSEELERARELKEKEATLCLEFLLQNDANPSIRDKEGYNSIHYAAAYGHRQCLELLLERTNSGFEESDSGATKSPLHLAAYNGHHQAWVTE

SEQ ID NO: 819087 - protein, 1098 aa, Homo sapiens
SAANPTSQCQPLGGRRRRRRRSRGRAVKFGSQIFSLLLAIPSASPAPGVTSAGRGPACVCARRSGRMAVLKLTDQPPLVQAIFSGDPEEIRMLIHKTEDVNTLDSEKRTPLHVAAFLGDAEIIELLILSGARVNAKDNMWLTPLHRAVASRSEEAVQVLIKHSADVNARDKNWQTPLHVAAANKAVKCAEVIIPLLSSVNVSDRGGRTALHHAALNGHVEMVNLLLGQRGKISMHLTRRTGVLCTGQHTWAILDVVALLINHGAEVTCKDKKGYTPLHAAASNGQINVVKHLLNLGVEIDEINVYGNTALHIACYNGQDAVVNELIDYGANVNQPNNNGFTPLHFAAASTHGALCLELLVNNGADVNIQSKDGKSPLHMTAVHGRFTRSQTLIQNGGEIDCVDKDGNTPLHVAARYGHELLINTLITSGADTAKCGIHSMFPLHLAALNAHSDCCRKLLSSGQKYSIVSLFSNEHVLSAGFEIDTPDKFGRTCLHAAAAGGNVECIKLLQSSGADFHKKDKCGRTPLHYAAANCHFHCIETLVTTGANVNETDDWGRTALHYAAASDMDRNKTILGNAHDNSEELERARELKEKEATLCLEFLLQNDANPSIRDKEGYNSIHYAAAYGHRQCLELLLERTNSGFEESDSGATKSPLHLAAYNGHHQALEVLLQSLVDLDIRDEKGRTALDLAAFKGHTECVEALINQGASIFVKDNVTKRTPLHASVINGHTLCLRLLLEIADNPEAVDVKDAKGQTPLMLAVAYGHIDAVSLLLEKEANVDTVDILGCTALHRGIMTGHEECVQMLLEQEVSILCKDSRGRTPLHYAAARGHATWLSELLQMALSEEDCCFKDNQGYTPLHWACYNGNENCIEVLLEQKCFRKFIGNPFTPLHCAIINDHGNCASLLLGAIDSSIVSCRDDKGRTPLHAAAFADHVECLQLLLRHSAPVNAVDNSGKTALMMAAENGQAGAVDILVNSAQADLTVKDKDLNTPLHLACSKGHEKCALLILDKIQDESLINEKNNALQTPLHVAARNGLKVVVEELLAKGACVLAVDENGHTPALACAPNKDVADCLALILATMMPFSPSSTMMAVNF

SEQ ID NO: 819088 - protein, 256 aa, Homo sapiens
ICARRRRTAVGGAHARRWNSPGDSRSAALASECLATGQREMWRLMSRFNAFKRTNTILHHLRMSKHTDAAEEVLLEKKGCAGVITLNRPKFLNALTLNMIRQIYPQLKKWEQDPETFLIIIKGAGGKAFCAGGDIRVISEAEKAKQKIAPVFFREEYMLNNAVGSCQKPYVALIHGITMGGVVSSVHGQFFFSSWGGYRKVSFCYARNAIGLFPELLGGWGKRGFKNFFFPFFFGGPPPKKRGGQQTRLFFSPATN

SEQ ID NO: 819089 - protein, 193 aa, Homo sapiens
ICARRRRTAVGGAHARRWNSPGDSRSAALASECLATGQREMWRLMSRFNAFKRTNTILHHLRMSKHTDAAEEVLLEKKGCAGVITLNRPKFLNALTLNMIRQIYPQLKKWEQDPETFLIIIKGAGGKAFCAGGDIRVISEAEKAKQKIAPVFFREEYMLNNAVGSCQKPYVALIHGITMGGKPENYIALAHHF

SEQ ID NO: 819090 - protein, 932 aa, Homo sapiens
LRPTCPLADDICDYFGVKIAMYFAWLGFYTSAMVYPAVFGSVLYTFTEADQTSRDVSCVVFALFNVIWSTLFLEEWKRRGAELAYKWGTLDSPGEAVEEPRPQFRGVRRISPITRAEEFYYPPWKRLLFQLLVSLPLCLACLVCVFLLMLGCFQLQELVLSVKGLPRLARFLPKVMLALLVSVSAEGYKKLAIWLNDMENYRLESAYEKHLIIKVVLFQFVNSYLSLFYIGFYLKDMERLKELLLVLSLSQSLERQLQAVLVPLAALRFRLLLLSLRGLLLAARAKMLATLLITRQFLQNVREVLQPHLYRRLGRGELGLRAVWELARALLGLLSLRRPAPRRLEPQADEGGGGGSGGGGRRCLSGGCGAPEEEEEAALVERRRAGEGGEEGDGPPGGKEEDEDDEEEEDEEEEEDEEEGEEGGLLDCGLRLKKVSFAERGAGRRRPGPSPEALLEEGSPTMVEKGLEPGVFTLAEEDDEAEGAPGSPEREPPAILFRRAGGEGRDQGPDGGPDPEPGSNSDSTRRQRRQNRSSWIDPPEEEHSPQLTQAELESCMKKYEDTFQDYQEMFVQFGYVVLFSSAFPLAALCALVNNLIEIRSDAFKLCTGLQRPFGQRVESIGQWQKVMEAMGVLAIVVNCYLIGQCGQLQRLFPWLSPEAAIVSVVVLEHFALLLKYLIHVAIPDIPGWVAEEMAKLEYQRREAFKRHERQAQHRYQQQQRRRREEEERQRHAEHHARREHDSGGREEARAEGSGLDPATSSEKASAKAKGSTAGGHGPERPKRPGSLLAPNNVMKLKQIIPLQGKFLSSGATSSLAAAGAGATTRPPPAQSPTGSDTRLPAFLSFKFLKSPETRRDSERSHSPPKAFHAGKLFPFGGTRAEPGSNGAGGQARPDGTPSSGSSRVQRSGPVDEALAEELEAPRPEEEGSGHKL

SEQ ID NO: 819091 - protein, 932 aa, Homo sapiens; identical to SEQ ID NO: 819090

SEQ ID NO: 819092 - protein, 932 aa, Homo sapiens; identical to SEQ ID NO: 819090

SEQ ID NO: 819093 - protein, 155 aa, Homo sapiens
KEGLARLGTGGGAGITCAPPSTVPELAARGIIQQVFPVHEQRILNRLMKSWVQAVCENQPLGAAWAGGWEGVPADRQGVTETHLPLADDICDYFGVKIAMYFAWLGFYTSAMVYPAVFGSVLYTFTEADQVLGRDPARSGGSRGALLSGLAQTMT

SEQ ID NO: 819094 - protein, 72 aa, Homo sapiens
GFRDLAGPLSLAAVAAPGLVFTALCPLLLEVHLLWPRYLQARKTGKITGSSTYWMFDKIFFLGQKHWHYWDH

SEQ ID NO: 819095 - protein, 138 aa, Homo sapiens
RLPGFGGAFVSRCSRSSRSRLHCSMSSAPRGPPSVAPLPAGIGRSTAKTPGLPGSLEMGPLTFRDVAIEFSLEEWQCLDTSQQNLYRNVMLDNYRNLVFLGIAVSKPDLITCLEQGKEPCNMKRHAMVAKPPGWSAVA

SEQ ID NO: 819096 - protein, 138 aa, Homo sapiens; identical to SEQ ID NO: 819095

SEQ ID NO: 819097 - protein, 326 aa, Homo sapiens
MLDNYRNLVFLGIAVSKPDLITCLEQGKEPCNMKRHAMVAKPPVVCSHFAQDLWPKQGLKDSFQKVILRRYGKYGHENLQLRKGCKSADEHKVHKRGYNGLNQCLTTTQSKIFQCDKYVKVLHKFSNSNIHKKRQTGKKPFKCKECGKSCCILSQLTQHKKTATRVNFYKCKTCGKAFNQFSNLTKHKIIHPEVNPYKCEECGKAFNQSLTLTKHKKIHTEEKPYKCEDCGKVFSVFSVLTKHKIIHTGTKPYNCEECGKGFSIFSTLTKHKIIHTGEKPYKCNECGKAFNWSSTLTKHKRIHTGERPYKCEECGKAFNQSSTLTR

SEQ ID NO: 819098 - protein, 588 aa, Homo sapiens
MKLEFTEKNYNSFVLQNLNRQRKRKEYWDMALSVDNHVFFAHRNVLAAVSPLVRSLISSNDMKTADELFITIDTSYLSPVTVDQLLDYFYSGKVVISEQNVEELLRGAQYFNTPRLRVHCNDFLIKSICRANCLRYLFLAELFELKEVSDVAYSGIRDNFHYWASPEGSMHFMRCPPVIFGRLLRDENLHVLNEDQALSALINWVYFRKEDREKYFKKFFNYINLNAVSNKTLVFASNKLVGMENTSSHTTLIESVLMDRKQERPCSLLVYQRKGALLDSVVILGGQKAHGQFNDGVFAYIIQENLWMKLSDMPYRAAALSATSAGRYIYISGGTTEQISGLKTAWRYDMDDNSWTKLPDLPIGLVFHTMVTCGGTVYSVGGSIAPRRYVSNIYRYDERKEVWCLAGKMSIPMDGTAVITKGDRHLYIVTGRCLVKGYISRVGVVDCFDTSTGDVVQCITFPIEFNHRPLLSFQQDNILCVHSHRQSVEINLQKVKASKTTTSVPVLPNSCPLDVSHAICSIGDSKVFVCGGVTTASDVQTKDYTINPNAFLLDQKTGKWKTLAPPPEALDCPACCLAKLPCKILQRI

SEQ ID NO: 819099 - protein, 174 aa, Homo sapiens
SEIFRNGKIESLLEASHPQEIDREFHNKLKLKEDKLEKQEKPVNGEDKGDSGVDTQNSEGNADEEDPLGPNCYYDKTKSFFDNISCDDNRERRPTWAEERRLNAETFGIPLRPNRGRGGYRGRGGLGFRGGRGRGGGRGGTFTAPRGFRGGFRGGRGGREFADFEYRKTTAFGP

SEQ ID NO: 819100 - protein, 267 aa, Homo sapiens
MSGGTPYIGSKISLISKAEIRYEGILYTIDTENSTVALAKVRSFGTEDRPTDRPIPPRDEVFEYIIFRGSDIKDLTVCEPPKPQCSLPQDPAIVQSSLGSSTSSFQSMGSYGPFGRMPTYSQFSPSSLVGQQFGAVGVAMQLWSAPDTLGEHPADDANSLKDNTTFLTQVQKAMGEKLAQLRANLPAWMTGEKCESGPWELGHGVSLTLCNLVQRYNGSRYITRVPASGRGKEDMQGGTPSEKRGDEGAQKGRHTGERRAQETARRR

SEQ ID NO: 819101 - protein, 463 aa, Homo sapiens
MSGGTPYIGSKISLISKAEIRYEGILYTIDTENSTVALAKVRSFGTEDRPTDRPIPPRDEVFEYIIFRGSDIKDLTVCEPPKPQCSLPQDPAIVQSSLGSSTSSFQSMGSYGPFGRMPTYSQFSPSSLVGQQFGAVGVAGSSLTSFGTETSNSGTLPQSSAVGSAFTQDTRSLKTQLSQGRSSPQLDPLRKSPTMEQAVQTASAHLPAPAAVGRRSPVSTRPLPSASQKAGENQEHRRAEVHKVSRPENEQLRNDNKRQVAPGAPSAPRRGRGGHRGGRGRFGIRRDGPMKFEKDFDFESANAQFNKEEIDREFHNKLKLKEDKLEKQEKPVNGEDKGDSGVDTQNSEGNADEEDPLGPNCYYDKTKSFFDNISCDDNRERRPTWAEERRLNAETFGIPLRPNRGRGGYRGRGGLGFRGGRGRGGGRGGTFTAPRGFRGGFRGGRGGREFADFEYRKDNKVAA

SEQ ID NO: 819102 - protein, 514 aa, Homo sapiens
PNICLGRGPGVNRPRASGCCRRRRSERACGAGDSGVGSASLRAAGSGGGGAMSGGTPYIGSKISLISKAEIRYEGILYTIDTENSTVALAKVRSFGTEDRPTDRPIPPRDEVFEYIIFRGSDIKDLTVCEPPKPQCSLPQDPAIVQSSLGSSTSSFQSMGSYGPFGRMPTYSQFSPSSLVGQQFGAVGVAGSSLTSFGTETSNSGTLPQSSAVGSAFTQDTRSLKTQLSQGRSSPQLDPLRKSPTMEQAVQTASAHLPAPAAVGRRSPVSTRPLPSASQKAGENQEHRRAEVHKVSRPENEQLRNDNKRQVAPGAPSAPRRGRGGHRGGRGRFGIRRDGPMKFEKDFDFESANAQFNKEEIDREFHNKLKLKEDKLEKQEKPVNGEDKGDSGVDTQNSEGNADEEDPLGPNCYYDKTKSFFDNISCDDNRERRPTWAEERRLNAETFGIPLRPNRGRGGYRGRGGLGFRGGRGRGGGRGGTFTAPRGFRGGFRGGRGGREFADFEYRKDNKVAA

SEQ ID NO: 819103 - protein, 463 aa, Homo sapiens; identical to SEQ ID NO: 819101

SEQ ID NO: 819104 - protein, 463 aa, Homo sapiens
MSGGTPYIGSKISLISKAEIRYEGILYTIDTENSTVALAKVRSFGTEDRPTDRPIPPRDEVFEYIIFRGSDIKDLTVCEPPKPQCSLPQDPAIVQSSLGSSTSSFQSMGSYGPFGRMPTYSQFSPSSLVGQQFGAVGVAGSSLTSFGTETSNSGTLPQSSAVGSAFTQDTRSLKTQLSQGRSSPQLDPLRKSPTMEQAVQTASAHLPAPAAVGRRSPVSTRPLPSASQKAGENQEHRRAEVHKVSRPENEQLRNDNKRQVAPGAPSAPRRGRGGHRGGRGRFGIRRDGPMKFEKDFDFESANAQFNKEEIDREFHNKLKLKEDKLEKQEKPVNGEDKGDSGVDTQNSEGNADEEDPLGPNCYYDKTKSFFDNISCDDNRERRPTWAEERRLNAETFGIPLRPNRGRGGYRGRGGLGFRGGRGRGGGRGGTFTAPRGFRGGFRGGRGGREFADFEYRKTTAFGP

SEQ ID NO: 819105 - protein, 402 aa, Homo sapiens
MSGGTPYIGSKISLISKAEIRYEGILYTIDTENSTVALAKVRSFGTEDRPTDRPIPPRDEVFEYIIFRGSDIKDLTVCEPPKPQCSLPQDPAIVQSSLGSSTSSFQSMGSYGPFGRMPTYSQFSPSSLVGQQFGAVGVAGSSLTSFGTETSNSGTLPQSSAVGSAFTQDTRSLKTQLSQGRSSPQLDPLRKSPTMEQAVQTASAHLPAPAAVGRRSPVSTRPLPSASQKAGENQEHRRAEVHKVSRPENEQLRNDNKRQVEDKLEKQEKPVNGEDKGDSGVDTQNSEGNADEEDPLGPNCYYDKTKSFFDNISCDDNRERRPTWAEERRLNAETFGIPLRPNRGRGGYRGRGGLGFRGGRGRGGGRGGTFTAPRGFRGGFRGGRGGREFADFEYRKDNKVAA

SEQ ID NO: 819106 - protein, 463 aa, Homo sapiens; identical to SEQ ID NO: 819101

SEQ ID NO: 819107 - protein, 463 aa, Homo sapiens; identical to SEQ ID NO: 819104

SEQ ID NO: 819108 - protein, 174 aa, Homo sapiens; identical to SEQ ID NO: 819099

SEQ ID NO: 819109 - protein, 463 aa, Homo sapiens; identical to SEQ ID NO: 819101

SEQ ID NO: 819110 - protein, 463 aa, Homo sapiens; identical to SEQ ID NO: 819101

SEQ ID NO: 819111 - protein, 463 aa, Homo sapiens; identical to SEQ ID NO: 819104

SEQ ID NO: 819112 - protein, 469 aa, Homo sapiens
MSGGTPYIGSKISLISKAEIRYEGILYTIDTENSTVALAKVRSFGTEDRPTDRPIPPRDEVFEYIIFRGSDIKDLTVCEPPKPQCSLPQDPAIVQSSLGSSTSSFQSMGSYGPFGRMPTYSQFSPSSLVGQQFGAVGVAGSSLTSFGTETSNSGTLPQSSAVGSAFTQDTRSLKTQLSQGRSSPQLDPLRKSPTMEQAVQTASAHLPAPAAVGRRSPVSTRPLPSASQKAGENQEHRRAEVHKVSRPENEQLRNDNKRQVAPGAPSAPRRGRGGHRGGRGRFGIRRDGPMKFEKDFDFESANAQFNKEEIDREFHNKLKLKEDKLEKQEKPVNGEDKGDSGVDTQNSEGNADEEDPLGPNCYYDKTKSFFDNISCDDNRERRPTWAEERRLNAETFGIPLRPNRGRGGYRGRGGLGFRGGRGRGGGRGGTFTAPRGFRGGFRGGRGGREFADFEYRVSVTVNKFFGVDM

SEQ ID NO: 819113 - protein, 287 aa, Homo sapiens
MSGGTPYIGSKISLISKAEIRYEGILYTIDTENSTVALAKVRSFGTEDRPTDRPIPPRDEVFEYIIFRGSDIKDLTVCEPPKPQCSLPQDPAIVQSSLGSSTSSFQSMGSYGPFGRMPTYSQFSPSSLVGQQFGAVGVAGSSLTSFGTETSNSGTLPQSSAVGSAFTQDTRSLKTQLSQGRSSPQLDPLRKSPTMEQAVQTASAHLPAPAAVGRRSPVSTRPLPSASQKAGENQEHRRAEVHKVSRPENEQLRNDNKRQVAPGAPSAPRRGRGGHRGGRGQFQERKL

SEQ ID NO: 819114 - protein, 504 aa, Homo sapiens
MSGGTPYIGSKISLISKAEIRYEGILYTIDTENSTVALAKVRSFGTEDRPTDRPIPPRDEVFEYIIFRGSDIKDLTVCEPPKPQCSLPQDPAIVQSSLGSSTSSFQSMGSYGPFGRMPTYSQFSPSSLVGQQFGAVGVAGSSLTSFGTETSNSGTLPQSSAVGSAFTQDTRSLKTQLSQGRSSPQLDPLRKSPTMEQAVQTASAHLPAPAAVGRRSPVSTRPLPSASQKAGENQEHRRAEVHKVSRPENEQLRNDNKRQVAPGAPSAPRRGRGGHRGGRGRFGIRRDGPMKFEKDFDFESANAQFNKEEIDREFHNKLKLKEDKLEKQEKPVNGEDKGDSGVDTQNSEGNADEEDPLGPNCYYDKTKSFFDNISCDDNRRTETNPSLHAIKLFTKEPLKPATSTISLYITGPDLRRLTIGSLYLMKPSAWRIEPKRTGGNYNREGAPIHNTYAPAHIGAGAAERATRPESRGRRHSKRQERERQQDTRRHKGKQARPEPTARGH

SEQ ID NO: 819115 - protein, 287 aa, Homo sapiens; identical to SEQ ID NO: 819113

SEQ ID NO: 819116 - protein, 294 aa, Homo sapiens
MSGGTPYIGSKISLISKAEIRYEGILYTIDTENSTVALAKVRSFGTEDRPTDRPIPPRDEVFEYIIFRGSDIKDLTVCEPPKPQCSLPQDPAIVQSSLGSSTSSFQSMGSYGPFGRMPTYSQFSPSSLVGQQFGAVGVAGSSLTSFGTETSNSGTLPQSSAVGSAFTQDTRSLKTQLSQGRSSPQLDPLRKSPTMEQAVQTASASKMLGFTGVSYCARLIILGCETRVWPSSRAAQQVRHPSRRVYVTATRGGPRKGPANLYGKAAQICGPNGGPKPKGQAPIRTQEDKHTPGR

SEQ ID NO: 819117 - protein, 318 aa, Homo sapiens
RRNARPAAAARGAGFQAPGGCLRPSARPGALESPSLGPRKVPGRARGSMMRRTLENRNAQTKQLQTAVSNVEKHFGELCQIFAAYVRKTARLRDKADLLVNEINAYAATETPHLKLGLMNFADEFAKLQDYRQAEVERLEAKVVEPLKTYGTIVKMKRDDLKATLTARNREAKQLTQLERTRQRNPSDRHVISAETELQRAAMDASRTSRHLEETINNFERQKMKDIKTIFSEFITIEMLFHGKALEVYTAAYQNIQNIDEDEDLEVFRNSLYAPDYSSRLDIVRANSKSPLQRSLSAKCVSGTGQEAGWAATCQTLI

SEQ ID NO: 819118 - protein, 336 aa, Homo sapiens
RRNARPAAAARGAGFQAPGGCLRPSARPGALESPSLGPRKVPGRARGSMMRRTLENRNAQTKQLQTAVSNVEKHFGELCQIFAAYVRKTARLRDKADLLVNEINAYAATETPHLKLGLMNFADEFAKLQDYRQAEVERLEAKVVEPLKTYGTIVKMKRDDLKATLTARNREAKQLTQLERTRQRNPSDRHVISAETELQRAAMDASRTSRHLEETINNFERQKMKDIKTIFSEFITIEMLFHGKALEVYTAAYQNIQNIDEDEDLEVFRNSLYAPDYSSRLDIVRANSKSPLQRSLSAKCVSGTGQVSTCRLRKDQQAEDDEDDELDVTEEENFLK

SEQ ID NO: 819119 - protein, 316 aa, Homo sapiens
RRNARPAAAARGAGFQAPGGCLRPSARPGALESPSLGPRKVPGRARGSMMRRTLENRNAQTKQLQTAVSNVEKHFGELCQIFAAYVRKTARLRDKADLLVNEINAYAATETPHLKLGLMNFADEFAKLQDYRQAEVERLEAKVVEPLKTYGTIVKMKRDDLKATLTARNREAKQLTQLERTRQRNPSDRHVISAETELQRAAMDASRTSRHLEETINNFERQKMKDIKTIFSEFITIEMLFHGKALEVYTAAYQNIQNIDEDEDLEVFRNSLYAPDYSSRLDIVRANSKSPLQRSLSAKCVSGTGQVSKKPYSKGI

SEQ ID NO: 819120 - protein, 318 aa, Homo sapiens; identical to SEQ ID NO: 819117

SEQ ID NO: 819121 - protein, 336 aa, Homo sapiens; identical to SEQ ID NO: 819118

SEQ ID NO: 819122 - protein, 127 aa, Homo sapiens
MLFQAETELQRAAMDASRTSRHLEETINNFERQKMKDIKTIFSEFITIEMLFHGKALEVYTAAYQNIQNIDEDEDLEVFRNSLYAPDYSSRLDIVRANSKSPLQRSLSAKCVSGTGQVSKKPYSKGI

SEQ ID NO: 819123 - protein, 147 aa, Homo sapiens
MGPLRRIPTLSGRLHGPRCDLGPNSLGCSHRRRRRGARGPAGCHPPTPPGLGSPHCRGQCGSLGGSRAPRPRCAEQPEQPPPQLRPGPPGLGLFLCLHSPDSEERSNETTANSCLKCGEAFWRTVPNLRCLCAENCQAERQSRPPGE

SEQ ID NO: 819124 - protein, 134 aa, Homo sapiens
MDASRTSRHLEETINNFERQKMKDIKTIFSEFITIEMLFHGKALEVYTAAYQNIQNIDEDEDLEVFRNSLYAPDYSSRLDIVRANSKSPLQRSLSAKCVSGTGQVSTCRLRKDQQAEDDEDDELDVTEEENFLK

SEQ ID NO: 819125 - protein, 180 aa, Homo sapiens
RRNARPAAAARGAGFQAPGGCLRPSARPGALESPSLGPRKVPGRARGSMMRRTLENRNAQTKQLQTAVSNVEKHFGELCQIFAAYVRKTARLRDKADLLVNEINAYAATETPHLKLGLMNFADEFAKLQDYRQAENLKREFQFSKNRMSIKKIELIIAIHTNLKSNHIWRYFWKNVEFLS

SEQ ID NO: 819126 - protein, 336 aa, Homo sapiens; identical to SEQ ID NO: 819118

SEQ ID NO: 819127 - protein, 336 aa, Homo sapiens; identical to SEQ ID NO: 819118

SEQ ID NO: 819128 - protein, 166 aa, Homo sapiens
MAQTNSFFMLISSLMFLSLSQGQESQTELPNPRISCPEGTNAYRSYCYYFNEDPETWVDADLYCQNMNSGNLVSVLTQAEGAFVASLIKESSTDDSNVWIGLHDPKKNRRWHWSSGSLVSYKSWDTGSPSSANAGYCASLTSCSGFKKWKDESCEKKFSFVCKFKN

SEQ ID NO: 819129 - protein, 198 aa, Homo sapiens
MAQTNSFFMLISSLMFLSLSQGQESQTELPNPRISCPEGTNAYRSYCYYFNEDPETWVDADLYCQNMNSGNLVSVLTQAEGAFVASLIKESSTDDSNVWIGLHDPKKNRRWHWSSGSLVSYKSWDTGSPSSANAGYCASLTSCSGERQTIYPPVAISFPLISGDEHGDWDRGKDSRNGRMNLVRRSSPLFASSKTRGS

SEQ ID NO: 819130 - protein, 166 aa, Homo sapiens; identical to SEQ ID NO: 819128

SEQ ID NO: 819131 - protein, 198 aa, Homo sapiens; identical to SEQ ID NO: 819129

SEQ ID NO: 819132 - protein, 67 aa, Homo sapiens
MAQTNSFFMLISSLMFLSLSQGQESQTELPNPRISCPEGTNAYRSYCYYFKKEETPLGETPPGVFLY

SEQ ID NO: 819133 - protein, 563 aa, Homo sapiens
MGLQACLLGLFALILSGKCSYSPEPDQRRTLPPGWVSLGRADPEEELSLTFALRQQNVERLSELVQAVSDPSSPQYGKYLTLENVADLVRPSPLTLHTVQKWLLAAGAQKCHSVITQDFLTCWLSIRQAELLLPGAEFHHYVGGPTETHVVRSPHPYQLPQALAPHVDFVGGLHRFPPTSSLRQRPEPQVTGTVGLHLGVTPSVIRKRYNLTSQDVGSGTSNNSQACAQFLEQYFHDSDLAQFMRLFGGNFAHQASVARVVGQQGRGRAGIEASLDVQYLMSAGANISTWVYSSPGRHEGQEPFLQWLMLLSNESALPHVHTVSYGDDEDSLSSAYIQRVNTELMKAAARGLTLLFASGDSGAGCWSVSGRHQFRPTFPASSPYVTTVGGTSFQEPFLITNEIVDYISGGGFSNVFPRPSYQEEAVTKFLSSSPHLPPSSYFNASGRAYPDVAALSDGYWVVSNRVPIPWVSGTSASTPVFGGILSLINEHRILSGRPPLGFLNPRLYQQHGAGLFDVTRGCHESCLDEEVEGQGFCSGPGWDPVTGWGTPNFPALLKTLLNP

SEQ ID NO: 819134 - protein, 563 aa, Homo sapiens; identical to SEQ ID NO: 819133

SEQ ID NO: 819135 - protein, 563 aa, Homo sapiens; identical to SEQ ID NO: 819133

SEQ ID NO: 819136 - protein, 563 aa, Homo sapiens; identical to SEQ ID NO: 819133

SEQ ID NO: 819137 - protein, 320 aa, Homo sapiens
MRLFGGNFAHQASVARVVGQQGRGRAGIEASLDVQYLMSAGANISTWVYSSPGRHEGQEPFLQWLMLLSNESALPHVHTVSYGDDEDSLSSAYIQRVNTELMKAAARGLTLLFASGDSGAGCWSVSGRHQFRPTFPASSPYVTTVGGTSFQEPFLITNEIVDYISGGGFSNVFPRPSYQEEAVTKFLSSSPHLPPSSYFNASGRAYPDVAALSDGYWVVSNRVPIPWVSGTSASTPVFGGILSLINEHRILSGRPPLGFLNPRLYQQHGAGLFDVTRGCHESCLDEEVEGQGFCSGPGWDPVTGWGTPNFPALLKTLLNP

SEQ ID NO: 819138 - protein, 563 aa, Homo sapiens; identical to SEQ ID NO: 819133

SEQ ID NO: 819139 - protein, 247 aa, Homo sapiens
CSVEKSVHSHLGPCLEGSKSLSQSHIHASPQSLVPPARPGLYSPLPTYLGGPLGSPTIQMLSSPLSPYVTTVGGTSFQEPFLITNEIVDYISGGGFSNVFPRPSYQEEAVTKFLSSSPHLPPSSYFNASGRAYPDVAALSDGYWVVSNRVPIPWVSGTSASTPVFGGILSLINEHRILSGRPPLGFLNPRLYQQHGAGLFDVTRGCHESCLDEEVEGQGFCSGPGWDPVTGWGTPNFPALLKTLLNP

SEQ ID NO: 819140 - protein, 563 aa, Homo sapiens; identical to SEQ ID NO: 819133

SEQ ID NO: 819141 - protein, 563 aa, Homo sapiens; identical to SEQ ID NO: 819133

SEQ ID NO: 819142 - protein, 563 aa, Homo sapiens; identical to SEQ ID NO: 819133

SEQ ID NO: 819143 - protein, 563 aa, Homo sapiens; identical to SEQ ID NO: 819133

SEQ ID NO: 819144 - protein, 563 aa, Homo sapiens; identical to SEQ ID NO: 819133

SEQ ID NO: 819145 - protein, 563 aa, Homo sapiens; identical to SEQ ID NO: 819133

SEQ ID NO: 819146 - protein, 563 aa, Homo sapiens; identical to SEQ ID NO: 819133

SEQ ID NO: 819147 - protein, 484 aa, Homo sapiens
MGLQACLLGLFALILSGKCSYSPEPDQRRTLPPGWVSLGRADPEEELSLTFALRQQNVERLSELVQAVSDPSSPQYGKYLTLENVADLVRPSPLTLHTVQKWLLAAGAQKCHSVITQDFLTCWLSIRQAELLLPGAEFHHYVGGPTETHVVRSPHPYQLPQALAPHVDFVGGLHRFPPTSSLRQRPEPQVTGTVGLHLGVTPSVIRKRYNLTSQDVGSGTSNNSQACAQFLEQYFHDSDLAQFMRLFGGNFAHQASVARVVGQQGRGRAGIEASLDVQYLMSAGANISTWVYSSPGRHEGQEPFLQWLMLLSNESALPHVHTVSYGDDEDSLSSAYIQRVNTELMKAAARGLTLLFASGDSGAGCWSVSGRHQFRPTFPASSPYVTTVGGTSFQEPFLITNEIVDYISGGGFSNVFPRPSYQEEAVTKFLSSSPHLPPSSYFNASGRAYPDVAALSDGYWVVSNRVPIPWVSGTSVRISPSPNS

SEQ ID NO: 819148 - protein, 489 aa, Homo sapiens
MGLQACLLGLFALILSGKCSYSPEPDQRRTLPPGWVSLGRADPEEELSLTFALRQQNVERLSELVQAVSDPSSPQYGKYLTLENVADLVRPSPLTLHTVQKWLLAAGAQKCHSVITQDFLTCWLSIRQAELLLPGAEFHHYVGGPTETHVVRSPHPYQLPQALAPHVDFVGGLHRFPPTSSLRQRPEPQVTGTVGLHLGVTPSVIRKRYNLTSQDVGSGTSNNSQACAQFLEQYFHDSDLAQFMRLFGGNFAHQASVARVVGQQGRGRAGIEASLDVQYLMSAGANISTWVYSSPGRHEGQEPFLQWLMLLSNESALPHVHTVSYGDDEDSLSSAYIQRVNTELMKAAARGLTLLFASGDSGAGCWSVSGRHQFRPTFPASSPYVTTVGGTSFQEPFLITNEIVDYISGGGFSNVFPRPSYQEEAVTKFLSSSPHLPPSSYFNASGRAYIAVITQDFLTCWLSIRQAELLLPGAEFHHYVGDLRNPVWR

SEQ ID NO: 819149 - protein, 321 aa, Homo sapiens
MGLQACLLGLFALILSGKCSYSPEPDQRRTLPPGWVSLGRADPEEELSLTFALRQQNVERLSELVQAVSDPSSPQYGKYLTLENVADLVRPSPLTLHTVQKWLLAAGAQKCHSVITQDFLTCWLSIRQAELLLPGAEFHHYVGGPTETHVVRSPHPYQLPQALAPHVDFVGGLHRFPPTSSLRQRPEPQVTGTVGLHLGVTPSVIRKRYNLTSQDVGSGTSNNSQACAQFLEQYFHDSDLAQFMRLFGGNFAHQASVARVVGQQGRGRAGIEASLDVQYLMSAGANISTWVYSSPGTTKRTGQWGRGWEMGVDPCSLKGML

SEQ ID NO: 819150 - protein, 138 aa, Homo sapiens
MGLQACLLGLFALILSGKCSYSPEPDQRRTLPPGWVSLGRADPEEELSLTFALRQQNVERLSELVQAVSDPSSPQYGKYLTLENVADLVRPSPLDEGTCPHPVGGLRLIGVAIKGQHNNGNCGNINVQPDCIVSISWF

SEQ ID NO: 819151 - protein, 185 aa, Homo sapiens
RFPPTSSLRQRPEPQVTGTVGLHLGVTPSVIRKRYNLTSQDVGSGTSNNSQACAQVSQAKSPRVLIASPQCPQFLTTLGLTLGPTISALTPSIFLEQYFHDSDLAQFMRLFGGNFAHQASVARVVGQQGRGRAGIEASLDVQYLMSAGANISTWVYSSPGTTKRTGQWGRGWEMGVDPCSLKGML

SEQ ID NO: 819152 - protein, 127 aa, Homo sapiens
MCPLPLAAAAVAAPRAPLRLLNRGLAAAMSTAQSLKSVDYEVFGRVQGVCFRMYTEDEARKIGVVGWVKNTSKGTVTGQVQGPEDKVNSMKSWLSKVGSPSSRIDRTNFSNEKTISKLEYSNFSIRY

SEQ ID NO: 819153 - protein, 127 aa, Homo sapiens; identical to SEQ ID NO: 819152

SEQ ID NO: 819154 - protein, 88 aa, Homo sapiens
AERRRRGRRWWRQLEPNGLRLLRRGPGSEPPPQASPAQREAASPETRGRIPSYCPASPGVAHSKRQPTGVPVATTGGSQTQPACTQVK

SEQ ID NO: 819155 - protein, 64 aa, Homo sapiens
MSTAQSLKSVDYEVFGRVQGRRPLYGGRSKRLWEEGEKAVRSASHLKYAFSRCGWDFRSAMTQQ

SEQ ID NO: 819156 - protein, 88 aa, Homo sapiens; identical to SEQ ID NO: 819154

SEQ ID NO: 819157 - protein, 129 aa, Homo sapiens
MCPLPLAAAAVAAPRAPLRLLNRGLAAAMSTAQSLKSVDYEVFGRVQGVCFRMYTEDEARKIGVVGWVKNTSKGTVTGQVQGPEDKVNSILDFTLLASLVLNPWPQVIRLPWPPKVLGLQWCLQILSLL

SEQ ID NO: 819158 - protein, 175 aa, Homo sapiens
MLLTQSLFGGLFPRTRETMRRYKVSLFYLGCSRTPNVKLSSCLGLPCCWDYSYKFIQLSEFGFGQVIIVSEEPWKENISCSSTTFIKSTICLSGVCFRMYTEDEARKIGVVGWVKNTSKGTVTGQVQGPEDKVNSILDFTLLASLVLNPWPQVIRLPWPPKVLGLQWCLQILSLL

SEQ ID NO: 819159 - protein, 122 aa, Homo sapiens
MCPLPLAAAAVAAPRAPLRLLNRGLAAAMSTAQSLKSVDYEVFGRVQGVCFRMYTEDEARKIGVVGWVKNTSKGTVTGQVQGPEDKVNSILLFPSIEALIAQIPNNFGVMPLPSSWSVRSPG

SEQ ID NO: 819160 - protein, 125 aa, Homo sapiens
MCPLPLAAAAVAAPRAPLRLLNRGLAAAMSTAQSLKSVDYEVFGRVQGVCFRMYTEDEARKIGVVGWVKNTSKGTVTGQVQGPEDKVNSMLECSGTISAHYNLCLPGSDLPDSASQVAGTTGSPG

SEQ ID NO: 819161 - protein, 129 aa, Homo sapiens; identical to SEQ ID NO: 819157

SEQ ID NO: 819162 - protein, 142 aa, Homo sapiens
MLLTQSLFGGLFPRTRETMRSYKFIQLSEFGFGQVIIVSEEPWKENISCSSTTFIKSTICLSGVCFRMYTEDEARKIGVVGWVKNTSKGTVTGQVQGPEDKVNSMKSWLSKVGSPSSRIDRTNFSNEKTISKLEYSNFSIRY

SEQ ID NO: 819163 - protein, 127 aa, Homo sapiens; identical to SEQ ID NO: 819152

SEQ ID NO: 819164 - protein, 127 aa, Homo sapiens; identical to SEQ ID NO: 819152

SEQ ID NO: 819165 - protein, 127 aa, Homo sapiens; identical to SEQ ID NO: 819152

SEQ ID NO: 819166 - protein, 122 aa, Homo sapiens; identical to SEQ ID NO: 819159

SEQ ID NO: 819167 - protein, 129 aa, Homo sapiens; identical to SEQ ID NO: 819157

SEQ ID NO: 819168 - protein, 129 aa, Homo sapiens; identical to SEQ ID NO: 819157

SEQ ID NO: 819169 - protein, 122 aa, Homo sapiens; identical to SEQ ID NO: 819159

SEQ ID NO: 819170 - protein, 122 aa, Homo sapiens; identical to SEQ ID NO: 819159

SEQ ID NO: 819171 - protein, 129 aa, Homo sapiens; identical to SEQ ID NO: 819157

SEQ ID NO: 819172 - protein, 88 aa, Homo sapiens; identical to SEQ ID NO: 819154

SEQ ID NO: 819173 - protein, 219 aa, Homo sapiens
PLPGVNSALTPPPALRPASMDLLRPHWLEVSRDITGPQAAPSAFPHQELPRALPAAAATAGCAGLEATYSNVGLAALPGVSLAASPVVAEYARVQKRKGTHRSPQEPQQGKTEVTPAAQVDVLYSRVCKPKRRDPGPTTDPLDPKGQGAILALAGDLAYQTLPLRALDVDSGPLENVYESIRELGDPAGRSSTCGAGTPPASSCPSLGRGWRPLPASLP

SEQ ID NO: 819174 - protein, 252 aa, Homo sapiens
SVRAGEALTASRRWRRAGAGEGCGGGATVQQAVGTAMHSAWCHMPTAASVTRARSPRGGVSWLCPGSELIGQSPGHHAQILWPGWATALCPSLAVVGSDAVDSAQSSALCPSLAVVGSDAVDSGTCSSAFAGWEVHTRGIGSRLLTKMGYEFGKARVSTSCPGEVGRLLQHSPGPAAIRFPGSRSHRVPRVPQTQHCHPRAPQIPGVPRPQHCHPRAPQIPRVLRPQHCHLRAPQIPGVPWPQHCHPRAPQI

SEQ ID NO: 819175 - protein, 548 aa, Homo sapiens
STSGSGGAREEVPIGCWGEKGAPGRSSRPGPAPPSLSMDEESLESALQTYRAQLQQVELALGAGLDSSEQADLRQLQGDLKELIELTEASLVSVRKSSLLAALDEERPGRQEDAEYQAFREAITEAVEAPAAARGSGSETVPKAEAGPESAAGGQEEEEGEDEEELSGTKVSAPYYSSWGTLEYHNAMVVGTEEAEDGSAGVRVLYLYPTHKSLKPCPFFLEGKCRFKENCRFSHGQVVSLDELRPFQDPDLSSLQAGSACLAKHQDGLWHAARITDVDNGYYTVKFDSLLLREAVVEGDGILPPLRTEATESDSDSDGTGDSSYARVVGSDAVDSGTCSSAFAGWEVHTRGIGSRLLTKMGYEFGKGLGRHAEGRVEPIHAVVLPRGKSLDQCVETLQKQTRVGKAGTNKPPRCRGRGARPGGRPAPRNVFDFLNEKLQGQAPGALEAGAAPAGRRSKDMYHASKSAKRALSLRLFQTEEKIERTQRDIRSIQEALARNAGRHSVASAQLQEKLAGAQRQLGQLRAQEAGLQQEQRKADTHKKMTEF

SEQ ID NO: 819176 - protein, 571 aa, Homo sapiens
ALPEAAALGRKCRSAAGAKRGRRAALAGEAGGLSVAAAGKPRGGGARPGTSPGPAPPSLSMDEESLESALQTYRAQLQQVELALGAGLDSSEQADLRQLQGDLKELIELTEASLVSVRKSSLLAALDEERPGRQEDAEYQAFREAITEAVEAPAAARGSGSETVPKAEAGPESAAGGQEEEEGEDEEELSGTKVSAPYYSSWGTLEYHNAMVVGTEEAEDGSAGVRVLYLYPTHKSLKPCPFFLEGKCRFKENCRFSHGQVVSLDELRPFQDPDLSSLQAGSACLAKHQDGLWHAARITDVDNGYYTVKFDSLLLREAVVEGDGILPPLRTEATESDSDSDGTGDSSYARVVGSDAVDSGTCSSAFAGWEVHTRGIGSRLLTKMGYEFGKGLGRHAEGRVEPIHAVVLPRGKSLDQCVETLQKQTRVGKAGTNKPPRCRGRGARPGGRPAPRNVFDFLNEKLQGQAPGALEAGAAPAGRRSKDMYHASKSAKRALSLRLFQTEEKIERTQRDIRSIQEALARNAGRHSVASAQLQEKLAGAQRQLGQLRAQEAGLQQEQRKADTHKKMTEF

SEQ ID NO: 819177 - protein, 511 aa, Homo sapiens
MDEESLESALQTYRAQLQQVELALGAGLDSSEQADLRQLQGDLKELIELTEASLVSVRKSSLLAALDEERPGRQEDAEYQAFREAITEAVEAPAAARGSGSETVPKAEAGPESAAGGQEEEEGEDEEELSGTKVSAPYYSSWGTLEYHNAMVVGTEEAEDGSAGVRVLYLYPTHKSLKPCPFFLEGKCRFKENCRFSHGQVVSLDELRPFQDPDLSSLQAGSACLAKHQDGLWHAARITDVDNGYYTVKFDSLLLREAVVEGDGILPPLRTEATESDSDSDGTGDSSYARVVGSDAVDSGTCSSAFAGWEVHTRGIGSRLLTKMGYEFGKGLGRHAEGRVEPIHAVVLPRGKSLDQCVETLQKQTRVGKAGTNKPPRCRGRGARPGGRPAPRNVFDFLNEKLQGQAPGALEAGAAPAGRRSKDMYHASKSAKRALSLRLFQTEEKIERTQRDIRSIQEALARNAGRHSVASAQLQEKLAGAQRQLGQLRAQEAGLQQEQRKADTHKKMTEF

SEQ ID NO: 819178 - protein, 548 aa, Homo sapiens; identical to SEQ ID NO: 819175

SEQ ID NO: 819179 - protein, 405 aa, Homo sapiens
KPHPPQPPQHSSEAGVNLDEEELSGTKVSAPYYSSWGTLEYHNAMVVGTEEAEDGSAGVRVLYLYPTHKSLKPCPFFLEGKCRFKENCRFSHGQVVSLDELRPFQDPDLSSLQAGSACLAKHQDGLWHAARITDVDNGYYTVKFDSLLLREAVVEGDGILPPLRTEATESDSDSDGTGDSSYARVVGSDAVDSGTCSSAFAGWEVHTRGIGSRLLTKMGYEFGKGLGRHAEGRVEPIHAVVLPRGKSLDQCVETLQKQTRVGKAGTNKPPRCRGRGARPGGRPAPRNVFDFLNEKLQGQAPGALEAGAAPAGRRSKDMYHASKSAKRALSLRLFQTEEKIERTQRDIRSIQEALARNAGRHSVASAQLQEKLAGAQRQLGQLRAQEAGLQQEQRKADTHKKMTEF

SEQ ID NO: 819180 - protein, 361 aa, Homo sapiens
MVVGTEEAEDGSAGVRVLYLYPTHKSLKPCPFFLEGKCRFKENCRFSHGQVVSLDELRPFQDPDLSSLQAGSACLAKHQDGLWHAARITDVDNGYYTVKFDSLLLREAVVEGDGILPPLRTEATESDSDSDGTGDSSYARVVGSDAVDSGTCSSAFAGWEVHTRGIGSRLLTKMGYEFGKGLGRHAEGRVEPIHAVVLPRGKSLDQCVETLQKQTRVGKAGTNKPPRCRGRGARPGGRPAPRNVFDFLNEKLQGQAPGALEAGAAPAGRRSKDMYHASKSAKRALSLRLFQTEEKIERTQRDIRSIQEALARNAGRHSVASAQLQEKLAGAQRQLGQLRAQEAGLQQEQRKADTHKKMTEF

SEQ ID NO: 819181 - protein, 548 aa, Homo sapiens; identical to SEQ ID NO: 819175

SEQ ID NO: 819182 - protein, 548 aa, Homo sapiens; identical to SEQ ID NO: 819175

SEQ ID NO: 819183 - protein, 548 aa, Homo sapiens; identical to SEQ ID NO: 819175

SEQ ID NO: 819184 - protein, 548 aa, Homo sapiens; identical to SEQ ID NO: 819175

SEQ ID NO: 819185 - protein, 568 aa, Homo sapiens
STSGSGGAREEVPIGCWGEKGAPGRSSRPGPAPPSLSMDEESLESALQTYRAQLQQVELALGAGLDSSEQADLRQLQGDLKELIELTEASLVSVRKSSLLAALDEERPGRQEDAEYQAFREAITEAVEAPAAARGSGSETVPKAEAGPESAAGGQEEEEGEDEEELSGTKVSAPYYSSWGTLEYHNAMVVGTEEAEDGSAGVRVLYLYPTHKSLKPCPFFLEGKCRFKENCRFSHGQVVSLDELRPFQDPDLSSLQAGSACLAKHQDGLWHAARITDVDNGYYTVKFDSLLLREAVVEGDGILPPLRTEATESDSDSDGTGDSSYARVVGSDAVDSAQSSALCPSLAVVGSDAVDSGTCSSAFAGWEVHTRGIGSRLLTKMGYEFGKGLGRHAEGRVEPIHAVVLPRGKSLDQCVETLQKQTRVGKAGTNKPPRCRGRGARPGGRPAPRNVFDFLNEKLQGQAPGALEAGAAPAGRRSKDMYHASKSAKRALSLRLFQTEEKIERTQRDIRSIQEALARNAGRHSVASAQLQEKLAGAQRQLGQLRAQEAGLQQEQRKADTHKKMTEF

SEQ ID NO: 819186 - protein, 295 aa, Homo sapiens
MGLPVSWAPPALWVLGCCALLLSLWALCTACRRPEDAVAPRKRARRQRARLQGSATAAEASLLRRTHLCSLSKSDTRLHELHRGPRSSRALRPASMDLLRPHWLEVSRDITGPQAAPSAFPHQELPRALPAAAATAGCAGLEATYSNVGLAALPGVSLAASPVVAEYARVQKRKGTHRSPQEPQQGKTEVTPAAQVDVLYSRVCKPKRRDPGPTTDPLDPKGQGAILALAGDLAYQTLPLRALDVDSGPLENVYESIRELGDPAGRSSTCGAGTPPASSCPSLGRGWRPLPASLP

SEQ ID NO: 819187 - protein, 548 aa, Homo sapiens; identical to SEQ ID NO: 819175

SEQ ID NO: 819188 - protein, 337 aa, Homo sapiens
MFSHGQVVSLDELRPFQDPDLSSLQAGSACLAKHQDGLWHAARITDVDNGYYTVKFDSLLLREAVVEGDGILPPLRTEATESDSDSDGTGDSSYARVVGSDAVDSAQSSALCPSLAVVGSDAVDSGTCSSAFAGWEVHTRGIGSRLLTKMGYEFGKGLGRHAEGRVEPIHAVVLPRGKSLDQCVETLQKQTRVGKAGTNKPPRCRGRGARPGGRPAPRNVFDFLNEKLQGQAPGALEAGAAPAGRRSKDMYHASKSAKRALSLRLFQTEEKIERTQRDIRSIQEALARNAGRHSVASAQLQEKLAGAQRQLGQLRAQEAGLQQEQRKADTHKKMTEF

SEQ ID NO: 819189 - protein, 295 aa, Homo sapiens; identical to SEQ ID NO: 819186

SEQ ID NO: 819190 - protein, 548 aa, Homo sapiens; identical to SEQ ID NO: 819175

SEQ ID NO: 819191 - protein, 548 aa, Homo sapiens; identical to SEQ ID NO: 819175

SEQ ID NO: 819192 - protein, 548 aa, Homo sapiens; identical to SEQ ID NO: 819175

SEQ ID NO: 819193 - protein, 454 aa, Homo sapiens
STSGSGGAREEVPIGCWGEKGAPGRSSRPGPAPPSLSMDEESLESALQTYRAQLQQVELALGAGLDSSEQADLRQLQGDLKELIELTEASLVSVRKSSLLAALDEERPGRQEDAEYQAFREAITEAVEAPAAARGSGSETVPKAEAGPESAAGGQEEEEGEDEEELSGTKVSAPYYSSWGTLEYHNAMVVGTEEAEDGSAGVRVLYLYPTHKSLKPCPFFLEGKCRFKENCRFSHGQVVSLDELRPFQDPDLSSLQAGSACLAKHQDGLWHAARITDVDNGYYTVKFDSLLLREAVVEGDGILPPLRTEATESDSDSDGTGDSSYARVVGSDAVDSGTCSSAFAGWEVHTRGIGSRLLTKMGYEFGKGLGRHAEGRVEPIHAVVLPRGKSLDQCVETLQKQTRVGKAGTNKPPRCRGRGARPGGRPAPRNVFDFLNENRPAAGAEEGRHPQEDD

SEQ ID NO: 819194 - protein, 347 aa, Homo sapiens
STSGSGGAREEVPIGCWGEKGAPGRSSRPGPAPPSLSMDEESLESALQTYRAQLQQVELALGAGLDSSEQADLRQLQGDLKELIELTEASLVSVRKSSLLAALDEERPGRQEDAEYQAFREAITEAVEAPAAARGSGSETVPKAEAGPESAAGGQEEEEGEDEEELSGTKVSAPYYSSWGTLEYHNAMVVGTEEAEDGSAGVRVLYLYPTHKSLKPCPFFLEGKCRFKENCRFSHGQVVSLDELRPFQDPDLSSLQAGSACLAKHQDGLWHAARITDVDNGYYTVKFDSLLLREAVVEGDGILPPLRTEATESDSDSDGTGDSSYARVVGSDSVALVGGYQLDSYMF

SEQ ID NO: 819195 - protein, 81 aa, Homo sapiens
FPHQELPRALPAAAATAGCAGLEATYSNVGLAALPGVSLAASPVVAEYARVQKRKGTHRSPQEPQQGKTEVTPAAQVTWAR

SEQ ID NO: 819196 - protein, 1310 aa, Homo sapiens
PWRRQRRRERRARGRARPGPEEATRPWCTDSLDGPGEGSVQPLPTAGGPSVKGKPGKRLSAPRGPFPRLADCAHFHYENVDFGHIQLLLSPDREGPSLSGENELVFGVQVTCQGRSWPVLRSYDDFRSLDAHLHRCIFDRRFSCLPELPPPPEGARAAQMLVPLLLQYLETLSGLVDSNLNCGPVLTWMELDNHGRRLLLSEEASLNIPAVAAAHVIKRYTAQAPDELSFEVGDIVSVIDMPPTEDRSWWRGKRGFQVGFFPSECVELFTERPGPGLKADADGPPCGIPAPQGISSLTSAVPRPRGKLAGLLRTFMRSRPSRQRLRQRGILRQRVFGCDLGEHLSNSGQDVPQVLRCCSEFIEAHGVVDGIYRLSGVSSNIQRLRHEFDSERIPELSGPAFLQDIHSVSSLCKLYFRELPNPLLTYQLYGKFSEAMSVPGEEERLVRVHDVIQQLPPPHYRTLEYLLRHLARMARHSANTSMHARNLAIVWAPNLLRSMELESVGMGGAAAFREVRVQSVVVEFLLTHVDVLFSDTFTSAGLDPAGRCLLPRPKSLAGSCPSTRLLTLEEAQARTQGRLGTPTEPTTPKAPASPAERRKGERGEKQRKPGGSSWKTFFALGRGPSVPRKKPLPWLGGTRAPPQPSGSRPDTVTLRSAKSEESLSSQASGAGLQRLHRLRRPHSSSDAFPVGPAPAGSCESLSSSSSSESSSSESSSSSSESSAAGLGALSGSPSHRTSAWLDDGDELDFSPPRCLEGLRGLDFDPLTFRCSSPTPGDPAPPASPAPPAPASAFPPRVTPQAISPRGPTSPASPAALDISEPLAVSVPPAVLELLGAGGAPASATPTPALSPGRSLRPHLIPLLLRGAEAPLTDACQQEMCSKLRGAQGPLGPDMESPLPPPPLSLLRPGGAPPPPPKNPARLMALALAERAQQVAEQQSQQECGGTPPASQSPFHRSLSLEVGGEPLGTSGSGPPPNSLAHPGAWVPGPPPYLPRQQSDGSLLRSQRPMGTSRRGLRGPAQVSAQLRAGGGGRDAPEAAAQSPCSVPSQVPTPGFFSPAPRECLPPFLGVPKPGLYPLGPPSFQPSSPAPVWRSSLGPPAPLDRGENLYYEIGASEGSPYSGPTRSWSPFRSMPPDRLNASYGMLGQSPPLHRSPDFLLSYPPAPSCFPPDHLGYSAPQHPARRPTPPEPLYVNLALGPRGPSPASSSSSSPPAHPRSRSDPGPPVPRLPQKQRAPWGPRTPHRVPGPWGPPEPLLLYRAAPPAYGRGGELHRGSLYRNGGQRGEGAGPPPPYPTPSWSLHSEGQTRSYC

SEQ ID NO: 819197 - protein, 1041 aa, Homo sapiens
GAGMDGPGASAVVVRVGIPDLQQTKCLRLDPAAPVWAAKQRVALALNHSLQDALNYGLFQPPSRGRAGKFLDEERLLQEYPPNLDTPLPYLEFRYKRRVYAQNLIDDKQFESFTQRHEFDSERIPELSGPAFLQDIHSVSSLCKLYFRELPNPLLTYQLYGKFSEAMSVPGEEERLVRVHDVIQQLPPPHYRTLEYLLRHLARMARHSANTSMHARNLAIVWAPNLLRSMELESVGMGGAAAFREVRVQSVVVEFLLTHVDVLFSDTFTSAGLDPAGRCLLPRPKSLAGSCPSTRLLTLEEAQARTQGRLGTPTEPTTPKAPASPAERRKGERGEKQRKPGGSSWKTFFALGRGPSVPRKKPLPWLGGTRAPPQPSGSRPDTVTLRSAKSEESLSSQASGAGLQRLHRLRRPHSSSDAFPVGPAPAGSCESLSSSSSSESSSSESSSSSSESSAAGLGALSGSPSHRTSAWLDDGDELDFSPPRCLEGLRGLDFDPLTFRCSSPTPGDPAPPASPAPPAPASAFPPRVTPQAISPRGPTSPASPAALDISEPLAVSVPPAVLELLGAGGAPASATPTPALSPGRSLRPHLIPLLLRGAEAPLTDACQQEMCSKLRGAQGPLGPDMESPLPPPPLSLLRPGGAPPPPPKNPARLMALALAERAQQVAEQQSQQECGGTPPASQSPFHRSLSLEVGGEPLGTSGSGPPPNSLAHPGAWVPGPPPYLPRQQSDGSLLRSQRPMGTSRRGLRGPAQVSAQLRAGGGGRDAPEAAAQSPCSVPSQVPTPGFFSPAPRECLPPFLGVPKPGLYPLGPPSFQPSSPAPVWRSSLGPPAPLDRGENLYYEIGASEGSPYSGPTRSWSPFRSMPPDRLNASYGMLGQSPPLHRSPDFLLSYPPAPSCFPPDHLGYSAPQHPARRPTPPEPLYVNLALGPRGPSPASSSSSSPPAHPRSRSDPGPPVPRLPQKQRAPWGPRTPHRVPGPWGPPEPLLLYRAAPPAYGRGGELHRGSLYRNGGQRGEGAGPPPPYPTPSWSLHSEGQTRSYC

SEQ ID NO: 819198 - protein, 730 aa, Homo sapiens
GGPELTAAPFPHSPGRCLLPRPKSLAGSCPSTRLLTLEEAQARTQAGWGRPRSPQLPRPRPHLRKGSRPDTVTLRSAKSEESLSSQASGAGLQRLHRLRRPHSSSDAFPVGPAPAGSCESLSSSSSSESSSSESSSSSSESSAAGLGALSGSPSHRTSAWLDDGDELDFSPPRCLEGLRGLDFDPLTFRCSSPTPGDPAPPASPAPPAPASAFPPRVTPQAISPRGPTSPASPAALDISEPLAVSVPPAVLELLGAGGAPASATPTPALSPGRSLRPHLIPLLLRGAEAPLTDACQQEMCSKLRGAQGPLGPDMESPLPPPPLSLLRPGGAPPPPPKNPARLMALALAERAQQVAEQQSQQECGGTPPASQSPFHRSLSLEVGGEPLGTSGSGPPPNSLAHPGAWVPGPPPYLPRQQSDGSLLRSQRPMGTSRRGLRGPAQVSAQLRAGGGGRDAPEAAAQSPCSVPSQVPTPGFFSPAPRECLPPFLGVPKPGLYPLGPPSFQPSSPAPVWRSSLGPPAPLDRGENLYYEIGASEGSPYSGPTRSWSPFRSMPPDRLNASYGMLGQSPPLHRSPDFLLSYPPAPSCFPPDHLGYSAPQHPARRPTPPEPLYVNLALGPRGPSPASSSSSSPPAHPRSRSDPGPPVPRLPQKQRAPWGPRTPHRVPGPWGPPEPLLLYRAAPPAYGRGGELHRGSLYRNGGQRGEGAGPPPPYPTPSWSLHSEGQTRSYC

SEQ ID NO: 819199 - protein, 1310 aa, Homo sapiens; identical to SEQ ID NO: 819196

SEQ ID NO: 819200 - protein, 1238 aa, Homo sapiens
PWRRQRRRERRARGRARPGPEEATRPWCTDSLDGPGEGSVQPLPTAGGPSVKGKPGKRLSAPRGPFPRLADCAHFHYENVDFGHIQLLLSPDREGPSLSGENELVFGVQVTCQGRSWPVLRSYDDFRSLDAHLHRCIFDRRFSCLPELPPPPEGARAAQMLVPLLLQYLETLSGLVDSNLNCGPVLTWMELDNHGRRLLLSEEASLNIPAVAAAHVIKRYTAQAPDELSFEVGDIVSVIDMPPTEDRSWWRGKRGFQVGFFPSECVELFTERPGPGLKADADGPPCGIPAPQGISSLTSAVPRPRGKLAGLLRTFMRSRPSRQRLRQRGILRQRVFGCDLGEHLSNSGQDVPQVLRCCSEFIEAHGVVDGIYRLSGVSSNIQRLRHEFDSERIPELSGPAFLQDIHSVSSLCKLYFRELPNPLLTYQLYGKFSEAMSVPGEEERLVRVHDVIQQLPPPHYRTLEYLLRHLARMARHSANTSMHARNLAIVWAPNLLRSMELESVGMGGAAAFREVRVQSVVVEFLLTHVDVLFSDTFTSAGLDPAGRCLLPRPKSLAGSCPSTRLLTLEEAQARTQGRLGTPTEPTTPKAPASPAERRKGERGEKQRKPGGSSWKTFFALGRGPSVPRKKPLPWLGGTRAPPQPSGSRPDTVTLRSAKSEESLSSQASGAGLQRLHRLRRPHSSSDAFPVGPAPAGSCESLSSSSSSESSSSESSSSSSESSAAGLGALSGSPSHRTSAWLDDGDELDFSPPRCLEGLRGLDFDPLTFRCSSPTPGDPAPPASPAPPAPASAFPPRVTPQAISPRGPTSPASPAALDISEPLAVSVPPAVLELLGAGGAPASATPTPALSPGRSLRPHLIPLLLRGAEAPLTDACQQEMCSKLRGAQGPLGPDMESPLHLASLGTDTMRPDASVSPRKSADYTRRHTDSTVSRHHLDSRSDHIAHCDRFSPHSELALMRASHPREAYHHHILMPTTKHEHRLISSTTTSKDKLTEPEDPPSKQQKTRSRTRPPLNLVTAQRRTHQPRTDQPARTRTRRPTDPPPHPQRPRHPGPQSPAPPHPRTGRPAGRPAATAQPQRRNPSPQTTHDPRRQASTSTHSPRPQATAPGARPHERRARGAEHESRAADSRKDADTTQRHAQRAPTTERKPRRHNEQKDYKDNKGTYIYSTQTDRNYNIKKNTDEQTPTYQQTEQKLEITTTATDTQHASSNKENRINTNRTDKQKAWIKSKNIKRRAN

SEQ ID NO: 819201 - protein, 597 aa, Homo sapiens
PWRRQRRRERRARGRARPGPEEATRPWCTDSLDGPGEGSVQPLPTAGGPSVKGKPGKRLSAPRGPFPRLADCAHFHYENVDFGHIQLLLSPDREGPSLSGENELVFGVQVTCQGRSWPVLRSYDDFRSLDAHLHRCIFDRRFSCLPELPPPPEGARAAQMLVPLLLQYLETLSGLVDSNLNCGPVLTWMELDNHGRRLLLSEEASLNIPAVAAAHVIKRYTAQAPDELSFEVGDIVSVIDMPPTEDRSWWRGKRGFQVGFFPSECVELFTERPGPGLKADADGPPCGIPAPQGISSLTSAVPRPRGKLAGLLRTFMRSRPSRQRLRQRGILRQRVFGCDLGEHLSNSGQDVPQVLRCCSEFIEAHGVVDGIYRLSGVSSNIQRLRHEFDSERIPELSGPAFLQDIHSVSSLCKLYFRELPNPLLTYQLYGKFSEAMSVPGEEERLVRVHDVIQQLPPPHYRTLEYLLRHLARMARHSANTSMHARNLAIVWAPNLLRSMELESVGMGGAAAFREVRVQSVVVEFLLTHVDVLFSDTFTSAGLDPAGRCLLPRPKSLAGSCPSTRLLTLEEAQARTQGRLGTPTEPTTPKAPASPAER

SEQ ID NO: 819202 - protein, 246 aa, Homo sapiens
MLSLSLCSHLWGPLILSALQARSTDSLDGPGEGSVQPLPTAGGPSVKGKPGKRLSAPRGPFPRLADCAHFHYENVDFGHIQLLLSPDREGPSLSGENELVFGVQVTCQGRSWPVLRSYDDFRSLDAHLHRCIFDRRFSCLPELPPPPEGARAAQMLVPLLLQYLETLSGLVDSNLNCGPVLTWMEVGLGRGLGDSEWVRGCVCHHAQHREILDGNRVASAVEDEGAEVDGEAFRWGSLWVGESWDM

SEQ ID NO: 819203 - protein, 1300 aa, Homo sapiens
IEVAEALNGPEALNGPGGTDSLDGPGEGSVQPLPTAGGPSVKGKPGKRLSAPRGPFPRLADCAHFHYENVDFGHIQLLLSPDREGPSLSGENELVFGVQVTCQGRSWPVLRSYDDFRSLDAHLHRCIFDRRFSCLPELPPPPEGARAAQMLVPLLLQYLETLSGLVDSNLNCGPVLTWMELDNHGRRLLLSEEASLNIPAVAAAHVIKRYTAQAPDELSFEVGDIVSVIDMPPTEDRSWWRGKRGFQVGFFPSECVELFTERPGPGLKADADGPPCGIPAPQGISSLTSAVPRPRGKLAGLLRTFMRSRPSRQRLRQRGILRQRVFGCDLGEHLSNSGQDVPQVLRCCSEFIEAHGVVDGIYRLSGVSSNIQRLRHEFDSERIPELSGPAFLQDIHSVSSLCKLYFRELPNPLLTYQLYGKFSEAMSVPGEEERLVRVHDVIQQLPPPHYRTLEYLLRHLARMARHSANTSMHARNLAIVWAPNLLRSMELESVGMGGAAAFREVRVQSVVVEFLLTHVDVLFSDTFTSAGLDPAGRCLLPRPKSLAGSCPSTRLLTLEEAQARTQGRLGTPTEPTTPKAPASPAERRKGERGEKQRKPGGSSWKTFFALGRGPSVPRKKPLPWLGGTRAPPQPSGSRPDTVTLRSAKSEESLSSQASGAGLQRLHRLRRPHSSSDAFPVGPAPAGSCESLSSSSSSESSSSESSSSSSESSAAGLGALSGSPSHRTSAWLDDGDELDFSPPRCLEGLRGLDFDPLTFRCSSPTPGDPAPPASPAPPAPASAFPPRVTPQAISPRGPTSPASPAALDISEPLAVSVPPAVLELLGAGGAPASATPTPALSPGRSLRPHLIPLLLRGAEAPLTDACQQEMCSKLRGAQGPLGPDMESPLPPPPLSLLRPGGAPPPPPKNPARLMALALAERAQQVAEQQSQQECGGTPPASQSPFHRSLSLEVGGEPLGTSGSGPPPNSLAHPGAWVPGPPPYLPRQQSDGSLLRSQRPMGTSRRGLRGPAQVSAQLRAGGGGRDAPEAAAQSPCSVPSQVPTPGFFSPAPRECLPPFLGVPKPGLYPLGPPSFQPSSPAPVWRSSLGPPAPLDRGENLYYEIGASEGSPYSGPTRSWSPFRSMPPDRLNASYGMLGQSPPLHRSPDFLLSYPPAPSCFPPDHLGYSAPQHPARRPTPPEPLYVNLALGPRGPSPASSSSSSPPAHPRSRSDPGPPVPRLPQKQRAPWGPRTPHRVPGPWGPPEPLLLYRAAPPAYGRGGELHRGSLYRNGGQRGEGAGPPPPYPTPSWSLHSEGQTRSYC

SEQ ID NO: 819204 - protein, 1282 aa, Homo sapiens
PWRRQRRRERRARGRARPGPEEATRPWCTDSLDGPGEGSVQPLPTAGGPSVKGKPGKRLSAPRGPFPRLADCAHFHYENVDFGHIQLLLSPDREGPSLSGENELVFGVQVTCQGRSWPVLRSYDDFRSLDAHLHRCIFDRRFSCLPELPPPPEGARAAQMLVPLLLQYLETLSGLVDSNLNCGPVLTWMELDNHGRRLLLSEEASLNIPAVAAAHVIKRYTAQAPDELSFEVGDIVSVIDMPPTEDRSWWRGKRGFQVGFFPSECVELFTERPGPGLKADADGPPCGIPAPQGISSLTSAVPRPRGKLAGLLRTFMRSRPSRQRLRQRGILRQRVFGCDLGEHLSNSGQDVPQVLRCCSEFIEAHGVVDGIYRLSGVSSNIQRLRHEFDSERIPELSGPAFLQDIHSVSSLCKLYFRELPNPLLTYQLYGKFSEAMSVPGEEERLVRVHDVIQQLPPPHYRTLEYLLRHLARMARHSANTSMHARNLAIVWAPNLLRSMELESVGMGGAAAFREVRVQSVVVEFLLTHVDVLFSDTFTSAGLDPAGRCLLPRPKSLAGSCPSTRLLTLEEAQARTQGRLGTPTEPTTPKAPASPAERRKGERGEKQRKPGGSSWKTFFALGRGPSVPRKKPLPWLGGTRAPPQPSGSRPDTVTLRSAKSEESLSSQASGAGLQRLHRLRRPHSSSDAFPVGPAPAGSCESLSSSSSSESSSSESSSSSSESSAAGLGALSGSPSHRTSAWLDDGDELDFSPPRCLEGLRGLDFDPLTFRCSSPTPGDPAPPASPAPPAPASAFPPRVTPQAISPRGPTSPASPAALDISEPLAVSVPPAVLELLGAGGAPASATPTPALSPGRSLRPHLIPLLLRGAEAPLTDACQQEMCSKLRGAQGPLGPDMESPLPPPPLSLLRPGGAPPPPPKNPARLMALALAERAQQVAEQQSQQECGGTPPASQSPFHRSLSLEVGGEPLGTSGSGPPPNSLAHPGAWVPGPPPYLPRQQSDGSLLRSQRPMGTSRRGLRGPAQVPTPGFFSPAPRECLPPFLGVPKPGLYPLGPPSFQPSSPAPVWRSSLGPPAPLDRGENLYYEIGASEGSPYSGPTRSWSPFRSMPPDRLNASYGMLGQSPPLHRSPDFLLSYPPAPSCFPPDHLGYSAPQHPARRPTPPEPLYVNLALGPRGPSPASSSSSSPPAHPRSRSDPGPPVPRLPQKQRAPWGPRTPHRVPGPWGPPEPLLLYRAAPPAYGRGGELHRGSLYRNGGQRGEGAGPPPPYPTPSWSLHSEGQTRSYC

SEQ ID NO: 819205 - protein, 1047 aa, Homo sapiens
PWRRQRRRERRARGRARPGPEEATRPWCTDSLDGPGEGSVQPLPTAGGPSVKGKPGKRLSAPRGPFPRLADCAHFHYENVDFGHIQLLLSPDREGPSLSGENELVFGVQVTCQGRSWPVLRSYDDFRSLDAHLHRCIFDRRFSCLPELPPPPEGARAAQMLVPLLLQYLETLSGLVDSNLNCGPVLTWMELDNHGRRLLLSEEASLNIPAVAAAHVIKRYTAQAPDELSFEVGDIVSVIDMPPTEDRSWWRGKRGFQVGFFPSECVELFTERPGPGLKADADGPPCGIPAPQGISSLTSAVPRPRGKLAGLLRTFMRSRPSRQRLRQRGILRQRVFGCDLGEHLSNSGQDVPQVLRCCSEFIEAHGVVDGIYRLSGVSSNIQRLRHEFDSERIPELSGPAFLQDIHSVSSLCKLYFRELPNPLLTYQLYGKFSEAMSVPGEEERLVRVHDVIQQLPPPHYRTLEYLLRHLARMARHSANTSMHARNLAIVWAPNLLRSMELESVGMGGAAAFREVRVQSVVVEFLLTHVDVLFSDTFTSAGLDPAGRCLLPRPKSLAGSCPSTRLLTLEEAQARTQGRLGTPTEPTTPKAPASPAERRKGERGEKQRKPGGSSWKTFFALGRGPSVPRKKPLPWLGGTRAPPQPSGSRPDTVTLRSAKSEESLSSQASGAGLQRLHRLRRPHSSSDAFPVGPAPAGSCESLSSSSSSESSSSESSSSSSESSAAGLGALSGSPSHRTSAWLDDGDELDFSPPRCLEGLRGLDFDPLTFRCSSPTPGDPAPPASPAPPAPASAFPPRVTPQAISPRGPTSPASPAALDISEPLAVSVPPAVLELLGAGGAPASATPTPALSPGRSLRPHLIPLLLRGAEAPLTDACQQEMCSKLRGAQGPLGPDMESPLPPPPLSLLRPGGAPPPPPKNPARLMALALAERAQQVAEQQSQQECGGTPPASQSPFHRSLSLEVGGEPLGTSGSGPPPNSLAHPGAWVPGPPPYLPRQQSDGSLLRSQRPMGTSRRGLRGPAQQEPPACPDLCTGMGGQLLPFFPHMPH

SEQ ID NO: 819206 - protein, 561 aa, Homo sapiens
PWRRQRRRERRARGRARPGPEEATRPWCTDSLDGPGEGSVQPLPTAGGPSVKGKPGKRLSAPRGPFPRLADCAHFHYENVDFGHIQLLLSPDREGPSLSGENELVFGVQVTCQGRSWPVLRSYDDFRSLDAHLHRCIFDRRFSCLPELPPPPEGARAAQMLVPLLLQYLETLSGLVDSNLNCGPVLTWMELDNHGRRLLLSEEASLNIPAVAAAHVIKRYTAQAPDELSFEVGDIVSVIDMPPTEDRSWWRGKRGFQVGFFPSECVELFTERPGPGLKADADGPPCGIPAPQGISSLTSAVPRPRGKLAGLLRTFMRSRPSRQRLRQRGILRQRVFGCDLGEHLSNSGQDVPQVLRCCSEFIEAHGVVDGIYRLSGVSSNIQRLRHEFDSERIPELSGPAFLQDIHSVSSLCKLYFRELPNPLLTYQLYGKFSEAMSVPGEEERLVRVHDVIQQLPPPHYRTLEYLLRHLARMARHSANTSMHARNLAIVWAPNLLRSMELESVGMGGAAAFREVRVQSVVVEFLLTHVDVLFSDTFTSAGLDPAAPPLRIPTSWPGRRSS

SEQ ID NO: 819207 - protein, 461 aa, Homo sapiens
MNNFGNEEFDCHFLDEGFTAKDILDQKINEVSSSDDKDAFYVADLGDILKKHLRWLKALPRVTPFYAVKCNDSKAIVKTLAATGTGFDCASKTEIQLVQSLGVPPERIIYANPCKQVSQIKYAANNGVQMMTFDSEVELMKVARAHPKAKLVLRIATDDSKAVCRLSVKFGATLRTSRLLLERAKELNIDVVGVSFHVGSGCTDPETFVQAISDARCVFDMGAEVGFSMYLLDIGGGFPGSEDVKLKFEEITGVINPALDKYFPSDSGVRIIAEPGRYYVASAFTLAVNIIAKKIVLKEQTGSDDEDESSEQTFMYYVNDGVYGSFNCILYDHAHVKPLLQKRPKPDEKYYSSSIWGPTCDGLDRIVERCDLPEMHVGDWMLFENMGAYTVAAASTFNGFQRPTIYYVMSGPAWQLMQQFQNPDFPPEVEEQDASTLPVSCAWESGMKRHRAACASASINV

SEQ ID NO: 819208 - protein, 313 aa, Homo sapiens
TRLGRGRGNSAEGIRRNPCKQVSQIKYAANNGVQMMTFDSEVELMKVARAHPKAKLVLRIATDDSKAVCRLSVKFGATLRTSRLLLERAKELNIDVVGVSFHVGSGCTDPETFVQAISDARCVFDMGAEVGFSMYLLDIGGGFPGSEDVKLKFEEITGVINPALDKYFPSDSGVRIIAEPGRYYVASAFTLAVNIIAKKIVLKEQTGSDDEDESSEQTFMYYVNDGVYGSFNCILYDHAHVKPLLQKRTKQMRKYYFIPAYVGTHHVDGGSNRIVEARGLAVKRLVGHGCSLEKWGVNRGGRPEQGSKTRSPM

SEQ ID NO: 819209 - protein, 461 aa, Homo sapiens; identical to SEQ ID NO: 819207

SEQ ID NO: 819210 - protein, 461 aa, Homo sapiens; identical to SEQ ID NO: 819207

SEQ ID NO: 819211 - protein, 461 aa, Homo sapiens; identical to SEQ ID NO: 819207

SEQ ID NO: 819212 - protein, 461 aa, Homo sapiens; identical to SEQ ID NO: 819207

SEQ ID NO: 819213 - protein, 461 aa, Homo sapiens; identical to SEQ ID NO: 819207

SEQ ID NO: 819214 - protein, 461 aa, Homo sapiens; identical to SEQ ID NO: 819207

SEQ ID NO: 819215 - protein, 461 aa, Homo sapiens; identical to SEQ ID NO: 819207

SEQ ID NO: 819216 - protein, 461 aa, Homo sapiens; identical to SEQ ID NO: 819207

SEQ ID NO: 819217 - protein, 461 aa, Homo sapiens; identical to SEQ ID NO: 819207

SEQ ID NO: 819218 - protein, 474 aa, Homo sapiens
  misc_feature (307)..(307): Xaa can be any naturally occurring amino acid
MNNFGNEEFDCHFLDEGFTAKDILDQKINEVSSSDDKDAFYVADLGDILKKHLRWLKALPRVTPFYAVKCNDSKAIVKTLAATGTGFDCASKTEIQLVQSLGVPPERIIYANPCKQVSQIKYAANNGVQMMTFDSEVELMKVARAHPKAKLVLRIATDDSKAVCRLSVKFGATLRTSRLLLERAKELNIDVVGVSFHVGSGCTDPETFVQAISDARCVFDMGAEVGFSMYLLDIGGGFPGSEDVKLKFEEITGVINPALDKYFPSDSGVRIIAEPGRYYVASAFTLAVNIIAKKRYLHNGGGTTGRXLLEIGKPGEKDEDESSEQTFMYYVNDGVYGSFNCILYDHAHVKPLLQKRPKPDEKYYSSSIWGPTCDGLDRIVERCDLPEMHVGDWMLFENMGAYTVAAASTFNGFQRPTIYYVMSGPAWQLMQQFQNPDFPPEVEEQDASTLPVSCAWESGMKRHRAACASASINV

SEQ ID NO: 819219 - protein, 428 aa, Homo sapiens
SEQYEAGGESAEAHILKKHLRWLKALPRVTPFYAVKCNDSKAIVKTLAATGTGFDCASKTEIQLVQSLGVPPERIIYANPCKQVSQIKYAANNGVQMMTFDSEVELMKVARAHPKAKLVLRIATDDSKAVCRLSVKFGATLRTSRLLLERAKELNIDVVGVSFHVGSGCTDPETFVQAISDARCVFDMGAEVGFSMYLLDIGGGFPGSEDVKLKFEEITGVINPALDKYFPSDSGVRIIAEPGRYYVASAFTLAVNIIAKKIVLKEQTGSDDEDESSEQTFMYYVNDGVYGSFNCILYDHAHVKPLLQKRPKPDEKYYSSSIWGPTCDGLDRIVERCDLPEMHVGDWMLFENMGAYTVAAASTFNGFQRPTIYYVMSGPAWQLMQQFQNPDFPPEVEEQDASTLPVSCAWESGMKRHRAACASASINV

SEQ ID NO: 819220 - protein, 332 aa, Homo sapiens
MMTFDSEVELMKVARAHPKAKLVLRIATDDSKAVCRLSVKFGATLRTSRLLLERAKELNIDVVGVSFHVGSGCTDPETFVQAISDARCVFDMGAEVGFSMYLLDIGGGFPGSEDVKLKFEEITGVINPALDKYFPSDSGVRIIAEPGRYYVASAFTLAVNIIAKKIVLKEQTGSDDEDESSEQTFMYYVNDGVYGSFNCILYDHAHVKPLLQKRPKPDEKYYSSSIWGPTCDGLDRIVERCDLPEMHVGDWMLFENMGAYTVAAASTFNGFQRPTIYYVMSGPAWQLMQQFQNPDFPPEVEEQDASTLPVSCAWESGMKRHRAACASASINV

SEQ ID NO: 819221 - protein, 461 aa, Homo sapiens; identical to SEQ ID NO: 819207

SEQ ID NO: 819222 - protein, 363 aa, Homo sapiens
GRSRRGGVIGTRANPCKQVSQIKYAANNGVQMMTFDSEVELMKVARAHPKAKLVLRIATDDSKAVCRLSVKFGATLRTSRLLLERAKELNIDVVGVSFHVGSGCTDPETFVQAISDARCVFDMGAEVGFSMYLLDIGGGFPGSEDVKLKFEEITGVINPALDKYFPSDSGVRIIAEPGRYYVASAFTLAVNIIAKKIVLKEQTGSDDEDESSEQTFMYYVNDGVYGSFNCILYDHAHVKPLLQKRPKPDEKYYSSSIWGPTCDGLDRIVERCDLPEMHVGDWMLFENMGAYTVAAASTFNGFQRPTIYYVMSGPAWQLMQQFQNPDFPPEVEEQDASTLPVSCAWESGMKRHRAACASASINV

SEQ ID NO: 819223 - protein, 355 aa, Homo sapiens
SEQYEAGGESAEAIKYAANNGVQMMTFDSEVELMKVARAHPKAKLVLRIATDDSKAVCRLSVKFGATLRTSRLLLERAKELNIDVVGVSFHVGSGCTDPETFVQAISDARCVFDMGAEVGFSMYLLDIGGGFPGSEDVKLKFEEITGVINPALDKYFPSDSGVRIIAEPGRYYVASAFTLAVNIIAKKIVLKEQTGSDDEDESSEQTFMYYVNDGVYGSFNCILYDHAHVKPLLQKRPKPDEKYYSSSIWGPTCDGLDRIVERCDLPEMHVGDWMLFENMGAYTVAAASTFNGFQRPTIYYVMSGPAWQLMQQFQNPDFPPEVEEQDASTLPVSCAWESGMKRHRAACASASINV

SEQ ID NO: 819224 - protein, 414 aa, Homo sapiens [sequence omitted]

SEQ ID NO: 819225 - protein, 340 aa, Homo sapiens
MKSLTATSSMKVLLPRTFWTRKLMKFLLLLVLRIATDDSKAVCRLSVKFGATLRTSRLLLERAKELNIDVVGVSFHVGSGCTDPETFVQAISDARCVFDMGAEVGFSMYLLDIGGGFPGSEDVKLKFEEITGVINPALDKYFPSDSGVRIIAEPGRYYVASAFTLAVNIIAKKIVLKEQTGSDDEDESSEQTFMYYVNDGVYGSFNCILYDHAHVKPLLQKRPKPDEKYYSSSIWGPTCDGLDRIVERCDLPEMHVGDWMLFENMGAYTVAAASTFNGFQRPTIYYVMSGPAWQLMQQFQNPDFPPEVEEQDASTLPVSCAWESGMKRHRAACASASINV

SEQ ID NO: 819226 - protein, 241 aa, Homo sapiens
MGAEVGFSMYLLDIGGGFPGSEDVKLKFEEITGVINPALDKYFPSDSGVRIIAEPGRYYVASAFTLAVNIIAKKIVLKEQTGSDDEDESSEQTFMYYVNDGVYGSFNCILYDHAHVKPLLQKRPKPDEKYYSSSIWGPTCDGLDRIVERCDLPEMHVGDWMLFENMGAYTVAAASTFNGFQRPTIYYVMSGPAWQLMQQFQNPDFPPEVEEQDASTLPVSCAWESGMKRHRAACASASINV

SEQ ID NO: 819227 - protein, 366 aa, Homo sapiens
MNNFGNEEFDCHFLDEGFTAKDILDQKINEVSSSDDKDAFYVADLGDILKKHLRWLKALPRVTPFYAVKCNDSKAIVKTLAATGTGFDCASKTEIQLVQSLGVPPERIIYANPCKQVSQIKYAANNGVQMMTFDSEVELMKVARAHPKAKLVLRIATDDSKAVCRLSVKFGATLRTSRLLLERAKELNIDVVGVSFHVGSGCTDPETFVQAISDARCVFDMGAEVGFSMYLLDIGGGFPGSEDVKLKFEEITGVINPALDKYFPSDSGVRIIAEPGRYYVASAFTLAVNIIAKKIVLKEQTGSDGDEKESGGFVLEEGHGTNGHLDRISLWKEPKSFPLGRFPQLGGAGWAKRGRLQHNMGGTPTP

SEQ ID NO: 819228 - protein, 328 aa, Homo sapiens
MNNFGNEEFDCHFLDEGFTAKDILDQKINEVSSSDDKDAFYVADLGDILKKHLRWLKALPRVTPFYAVKCNDSKAIVKTLAATGTGFDCASKTEIQLVQSLGVPPERIIYANPCKQVSQIKYAANNGVQMMTFDSEVELMKVARAHPKAKLVLRIATDDSKAVCRLSVKFGATLRTSRLLLERAKELNIDVVGVSFHVGSGCTDPETFVQAISDARCVFDMGAEVGFSMYLLDIGGGFPGSEDVKLKFEEITGVINPALDKYFPSDSGVRIIAEPGRYYVASAFTLAVNIIAKKIVLKEQTGSDGSSGQHNSRGPPFFNAEKGKDTTG

SEQ ID NO: 819229 - protein, 303 aa, Homo sapiens
MNNFGNEEFDCHFLDEGFTAKDILDQKINEVSSSDDKDAFYVADLGDILKKHLRWLKALPRVTPFYAVKCNDSKAIVKTLAATGTGFDCASKTEIQLVQSLGVPPERIIYANPCKQVSQIKYAANNGVQMMTFDSEVELMKVARAHPKAKLVLRIATDDSKAVCRLSVKFGATLRTSRLLLERAKELNIDVVGVSFHVGSGCTDPETFVQAISDARCVFDMGAEVGFSMYLLDIGGGFPGSEDVKLKFEEITGVINPALDKYFPSDSGVRIIAEPGRYYVASAFTLAVNIIAKKWFTDDGCSK

SEQ ID NO: 819230 - protein, 175 aa, Homo sapiens
  misc_feature (1)..(1): Xaa can be any naturally occurring amino acid
XILYDHAHNTIKEQTGSDDEDESSEQTFMYYVNDGVYGSFNCILYDHAHVKPLLQKRPKPDEKYYSSSIWGPTCDGLDRIVERCDLPEMHVGDWMLFENMGAYTVAAASTFNGFQRPTIYYVMSGPAWQLMQQFQNPDFPPEVEEQDASTLPVSCAWESGMKRHRAACASASINV

SEQ ID NO: 819231 - protein, 180 aa, Homo sapiens
MNNFGNEEFDCHFLDEGFTAKDILDQKINEVSSSDDKDAFYVADLGDILKKHLRWLKALPRVTPFYAVKCNDSKAIVKTLAATGTGFDCASKTEIQLVQSLGVPPERIIYANPCKQVSQIKYAANNGVQMMTFDSEVELMKVARAHPKAKGLRIGTEDSKPAVAQVKWWPSEPEGLWRES

SEQ ID NO: 819232 - protein, 199 aa, Homo sapiens
MNNFGNEEFDCHFLDEGFTAKDILDQKINEVSSSDDKDAFYVADLGDILKKHLRWLKALPRVTPFYAVKCNDSKAIVKTLAATGTGFDCASKTEIQLVQSLGVPPERIIYANPCKQVSQIKYAANNGVQMMTFDSEVELMKVARAHPKAKFGDWPEDSKSVVWVNGGGETRPWKGESNTVWAAVKGRGRRIGGVMGRAF

SEQ ID NO: 819233 - protein, 106 aa, Homo sapiens
VSDSSRPQKRCIKWAWYSPRGRYKLCFLGNKCSLKANGAGGYMTTSHAFLFIPRVKPHMDSMTPLFFFRLKYSWCRVWGCLQRGLSMQILVNKYLKLSMLLIMESR

SEQ ID NO: 819234 - protein, 403 aa, Homo sapiens
LGSGSGAPQSCRPLDRARRSGESGATRRAVARMEEAGAAVVTAGEAELNWSRLSVSTETLESELEARGEERRGAREALLRLLLPHNRLVSLPRALGSGFPHLQLLDVSGNALTALGPELLALRGLRTLLAKNNRLGGPSALPKGLAQSPLCRSLQVLNLSGNCFQEVPASLLELRALQTLSLGGNQLQSIPAEIENLQSLECLYLGGNFIKEIPPELGNLPSLNYLVLCDNKIQSIPPQLSQLHSLRSLSLHNNLLTYLPREILNLIHLEELSLRGNPLVVRFVRDLTYDPPTLLELAARTIKIRNISYTPYDLPGNLLRYLGSASNCPNPKCGGVYFDCCVRQIKFVDFCGKYRLPLMHYLCSPECSSPCSSASHSSTSQSESDSEDEASVAARRMQKVLLG

SEQ ID NO: 819235 - protein, 403 aa, Homo sapiens; identical to SEQ ID NO: 819234

SEQ ID NO: 819236 - protein, 368 aa, Homo sapiens
MRVAGREGRFLSAGVAAREGSAMFLSILVALCLWLHLALGVRGAPCEAVRIPMCRHMPWNITRMPNHLHHSTQENAILAIEQYEELVDVNCSAVLRFFLCAMYAPICTLEFLHDPIKPCKSVCQRARDDCEPLMKMYNHSWPESLACDELPVYDRGVCISPEAIVTDLPEDVKWIDITPDMMVQERPLDVDCKRLSPDRCKCKKVKPTLATYLSKNYSYVIHAKIKAVQRSGCNEVTTVVDVKEIFKSSSPIPRTQVPLITNSSCQCPHILPHQDVLIMCYEWRSRMMLLENCLVEKWRDQLSKRSIQWEERLQEQRRTVQDKKKTAGRTSRSNPPKPKGKPPAPKPASPKKNIKTRSAQKRTNPKRV

SEQ ID NO: 819237 - protein, 368 aa, Homo sapiens; identical to SEQ ID NO: 819236

SEQ ID NO: 819238 - protein, 629 aa, Homo sapiens
WGGDGLELRAVCEAHAQEPALCVPHPSSRAMSRSLLLRFLLFLLLLPPLPVLLADPGAPTPVNPCCYYPCQHQGICVRFGLDRYQCDCTRTGYSGPNCTIPGLWTWLRNSLRPSPSFTHFLLTHGRWFWEFVNATFIREMLMRLVLTVRSNLIPSPPTYNSAHDYISWESFSNVSYYTRILPSVPKDCPTPMGTKGKKQLPDAQLLARRFLLRRKFIPDPQGTNLMFAFFAQHFTHQFFKTSGKMGPGFTKALGHGVDLGHIYGDNLERQYQLRLFKDGKLKYQVLDGEMYPPSVEEAPVLMHYPRGIPPQSQMAVGQEVFGLLPGLMLYATLWLREHNRVCDLLKAEHPTWGDEQLFQTTRLILIGETIKIVIEEYVQQLSGYFLQLKFDPELLFGVQFQYRNRIAMEFNHLYHWHPLMPDSFKVGSQEYSYEQFLFNTSMLVDYGVEALVDAFSRQIAGRIGGGRNMDHHILHVAVDVIRESREMRLQPFNEYRKRFGMKPYTSFQELVGEKEMAAELEELYGDIDALEFYPGLLLEKCHPNSIFGESMIEIGAPFSLKGLLGNPICSPEYWKPSTFGGEVGFNIVKTATLKKLVCLNTKTCPYVSFRVPDASQDDGPAVERPSTEL

SEQ ID NO: 819239 - protein, 629 aa, Homo sapiens; identical to SEQ ID NO: 819238

SEQ ID NO: 819240 - protein, 629 aa, Homo sapiens; identical to SEQ ID NO: 819238

SEQ ID NO: 819241 - protein, 592 aa, Homo sapiens
WGGDGLELRAVCEAHAQEPALCVPHPSSRAMSRSLLLRFLLFLLLLPPLPVLLADPGAPTPVNPCCYYPCQHQGICVRFGLDRYQCDCTRTGYSGPNCTIPGLWTWLRNSLRPSPSFTHFLLTHGRWFWEFVNATFIREMLMRLVLTVRSNLIPSPPTYNSAHDYISWESFSNVSYYTRILPSVPKDCPTPMGTKGKKQLPDAQLLARRFLLRRKFIPDPQGTNLMFAFFAQHFTHQFFKTSGKMGPGFTKALGHGVDLGHIYGDNLERQYQLRLFKDGKLKYQVLDGEMYPPSVEEAPVLMHYPRGIPPQSQMAVGQEVFGLLPGLMLYATLWLREHNRVCDLLKAEHPTWGDEQLFQTTRLILIGETIKIVIEEYVQQLSGYFLQLKFDPELLFGVQFQYRNRIAMEFNHLYHWHPLMPDSFKIGGGRNMDHHILHVAVDVIRESREMRLQPFNEYRKRFGMKPYTSFQELVGEKEMAAELEELYGDIDALEFYPGLLLEKCHPNSIFGESMIEIGAPFSLKGLLGNPICSPEYWKPSTFGGEVGFNIVKTATLKKLVCLNTKTCPYVSFRVPDASQDDGPAVERPSTEL

SEQ ID NO: 819242 - protein, 629 aa, Homo sapiens; identical to SEQ ID NO: 819238

SEQ ID NO: 819243 - protein, 581 aa, Homo sapiens
WGGDGLELRAVCEAHAQEPALCVPHPSSRAMSRSLLLRFLLFLLLLPPLPVLLADPGAPTPVNPCCYYPCQHQGICVRFGLDRYQCDCTRTGYSGPNCTIPGLWTWLRNSLRPSPSFTHFLLTHGRWFWEFVNATFIREMLMRLVLTGKKQLPDAQLLARRFLLRRKFIPDPQGTNLMFAFFAQHFTHQFFKTSGKMGPGFTKALGHGVDLGHIYGDNLERQYQLRLFKDGKLKYQVLDGEMYPPSVEEAPVLMHYPRGIPPQSQMAVGQEVFGLLPGLMLYATLWLREHNRVCDLLKAEHPTWGDEQLFQTTRLILIGETIKIVIEEYVQQLSGYFLQLKFDPELLFGVQFQYRNRIAMEFNHLYHWHPLMPDSFKVGSQEYSYEQFLFNTSMLVDYGVEALVDAFSRQIAGRIGGGRNMDHHILHVAVDVIRESREMRLQPFNEYRKRFGMKPYTSFQELVGEKEMAAELEELYGDIDALEFYPGLLLEKCHPNSIFGESMIEIGAPFSLKGLLGNPICSPEYWKPSTFGGEVGFNIVKTATLKKLVCLNTKTCPYVSFRVPDASQDDGPAVERPSTEL

SEQ ID NO: 819244 - protein, 526 aa, Homo sapiens
WGGDGLELRAVCEAHAQEPALCVPHPSSRAMSRSLLLRFLLFLLLLPPLPVLLADPGAPTPAGLWTWLRNSLRPSPSFTHFLLTHGRWFWEFVNATFIREMLMRLVLTVRSNLIPSPPTYNSAHDYISWESFSNFFKTSGKMGPGFTKALGHGVDLGHIYGDNLERQYQLRLFKDGKLKYQVLDGEMYPPSVEEAPVLMHYPRGIPPQSQMAVGQEVFGLLPGLMLYATLWLREHNRVCDLLKAEHPTWGDEQLFQTTRLILIGETIKIVIEEYVQQLSGYFLQLKFDPELLFGVQFQYRNRIAMEFNHLYHWHPLMPDSFKVGSQEYSYEQFLFNTSMLVDYGVEALVDAFSRQIAGRIGGGRNMDHHILHVAVDVIRESREMRLQPFNEYRKRFGMKPYTSFQELVGEKEMAAELEELYGDIDALEFYPGLLLEKCHPNSIFGESMIEIGAPFSLKGLLGNPICSPEYWKPSTFGGEVGFNIVKTATLKKLVCLNTKTCPYVSFRVPDASQDDGPAVERPSTEL

SEQ ID NO: 819245 - protein, 490 aa, Homo sapiens
MLMRLVLTVRSNLIPSPPTYNSAHDYISWESFSNVSYYTRILPSVPKDCPTPMGTKGKKQLPDAQLLARRFLLRRKFIPDPQGTNLMFAFFAQHFTHQFFKTSGKMGPGFTKALGHGVDLGHIYGDNLERQYQLRLFKDGKLKYQVLDGEMYPPSVEEAPVLMHYPRGIPPQSQMAVGQEVFGLLPGLMLYATLWLREHNRVCDLLKAEHPTWGDEQLFQTTRLILIGETIKIVIEEYVQQLSGYFLQLKFDPELLFGVQFQYRNRIAMEFNHLYHWHPLMPDSFKVGSQEYSYEQFLFNTSMLVDYGVEALVDAFSRQIAGRIGGGRNMDHHILHVAVDVIRESREMRLQPFNEYRKRFGMKPYTSFQELVGEKEMAAELEELYGDIDALEFYPGLLLEKCHPNSIFGESMIEIGAPFSLKGLLGNPICSPEYWKPSTFGGEVGFNIVKTATLKKLVCLNTKTCPYVSFRVPDASQDDGPAVERPSTEL

SEQ ID NO: 819246 - protein, 629 aa, Homo sapiens; identical to SEQ ID NO: 819238

SEQ ID NO: 819247 - protein, 629 aa, Homo sapiens; identical to SEQ ID NO: 819238

SEQ ID NO: 819248 - protein, 629 aa, Homo sapiens; identical to SEQ ID NO: 819238

SEQ ID NO: 819249 - protein, 629 aa, Homo sapiens; identical to SEQ ID NO: 819238

SEQ ID NO: 819250 - protein, 629 aa, Homo sapiens; identical to SEQ ID NO: 819238

SEQ ID NO: 819251 - protein, 105 aa, Homo sapiens
GRLLLLNSRPRRRQLPAPSCFTKGEVPGHLRVSLCGAQNLQGPLSMPLVPWTVSLVHLLSPSILSQSTDFSHSAVSVQPYPRDLDAWPPNLALGYPDANQTPPSS

SEQ ID NO: 819252 - protein, 112 aa, Homo sapiens
RGLTLFARAPIFADLCSGYNLPPGNTYDLDSAKPLIRPTYGKSCSACRYGSEFRGRLLLLNSRPRRRKFMLCAGRWTGGKSTCSWVILITELTMPALPMVLHGSLVPWRGGV

SEQ ID NO: 819253 - protein, 275 aa, Homo sapiens
EPQAYHLHPESCVTMWVPVVFLTLSVTWIGAAPLILSRIVGGWECEKHSQPWQVLVASRGRAVCGGVLVHPQWVLTAAHCIRNKSVILLGRHSLFHPEDTGQVFQVSHSFPHPLYDMSLLKNRFLRPGDDSSHDLMLLRLSEPAELTDAVKVMDLPTQEPALGTTCYASGWGSIEPEEFLTPKKLQCVDLHVISNDVCAQVHPQKVTKFMLCAGRWTGGKSTCSGDSGGPLVCNGVLQGITSWGSEPCALPERPSLYTKVVHYRKWIKDTIVANP

SEQ ID NO: 819254 - protein, 159 aa, Homo sapiens
MSLLKNRFLRPGDDSSHDLMLLRLSEPAELTDAVKVMDLPTQEPALGTTCYASGWGSIEPEEFLTPKKLQCVDLHVISNDVCAQVHPQKVTKFMLCAGRWTGGKSTCSGDSGGPLVCNGVLQGITSWGSEPCALPERPSLYTKVVHYRKWIKDTIVANP

SEQ ID NO: 819255 - protein, 108 aa, Homo sapiens
  misc_feature (61)..(61): Xaa can be any naturally occurring amino acid
GIEGLTNFSWGHHANANPIYKVPLLGHVAQSARFYQAGWGGKPCEEQQSWRYCQQRTLRRXRMTSDCFFLHSSWMYLYAPILAYLMAAASCRIRHEGWGVCVICGVQR

SEQ ID NO: 819256 - protein, 76 aa, Homo sapiens
RGLTLFARAPIFADLCSGYNLPPGNTYDLDSAKPLIRPTYGKSCSACRYGSEFRGRLLLLNSRPRRRMCWTLSMKH

SEQ ID NO: 819257 - protein, 70 aa, Homo sapiens
TRCEGDSEQDLKSVILLGRHSLFHPEDTGQVFQVSHSFPHPLYDMSLLKNRFKQGLWEVGFVVTRGQGEL

SEQ ID NO: 819258 - protein, 261 aa, Homo sapiens
MWVPVVFLTLSVTWIGAAPLILSRIVGGWECEKHSQPWQVLVASRGRAVCGGVLVHPQWVLTAAHCIRNKSVILLGRHSLFHPEDTGQVFQVSHSFPHPLYDMSLLKNRFLRPGDDSSHDLMLLRLSEPAELTDAVKVMDLPTQEPALGTTCYASGWGSIEPEEFLTPKKLQCVDLHVISNDVCAQVHPQKVTKFMLCAGRWTGGKSTCSGDSGGPLVCNGVLQGITSWGSEPCALPERPSLYTKVVHYRKWIKDTIVANP

SEQ ID NO: 819259 - protein, 261 aa, Homo sapiens; identical to SEQ ID NO: 819258

SEQ ID NO: 819260 - protein, 261 aa, Homo sapiens; identical to SEQ ID NO: 819258

SEQ ID NO: 819261 - protein, 238 aa, Homo sapiens
MWVPVVFLTLSVTWIGAAPLILSRIVGGWECEKHSQPWQVLVASRGRAVCGGVLVHPQWVLTAAHCIRNKSVILLGRHSLFHPEDTGQVFQVSHSFPHPLYDMSLLKNRFLRPGDDSSHDLMLLRLSEPAELTDAVKVMDLPTQEPALGTTCYASGWGSIEPEEFLTPKKLQCVDLHVISNDVCAQVHPQKVTKFMLCAGRWTGGKSTCSWVILITELTMPALPMVLHGSLVPWRGGV

SEQ ID NO: 819262 - protein, 306 aa, Homo sapiens
MSVSLCFCLFFLILCIFGSPCLSLFSPLPFHSLCPFTLFLFPLVSLSFCICPSPSHTAVSQLVVCIFGLNCVFPNPVFFSLFLFLFWSLLLAPLSLLSFLIILAPHSCVCFLPSKSVILLGRHSLFHPEDTGQVFQVSHSFPHPLYDMSLLKNRFLRPGDDSSHDLMLLRLSEPAELTDAVKVMDLPTQEPALGTTCYASGWGSIEPEEFLTPKKLQCVDLHVISNDVCAQVHPQKVTKFMLCAGRWTGGKSTCSGDSGGPLVCNGVLQGITSWGSEPCALPERPSLYTKVVHYRKWIKDTIVANP

SEQ ID NO: 819263 - protein, 244 aa, Homo sapiens
RAPSLPPAPGELCHHVGPGCLPHPVRDVDWAVCGGVLVHPQWVLTAAHCIRNKSVILLGRHSLFHPEDTGQVFQVSHSFPHPLYDMSLLKNRFLRPGDDSSHDLMLLRLSEPAELTDAVKVMDLPTQEPALGTTCYASGWGSIEPEEFLTPKKLQCVDLHVISNDVCAQVHPQKVTKFMLCAGRWTGGKSTCSGDSGGPLVCNGVLQGITSWGSEPCALPERPSLYTKVVHYRKWIKDTIVANP

SEQ ID NO: 819264 - protein, 261 aa, Homo sapiens; identical to SEQ ID NO: 819258

SEQ ID NO: 819265 - protein, 234 aa, Homo sapiens
RAPSLPPAPGELCHHVGPGCLPHPVRDVDWCCTPHPVSDCGRLGVREAFPTLAGACGLSWQGSLRRCSGAPPVGPHSCPLHQELRPGDDSSHDLMLLRLSEPAELTDAVKVMDLPTQEPALGTTCYASGWGSIEPEEFLTPKKLQCVDLHVISNDVCAQVHPQKVTKFMLCAGRWTGGKSTCSGDSGGPLVCNGVLQGITSWGSEPCALPERPSLYTKVVHYRKWIKDTIVANP

SEQ ID NO: 819266 - protein, 261 aa, Homo sapiens; identical to SEQ ID NO: 819258

SEQ ID NO: 819267 - protein, 323 aa, Homo sapiens
EPQAYHLHPESCVTMWVPVVFLTLSVTWIGAAPLILSRIVGGWECEKHSQPWQVLVASRGRAVCGGVLVHPQWVLTAAHCIRNKSVILLGRHSLFHPEDTGQVFQVSHSFPHPLYDMSLLKNRFLRPGDDSSHDLMLLRLSEPAELTDAVKVMDLPTQEPALGTTCYASGWGSIEPEELYRLGQMVQPGAQMPGSEGGGDRTPGSEGGGPRNQVGSSPQQCFCLARILTPKKLQCVDLHVISNDVCAQVHPQKVTKFMLCAGRWTGGKSTCSGDSGGPLVCNGVLQGITSWGSEPCALPERPSLYTKVVHYRKWIKDTIVANP

SEQ ID NO: 819268 - protein, 84 aa, Homo sapiens
ELGTQTTRRPESCVTMWVPVVFLTLSVTWIGAAPLILSRIVGGWECEKHSQPWQVLVASRGRAVCGGVLVHPQWVLTAAHCIRK

SEQ ID NO: 819269 - protein, 137 aa, Homo sapiens
EPQAYHLHPESCVTMWVPVVFLTLSVTWIGAAPLILSRIVGGWECEKHSQPWQVLVASRGRAVCGGVLVHPQWVLTAAHCIRNKSVILLGRHSLFHPEDTGQVFQVSHSFPHPLYDMSLLKNRFLRPGDDSSHDLMS

SEQ ID NO: 819270 - protein, 193 aa, Homo sapiens
EPQAYHLHPESCVTMWVPVVFLTLSVTWIGAAPLILSRIVGGWECEKHSQPWQVLVASRGRAVCGGVLVHPQWVLTAAHCIRNKSVICWGSIEPEEFLTPKKLQCVDLHVISNDVCAQVHPQKVTKFMLCAGRWTGGKSTCSGDSGGPLVCNGVLQGITSWGSEPCALPERPSLYTKVVHYRKWIKDTIVANP

SEQ ID NO: 819271 - protein, 109 aa, Homo sapiens
ARTRGRSVEPDEFLTPKKLQCVDLHVISNDVCAQVHPQKVTKFMLCAGRWTGGKSTCSGDSGGPLVCNGVLQGITSWGSEPCALPERPSLYTKVVHYRKWIKDTIVANP

SEQ ID NO: 819272 - protein, 195 aa, Homo sapiens
RSTTTTKFAAASTSWKVASVRSHGDSILQMVLALVPPTCLQGLSSWTLPSAQELDPEVPSPPARTGAPTPLLESLPTFFWKSALETFLSSSKAGNCYLLSACPGLKDRIAQAETGTDLSHSLPAFTLRVILGAHLSVMVCFKVSRHGAVNHVPCPKGLPCTPRWCITGSGSRTPSWPTPEHPYQLPIVVNLEPWK

SEQ ID NO: 819273 - protein, 134 aa, Homo sapiens
RGLTLFARAPIFADLCSGYNLPPGNTYDLDSAKPLIRPTYGKSCSACRYGSEFRGRLLLLNSRPRRRVILGAHLSVMVCFKVSRHGAVNHVPCPKGLPCTPRWCITGSGSRTPSWPTPEHPYQLPIVVNLEPWK

SEQ ID NO: 819274 - protein, 141 aa, Homo sapiens
GLNCCPSARNAPYFPCDKASKEEERPSSEDEIALHFEPPNAPLNRKGLVSPQSPQKSDCQPNSPTESCSSKNACILQKMGQWTGGKSTCSGDSGGPLVCNGVLQGITSWGSEPCALPERPSLYTKVVHYRKWIKDTIVANP

SEQ ID NO: 819275 - protein, 86 aa, Homo sapiens
RGLTLFARAPIFADLCSGYNLPPGNTYDLDSAKPLIRPTYGKSCSACRYGSEFRGRLLLLNSRPRRRLSLGVRSRVARKRNQQTQV

SEQ ID NO: 819276 - protein, 71 aa, Homo sapiens
RGLTLFARAPIFADLCSGYNLPPGNTYDLDSAKPLIRPTYGKSCSACRYGSEFRGRLLLLNSRPRRRQSVS

SEQ ID NO: 819277 - protein, 80 aa, Homo sapiens
RGLTLFARAPIFADLCSGYNLPPGNTYDLDSAKPLIRPTYGKSCSACRYGSEFRGRLLLLNSRPRRRMGCLCYLWGTEMR

SEQ ID NO: 819278 - protein, 88 aa, Homo sapiens
RGLTLFARAPIFADLCSGYNLPPGNTYDLDSAKPLIRPTYGKSCSACRYGSEFRGRLLLLNSRPRRRDERGVGSTLREWRVTCAGHCP

SEQ ID NO: 819279 - protein, 261 aa, Homo sapiens; identical to SEQ ID NO: 819258

SEQ ID NO: 819280 - protein, 261 aa, Homo sapiens; identical to SEQ ID NO: 819258

SEQ ID NO: 819281 - protein, 261 aa, Homo sapiens; identical to SEQ ID NO: 819258

SEQ ID NO: 819282 - protein, 251 aa, Homo sapiens
MWVPVVFLTLSVTWIGAAPLILSRIVGGWECEKHSQPWQVLVASRGRAVCGGVLVHPQWVLTAAHCIRNKSVILLGRHSLFHPEDTGQVFQVSHSFPHPLYDMSLLKNRFLRPGDDSSHDLMLLRLSEPAELTDAVKVMDLPTQEPALGTTCYASGWGSIEPEEFLTPKKLQCVDLHVISNDVCAQVHPQKVTKFMLCAGRWTGGKSTCSGDSGGPLVCNGVLQGITSWGSEPCALPERPSLYTKFTTIGS

SEQ ID NO: 819283 - protein, 238 aa, Homo sapiens; identical to SEQ ID NO: 819261

SEQ ID NO: 819284 - protein, 228 aa, Homo sapiens
MWVPVVFLTLSVTWIGAAPLILSRIVGGWECEKHSQPWQVLVASRGRAVCGGVLVHPQWVLTAAHCIRNKSVILLGRHSLFHPEDTGQVFQVSHSFPHPLYDMSLLKNRFLRPGDDSSHDLMLLRLSEPAELTDAVKVMDLPTQEPALGTTCYASGWGSIEPEEFLTPKKLQCVDLHVISNDVCAQVHPQKVTKFMLCAGRWTGGKSTCSGTASVFVDAAANLVVVVD

SEQ ID NO: 819285 - protein, 230 aa, Homo sapiens
MWVPVVFLTLSVTWIGAAPLILSRIVGGWECEKHSQPWQVLVASRGRAVCGGVLVHPQWVLTAAHCIRNKSVILLGRHSLFHPEDTGQVFQVSHSFPHPLYDMSLLKNRFLRPGDDSSHDLMLLRLSEPAELTDAVKVMDLPTQEPALGTTCYASGWGSIEPEEFLTPKKLQCVDLHVISNDVCAQVHPQKVTKFMLCAGRWTGGKSTCSVILGAHLSVQWLRWPSEPPE

SEQ ID NO: 819286 - protein, 213 aa, Homo sapiens [sequence omitted]

SEQ ID NO: 819287 - protein, 76 aa, Homo sapiens; identical to SEQ ID NO: 819256

SEQ ID NO: 819288 - protein, 73 aa, Homo sapiens
RSTTTTKFAAASTHVLDTVHEALSRSWRHNAPDTHSKDGAENITHSVLEALGSLEKAVSQGGRVFLWHGMGMK

SEQ ID NO: 819289 - protein, 168 aa, Homo sapiens
MVGGMQEREPALTVKLRLFPPQPSTPAQTGSWALFCLSQPHSKPIPPAPPYCNSPHSHTRSPLPPTYPRTFSPLPSQLPAPSCFTKGEVPGHLRVSLCGAQNLQGPLSMPLVPWTVSLVHLLSPSILSQSTDFSHSAVSVQPYPRDLDAWPPNLALGYPDANQTPPSS

SEQ ID NO: 819290 - protein, 84 aa, Homo sapiens; identical to SEQ ID NO: 819268

SEQ ID NO: 819291 - protein, 84 aa, Homo sapiens; identical to SEQ ID NO: 819268

SEQ ID NO: 819292 - protein, 84 aa, Homo sapiens; identical to SEQ ID NO: 819268

SEQ ID NO: 819293 - protein, 202 aa, Homo sapiens
EPQAYHLHPESCVTMWVPVVFLTLSVTWIGAAPLILSRIVGGWECEKHSQPWQVLVASRGRAVCGGVLVHPQWVLTAAHCIRNKSVILLGRHSLFHPEDTGQVFQVSHSFPHPLYDMSLLKNRFLRPGDDSSHDLMLLRLSEPAELTDAVKVMDLPTQEPALGTTCYASGWGSIEPEEFSVTPVVLSCSKYDHATALQLGNR

SEQ ID NO: 819294 - protein, 125 aa, Homo sapiens
MVLALVPPTCLQGLSSWTLPSAQELDPEVPSPPARTGAPTPLLESLPTFFWKSALETFLSSSKAGNCYLLSACPGLKDRIAQAETGTDLSHSLPAFTLRVILGAHLSVMVCFKVSRHGAVNHVPC

SEQ ID NO: 819295 - protein, 259 aa, Homo sapiens
MSEVPVARVWLVLLLLTVQVGVTAGAPWQCAPCSAEKLALCPPVSASCSEVTRSAGCGCCPMCALPLGAACGVATARCARGLSCRALPGEQQPLHALTRGQGACVQESDASAPHAAEAGSPESPESTEITEEELLDNFHLMAPSEEDHSILWDAISTYDGSKALHVTNIKKWKEPCRIELYRVVESLAKAQETSGEEISKFYLPNCNKNGFYHSRQCETSMDGEAGLCWCVYPWNGKRIPGSPEIRGDPNCQMYFNVQN

SEQ ID NO: 819296 - protein, 259 aa, Homo sapiens; identical to SEQ ID NO: 819295

SEQ ID NO: 819297 - protein, 259 aa, Homo sapiens; identical to SEQ ID NO: 819295

SEQ ID NO: 819298 - protein, 119 aa, Homo sapiens
MAPSEEDHSILWDAISTYDGSKALHVTNIKKWKEPCRIELYRVVESLAKAQETSGEEISKFYLPNCNKNGFYHSRQCETSMDGEAGLCWCVYPWNGKRIPGSPEIRGDPNCQMYFNVQN

SEQ ID NO: 819299 - protein, 119 aa, Homo sapiens; identical to SEQ ID NO: 819298

SEQ ID NO: 819300 - protein, 119 aa, Homo sapiens; identical to SEQ ID NO: 819298

SEQ ID NO: 819301 - protein, 259 aa, Homo sapiens; identical to SEQ ID NO: 819295

SEQ ID NO: 819302 - protein, 191 aa, Homo sapiens
MSEVPVARVWLVLLLLTVQVGVTAGAPWQCAPCSAEKLALCPPVSASCSEVTRSAGCGCCPMCALPLGAACGVATARCARGLSCRALPGEQQPLHALTRGQGACVQESDASAPHAAEAGSPESPESTEITEEELLDNFHLMAPSEEDHSILWDAISTYDGSKALHVTNIKKWKKVRPSRWVVGTLLSEDVA

SEQ ID NO: 819303 - protein, 191 aa, Homo sapiens; identical to SEQ ID NO: 819302

SEQ ID NO: 819304 - protein, 202 aa, Homo sapiens
MSEVPVARVWLVLLLLTVQVGVTAGAPWQCAPCSAEKLALCPPVSASCSEVTRSAGCGCCPMCALPLGAACGVATARCARGLSCRALPGEQQPLHALTRGQGACVQESDASAPHAAEAGSPESPESTEITEEELLDNFHLMAPSEEDHSILWDAISTYDGSKALHVTNIKKWKQGTGDIRRRNFQILPAKLQQEWILSQQTV

SEQ ID NO: 819305 - protein, 262 aa, Homo sapiens
MSEVPVARVWLVLLLLTVQVGVTAGAPWQCAPCSAEKLALCPPVSASCSEVTRSAGCGCCPMCALPLGAACGVATARCARGLSCRALPGEQQPLHALTRGQGACVQESDASAPHAAEAGSPESPESTEITEEELLDNFHLMAPSEEDHSILWDAISTYDGSKALHVTNIKKWKEPCRIELYRVVESLAKAQETSGEEISKFYLPNCNKNGFYHSRQCETSMDGEAGLCWCVYPWNGKRIPGSPEIRGDPNCQMYFNVHIFIL

SEQ ID NO: 819306 - protein, 191 aa, Homo sapiens; identical to SEQ ID NO: 819302

SEQ ID NO: 819307 - protein, 375 aa, Homo sapiens [sequence omitted]

SEQ ID NO: 819308 - protein, 123 aa, Homo sapiens [sequence omitted]

SEQ ID NO: 819309 - protein, 199 aa, Homo sapiens [sequence omitted]

SEQ ID NO: 819310 - protein, 189 aa, Homo sapiens
DWLSSQAIMASPSGKGARALEAPGCGPRPLARDLVDSVDDAEGLYVAVERCPLCNTTRRRLTCAKCVQSGDFVYFDGRDRERFIDKKERLSRLKSKQEEFQKEVLKAMEGKWITDQLRWKIMSCKMRIEQLKQTICKGNEEMEKNSEGLLKTKEKNQKLYSRAQRHQEKKEKIQRHNRKLGDLVFLSLL

SEQ ID NO: 819311 - protein, 123 aa, Homo sapiens [sequence omitted]

SEQ ID NO: 819312 - protein, 199 aa, Homo sapiens [sequence omitted]

SEQ ID NO: 819313 - protein, 182 aa, Homo sapiens
MRIEQLKQTICKGNEEMEKNSEGLLKTKEKNQKLYSRAQRHQEKKEKIQRHNRKLGDLVEKKTIDLRSHYERLANLRRSHILELTSVIFPIEEVKTGVRDPADVSSESDSAMTSSTVSKLAEARRTTYLSGRWVCDDHNGDTSISITGPWISLPNNGDYSAYYSWVEEKKTTQGPGEKQHIL

SEQ ID NO: 819314 - protein, 557 aa, Homo sapiens
MVSKLTSLQQELLSALLSSGVTKEVLVQALEELLPSPNFGVKLETLPLSPGSGAEPDTKPVFHTLTNGHAKGRLSGDEGSEDGDDYDTPPILKELQALNTEEAAEQRAEVDRMLSEDPWRAAKMIKGYMQQHNIPQREVVDVTGLNQSHLSQHLNKGTPMKTQKRAALYTWYVRKQREILRQFNQTVQSSGNMTDKSSQDQLLFLFPEFSQQSHGPGQSDDACSEPTNKKMRRNRFKWGPASQQILYQAYDRQKNPSKEEREALVEECNRAECLQRGVSPSKAHGLGSNLVTEVRVYNWFANRRKEEAFRQKLAMDAYSSNQTHSLNPLLSHGSPHHQPSSSPPNKLSGVRYSQQGNNEITSSSTISHHGNSAMVTSQSVLQQVSPASLDPGHNLLSPDGKMISVSGGGLPPVSTLTNIHSLSHHNPQQSQNLIMTPLSGVMAIAQSLNTSQAQSVPVINSVAGSLAALQPVQFSQQLHSPHQQPLMQQSPGSHMAQQPFMAAVTQLQNSHMYAHKQEPPQYSHTSRFPSAMVVTDTSSISTLTNMSSSKQCPLQAW

SEQ ID NO: 819315 - protein, 184 aa, Homo sapiens
MVTSQSVLQQVSPASLDPGHNLLSPDGKMISVSGGGLPPVSTLTNIHSLSHHNPQQSQNLIMTPLSGVMAIAQSLNTSQAQSVPVINSVAGSLAALQPVQFSQQLHSPHQQPLMQQSPGSHMAQQPFMAAVTQLQNSHMYAHKQEPPQYSHTSRFPSAMVVTDTSSISTLTNMSSSKQCPLQAW

SEQ ID NO: 819316 - protein, 557 aa, Homo sapiens; identical to SEQ ID NO: 819314

SEQ ID NO: 819317 - protein, 399 aa, Homo sapiens
MVSKLTSLQQELLSALLSSGVTKEVLVQALEELLPSPNFGVKLETLPLSPGSGAEPDTKPVFHTLTNGHAKGRLSGDEGSEDGDDYDTPPILKELQALNTEEAAEQRAEVDRMLSEDPWRAAKMIKGYMQQHNIPQREVVDVTGLNQSHLSQHLNKGTPMKTQKRAALYTWYVRKQREILRQFNQTVQSSGNMTDKSSQDQLLFLFPEFSQQSHGPGQSDDACSEPTNKKMRRNRFKWGPASQQILYQAYDRQKNPSKEEREALVEECNRAECLQRGVSPSKAHGLGSNLVTEVRVYNWFANRRKEEAFRQKLAMDAYSSNQTHSLNPLLSHGSPHHQPSSSPPNKLSGKQRLGLTASATQPSWFLPRILSGLRVFRGANAFEMILGPLSHCQNILPWK

SEQ ID NO: 819318 - protein, 650 aa, Homo sapiens
MGPASPAARGLSRRPGQPPLPLLLPLLLLLLRAQPAIGSLAGGSPGAAEAPGSAQVAGLCGRLTLHRDLRTGRWEPDPQRSRRCLRDPQRVLEYCRQMYPELQIARVEQATQAIPMERWCGGSRSGSCAHPHHQVVPFRCLPGEFVSEALLVPEGCRFLHQERMDQCESSTRRHQEAQEACSSQGLILHGSGMLLPCGSDRFRGVEYVCCPPPGTPDPSGTAVGDPSTRSWPPGSRVEGAEDEEEEESFPQPVDDYFVEPPQAEEEEETVPPPSSHTLAVVGKVTPTPRPTDGVDIYFGMPGEISEHEGFLRAKMDLEERRMRQINEVMREWAMADNQSKNLPKADRQALNEHFQSILQTLEEQVSGERQRLVETHATRVIALINDQRRAALEGFLAALQADPPQAERVLLALRRYLRAEQKEQRHTLRHYQHVAAVDPEKAQQMRFQVHTHLQVIEERVNQSLGLLDQNPHLAQELRPQIQELLHSEHLGPSELEAPAPGGSSEDKGGLQPPDSKDDTPMTLPKGSTEQDAASPEKEKMNPLEQYERKVNASVPRGFPFHSSEIQRDELAPAGTGVSREAVSGLLIMGAGGGSLIVLSMLLLRRKKPYGAISHGVVEVDPMLTLEEQQLRELQRHGYENPTYRFLEERP

SEQ ID NO: 819319 - protein, 635 aa, Homo sapiens
  misc_feature (619)..(619): Xaa can be any naturally occurring amino acid
  misc_feature (633)..(633): Xaa can be any naturally occurring amino acid
MGPASPAARGLSRRPGQPPLPLLLPLLLLLLRAQPAIGSLAGGSPGAAEAPGSAQVAGLCGRLTLHRDLRTGRWEPDPQRSRRCLRDPQRVLEYCRQMYPELQIARVEQATQAIPMERWCGGSRSGSCAHPHHQVVPFRCLPGEFVSEALLVPEGCRFLHQERMDQCESSTRRHQEAQEACSSQGLILHGSGMLLPCGSDRFRGVEYVCCPPPGTPDPSGTAVGDPSTRSWPPGSRVEGAEDEEEEESFPQPVDDYFVEPPQAEEEEETVPPPSSHTLAVVGKVTPTPRPTDGVDIYFGMPGEISEHEGFLRAKMDLEERRMRQINEVMREWAMADNQSKNLPKADRQALNEHFQSILQTLEEQVSGERQRLVETHATRVIALINDQRRAALEGFLAALQADPPQAERVLLALRRYLRAEQKEQRHTLRHYQHVAAVDPEKAQQMRFQVHTHLQVIEERVNQSLGLLDQNPHLAQELRPQIQELLHSEHLGPSELEAPAPGGSSEDKGGLQPPDSKDDTPMTLPKGSTEQDAASPEKEKMNPLEQYERKVNASVPRGFPFHSSEIQRDELAPAGTGVSREAVSGLLIMGAGGGSLIVLSMLLLRRKKPYGAISHGVVEXTHSYLEEQKFGTGXTV

SEQ ID NO: 819320 - protein, 132 aa, Homo sapiens [sequence omitted]

SEQ ID NO: 819321 - protein, 99 aa, Homo sapiens
SSSSANCSGTAMRTPLTASWRNDPDPAPFTPSAEPRPPLFLEPQNPNSQPRAAGSLEVIISHPFVRRLEILISPFQFQNSIPKNSQIVPAASPRGTSSP

SEQ ID NO: 819322 - protein, 642 aa, Homo sapiens [sequence omitted]

SEQ ID NO: 819323 - protein, 565 aa, Homo sapiens
GTFQGGITEAGRADAAEARALRDLEVQNAVLVSPSLSGHYALPFSDGGHHQLPGFVPIAPSSTQNYTQEQFWAVKTPTLILYGELEHILARDVTACSSQGLILHGSGMLLPCGSDRFRGVEYVCCPPPGTPDPSGTAVGDPSTRSWPPGSRVEGAEDEEEEESFPQPVDDYFVEPPQAEEEEETVPPPSSHTLAVVGKVTPTPRPTDGVDIYFGMPGEISEHEGFLRAKMDLEERRMRQINEVMREWAMADNQSKNLPKADRQALNEHFQSILQTLEEQVSGERQRLVETHATRVIALINDQRRAALEGFLAALQADPPQAERVLLALRRYLRAEQKEQRHTLRHYQHVAAVDPEKAQQMRFQVHTHLQVIEERVNQSLGLLDQNPHLAQELRPQIQELLHSEHLGPSELEAPAPGGSSEDKGGLQPPDSKDDTPMTLPKGSTEQDAASPEKEKMNPLEQYERKVNASVPRGFPFHSSEIQRDELAPAGTGVSREAVSGLLIMGAGGGSLIVLSMLLLRRKKPYGAISHGVVEVDPMLTLEEQQLRELQRHGYENPTYRFLEERP

SEQ ID NO: 819324 - protein, 302 aa, Homo sapiens
MWSWKCLLFWAVLVTATLCTARPSPTLPEQDALPSSEDDDDDDDSSSEEKETDNTKPNRMPVAPYWTSPEKMEKKLHAVPAAKTVKFKCPSSGTPNPTLRWLKNGKEFKPDHRIGGYKVRYATWSIIMDSVVPSDKGNYTCIVENEYGSINHTYQLDVVERSPHRPILQAGLPANKTVALGSNVEFMCKVYSDPQPHIQWLKHIEVNGSKIGPDNLPYVQILKVIMAPVFVGQSTGKETTVSGAQVPVGRLSCPRMGSFLTLQAHTLHLSRDLATSPRTSNRGHKVEVSWEQRAAGMGGAGL

SEQ ID NO: 819325 - protein, 733 aa, Homo sapiens
MWSWKCLLFWAVLVTATLCTARPSPTLPEQDALPSSEDDDDDDDSSSEEKETDNTKPNRMPVAPYWTSPEKMEKKLHAVPAAKTVKFKCPSSGTPNPTLRWLKNGKEFKPDHRIGGYKVRYATWSIIMDSVVPSDKGNYTCIVENEYGSINHTYQLDVVERSPHRPILQAGLPANKTVALGSNVEFMCKVYSDPQPHIQWLKHIEVNGSKIGPDNLPYVQILKTAGVNTTDKEMEVLHLRNVSFEDAGEYTCLAGNSIGLSHHSAWLTVLEALEERPAVMTSPLYLEIIIYCTGAFLISCMVGSVIVYKMKSGTKKSDFHSQMAVHKLAKSIPLRRQVTVSADSSASMNSGVLLVRPSRLSSSGTPMLAGVSEYELPEDPRWELPRDRLVLGKPLGEGCFGQVVLAEAIGLDKDKPNRVTKVAVKMLKSDATEKDLSDLISEMEMMKMIGKHKNIINLLGACTQDGPLYVIVEYASKGNLREYLQARRPPGLEYCYNPSHNPEEQLSSKDLVSCAYQVARGMEYLASKKCIHRDLAARNVLVTEDNVMKIADFGLARDIHHIDYYKKTTNGRLPVKWMAPEALFDRIYTHQSDVWSFGVLLWEIFTLGGSPYPGVPVEELFKLLKEGHRMDKPSNCTNELYMMMRDCWHAVPSQRPTFKQLVEDLDRIVALTSNQEYLDLSMPLDQYSPSFPDTRSSTCSSGEDSVFSHEPLPEEPCLPRHPAQLANGGLKRR

SEQ ID NO: 819326 - protein, 733 aa, Homo sapiens; identical to SEQ ID NO: 819325

SEQ ID NO: 819327 - protein, 733 aa, Homo sapiens; identical to SEQ ID NO: 819325

SEQ ID NO: 819328 - protein, 733 aa, Homo sapiens; identical to SEQ ID NO: 819325

SEQ ID NO: 819329 - protein, 386 aa, Homo sapiens
MNSGVLLVRPSRLSSSGTPMLAGVSEYELPEDPRWELPRDRLVLGKPLGEGCFGQVVLAEAIGLDKDKPNRVTKVAVKMLKSDATEKDLSDLISEMEMMKMIGKHKNIINLLGACTQDGPLYVIVEYASKGNLREYLQARRPPGLEYCYNPSHNPEEQLSSKDLVSCAYQVARGMEYLASKKCIHRDLAARNVLVTEDNVMKIADFGLARDIHHIDYYKKTTNGRLPVKWMAPEALFDRIYTHQSDVWSFGVLLWEIFTLGGSPYPGVPVEELFKLLKEGHRMDKPSNCTNELYMMMRDCWHAVPSQRPTFKQLVEDLDRIVALTSNQEYLDLSMPLDQYSPSFPDTRSSTCSSGEDSVFSHEPLPEEPCLPRHPAQLANGGLKRR

SEQ ID NO: 819330 - protein, 776 aa, Homo sapiens
MWSWKCLLFWAVLVTATLCTARPSPTLPEQDALPSSEDDDDDDDSSSEEKETDNTKPNRMPVAPYWTSPEKMEKKLHAVPAAKTVKFKCPSSGTPNPTLRWLKNGKEFKPDHRIGGYKVRYATWSIIMDSVVPSDKGNYTCIVENEYGSINHTYQLDVVERSPHRPILQAGLPANKTVALGSNVEFMCKVYSDPQPHIQWLKHIEVNGSKIGPDNLPYVQILKTAGVNTTDKEMEVLHLRNVSFEDAGEYTCLAGNSIGLSHHSAWLTVLEALEERPAVMTSPLYLEIIIYCTGAFLISCMVGSVIVYKMKSGTKKSDFHSQMAVHKLAKSIPLRRQVTVSADSSASMNSGVLLVRPSRLSSSGTPMLAGVSEYELPEDPRWELPRDRLVLGKPLGEGCFGQVVLAEAIGLDKDKPNRVTKVAVKMLKSDATEKDLSDLISEMEMMKMIGKHKNIINLLGACTQDGPLYVIVEYASKGNLREYLQARRPPGLEYCYNPSHNPEEQLSSKDLVSCAYQVARGMEYLASKKCIHRDLAARNVLVTEDNVMKIADFGLARDIHHIDYYKKTTNGRLPVKWMAPEALFDRIYTHQSDVWSFGVLLWEIFTLGGSPYPGVPVEELFKLLKEGHRMDKPSNCTNELYARGDVGGPEPGLGAKSGLEGQGARLESIHLQETSLTLQSCRRYMMMRDCWHAVPSQRPTFKQLVEDLDRIVALTSNQEYLDLSMPLDQYSPSFPDTRSSTCSSGEDSVFSHEPLPEEPCLPRHPAQLANGGLKRR

SEQ ID NO: 819331 - protein, 610 aa, Homo sapiens
MWSWKCLLFWAVLVTATLCTARPSPTLPEQDALPSSEDDDDDDDSSSEEKETDNTKPNRMPVAPYWTSPEKMEKKLHAVPAAKTVKFKCPSSGTPNPTLRWLKNGKEFKPDHRIGGYKVRYATWSIIMDSVVPSDKGNYTCIVENEYGSINHTYQLDVVERSPHRPILQAGLPANKTVALGSNVEFMCKVYSDPQPHIQWLKHIEVNGSKIGPDNLPYVQILKTAGVNTTDKEMEVLHLRNVSFEDAGEYTCLAGNSIGLSHHSAWLTVLEALEERPAVMTSPLYLEIIIYCTGAFLISCMVGSVIVYKMKSGTKKSDFHSQMAVHKLAKSIPLRRQVTVSADSSASMNSGVLLVRPSRLSSSGTPMLAGVSEYELPEDPRWELPRDRLVLGKPLGEGCFGQVVLAEAIGLDKDKPNRVTKVAVKMLKSDATEKDLSDLISEMEMMKMIGKHKNIINLLGACTQDGPLYVIVEYASKGNLREYLQARRPPGLEYCYNPSHNPEEQLSSKDLVSCAYQVARGMEYLASKKCIHRDLAARNVLVTEDNVMKIADFGLARDIHHIDYYKKTTNGRLPVKWMAPEALFDRIYTHQSDVAAPHTPVCLWRNFSSC

SEQ ID NO: 819332 - protein, 386 aa, Homo sapiens; identical to SEQ ID NO: 819329

SEQ ID NO: 819333 - protein, 454 aa, Homo sapiens [sequence omitted]

SEQ ID NO: 819334 - protein, 442 aa, Homo sapiens
  misc_feature (9)..(9): Xaa can be any naturally occurring amino acid
FAARFDSEXIPEWVIVYKMKSGTKKSDFHSQMAVHKLAKSIPLRRQVTVSADSSASMNSGVLLVRPSRLSSSGTPMLAGVSEYELPEDPRWELPRDRLVLGKPLGEGCFGQVVLAEAIGLDKDKPNRVTKVAVKMLKSDATEKDLSDLISEMEMMKMIGKHKNIINLLGACTQDGPLYVIVEYASKGNLREYLQARRPPGLEYCYNPSHNPEEQLSSKDLVSCAYQVARGMEYLASKKCIHRDLAARNVLVTEDNVMKIADFGLARDIHHIDYYKKTTNGRLPVKWMAPEALFDRIYTHQSDVWSFGVLLWEIFTLGGSPYPGVPVEELFKLLKEGHRMDKPSNCTNELYMMMRDCWHAVPSQRPTFKQLVEDLDRIVALTSNQEYLDLSMPLDQYSPSFPDTRSSTCSSGEDSVFSHEPLPEEPCLPRHPAQLANGGLKRR

SEQ ID NO: 819335 - protein, 733 aa, Homo sapiens; identical to SEQ ID NO: 819325

SEQ ID NO: 819336 - protein, 364 aa, Homo sapiens
TLEDLKRPEDLAWELPRDRLVLGKPLGEGCFGQVVLAEAIGLDKDKPNRVTKVAVKMLKSDATEKDLSDLISEMEMMKMIGKHKNIINLLGACTQDGPLYVIVEYASKGNLREYLQARRPPGLEYCYNPSHNPEEQLSSKDLVSCAYQVARGMEYLASKKCIHRDLAARNVLVTEDNVMKIADFGLARDIHHIDYYKKTTNGRLPVKWMAPEALFDRIYTHQSDVWSFGVLLWEIFTLGGSPYPGVPVEELFKLLKEGHRMDKPSNCTNELYMMMRDCWHAVPSQRPTFKQLVEDLDRIVALTSNQEYLDLSMPLDQYSPSFPDTRSSTCSSGEDSVFSHEPLPEEPCLPRHPAQLANGGLKRR

SEQ ID NO: 819337 - protein, 733 aa, Homo sapiens; identical to SEQ ID NO: 819325

SEQ ID NO: 819338 - protein, 733 aa, Homo sapiens; identical to SEQ ID NO: 819325

SEQ ID NO: 819339 - protein, 221 aa, Homo sapiens
LFPIEATIMGVQSYTNDTYKKYKTKTPRQYARRAYCRAMQYADMKEMLRASALRKEEGRSACCDEKPGAGRECEKRESKGSGGRAVWQKFYETSRGGSPYPGVPVEELFKLLKEGHRMDKPSNCTNELYMMMRDCWHAVPSQRPTFKQLVEDLDRIVALTSNQEYLDLSMPLDQYSPSFPDTRSSTCSSGEDSVFSHEPLPEEPCLPRHPAQLANGGLKRR

SEQ ID NO: 819340 - protein, 733 aa, Homo sapiens; identical to SEQ ID NO: 819325

SEQ ID NO: 819341 - protein, 481 aa, Homo sapiens
MWSWKCLLFWAVLVTATLCTARPSPTLPEQDALPSSEDDDDDDDSSSEEKETDNTKPNRMPVAPYWTSPEKMEKKLHAVPAAKTVKFKCPSSGTPNPTLRWLKNGKEFKPDHRIGGYKVRYATWSIIMDSVVPSDKGNYTCIVENEYGSINHTYQLDVVERSPHRPILQAGLPANKTVALGSNVEFMCKVYSDPQPHIQWLKHIEVNGSKIGPDNLPYVQILKTAGVNTTDKEMEVLHLRNVSFEDAGEYTCLAGNSIGLSHHSAWLTVLEALEERPAVMTSPLYLEIIIYCTGAFLISCMVGSVIVYKMKSGTKKSDFHSQMAVHKLAKSIPLRRQVTVSADSSASMNSGVLLVRPSRLSSSGTPMLAGVSEYELPEDPRWELPRDRLVLGKPLGEGCFGQVVLAEAIGLDKDKPNRVTKVAVKMLKSDATEKDLSDLISEMEMMKMIGKHKNIINLLGACTQDGGCRPDWLSLPSGEKI

SEQ ID NO: 819342 - protein, 365 aa, Homo sapiens
MWSWKCLLFWAVLVTATLCTARPSPTLPEQDALPSSEDDDDDDDSSSEEKETDNTKPNRMPVAPYWTSPEKMEKKLHAVPAAKTVKFKCPSSGTPNPTLRWLKNGKEFKPDHRIGGYKVRYATWSIIMDSVVPSDKGNYTCIVENEYGSINHTYQLDVVERSPHRPILQAGLPANKTVALGSNVEFMCKVYSDPQPHIQWLKHIEVNGSKIGPDNLPYVQILKTAGVNTTDKEMEVLHLRNVSFEDAGEYTCLAGNSIGLSHHSAWLTVLEALEERPAVMTSPLYLEIIIYCTGAFLISCMVGSVIVYKMKSGTKKSDFHSQMAVHKLAKSIPLRRQVTESRWGICTLSTTSLSGPLMPCPLHCP

SEQ ID NO: 819343 - protein, 381 aa, Homo sapiens
  misc_feature (366)..(366): Xaa can be any naturally occurring amino acid
MWSWKCLLFWAVLVTATLCTARPSPTLPEQDALPSSEDDDDDDDSSSEEKETDNTKPNRMPVAPYWTSPEKMEKKLHAVPAAKTVKFKCPSSGTPNPTLRWLKNGKEFKPDHRIGGYKVRYATWSIIMDSVVPSDKGNYTCIVENEYGSINHTYQLDVVERSPHRPILQAGLPANKTVALGSNVEFMCKVYSDPQPHIQWLKHIEVNGSKIGPDNLPYVQILKTAGVNTTDKEMEVLHLRNVSFEDAGEYTCLAGNSIGLSHHSAWLTVLEALEERPAVMTSPLYLEIIIYCTGAFLISCMVGSVIVYKMKSGTKKSDFHSQMAVHKLAKSIPLRRQVTSFLADSKCNPMKLLGGFLLGFRANQRXSPPSGGLPILTKGSP

SEQ ID NO: 819344 - protein, 98 aa, Homo sapiens
MASSPVPAGPLYVIVEYASKGNLREYLQARRPPGLEYCYNPSHNPEEQLSSKDLVSCAYQVARGMEYLASKKVWNLKAPLGNARVGTEPPYVFQPVTY

SEQ ID NO: 819345 - protein, 73 aa, Homo sapiens
MGKTPPGPGLGPAPEPDQLLLSTLPVSLGFPRAAVAPYWTSPEKMEKKLHAVPAAKTVKFKCPSSGTPNPTLR

SEQ ID NO: 819346 - protein, 121 aa, Homo sapiens
ETEVQLFLSRLECNGMISAHCNPCLPSRNNSHKCTFHTKGFFISSPVKPRSLPGRLRTQSFVIPKPFHCKCPAVKMASNWVLACSVCGSSPCAFTCCQTCKHLFVFMTVMGTEVLQRKSVS

SEQ ID NO: 819347 - protein, 84 aa, Homo sapiens
WLCVTSGKLVNPDVAPFTDFYDGDNMFPSRQYHEDVRTDIFKGSEEYLTHSEHYEMPPCMTRSMPGAEGGEVLRFALLPPQQEQ

SEQ ID NO: 819348 - protein, 123 aa, Homo sapiens
RQDLLFITPWHPFRTTPEGVVMGSSRPGARKEGGAHRRRNIPKSGPPCSFLPIPSSCKRKSRLWEQMAEGGSKERAKNDDPQLIVAVKLSEVFFLFCGRRAGGPKVGNKRVPTQNPSCERCAL

SEQ ID NO: 819349 - protein, 123 aa, Homo sapiens; identical to SEQ ID NO: 819348

SEQ ID NO: 819350 - protein, 121 aa, Homo sapiens; identical to SEQ ID NO: 819346

SEQ ID NO: 819351 - protein, 341 aa, Homo sapiens
VCKSQRCKKQRLQQQQQQRRWQQQQQRRQQQQQRRHRWQQQHHQQQQQKKILIKSSPKLSVYPDPHLHSSQERERGKGGRKKKKPNNLAETSQRMLQNSAVLLVLVISASATHEAEQNDSVSPRKSRVAAQNSAEVVRCLNSALQVGCGAFACLENSTCDTDGMYDICKSFLYSAAKFDTQGKAFVKESLKCIANGVTSKVFLAIRRCSTFQRMIAEVQEECYSKLNVCSIAKRNPEAITEVVQLPNHFSNRYYNRLVRSLLECDEDTVSTIRDSLMEKIGPNMASLFHILQTDHCAQTHPRADFNRRRTNEPQKLKVLLRNLRGEEDSPSHIKRTSHESA

SEQ ID NO: 819352 - protein, 477 aa, Homo sapiens
MSVRESPPHLRRFLRRTSQLSAAPCCVLLLNVQLRGCHLDTLVCPQDVGRGLPMLGPIFSHSRLSLNCADRVFITVPAALRTSPVIVSVRRSDLGSLAQTSVTGFTGFRLHDAAHNSALLSTLPAPQQSSFGKVEHLRMDEEDLGGDPVGDAFEALFDVMLFPECHNLAALYHEGFTDVIHPICVTCWSFPGMQKPRSLTCRAQFDGNVTTLMLEVLDAAISGSSWGSQRMLQNSAVLLVLVISASATHEAEQNDSVSPRKSRVAAQNSAEVVRCLNSALQVGCGAFACLENSTCDTDGMYDICKSFLYSAAKFDTQGKAFVKESLKCIANGVTSKVFLAIRRCSTFQRMIAEVQEECYSKLNVCSIAKRNPEAITEVVQLPNHFSNRYYNRLVRSLLECDEDTVSTIRDSLMEKIGPNMASLFHILQTDHCAQTHPRADFNRRRTNEPQKLKVLLRNLRGEEDSPSHIKRTSHESA

SEQ ID NO: 819353 - protein, 341 aa, Homo sapiens; identical to SEQ ID NO: 819351

SEQ ID NO: 819354 - protein, 137 aa, Homo sapiens
KKQRLQQQQQQRRWQQQQQRRQQQQQRRHRWQQQHHQQQQQKKILIKSSPKLSVYPDPHLHSSQERERGKGGRKKKKPNNLAETSQRMLQNSAVLLVLVISASATHEAEQNDSVSPRKSRVAAQNSGKQQTQERFLP

SEQ ID NO: 819355 - protein, 237 aa, Homo sapiens
MSFLKSFPPPGPAEGLLRQQPDTEAVLNGKGLGTGTLYIAESRLSWLDGSGLGFSLEYPTISLHALSRDRSDCLGEHLYVMVNAKFEEESKEPVADEEEEDSDDDVEPITEFRFVPSDKSALEAMFTAMCECQALHPDPEDEDSDDYDGEEYDVEAHEQGQGDIPTFYTYEEGLSHLTAEGQATLERLEGMLSQSVSSQYNMAGVRTEDSIRDYEDGMEVDTTPTVAGQFEDADVDH

SEQ ID NO: 819356 - protein, 260 aa, Homo sapiens
MPAGGGRACAPTPSGPVLPHSAAMSFLKSFPPPGPAEGLLRQQPDTEAVLNGKGLGTGTLYIAESRLSWLDGSGLGFSLEYPTISLHALSRDRSDCLGEHLYVMVNAKFEEESKEPVADEEEEDSDDDVEPITEFRFVPSDKSALEAMFTAMCECQALHPDPEDEDSDDYDGEEYDVEAHEQGQGDIPTFYTYEEGLSHLTAEGQATLERLEGMLSQSVSSQYNMAGVRTEDSIRDYEDGMEVDTTPTVAGQFEDADVDH

SEQ ID NO: 819357 - protein, 109 aa, Homo sapiens
MCECQALHPDPEDEDSDDYDGEEYDVEAHEQGQGDIPTFYTYEEGLSHLTAEGQATLERLEGMLSQSVSSQYNMAGVRTEDSIRDYEDGMEVDTTPTVAGQFEDADVDH

SEQ ID NO: 819358 - protein, 237 aa, Homo sapiens; identical to SEQ ID NO: 819355

SEQ ID NO: 819359 - protein, 237 aa, Homo sapiens; identical to SEQ ID NO: 819355

SEQ ID NO: 819360 - protein, 237 aa, Homo sapiens; identical to SEQ ID NO: 819355

SEQ ID NO: 819361 - protein, 237 aa, Homo sapiens; identical to SEQ ID NO: 819355

SEQ ID NO: 819362 - protein, 237 aa, Homo sapiens; identical to SEQ ID NO: 819355

SEQ ID NO: 819363 - protein, 237 aa, Homo sapiens; identical to SEQ ID NO: 819355

SEQ ID NO: 819364 - protein, 203 aa, Homo sapiens
MSFLKSFPPPGPAEGLLRQQPDTEAVLNGKGLGTGTLYIAESRLSWLDGSGLGFSLEYPTISLHALSRDRSDCLGEHLYVMVNAKFEVEAMFTAMCECQALHPDPEDEDSDDYDGEEYDVEAHEQGQGDIPTFYTYEEGLSHLTAEGQATLERLEGMLSQSVSSQYNMAGVRTEDSIRDYEDGMEVDTTPTVAGQFEDADVDH

SEQ ID NO: 819365 - protein, 109 aa, Homo sapiens; identical to SEQ ID NO: 819357

SEQ ID NO: 819366 - protein, 237 aa, Homo sapiens; identical to SEQ ID NO: 819355

SEQ ID NO: 819367 - protein, 227 aa, Homo sapiens
MSFLKSFPPPGPAEGLLRQQPDTEAVLNGKGLGTGTLYIAESRLSWLDGSGLGFSLEYPTISLHALSRDRSDCLGEHLYVMVNAKFEEESKEPVADEEEEDSDDDVEPITEFRFVPSDKSALEAMFTAMCECQALHPDPEDEDSDDYDGEEYDVEAHEQGQGDIPTFYTYEEGLSHLTAEGQATLERLEGMLSQSVSSQYNMAGVRTEDSIRDYEGIHTPTKARERF

SEQ ID NO: 819368 - protein, 179 aa, Homo sapiens
MSFLKSFPPPGPAEGLLRQQPDTEAVLNGKGLGTGTLYIAESRLSWLDGSGLGFSLEYPTISLHALSRDRSDCLGEHLYVMVNAKFEEESKEPVADEEEEDSDDDVEPITEFRFVPSDKSALEAMFTAMCECQALHPDPEDEDSDDYDGEEYDVEAHDGMEVDTTPTVAGQFEDADVDH

SEQ ID NO: 819369 - protein, 237 aa, Homo sapiens; identical to SEQ ID NO: 819355

SEQ ID NO: 819370 - protein, 237 aa, Homo sapiens; identical to SEQ ID NO: 819355

SEQ ID NO: 819371 - protein, 222 aa, Homo sapiens
MSFLKSFPPPGPAEGLLRQQPDTEAVLNGKGLGTGTLYIAESRLSWLDGSGLGFSLEYPTISLHALSRDRSDCLGEHLYVMVNAKFEEESKEPVADEEEEDSDDDVEPITEFRFVPSDKSALEAMFTAMCECQALHPDPEDEDSDDYDGEEYDVEAHEQGQGDIPTFYTYEEGLSHLTAEGQATLERLEGMLSQSVSSQYNMAGVRTEDSIRDYEGECPFAV

SEQ ID NO: 819372 - protein, 101 aa, Homo sapiens
TCLQRYCLQRYWFAAVTGLQRYWFARGTGSQRQEGICSLLFTLKLSVSGYPLSRPIIPTLTVCIICKLADLCGENAQELGRLRGKERAPFAMFYQSAVITS

SEQ ID NO: 819373 - protein, 132 aa, Homo sapiens
MSFLKSFPPPGPAEGLLRQQPDTEAVLNGKGLGTGTLYIAESRLSWLDGSGLGFSLEYPTISLHALSRDRSDCLGEHLYVMVNAKFEEESKEPVADEEEEDSDDDVEPITEFRFVPSDKSALETELFKVPKS

SEQ ID NO: 819374 - protein, 106 aa, Homo sapiens
RSIIHNFRANNVSPMTCLKKHWMKLAFMTNTNGKIPVRSITRTFASGKTEKVIFQALKELGLPSGKNDEIEPTAFSYEKFYELTQKICPRTDIEDLFKKIINEILD

SEQ ID NO: 819375 - protein, 1022 aa, Homo sapiens
MNNNWNVCFFLFCPSITRTFASGKTEKVIFQALKELGLPSGKNDEIEPTAFSYEKFYELTQKICPRTDIEDLFKKINGDKTDYLTVDQLVSFLNEHQRDPRLNEILFPFYDAKRAMQIIEMYEPDEDLKKKGLISSDGFCRYLMSDENAPVFLDRLELYQEMDHPLAHYFISSSHNTYLTGRQFGGKSSVEMYRQVLLAGCRCVELDCWDGKGEDQEPIITHGKAMCTDILFKDVIQAIKETAFVTSEYPVILSFENHCSKYQQYKMSKYCEDLFGDLLLKQALESHPLEPGRALPSPNDLKRKILIKNKRLKPEVEKKQLEALRSMMEAGESASPANILEDDNEEEIESADQEEEAHPEFKFGNELSADDLGHKEAVANSVKKGLVTVEDEQAWMASYKYVGATTNIHPYLSTMINYAQPVKFQGFHVAEERNIHYNMSSFNESVGLGYLKTHAIEFVNYNKRQMSRIYPKGGRVDSSNYMPQIFWNAGCQMVSLNYQTPDLAMQLNQGKFEYNGSCGYLLKPDFMRRPDRTFDPFSETPVDGVIAATCSVQVISGQFLSDKKIGTYVEVDMYGLPTDTIRKEFRTRMVMNNGLNPVYNEESFVFRKVILPDLAVLRIAVYDDNNKLIGQRILPLDGLQAGYRHISLRNEGNKPLSLPTIFCNIVLKTYVPDGFGDIVDALSDPKKFLSITEKRADQMRAMGIETSDIADVPSDTSKNDKKGKANTAKANVTPQSSSELRPTTTAALASGVEAKKGIELIPQVRIEDLKQMKAYLKHLKKQQKELNSLKKKHAKEHSTMQKLHCTQVDKIVAQYDKEKSTHEKILEKAMKKKGGSNCLEMKKETEIKIQTLTSDHKSKVKEIVAQHTKEWSEMINTHSAEEQEIRDLHLSQQCELLKKLLINAHEQQTQQLKLSHDRESKEMRAHQAKISMENSKAISQDKSIKNKAERERRVRELNSSNTKKFLEERKRLAMKQSKEMDQLKKVQLEHLEFLEKQNEQAKEMQQMVKLEAEMDRRPATVV

SEQ ID NO: 819376 - protein, 1022 aa, Homo sapiens; identical to SEQ ID NO: 819375

SEQ ID NO: 819377 - protein, 1065 aa, Homo sapiens
RSIIHNFRANNVSPMTCLKKHWMKLAFMTNTNGKIPVRSITRTFASGKTEKVIFQALKELGLPSGKNDEIEPTAFSYEKFYELTQKICPRTDIEDLFKKINGDKTDYLTVDQLVSFLNEHQRDPRLNEILFPFYDAKRAMQIIEMYEPDEDLKKKGLISSDGFCRYLMSDENAPVFLDRLELYQEMDHPLAHYFISSSHNTYLTGRQFGGKSSVEMYRQVLLAGCRCVELDCWDGKGEDQEPIITHGKAMCTDILFKDVIQAIKETAFVTSEYPVILSFENHCSKYQQYKMSKYCEDLFGDLLLKQALESHPLEPGRALPSPNDLKRKILIKNKRLKPEVEKKQLEALRSMMEAGESASPANILEDDNEEEIESADQEEEAHPEFKFGNELSADDLGHKEAVANSVKKGLVTVEDEQAWMASYKYVGATTNIHPYLSTMINYAQPVKFQGFHVAEERNIHYNMSSFNESVGLGYLKTHAIEFVNYNKRQMSRIYPKGGRVDSSNYMPQIFWNAGCQMVSLNYQTPDLAMQLNQGKFEYNGSCGYLLKPDFMRRPDRTFDPFSETPVDGVIAATCSVQVISGQFLSDKKIGTYVEVDMYGLPTDTIRKEFRTRMVMNNGLNPVYNEESFVFRKVILPDLAVLRIAVYDDNNKLIGQRILPLDGLQAGYRHISLRNEGNKPLSLPTIFCNIVLKTYVPDGFGDIVDALSDPKKFLSITEKRADQMRAMGIETSDIADVPSDTSKNDKKGKANTAKANVTPQSSSELRPTTTAALASGVEAKKGIELIPQVRIEDLKQMKAYLKHLKKQQKELNSLKKKHAKEHSTMQKLHCTQVDKIVAQYDKEKSTHEKILEKAMKKKGGSNCLEMKKETEIKIQTLTSDHKSKVKEIVAQHTKEWSEMINTHSAEEQEIRDLHLSQQCELLKKLLINAHEQQTQQLKLSHDRESKEMRAHQAKISMENSKAISQDKSIKNKAERERRVRELNSSNTKKFLEERKRLAMKQSKEMDQLKKVQLEHLEFLEKQNEQLLKSCHAVSQTQGEGDAADGEIGSRDGPQTSNSSMKLQNAN

SEQ ID NO: 819378 - protein, 714 aa, Homo sapiens
MEAGESASPANILEDDNEEEIESADQEEEAHPEFKFGNELSADDLGHKEAVANSVKKGLVTVEDEQAWMASYKYVGATTNIHPYLSTMINYAQPVKFQGFHVAEERNIHYNMSSFNESVGLGYLKTHAIEFVNYNKRQMSRIYPKGGRVDSSNYMPQIFWNAGCQMVSLNYQTPDLAMQLNQGKFEYNGSCGYLLKPDFMRRPDRTFDPFSETPVDGVIAATCSVQVISGQFLSDKKIGTYVEVDMYGLPTDTIRKEFRTRMVMNNGLNPVYNEESFVFRKVILPDLAVLRIAVYDDNNKLIGQRILPLDGLQAGYRHISLRNEGNKPLSLPTIFCNIVLKTYVPDGFGDIVDALSDPKKFLSITEKRADQMRAMGIETSDIADVPSDTSKNDKKGKANTAKANVTPQSSSELRPTTTAALASGVEAKKGIELIPQVRIEDLKQMKAYLKHLKKQQKELNSLKKKHAKEHSTMQKLHCTQVDKIVAQYDKEKSTHEKILEKAMKKKGGSNCLEMKKETEIKIQTLTSDHKSKVKEIVAQHTKEWSEMINTHSAEEQEIRDLHLSQQCELLKKLLINAHEQQTQQLKLSHDRESKEMRAHQAKISMENSKAISQDKSIKNKAERERRVRELNSSNTKKFLEERKRLAMKQSKEMDQLKKVQLEHLEFLEKQNEQLLKSCHAVSQTQGEGDAADGEIGSRDGPQTSNSSMKLQNAN

SEQ ID NO: 819379 - protein, 646 aa, Homo sapiens [sequence omitted]

SEQ ID NO: 819380 - protein, 880 aa, Homo sapiens
RSIIHNFRANNVSPMTCLKKHWMKLAFMTNTNGKIPVRSITRTFASGKTEKVIFQALKELGLPSGKNDEIEPTAFSYEKFYELTQKICPRTDIEDLFKKINGDKTDYLTVDQLVSFLNEHQRDPRLNEILFPFYDAKRAMQIIEMYEPDEDLKKKGLISSDGFCRYLMSDENAPVFLDRLELYQEMDHPLAHYFISSSHNTYLTGRQFGGKSSVEMYRQVLLAGCRCVELDCWDGKGEDQEPIITHGKAMCTDILFKDVIQAIKETAFVTSEYPVILSFENHCSKYQQYKMSKYCEDLFGDLLLKQALESHPLEPGRALPSPNDLKRKILIKNKRLKPEVEKKQLEALRSMMEAGESASPANILEDDNEEEIESADQEEEAHPEFKFGNELSADDLGHKEAVANSVKKGLVTVEDEQAWMASYKYVGATTNIHPYLSTMINYAQPVKFQGFHVAEERNIHYNMSSFNESVGLGYLKTHAIEFVNYNKRQMSRIYPKGGRVDSSNYMPQIFWNAGCQMVSLNYQTPDLAMQLNQGKFEYNGSCGYLLKPDFMRRPDRTFDPFSETPVDGVIAATCSVQVISGQFLSDKKIGTYVEVDMYGLPTDTIRKEFRTRMVMNNGLNPVYNEESFVFRKVILPDLAVLRIAVYDDNNKLIGQRILPLDGLQAGYRHISLRNEGNKPLSLPTIFCNIVLKTYVPDGFGDIVDALSDPKKFLSITEKRADQMRAMGIETSDIADVPSDTSKNDKKGKANTAKANVTPQSSSELRPTTTAALASGVEAKKGIELIPQVRIEDLKQMKAYLKHLKKQQKELNSLKKKHAKEHSTMQKLHCTQVDKIVAQYDKEKSTHEKILEKAMKKKGGSNCLEMKKETEIKIQTTRPGV

SEQ ID NO: 819381 - protein, 905 aa, Homo sapiens
  misc_feature (891)..(891): Xaa can be any naturally occurring amino acid
RSIIHNFRANNVSPMTCLKKHWMKLAFMTNTNGKIPVRSITRTFASGKTEKVIFQALKELGLPSGKNDEIEPTAFSYEKFYELTQKICPRTDIEDLFKKINGDKTDYLTVDQLVSFLNEHQRDPRLNEILFPFYDAKRAMQIIEMYEPDEDLKKKGLISSDGFCRYLMSDENAPVFLDRLELYQEMDHPLAHYFISSSHNTYLTGRQFGGKSSVEMYRQVLLAGCRCVELDCWDGKGEDQEPIITHGKAMCTDILFKDVIQAIKETAFVTSEYPVILSFENHCSKYQQYKMSKYCEDLFGDLLLKQALESHPLEPGRALPSPNDLKRKILIKNKRLKPEVEKKQLEALRSMMEAGESASPANILEDDNEEEIESADQEEEAHPEFKFGNELSADDLGHKEAVANSVKKGLVTVEDEQAWMASYKYVGATTNIHPYLSTMINYAQPVKFQGFHVAEERNIHYNMSSFNESVGLGYLKTHAIEFVNYNKRQMSRIYPKGGRVDSSNYMPQIFWNAGCQMVSLNYQTPDLAMQLNQGKFEYNGSCGYLLKPDFMRRPDRTFDPFSETPVDGVIAATCSVQVISGQFLSDKKIGTYVEVDMYGLPTDTIRKEFRTRMVMNNGLNPVYNEESFVFRKVILPDLAVLRIAVYDDNNKLIGQRILPLDGLQAGYRHISLRNEGNKPLSLPTIFCNIVLKTYVPDGFGDIVDALSDPKKFLSITEKRADQMRAMGIETSDIADVPSDTSKNDKKGKANTAKANVTPQSSSELRPTTTAALASGVEAKKGLVTVEDEQAWMASYNFVGATTIIHPYLSTMINYAQPVKFQGFHVAEERNIHYNMSSFNESVGLGYLKTHAIEFVNYNKTAMSRIYPKGGRVGSSNYYASDFLDAGCQMVXLDYQTPVGAVSMTP

SEQ ID NO: 819382 - protein, 528 aa, Homo sapiens
RSIIHNFRANNVSPMTCLKKHWMKLAFMTNTNGKIPVRSITRTFASGKTEKVIFQALKELGLPSGKNDEIEPTAFSYEKFYELTQKICPRTDIEDLFKKINGDKTDYLTVDQLVSFLNEHQRDPRLNEILFPFYDAKRAMQIIEMYEPDEDLKKKGLISSDGFCRYLMSDENAPVFLDRLELYQEMDHPLAHYFISSSHNTYLTGRQFGGKSSVEMYRQVLLAGCRCVELDCWDGKGEDQEPIITHGKAMCTDILFKDVIQAIKETAFVTSEYPVILSFENHCSKYQQYKMSKYCEDLFGDLLLKQALESHPLEPGRALPSPNDLKRKILIKNKRLKPEVEKKQLEALRSMMEAGESASPANILEDDNEEEIESADQEEEAHPEFKFGNELSADDLGHKEAVANSVKKGLVTVEDEQAWMASYKYVGATTNIHPYLSTMINYAQPVKFQGFHVAEERNIHYNMSSFNESVGLGYLKTHAIEFVNYNKRQMSRIYPKGGRVDSSNYMPQIFWNAGCQMVSLNYQTPGRS

SEQ ID NO: 819383 - protein, 42 aa, Homo sapiens
MVLDPPWSPVYSFSYHQHPHPNYLFQKGFETSYQLLGLPRTF

SEQ ID NO: 819384 - protein, 88 aa, Homo sapiens
PKRREEYSLVNARTSLVFLSAFGREEDAEIIVKIFVEFSIASETHKAIQALNGRWFAGRKVVAEVYDQERFDNSVLSAFQTQRGQCNN

SEQ ID NO: 819385 - protein, 418 aa, Homo sapiens
RRDVLLSRQGPANPEGARRVVGGQERVWPAVRRGRGGSMFRLLSWSLGRGFLRAAGRRCRGCSARLLPGLAGGPGPEVQVPPSRVAPHGRGPGLLPLLAALAWFSRPAAAEEEEQQGADGAAAEDGADEAEAEIIQLLKRAKLSIMKDEPEEAELILHDALRLAYQTDNKKAITYTYDLMANLAFIRGQLENAEQLFKATMSYLLGGGMKQEDNAIIEISLKLASIYAAQNRQEFAVAGYEFCISTLEEKIEREKELAEDIMSVEEKANTHLLLGMCLDACARYLLFSKQPSQAQRMYEKALQISEEIQGERHPQTIVLMSDLATTLDAQGRFDEAYIYMQRASDLARQINHPELHMVLSNLAAVLMHRERYTQAKEIYQEALKQAKLKKDEISVQHIREELAELSKKSRPLTNSVKL

SEQ ID NO: 819386 - protein, 418 aa, Homo sapiens; identical to SEQ ID NO: 819385

SEQ ID NO: 819387 - protein, 418 aa, Homo sapiens; identical to SEQ ID NO: 819385

SEQ ID NO: 819388 - protein, 143 aa, Homo sapiens
MCLDACARYLLFSKQPSQAQRMYEKALQISEEIQGERHPQTIVLMSDLATTLDAQGRFDEAYIYMQRASDLARQINHPELHMVLSNLAAVLMHRERYTQAKEIYQEALKQAKLKKDEISVQHIREELAELSKKSRPLTNSVKL

SEQ ID NO: 819389 - protein, 371 aa, Homo sapiens
  misc_feature (61)..(61): Xaa can be any naturally occurring amino acid
  misc_feature (63)..(64): Xaa can be any naturally occurring amino acid
  misc_feature (66)..(68): Xaa can be any naturally occurring amino acid
  misc_feature (73)..(73): Xaa can be any naturally occurring amino acid
  misc_feature (76)..(76): Xaa can be any naturally occurring amino acid
  misc_feature (78)..(78): Xaa can be any naturally occurring amino acid
  misc_feature (80)..(81): Xaa can be any naturally occurring amino acid
  misc_feature (83)..(90): Xaa can be any naturally occurring amino acid
  misc_feature (92)..(99): Xaa can be any naturally occurring amino acid
  misc_feature (101)..(101): Xaa can be any naturally occurring amino acid
  misc_feature (103)..(107): Xaa can be any naturally occurring amino acid
  misc_feature (109)..(110): Xaa can be any naturally occurring amino acid
  misc_feature (112)..(113): Xaa can be any naturally occurring amino acid
  misc_feature (116)..(116): Xaa can be any naturally occurring amino acid
  misc_feature (118)..(124): Xaa can be any naturally occurring amino acid
  misc_feature (126)..(127): Xaa can be any naturally occurring amino acid
  misc_feature (138)..(138): Xaa can be any naturally occurring amino acid
  misc_feature (143)..(144): Xaa can be any naturally occurring amino acid
  misc_feature (146)..(146): Xaa can be any naturally occurring amino acid
  misc_feature (149)..(149): Xaa can be any naturally occurring amino acid
  misc_feature (151)..(152): Xaa can be any naturally occurring amino acid
RGQGRGPGPMTSEPLPAALAWFSRPAAAEEEEQQGADGAAAEDGADEAEAEIIQLLKRAKXRXXKXXXMREEXEEXEXIXXGXXXXXXXXDXXXXXXXXYXLXXXXXFXXGXXENXGXXXXXXXGXXLGGGMKEGGNXIIGIXXEXAGXYXXQKQEFAVAGYEFCISTLEEKIEREKELAEDIMSVETGFHHVSQDGLNLLTLDPPASASQSAVITVEEKANTHLLLGMCLDACARYLLFSKQPSQAQRMYEKALQISEEIQGERHPQTIVLMSDLATTLDAQGRFDEAYIYMQRASDLARQINHPELHMVLSNLAAVLMHRERYTQAKEIYQEALKQAKLKKDEISVQHIREELAELSKKSRPLTNSVKL

SEQ ID NO: 819390 - protein, 418 aa, Homo sapiens; identical to SEQ ID NO: 819385

SEQ ID NO: 819391 - protein, 464 aa, Homo sapiens
RRDVLLSRQGPANPEGARRVVGGQERVWPAVRRGRGGSMFRLLSWSLGRGFLRAAGRRCRGCSARLLPGLAGGPGPEVQVPPSRVAPHGRGPGLLPLLAALAWFSRPAAAEEEEQQGADGAAAEDGADEAEAEIIQLLKRAKLSIMKDEPEEAELILHDALRLAYQTDNKKAITYTYDLMANLAFIRGQLENAEQLFKATMSYLLGGGMKQEDNAIIEISLKLASIYAAQNRQEFAVAGYEFCISTLEEKIEREKELAEDIMSVEEKANTHLLLGMCLDACARYLLFSKQPSQAQRMYEKALQISEEIQGERHPQTIVLMSDLATTLDAQGRFDEAYIYMQRASDLARQINHPELHMVLSNLAAVLMHRAATTVLGPSKEAKATLVMRPSLHPATTTTSGSASPTLAHTMSSVSELACIYSALTLHDNEVTITEDKINALVKAAGVNVEPFWSSLFAMALANVN

SEQ ID NO: 819392 - protein, 302 aa, Homo sapiens
RRDVLLSRQGPANPEGARRVVGGQERVWPAVRRGRGGSMFRLLSWSLGRGFLRAAGRRCRGCSARLLPGLAGGPGPEVQVPPSRVAPHGRGPGLLPLLAALAWFSRPAAAEEEEQQGADGAAAEDGADEAEAEIIQLLKRAKLSIMKDEPEEAELILHDALRLAYQTDNKKAITYTYDLMANLAFIRGQLENAEQLFKATMSYLLGGGMKQEDNAIIEISLKLASIYAAQNRQEFAVAGYEFCISTLEEKIEREKELAEDIMSGRKPIIWALPFLHKRLYFTLLRNGKRSKLGRGKVTYFAK

SEQ ID NO: 819393 - protein, 96 aa, Homo sapiens
LHDNEVTITEDKINALVKAAGVNVEPFWSSLFAMALANVNIGSLIYNVGAGGPAPAAGADQWDPAHSTAAAPAEKKVEANKEESEESDDDMGFWLF

SEQ ID NO: 819394 - protein, 295 aa, Homo sapiens
CCNPAGTNEQAIIDVLTKRSNTQRQQIAKSFKAQFGKDLTETLKSELSGKFERLIVALMYPPYRYEAKELHDAMKGLGTKEGVIIEILASRTKNQLREIMKAYEEDYGSSLEEDIQADTSGYLERILVCLLQGSRDDVSSFVDPALALQDAQDLYAAGEKIRGTDEMKFITILCTRSATHLLRVFEEYEKIANKSIEDSIKSETHGSLEEAMLTVVKCTQNLHSYFAERLYYAMKGAGTRDGTLIRNIVSRSEIDLNLIKCHFKKMYGKTLSSMIMEDTSGDYKNALLSLVGSDP

SEQ ID NO: 819395 - protein, 222 aa, Homo sapiens [sequence omitted]

SEQ ID NO: 819396 - protein, 263 aa, Homo sapiens
CCNPAGTNEQAIIDVLTKRSNTQRQQIAKSFKAQFGKDLTETLKSELSGKFERLIVALMYPPYRYEAKELHDAMKGLGTKEGVIIEILASRTKNQLREIMKAYEEDYGSSLEEDIQADTSGYLERILVCLLQGSRDDVSSFVDPALALQDAQDLYAAGEKIRGTDEMKFITILCTRSATHLLRVKCTQNLHSYFAERLYYAMKGAGTRDGTLIRNIVSRSEIDLNLIKCHFKKMYGKTLSSMIMEDTSGDYKNALLSLVGSDP

SEQ ID NO: 819397 - protein, 251 aa, Homo sapiens
FLRLRHLEKRRCGQSRRSWQSTPAGRGFCPQGLGTKEGVIIEILASRTKNQLREIMKAYEEDYGSSLEEDIQADTSGYLERILVCLLQGSRDDVSSFVDPALALQDAQDLYAAGEKIRGTDEMKFITILCTRSATHLLRVFEEYEKIANKSIEDSIKSETHGSLEEAMLTVVKCTQNLHSYFAERLYYAMKGAGTRDGTLIRNIVSRSEIDLNLIKCHFKKMYGKTLSSMIMEDTSGDYKNALLSLVGSDP

SEQ ID NO: 819398 - protein, 254 aa, Homo sapiens
MKGLGTKEGVIIEILASRTKNQLREIMKAYEEDYGSSLEEDIQADTSGYLERILVCLLQVSQPEALGSALVWESQQLHPREQPLNSATRVRGSRDDVSSFVDPALALQDAQDLYAAGEKIRGTDEMKFITILCTRSATHLLRVFEEYEKIANKSIEDSIKSETHGSLEEAMLTVVKCTQNLHSYFAERLYYAMKGAGTRDGTLIRNIVSRSEIDLNLIKCHFKKMYGKTLSSMIMEDTSGDYKNALLSLVGSDP

SEQ ID NO: 819399 - protein, 243 aa, Homo sapiens
CCNPAGTNEQAIIDVLTKRSNTQRQQIAKSFKAQFGKDLTETLKSELSGKFERLIVALMYPPYRYEAKELHDAMKGLGTKEGVIIEILASRTKNQLREIMKAYEEDYGSSLEEDIQADTSGYLERILVCLLQGSRDDVSSFVDPALALQDAQDLYAAGEKIRGTDEMKFITILCTRSATHLLRVFEEYEKIANKSIEDSIKSETHGSLEEAMLTVVKCTQNLHSYFAERLYYAMKVTVLSSSS

SEQ ID NO: 819400 - protein, 295 aa, Homo sapiens; identical to SEQ ID NO: 819394

SEQ ID NO: 819401 - protein, 295 aa, Homo sapiens; identical to SEQ ID NO: 819394

SEQ ID NO: 819402 - protein, 92 aa, Homo sapiens
TAATAEPGTSKPLLTLMRLLPTGRHQRRLQERPAEPGGQRPLRHRRTRAKTMKPESPGLLTQPRPWTQVGCEGGPSLSVFYFPISSAFQPGF

SEQ ID NO: 819403 - protein, 138 aa, Homo sapiens
GQCTLMLLVDLEYPRGSLRAVPLTCCVFEEYEKIANKSIEDSIKSETHGSLEEAMLTVVKCTQNLHSYFAERLYYAMKGAGTRDGTLIRNIVSRSEIDLNLIKCHFKKMYGKTLSSMIMEDTSGDYKNALLSLVGSDP

SEQ ID NO: 819404 - protein, 295 aa, Homo sapiens; identical to SEQ ID NO: 819394

SEQ ID NO: 819405 - protein, 452 aa, Homo sapiens
AGCCRETSCSSAAPFAAALARDPNPASPLPEHRPRLHRGPGPPARLAAAMADPKYADLPGIARNEPDVYETSDLPEDDQAEFDAELEELTSTSVEHIIVNPNAAYDKFKDKRVGTKGLDFSDRIGKTKRTGYESGEYEMLGEGLGVKETPQQKYQRLLHEVQELTTEVEKIKTTVKESATEEKLTPVLLAKQLAALKQQLVASHLEKLLGPDAAINLTDPDGALAKRLLLQLEATKNSKGGSGGKTTGTPPDSSLVTYELHSRPEQDKFSQAAKVAELEKRLTELETAVRCDQDAQNPLSAGLQGACLMETVELLQAKVSALDLAVLDQVEARLQSVLGKVNEIAKHKASVEDADTQSKVHQLYETIQRWSPIASTLPELVQRLVTIKQLHEQAMQFGQLLTHLDTTQQMIANSLKDNTTLLTQVQTTMRENLATVEGNFASIDERMKKLGK

SEQ ID NO: 819406 - protein, 463 aa, Homo sapiens
PPPPPPPPPPPSPLLLQLPPTSARSRPGLLARDPNPASPLPEHRPRLHRGPGPPARLAAAMADPKYADLPGIARNEPDVYETSDLPEDDQAEFDAELEELTSTSVEHIIVNPNAAYDKFKDKRVGTKGLDFSDRIGKTKRTGYESGEYEMLGEGLGVKETPQQKYQRLLHEVQELTTEVEKIKTTVKESATEEKLTPVLLAKQLAALKQQLVASHLEKLLGPDAAINLTDPDGALAKRLLLQLEATKNSKGGSGGKTTGTPPDSSLVTYELHSRPEQDKFSQAAKVAELEKRLTELETAVRCDQDAQNPLSAGLQGACLMETVELLQAKVSALDLAVLDQVEARLQSVLGKVNEIAKHKASVEDADTQSKVHQLYETIQRWSPIASTLPELVQRLVTIKQLHEQAMQFGQLLTHLDTTQQMIANSLKDNTTLLTQVQTTMRENLATVEGNFASIDERMKKLGK

SEQ ID NO: 819407 - protein, 328 aa, Homo sapiens
AGCCRETSCSSAAPFAAALARDPNPASPLPEHRPRLHRGPGPPARLAAAMADPKYADLPGIARNEPDVYETSDLPEDDQAEFDAELEELTSTSVEHIIVNPNAAYDKFKDKRVGTKGLDFSDRIGKTKRTGYESGEYEMLGEGLGVKETPQQKYQRLLHEVQELTTEVEKIKNPLSAGLQGACLMETVELLQAKVSALDLAVLDQVEARLQSVLGKVNEIAKHKASVEDADTQSKVHQLYETIQRWSPIASTLPELVQRLVTIKQLHEQAMQFGQLLTHLDTTQQMIANSLKDNTTLLTQVQTTMRENLATVEGNFASIDERMKKLGK

SEQ ID NO: 819408 - protein, 674 aa, Homo sapiens
MAPGQAPHQATPWRDAHPFFLLSPVMGLLSRAWSRLRGLGPLEPWLVEAVKGAALVEAGLEGEARTPLAIPHTPWGRRPEEEAEDSGGPGEDRETLGLKTSSSLPEAWGLLDDDDGMYGEREATSVPRGQGSQFADGQRAPLSPSLLIRTLQGSDKNPGEEKAEEEGVAEEEGVNKFSYPPSHRECCPAVEEEDDEEAVKKEAHRTSTSALSPGSKPSTWVSCPGEEENQATEDKRTERSKGARKTSVSPRSSGSDPRSWEYRSGEASEEKEEKAHKETGKGEAAPGPQSSAPAQRPQLKSWWCQPSDEEEGEVKALGAAEKDGEAECPPCIPPPSAFLKAWVYWPGEDTEEEEDEEEDEDSDSGSDEEEGEAEASSSTPATGVFLKSWVYQPGEDTEEEEDEDSDTGSAEDEREAETSASTPPASAFLKAWVYRPGEDTEEEEDEDVDSEDKEDDSEAALGEAESDPHPSHPDQRAHFRGWGYRPGKETEEEEAAEDWGEAEPCPFRVAIYVPGEKPPPPWAPPRLPLRLQRRLKRPETPTHDPDPETPLKARKVRFSEKVTVHFLAVWAGPAQAARQGPWEQLARDRSRFARRITQAQEELSPCLTPAARARAWARLRNPPLAPIPALTQTLPSSSVPSSPVQTTPLSQAVATPSRSSAAAAAALDLSGRRG

SEQ ID NO: 819409 - protein, 674 aa, Homo sapiens; identical to SEQ ID NO: 819408

SEQ ID NO: 819410 - protein, 584 aa, Homo sapiens
MAPGQAPHQATPWRDAHPFFLLSPVMGLLSRAWSRLRGLGPLEPWLVEAVKGAALVEAGLEGEARTPLAIPHTPWGRRPEEEAEDSGGPGEDRETLGLKTSSSLPEAWGLLDDDDGMYGEREATSVPRGQGSQFADGQRAPLSPSLLIRTLQGSDKNPGEEKAEEEGVAEEEGVNKFSYPPSHRECCPAVEEEDDEEAVKKEAHRTSTSALSPGSKPSTWVSCPGEEENQATEDKRTERSKGARKTSVSPRSSGSDPRSWEYRSGEASEEKEEKAHKETGKGEAAPGPQSSAPAQRPQLKSWWCQPSDEEEGEVKALGAAEKDGEAECPPCIPPPSAFLKAWVYRPGEDTEEEEDEDVDSEDKEDDSEAALGEAESDPHPSHPDQRAHFRGWGYRPGKETEEEEAAEDWGEAEPCPFRVAIYVPGEKPPPPWAPPRLPLRLQRRLKRPETPTHDPDPETPLKARKVRFSEKVTVHFLAVWAGPAQAARQGPWEQLARDRSRFARRITQAQEELSPCLTPAARARAWARLRNPPLAPIPALTQTLPSSSVPSSPVQTTPLSQAVATPSRSSAAAAAALDLSGRRG

SEQ ID NO: 819411 - protein, 416 aa, Homo sapiens
MAPGQAPHQATPWRDAHPFFLLSPVMGLLSRAWSRLRGLGPLEPWLVEAVKGAALVEAGLEGEARTPLAIPHTPWGRRPEEEAEDSGGPGEDRETLGLKTSSSLPEAWGLLDDDDGMYGEREATSVPRGQGSQFADGQRAPLSPSLLIRTLQGSDKNPGEEKAEEEGVAEEEGVNKFSYPPSHRECCPAVEEEDDEEAVKKEAHRTSTSALSPGSKPSTWVSCPGEEENQATEDKRTERSKGARKTSVSPRSSGSDPRSWEYRSGEASEEKEEKAHKETGKGEAAPGPQSSAPAQRPQLKSWWCQPSDEEEGMWIVRIRKMIQKQPWEKLSQTHIPPTRTRGPTSGAGDIDLEKRQRKRKLLRTGEKLSPAPSEWPSMYLERSHRLPGLLLGCPSDCKGGSSAQKPLLMIRTLRLP

SEQ ID NO: 819412 - protein, 674 aa, Homo sapiens; identical to SEQ ID NO: 819408

SEQ ID NO: 819413 - protein, 687 aa, Homo sapiens
KLYFFLPLFQPRHMAPGQAPHQATPWRDAHPFFLLSPVMGLLSRAWSRLRGLGPLEPWLVEAVKGAALVEAGLEGEARTPLAIPHTPWGRRPEEEAEDSGGPGEDRETLGLKTSSSLPEAWGLLDDDDGMYGEREATSVPRGQGSQFADGQRAPLSPSLLIRTLQGSDKNPGEEKAEEEGVAEEEGVNKFSYPPSHRECCPAVEEEDDEEAVKKEAHRTSTSALSPGSKPSTWVSCPGEEENQATEDKRTERSKGARKTSVSPRSSGSDPRSWEYRSGEASEEKEEKAHKETGKGEAAPGPQSSAPAQRPQLKSWWCQPSDEEEGEVKALGAAEKDGEAECPPCIPPPSAFLKAWVYWPGEDTEEEEDEEEDEDSDSGSDEEEGEAEASSSTPATGVFLKSWVYQPGEDTEEEEDEDSDTGSAEDEREAETSASTPPASAFLKAWVYRPGEDTEEEEDEDVDSEDKEDDSEAALGEAESDPHPSHPDQRAHFRGWGYRPGKETEEEEAAEDWGEAEPCPFRVAIYVPGEKPPPPWAPPRLPLRLQRRLKRPETPTHDPDPETPLKARKVRFSEKVTVHFLAVWAGPAQAARQGPWEQLARDRSRFARRITQAQEELSPCLTPAARARAWARLRNPPLAPIPALTQTLPSSSVPSSPVQTTPLSQAVATPSRSSAAAAAALDLSGRRG

SEQ ID NO: 819414 - protein, 648 aa, Homo sapiens
SLRLGARLGFNPAEAESPWLVEAVKGAALVEAGLEGEARTPLAIPHTPWGRRPEEEAEDSGGPGEDRETLGLKTSSSLPEAWGLLDDDDGMYGEREATSVPRGQGSQFADGQRAPLSPSLLIRTLQGSDKNPGEEKAEEEGVAEEEGVNKFSYPPSHRECCPAVEEEDDEEAVKKEAHRTSTSALSPGSKPSTWVSCPGEEENQATEDKRTERSKGARKTSVSPRSSGSDPRSWEYRSGEASEEKEEKAHKETGKGEAAPGPQSSAPAQRPQLKSWWCQPSDEEEGEVKALGAAEKDGEAECPPCIPPPSAFLKAWVYWPGEDTEEEEDEEEDEDSDSGSDEEEGEAEASSSTPATGVFLKSWVYQPGEDTEEEEDEDSDTGSAEDEREAETSASTPPASAFLKAWVYRPGEDTEEEEDEDVDSEDKEDDSEAALGEAESDPHPSHPDQRAHFRGWGYRPGKETEEEEAAEDWGEAEPCPFRVAIYVPGEKPPPPWAPPRLPLRLQRRLKRPETPTHDPDPETPLKARKVRFSEKVTVHFLAVWAGPAQAARQGPWEQLARDRSRFARRITQAQEELSPCLTPAARARAWARLRNPPLAPIPALTQTLPSSSVPSSPVQTTPLSQAVATPSRSSAAAAAALDLSGRRG

SEQ ID NO: 819415 - protein, 566 aa, Homo sapiens
ERVMRLTEDVDSEDKEDDSEAALGEAESDPHPSHPDQRAHFRGWGYRPGKETEEEEAAEDWGEAEPCPFRVGIYDRECCPAVEEEDDEEAVKKEAHRTSTSALSPGSKPSTWVSCPGEEENQATEDKRTERSKGARKTSVSPRSSGSDPRSWEYRSGEASEEKEEKAHKETGKGEAAPGPQSSAPAQRPQLKSWWCQPSDEEEGEVKALGAAEKDGEAECPPCIPPPSAFLKAWVYWPGEDTEEEEDEEEDEDSDSGSDEEEGEAEASSSTPATGVFLKSWVYQPGEDTEEEEDEDSDTGSAEDEREAETSASTPPASAFLKAWVYRPGEDTEEEEDEDVDSEDKEDDSEAALGEAESDPHPSHPDQRAHFRGWGYRPGKETEEEEAAEDWGEAEPCPFRVAIYVPGEKPPPPWAPPRLPLRLQRRLKRPETPTHDPDPETPLKARKVRFSEKVTVHFLAVWAGPAQAARQGPWEQLARDRSRFARRITQAQEELSPCLTPAARARAWARLRNPPLAPIPALTQTLPSSSVPSSPVQTTPLSQAVATPSRSSAAAAAALDLSGRRG

SEQ ID NO: 819416 - protein, 418 aa, Homo sapiens
RYPAPPSPGEASEEKEEKAHKETGKGEAAPGPQSSAPAQRPQLKSWWCQPSDEEEGEVKALGAAEKDGEAECPPCIPPPSAFLKAWVYWPGEDTEEEEDEEEDEDSDSGSDEEEGEAEASSSTPATGVFLKSWVYQPGEDTEEEEDEDSDTGSAEDEREAETSASTPPASAFLKAWVYRPGEDTEEEEDEDVDSEDKEDDSEAALGEAESDPHPSHPDQRAHFRGWGYRPGKETEEEEAAEDWGEAEPCPFRVAIYVPGEKPPPPWAPPRLPLRLQRRLKRPETPTHDPDPETPLKARKVRFSEKVTVHFLAVWAGPAQAARQGPWEQLARDRSRFARRITQAQEELSPCLTPAARARAWARLRNPPLAPIPALTQTLPSSSVPSSPVQTTPLSQAVATPSRSSAAAAAALDLSGRRG

SEQ ID NO: 819417 - protein, 611 aa, Homo sapiens
MAPGQAPHQATPWRDAHPFFLLSPVMGLLSRAWSRLRGLGPLEPWLVEAVKGAALVEAGLEGEARTPLAIPHTPWGRRPEEEAEDSGGPGEDRETLGLKTSSSLPEAWGLLDDDDGMYGEREATSVPRGQGSQFADGQRAPLSPSLLIRTLQGSDKNPGEEKAEEEGVAEEEGVNKFSYPPSHRECCPAVEEEDDEEAVKKEAHRTSTSALSPGSKPSTWVSCPGEEENQATEDKRTERSKGARKTSVSPRSSGSDPRSWEYRSGEASEEKEEKAHKETGKGEAAPGPQSSAPAQRPQLKSWWCQPSDEEEGEVKALGAAEKDGEAECPPCIPPPSAFLKAWVYWPGEDTEEEEDEEEDEDSDSGSDEEEGEAEASSSTPATGVFLKSWVYQPGEDTEEEEDEDSDTGSAEDEREAETSASTPPASAFLKAWVYRPGEDTEEEEDEDVDSEDKEDDSEAALGEAESDPHPSHPDQRAHFRGWGYRPGKETEEEEAAEDWGEAEPCPFRVAIYVPGEKPPPPWAPPRLPLRLQRRLKRPETPTHDPDPETPLKARKVRFSEKVTVHFLAVWAGPAQAARQGPWEQLARDRSRFARRITQEIRPHICLLYTHP

SEQ ID NO: 819418 - protein, 633 aa, Homo sapiens
MAPGQAPHQATPWRDAHPFFLLSPVMGLLSRAWSRLRGLGPLEPWLVEAVKGAALVEAGLEGEARTPLAIPHTPWGRRPEEEAEDSGGPGEDRETLGLKTSSSLPEAWGLLDDDDGMYGEREATSVPRGQGSQFADGQRAPLSPSLLIRTLQGSDKNPGEEKAEEEGVAEEEGVNKFSYPPSHRECCPAVEEEDDEEAVKKEAHRTSTSALSPGSKPSTWVSCPGEEENQATEDKRTERSKGARKTSVSPRSSGSDPRSWEYRSGEASEEKEEKAHKETGKGEAAPGPQSSAPAQRPQLKSWWCQPSDEEEGEVKALGAAEKDGEAECPPCIPPPSAFLKAWVYWPGEDTEEEEDEEEDEDSDSGSDEEEGEAEASSSTPATGVFLKSWVYQPGEDTEEEEDEDSDTGSAEDEREAETSASTPPASAFLKAWVYRPGEDTEEEEDEDVDSEDKEDDSEAALGEAESDPHPSHPDQRAHFRGWGYRPGKETEEEEAAEDWGEAEPCPFRVAIYVPGEKPPPPWAPPRLPLRLQRRLKRPETPTHDPDPETPLKARKVRFSEKVTVHFLAVWAGPAQAARQGPWEQLARDRSRFARRITQASSPVQTTPLSQAVATPSRSSAAAAAALDLSGRRG

SEQ ID NO: 819419 - protein, 360 aa, Homo sapiens
MAPGQAPHQATPWRDAHPFFLLSPVMGLLSRAWSRLRGLGPLEPWLVEAVKGAALVEAGLEGEARTPLAIPHTPWGRRPEEEAEDSGGPGEDRETLGLKTSSSLPEAWGLLDDDDGMYGEREATSVPRGQGSQFADGQRAPLSPSLLIRTLQGSDKNPGEEKAEEEGVAEEEGVNKFSYPPSHRECCPAVEEEDDEEAVKKEAHRTSTSALSPGSKPSTWVSCPGEEENQATEDKRTERSKGARKTSVSPRSSGSDPRSWEYRSGEASEEKEEKAHKETGKGEAAPGPQSSAPAQRPQLKSWWCQPSDEEEGEVKALGAAEKDGEAECPPCIPPPSAFLKAWVYWPGEDTEEEEDEPRRS

SEQ ID NO: 819420 - protein, 456 aa, Homo sapiens
MAPGQAPHQATPWRDAHPFFLLSPVMGLLSRAWSRLRGLGPLEPWLVEAVKGAALVEAGLEGEARTPLAIPHTPWGRRPEEEAEDSGGPGEDRETLGLKTSSSLPEAWGLLDDDDGMYGEREATSVPRGQGSQFADGQRAPLSPSLLIRTLQGSDKNPGEEKAEEEGVAEEEGVNKFSYPPSHRECCPAVEEEDDEEAVKKEAHRTSTSALSPGSKPSTWVSCPGEEENQATEDKRTERSKGARKTSVSPRSSGSDPRSWEYRSGEASEEKEEKAHKETGKGEAAPGPQSSAPAQRPQLKSWWCQPSDEEEGEVKALGAAEKDGEAECPPCIPPPSAFLKAWVYRPGEDTEEEEDEDVDSEDKEDDSEAALGEAESDPHPSQEELSPCLTPAARARAWARLRNPPLAPIPALTQTLPSSSVPSSPVQTTPLSQAVATPSRSSAAAAAALDLSGRRG

SEQ ID NO: 819421 - protein, 401 aa, Homo sapiens
MAPGQAPHQATPWRDAHPFFLLSPVMGLLSRAWSRLRGLGPLEPWLVEAVKGAALVEAGLEGEARTPLAIPHTPWGRRPEEEAEDSGGPGEDRETLGLKTSSSLPEAWGLLDDDDGMYGEREATSVPRGQGSQFADGQRAPLSPSLLIRTLQGSDKNPGEEKAEEEGVAEEEGVNKFSYPPSHRECCPAVEEEDDEEAVKKEAHRTSTSALSPGSKPSTWVSCPGEEENQATEDKRTERSKGARKTSVSPRSSGSDPRSWEYRSGEASEEKEEKAHKETGKGEAAPGPQSSAPAQRPQLKSWWCQPSDEEEGEVKALGAAEKDGEAQEELSPCLTPAARARAWARLRNPPLAPIPALTQTLPSSSVPSSPVQTTPLSQAVATPSRSSAAAAAALDLSGRRG

SEQ ID NO: 819422 - protein, 321 aa, Homo sapiens
IRGSPEAQGRRGILTARRSVDDLWWRRTEKEVAEAGHIERRCNRGSAQRWSQVLEKAEDEREAETSASTPPASAFLKAWVYRPGEDTEEEEDEDVDSEDKEDDSEAALGEAESDPHPSHPDQRAHFRGWGYRPGKETEEEEAAEDWGEAEPCPFRVAIYVPGEKPPPPWAPPRLPLRLQRRLKRPETPTHDPDPETPLKARKVRFSEKVTVHFLAVWAGPAQAARQGPWEQLARDRSRFARRITQAQEELSPCLTPAARARAWARLRNPPLAPIPALTQTLPSSSVPSSPVQTTPLSQAVATPSRSSAAAAAALDLSGRRG

SEQ ID NO: 819423 - protein, 238 aa, Homo sapiens
SLRLVRGWVLDVDSEDKEDDSEAALGEAESDPHPSHPDQRAHFRGWGYRPGKETEEEEAAEDWGEAEPCPFRVAIYVPGEKPPPPWAPPRLPLRLQRRLKRPETPTHDPDPETPLKARKVRFSEKVTVHFLAVWAGPAQAARQGPWEQLARDRSRFARRITQAQEELSPCLTPAARARAWARLRNPPLAPIPALTQTLPSSSVPSSPVQTTPLSQAVATPSRSSAAAAAALDLSGRRG

SEQ ID NO: 819424 - protein, 392 aa, Homo sapiens
MAPGQAPHQATPWRDAHPFFLLSPVMGLLSRAWSRLRGLGPLEPWLVEAVKGAALVEAGLEGEARTPLAIPHTPWGRRPEEEAEDSGGPGEDRETLGLKTSSSLPEAWGLLDDDDGMYGEREATSVPRGQGSQFADGQRAPLSPSLLIRTLQGSDKNPGEEKAEEEGVAEEEGVNKFSYPPSHRECCPAVEEEDDEEAVKKEAHRTSTSALSPGSKPSTWVSCPGEEENQATEDKRTERSKGARKTSVSPRSSGSDPRSWEYRSGEASEEKEEKAHKETGKGEAAPGPQSSAPAQRPQLKSWWCQPSDEEEGEVKALGAAEKDGEAECPPCIPPPSAFLKAWVYWPGEDTEEEEDENQATEDKRTERSKGARKTSVSPRSSGYRPQSWDIFM

SEQ ID NO: 819425 - protein, 297 aa, Homo sapiens
MAPGQAPHQATPWRDAHPFFLLSPVMGLLSRAWSRLRGLGPLEPWLVEAVKGAALVEAGLEGEARTPLAIPHTPWGRRPEEEAEDSGGPGEDRETLGLKTSSSLPEAWGLLDDDDGMYGEREATSVPRGQGSQFADGQRAPLSPSLLIRTLQGSDKNPGEEKAEEEGVAEEEGVNKFSYPPSHRECCPAVEEEDDEEAVKKEAHRTSTSALSPGSKPSTWVSCPGEEENQATEDKRTERSKGARKTSVSPRSSGSDPRSWEYRSGEASEEKEEKAHKETGKGEAAPGPQSFPSFFVC

SEQ ID NO: 819426 - protein, 238 aa, Homo sapiens
MAPGQAPHQATPWRDAHPFFLLSPVMGLLSRAWSRLRGLGPLEPWLVEAVKGAALVEAGLEGEARTPLAIPHTPWGRRPEEEAEDSGGPGEDRETLGLKTSSSLPEAWGLLDDDDGMYGEREATSVPRGQGSQFADGQRAPLSPSLLIRTLQGSDKNPGEEKAEEEGVAEEEGVNKFSYPPSHRECCPAVEEEDDEEAVKKEAHRTSTSALSPGSKPSQLRKITCPQVGRDMINSSSL

SEQ ID NO: 819427 - protein, 158 aa, Homo sapiens
TRLDNTPGVMVDKKLVNSLPIRIPVAVCISCLCPHVCPQVRFSEKVTVHFLAVWAGPAQAARQGPWEQLARDRSRFARRITQAQEELSPCLTPAARARAWARLRNPPLAPIPALTQTLPSSSVPSSPVQTTPLSQAVATPSRSSAAAAAALDLSGRRG

SEQ ID NO: 819428 - protein, 458 aa, Homo sapiens
MELPLGRCDDSRTWDDDSDPESETDPDAQAKAYVARVLSPPKSGLAFSRPSQLSTPAASPSASEPRAASRVSAVSEPGLLSLPPELLLEICSYLDARLVLHVLSRVCHALRDLVSDHVTWRLRALRRVRAPYPVVEEKNFDWPAACIALEQHLSRWAEDGRWVEYFCLAEGHVASVDSVLLLQGGSLCLSGSRDRNVNLWDLRQLGTESNQVLIKTLGTKRNSTHEGWVWSLAAQDHRVCSGSWDSTVKLWDMAADGQQFGEIKASSAVLCLSYLPDILVTGTYDKKVTIYDPRAGPALLKHQQLHSRPVLTLLADDRHIISGSEDHTLVVVDRRANSVLQRLQLDSYLLCMSYQEPQLWAGDNQGLLHVFANRNGCFQLIRSFDVGHSFPITGIQYSVGALYTTSTDKTIRVHVPTDPPRTICTRRHDNGLNRVCAEGNLVVAGSGDLSLEVWRLQA

SEQ ID NO: 819429 - protein, 458 aa, Homo sapiens; identical to SEQ ID NO: 819428

SEQ ID NO: 819430 - protein, 458 aa, Homo sapiens; identical to SEQ ID NO: 819428

SEQ ID NO: 819431 - protein, 501 aa, Homo sapiens
MELPLGRCDDSRTWDDDSDPESETDPDAQAKAYVARVLSPPKSGLAFSRPSQLSTPAASPSASEPRAASRVSAVSEPGLLSLPPELLLEICSYLDARLVLHVLSRVCHALRDLVSDHVTWRLRALRRVRAPYPVVEEKNFDWPAACIALEQHLSRWAEDGRWVEYFCLAEGHVASVDSVLLLQGGSLCLSGSRDRNVNLWDLRQLGTESNQVLIKTLGTKRNSTHEGWVWSLAAQDHRVCSGSWDSTVKLWDMAADGQQFGEIKASSAVLCLSYLPDILVTGTYDKKVTIYDPRAGPALLKHQQLHSRPVLTLLADDRHIISGSEDHTLVVVDRRANSVLQRLQLDSYLLCMSYQEPQLWAGDNQGLLHVFANRNGCFQLIRAAGAPAPDCPSPRASFLPEPLVVWGRAGLGRASTECCLILLLQSFDVGHSFPITGIQYSVGALYTTSTDKTIRVHVPTDPPRTICTRRHDNGLNRVCAEGNLVVAGSGDLSLEVWRLQA

SEQ ID NO: 819432 - protein, 458 aa, Homo sapiens; identical to SEQ ID NO: 819428

SEQ ID NO: 819433 - protein, 458 aa, Homo sapiens; identical to SEQ ID NO: 819428

SEQ ID NO: 819434 - protein, 458 aa, Homo sapiens; identical to SEQ ID NO: 819428

SEQ ID NO: 819435 - protein, 295 aa, Homo sapiens
MSPGGYARYAAYARPTQWWKGGSLCLSGSRDRNVNLWDLRQLGTESNQVLIKTLGTKRNSTHEGWVWSLAAQDHRVCSGSWDSTVKLWDMAADGQQFGEIKASSAVLCLSYLPDILVTGTYDKKVTIYDPRAGPALLKHQQLHSRPVLTLLADDRHIISGSEDHTLVVVDRRANSVLQRLQLDSYLLCMSYQEPQLWAGDNQGLLHVFANRNGCFQLIRSFDVGHSFPITGIQYSVGALYTTSTDKTIRVHVPTDPPRTICTRRHDNGLNRVCAEGNLVVAGSGDLSLEVWRLQA

SEQ ID NO: 819436 - protein, 250 aa, Homo sapiens
  misc_feature (4)..(4): Xaa can be any naturally occurring amino acid
ALDXPPVCQALALTNRPGGWVWSLAAQDHRVCSGSWDSTVKLWDMAADGQQFGEIKASSAVLCLSYLPDILVTGTYDKKVTIYDPRAGPALLKHQQLHSRPVLTLLADDRHIISGSEDHTLVVVDRRANSVLQRLQLDSYLLCMSYQEPQLWAGDNQGLLHVFANRNGCFQLIRSFDVGHSFPITGIQYSVGALYTTSTDKTIRVHVPTDPPRTICTRRHDNGLNRVCAEGNLVVAGSGDLSLEVWRLQA

SEQ ID NO: 819437 - protein, 693 aa, Homo sapiens
MAQGSHQIDFQVLHDLRQKFPEVPEVVVSRCMLQNNNNLDACCAVLSQESTRYLYGEGDLNFSDDSGISGLRNHMTSLNLDLQSQNIYHHGREGSRMNGSRTLTHSISDGQLQGGQSNSELFQQEPQTAPAQVPQGFNVFGMSSSSGASNSAPHLGFHLGSKGTSSLSQQTPRFNPIMVTLAPNIQTGRNTPTSLHIHGVPPPVLNSPQGNSIYIRPYITTPGGTTRQTQQHSGWVSQFNPMNPQQVYQPSQPGPWTTCPASNPLSHTSSQQPNQQGHQTSHVYMPISSPTTSQPPTIHSSGSSQSSAHSQYNIQNISTGPRKNQIEIKLEPPQRNNSSKLRSSGPRTSSTSSSVNSQTLNRNQPTVYIAASPPNTDELMSRSQPKVYISANAATGDEQVMRNQPTLFISTNSGASAASRNMSGQVSMGPAFIHHHPPKSRAIGNNSATSPRVVVTQPNTKYTFKITVSPNKPPAVSPGVVSPTFELTNLLNHPDHYVETENIQHLTDPTLAHVDRISETRKLSMGSDDAAYTQALLVHQKARMERLQRELEIQKKKLDKLKSEVNEMENNLTRRRLKRSNSISQIPSLEEMQQLRSCNRQLQIDIDCLTKEIDLFQARGPHFNPSAIHNFYDNIGFVGPVPPKPKDQRSIIKTPKTQDTEDDEGAQWNCTACTFLNHPALIRCEQCEMPRHF

SEQ ID NO: 819438 - protein, 693 aa, Homo sapiens; identical to SEQ ID NO: 819437

SEQ ID NO: 819439 - protein, 693 aa, Homo sapiens; identical to SEQ ID NO: 819437

SEQ ID NO: 819440 - protein, 536 aa, Homo sapiens
MAQGSHQIDFQVLHDLRQKFPEVPEVVVSRCMLQNNNNLDACCAVLSQESTRYLYGEGDLNFSDDSGISGLRNHMTSLNLDLQSQNIYHHGREGSRMNGSRTLTHSISDGQLQGGQSNSELFQQEPQTAPAQVPQGFNVFGMSSSSGASNSAPHLGFHLGSKGTSSLSQQTPRFNPIMVTLAPNIQTGRNTPTSLHIHGVPPPVLNSPQGNSIYIRPYITTPGGTTRQTQQHSGWVSQFNPMNPQQVYQPSQPGPWTTCPASNPLSHTSSQQPNQQGHQTSHVYMPISSPTTSQPPTIHSSGSSQSSAHSQYNIQNISTGPRKNQIEIKLEPPQRNNSSKLRSSGPRTSSTSSSVNSQTLNRNQPTVYIAASPPNTDELMSRSQPKVYISANAATGDEQVMRNQPTLFISTNSGASAASRNMSGQVSMGPAFIHHHPPKSRAIGNNSATSPRVVVTQPNTKYTFKITVSPNKPPAVSPGVVSPTFELTNLLNHPDHYVETENIQHLTDPTLAHVDRISETRKLSMGSDDAAYTQDI

SEQ ID NO: 819441 - protein, 693 aa, Homo sapiens; identical to SEQ ID NO: 819437

SEQ ID NO: 819442 - protein, 546 aa, Homo sapiens
MIALHSIVQSIMELSRPFLNDTRQSYAPNSWLILESYYSMTGPVLFPTLPHGVPPPVLNSPQGNSIYIRPYITTPGGTTRQTQQHSGWVSQFNPMNPQQVYQPSQPGPWTTCPASNPLSHTSSQQPNQQGHQTSHVYMPISSPTTSQPPTIHSSGSSQSSAHSQYNIQNISTGPRKNQIEIKLEPPQRNNSSKLRSSGPRTSSTSSSVNSQTLNRNQPTVYIAASPPNTDELMSRSQPKVYISANAATGDEQVMRNQPTLFISTNSGASAASRNMSGQVSMGPAFIHHHPPKSRAIGNNSATSPRVVVTQPNTKYTFKITVSPNKPPAVSPGVVSPTFELTNLLNHPDHYVETENIQHLTDPTLAHVDRISETRKLSMGSDDAAYTQALLVHQKARMERLQRELEIQKKKLDKLKSEVNEMENNLTRRRLKRSNSISQIPSLEEMQQLRSCNRQLQIDIDCLTKEIDLFQARGPHFNPSAIHNFYDNIGFVGPVPPKPKDQRSIIKTPKTQDTEDDEGAQWNCTACTFLNHPALIRCEQCEMPRHF

SEQ ID NO: 819443 - protein, 693 aa, Homo sapiens; identical to SEQ ID NO: 819437

SEQ ID NO: 819444 - protein, 693 aa, Homo sapiens; identical to SEQ ID NO: 819437

SEQ ID NO: 819445 - protein, 595 aa, Homo sapiens
MAQGSHQIDFQVLHDLRQKFPEVPEVVVSRCMLQNNNNLDACCAVLSQESTRYLYGEGDLNFSDDSGISGLRNHMTSLNLDLQSQNIYHHGREGSRMNGSRTLTHSISDGQLQGGQSNSELFQQEPQTAPAQVPQGFNVFGMSSSSGASNSAPHLGFHLGSKGTSSLSQQTPRFNPIMVTLAPNIQTGRNTPTSLHIHGVPPPVLNSPQGNSIYIRPYITTPGGTTRQTQQHSGWVSQFNPMNPQQVYQPSQPGPWTTCPASNPLSHTSSQQPNQQGHQTSHVYMPISSPTTSQPPTIHSSGSSQSSAHSQYNIQNISTGPRKNQIEIKLEPPQRNNSSKLRSSGPRTSSTSSSVNSQTLNRNQPTVYIAASPPNTDELMSRSQPKVYISANAATGDEQVMRNQPTLFISTNSGASAASRNMSGQVSMGPAFIHHHPPKSRAIGNNSATSPRVVVTQPNTKYTFKITVSPNKPPAVSPGVVSPTFELTNLLNHPDHYVETENIQHLTDPTLAHVDRISETRKLSMGSDDAAYTQALLVHQKARMERLQRELEIQKKKLDKLKSEVNEMENNLTRRRLKRSNSISQIPSVSLYVTV

SEQ ID NO: 819446 - protein, 148 aa, Homo sapiens
MAQGSHQIDFQVLHDLRQKFPEVPEVVVSRCMLQNNNNLDACCAVLSQESTRYLYGEGDLNFSDDSGISGLRNHMTSLNLDLQSQNIYHHGREGSRMNGSRTLTHSISEGPGEHETDDETSTSEGEAPETTRQMRNQHQLRGGPETLR

SEQ ID NO: 819447 - protein, 1203 aa, Homo sapiens
MDKLPPSMRKRLYSLPQQVGAKAWIMDEEEDAEEEGAGGRQDPSRRSIRLRPLPSPSPSAAAGGTESRSSALGAADSEGPARGAGKSSTNGDCRRFRGSLASLGSRGGGSGGTGSGSSHGHLHDSAEERRLIAEGDASPGEDRTPPGLAAEPERPGASAQPAASPPPPQQPPQPASASCEQPSVDTAIKVEGGAAAGDQILPEAEVRLGQAGFMQRQFGAMLQPGVNKFSLRMFGSQKAVEREQERVKSAGFWIIHPYSDFRFYWDLTMLLLMVGNLIIIPVGITFFKDENTTPWIVFNVVSDTFFLIDLVLNFRTGIVVEDNTEIILDPQRIKMKYLKSWFMVDFISSIPVDYIFLIVETRIDSEVYKTARALRIVRFTKILSLLRLLRLSRLIRYIHQWEEIFHMTYDLASAVVRIVNLIGMMLLLCHWDGCLQFLVPMLQDFPDDCWVSINNMVNNSWGKQYSYALFKAMSHMLCIGYGRQAPVGMSDVWLTMLSMIVGATCYAMFIGHATALIQSLDSSRRQYQEKYKQVEQYMSFHKLPPDTRQRIHDYYEHRYQGKMFDEESILGELSEPLREEIINFNCRKLVASMPLFANADPNFVTSMLTKLRFEVFQPGDYIIREGTIGKKMYFIQHGVVSVLTKGNKETKLADGSYFGEICLLTRGRRTASVRADTYCRLYSLSVDNFNEVLEEYPMMRRAFETVALDRLDRIGKKNSILLHKVQHDLNSGVFNYQENEIIQQIVQHDREMAHCAHRVQAAASATPTPTPVIWTPLIQAPLQAAAATTSVAIALTHHPRLPAAIFRPPPGSGLGNLGAGQTPRHLKRLQSLIPSALGSASPASSPSQVDTPSSSSFHIQQLAGFSAPAGLSPLLPSSSSSPPPGACGSPSAPTPSAGVAATTIAGFGHFHKALGGSLSSSDSPLLTPLQPGARSPQAAQPSPAPPGARGGLGLPEHFLPPPPSSRSPSSSPGQLGQPPGELSLGLATGPLSTPETPPRQPEPPSLVAGASGGASPVGFTPRGGLSPPGHSPGPPRTFPSAPPRASGSHGSLLLPPASSPPPPQVPQRRGTPPLTPGRLTQDLKLISASQPALPQDGAQTLRRASPHSSGESMAAFPLFPRAGGGSGGSGSSGGLGPPGRPYGAIPGQHVTLPRKTSSGSLPPPLSLFGARATSSGGPPLTAGPQREPGARPEPVRSKLPSNL

SEQ ID NO: 819448 - protein, 343 aa, Homo sapiens
MAGGRPHLKRSFSIIPCFVFVESVLLGIVILLAYRLEFTDTFPVHTQGFFCYDSTYAKPYPGPEAASRVPPALVYALVTAGPTLTILLGELARAFFPAPPSAVPVIGESTIVSGACCRFSPPVRRLVRFLGVYSFGLFTTTIFANAGQVVTGNPTPHFLSVCRPNYTALGCLPPSPDRPGPDRFVTDQGACAGSPSLVAAARRAFPCKDAALCAYAVTYTAMYVTLVFRVKGSRLVKPSLCLALLCPAFLVGVVRVAEYRNHWSDVLAGFLTGAAIATFLVTCVVHNFQSRPPSGRRLSPWEDLGQAPTMDSPLEKNPRSAGRIRHRHGSPHPSRRTAPAVAT

SEQ ID NO: 819449 - protein, 299 aa, Homo sapiens
MAGGRPHLKRSFSIIPCFVFVESVLLGIVILLAYRLEFTDTFPVHTQGFFCYDSTYAKPYPGPEAASRVPPALVYALVTAGPTLTILLGELARAFFPAPPSAVPVIGESTIVSGACCRFSPPVRRLVRFLGVYSFGLFTTTIFANAGQVVTGNPTPHFLSVCRPNYTALGCLPPSPDRPGPDRFVTDQGACAGSPSLVAAARRAFPCKDAALCAYAVTYTAGHPLAEGSLPGRTWAKPPPWIAPSKRTRGLQAAFDTGTAHPIQVAELRPPWPPDPQLCLLQGPSHVFVAPCAPSSIEV

SEQ ID NO: 819450 - protein, 343 aa, Homo sapiens; identical to SEQ ID NO: 819448

SEQ ID NO: 819451 - protein, 343 aa, Homo sapiens; identical to SEQ ID NO: 819448

SEQ ID NO: 819452 - protein, 318 aa, Homo sapiens
MAGGRPHLKRSFSIIPCFVFVEGFFCYDSTYAKPYPGPEAASRVPPALVYALVTAGPTLTILLGELARAFFPAPPSAVPVIGESTIVSGACCRFSPPVRRLVRFLGVYSFGLFTTTIFANAGQVVTGNPTPHFLSVCRPNYTALGCLPPSPDRPGPDRFVTDQGACAGSPSLVAAARRAFPCKDAALCAYAVTYTAMYVTLVFRVKGSRLVKPSLCLALLCPAFLVGVVRVAEYRNHWSDVLAGFLTGAAIATFLVTCVVHNFQSRPPSGRRLSPWEDLGQAPTMDSPLEKNPRSAGRIRHRHGSPHPSRRTAPAVAT

SEQ ID NO: 819453 - protein, 376 aa, Homo sapiens
MAGGRPHLKRSFSIIPCFVFVESVLLGIVILLAYRLEFTDTFPVHTQGFFCYDSTYAKPYPGPEAASRVPPALVYALVTAGPTLTVDNEDLLGGRWAGKGGGGDGLEGQKTPSWSCPQILLGELARAFFPAPPSAVPVIGESTIVSGACCRFSPPVRRLVRFLGVYSFGLFTTTIFANAGQVVTGNPTPHFLSVCRPNYTALGCLPPSPDRPGPDRFVTDQGACAGSPSLVAAARRAFPCKDAALCAYAVTYTAMYVTLVFRVKGSRLVKPSLCLALLCPAFLVGVVRVAEYRNHWSDVLAGFLTGAAIATFLVTCVVHNFQSRPPSGRRLSPWEDLGQAPTMDSPLEKNPRSAGRIRHRHGSPHPSRRTAPAVAT

SEQ ID NO: 819454 - protein, 122 aa, Homo sapiens
MYVTLVFRVKGSRLVKPSLCLALLCPAFLVGVVRVAEYRNHWSDVLAGFLTGAAIATFLVTCVVHNFQSRPPSGRRLSPWEDLGQAPTMDSPLEKNPRSAGRIRHRHGSPHPSRRTAPAVAT

SEQ ID NO: 819455 - protein, 133 aa, Homo sapiens
KKVCAARPGPADRVSVFASASLAGSPSVHPAAPGQSRRSGGSGGGGLDASECRGWGAGPRVPTLACLGLSFHICTMGVTIRPPSGRRLSPWEDLGQAPTMDSPLEKNPRSAGRIRHRHGSPHPSRRTAPAVAT

SEQ ID NO: 819456 - protein, 343 aa, Homo sapiens; identical to SEQ ID NO: 819448

SEQ ID NO: 819457 - protein, 41 aa, Homo sapiens
MSSLWLWPVGPRGPLAPSVCLFVSGTRGLQAAFDTGTAHPI

SEQ ID NO: 819458 - protein, 496 aa, Homo sapiens
RRLLPAPRPPAPGGARARAPPPPLLQQQLLCRVVAGARAGVPSLPPSPAMSQGSPGDWAPLDPTPGPPASPNPFVHELHLSRLQRVKFCLLGALLAPIRVLLAFIVLFLLWPFAWLQVAGLSEEQLQEPITGWRKTVCHNGVLGLSRLLFFLLGFLRIRVRGQRASRLQAPVLVAAPHSTFFDPIVLLPCDLPKVVSRAENLSVPVIGALLRFNQAILVSRHDPASRRRVVEEVRRRATSGGKWPQVLFFPEGTCSNKKALLKFKPGAFIAGVPVQPVLIRYPNSLDTTSWAWRGPGVLKVLWLTASQPCSIVDVEFLPVYHPSPEESRDPTLYANNVQRVMAQALGIPATECEFVGSLPVIVVGRLKVALEPQLWELGKVLRKAGLSAGYVDAGAEPGRSRMISQEEFARQLQLSDPQTVAGAFGYFQQDTKGLVDFRDVALALAALDGGRSLEELTRLAFEVMGGGGGGGCLVAMLTPLQEAYFGMLFPVASRY

SEQ ID NO: 819459 - protein, 573 aa, Homo sapiens
RRLLPAPRPPAPGGARARAPPPPLLQQQLLCRVVAGARAGVPSLPPSPAMSQGSPGDWAPLDPTPGPPASPNPFVHELHLSRLQRVKFCLLGALLAPIRVLLAFIVLFLLWPFAWLQVAGLSEEQLQEPITGWRKTVCHNGVLGLSRLLFFLLGFLRIRVRGQRASRLQAPVLVAAPHSTFFDPIVLLPCDLPKVVSRAENLSVPVIGALLRFNQAILVSRHDPASRRRVVEEVRRRATSGGKWPQVLFFPEGTCSNKKALLKFKPGAFIAGVPVQPVLIRYPNSLDTTSWAWRGPGVLKVLWLTASQPCSIVDVEFLPVYHPSPEESRDPTLYANNVQRVMAQALGIPATECEFVGSLPVIVVGRLKVALEPQLWELGKVLRKAGLSAGYVDAGAEPGRSRMISQEEFARQLQLSDPQTVAGAFGYFQQDTKGLVDFRDVALALAALDGGRSLEELTRLAFELFAEEQAEGPNRLLYKDGFSTILHLLLGSPHPAATALHAELCQAGSSQGLSLCQFQNFSLHDPLYGKLFSTYLRPPHTSRGTSQTPNASSPGNPTALANGTVQAPKQKGD

SEQ ID NO: 819460 - protein, 439 aa, Homo sapiens
GVGSRGAPGPPASPNPFVHELHLSRLQRVKFCLLGALLAPIRVLLAFIVLFLLWPFAWLQVAGLSEEQLQEPITGWRKTVCHNGVLGLSRLLFFLLGFLRIRVRGQRASRLQAPVLVAAPHSTFFDPIVLLPCDLPKVVSRAENLSVPVIGALLRFNQAILVSRHDPASRRRVVEEVRRRATSGGKWPQVLFFPEGTCSNKKALLKFKPGAFIAGVPVQPVLIRYPNSLDTTSWAWRGPGVLKVLWLTASQPCSIVDVEFLPVYHPSPEESRDPTLYANNVQRVMAQALGIPATECEFVGSLPVIVVGRLKVALEPQLWELGKVLRKAGLSAGYVDAGAEPGRSRMISQEEFARQLQLSDPQTVAGAFGYFQQDTKGLVDFRDVALALAALDGGRSLEELTRLAFEVMGGGGGGGCLVAMLTPLQEAYFGMLFPVASRY

SEQ ID NO: 819461 - protein, 435 aa, Homo sapiens
AAVGQGVLERTLRAWAIDKLEDVEKLFCLLGALLAPIRVLLAFIVLFLLWPFAWLQVAGLSEEQLQEPITGWRKTVCHNGVLGLSRLLFFLLGFLRIRVRGQRASRLQAPVLVAAPHSTFFDPIVLLPCDLPKVVSRAENLSVPVIGALLRFNQAILVSRHDPASRRRVVEEVRRRATSGGKWPQVLFFPEGTCSNKKALLKFKPGAFIAGVPVQPVLIRYPNSLDTTSWAWRGPGVLKVLWLTASQPCSIVDVEFLPVYHPSPEESRDPTLYANNVQRVMAQALGIPATECEFVGSLPVIVVGRLKVALEPQLWELGKVLRKAGLSAGYVDAGAEPGRSRMISQEEFARQLQLSDPQTVAGAFGYFQQDTKGLVDFRDVALALAALDGGRSLEELTRLAFEVMGGGGGGGCLVAMLTPLQEAYFGMLFPVASRY

SEQ ID NO: 819462 - protein, 432 aa, Homo sapiens
VWGAGVGRTREDRKMGPFEPWQKFCLLGALLAPIRVLLAFIVLFLLWPFAWLQVAGLSEEQLQEPITGWRKTVCHNGVLGLSRLLFFLLGFLRIRVRGQRASRLQAPVLVAAPHSTFFDPIVLLPCDLPKVVSRAENLSVPVIGALLRFNQAILVSRHDPASRRRVVEEVRRRATSGGKWPQVLFFPEGTCSNKKALLKFKPGAFIAGVPVQPVLIRYPNSLDTTSWAWRGPGVLKVLWLTASQPCSIVDVEFLPVYHPSPEESRDPTLYANNVQRVMAQALGIPATECEFVGSLPVIVVGRLKVALEPQLWELGKVLRKAGLSAGYVDAGAEPGRSRMISQEEFARQLQLSDPQTVAGAFGYFQQDTKGLVDFRDVALALAALDGGRSLEELTRLAFEVMGGGGGGGCLVAMLTPLQEAYFGMLFPVASRY

SEQ ID NO: 819463 - protein, 377 aa, Homo sapiens
MVRTTASADTQPCPGRTVCHNGVLGLSRLLFFLLGFLRIRVRGQRASRLQAPVLVAAPHSTFFDPIVLLPCDLPKVVSRAENLSVPVIGALLRFNQAILVSRHDPASRRRVVEEVRRRATSGGKWPQVLFFPEGTCSNKKALLKFKPGAFIAGVPVQPVLIRYPNSLDTTSWAWRGPGVLKVLWLTASQPCSIVDVEFLPVYHPSPEESRDPTLYANNVQRVMAQALGIPATECEFVGSLPVIVVGRLKVALEPQLWELGKVLRKAGLSAGYVDAGAEPGRSRMISQEEFARQLQLSDPQTVAGAFGYFQQDTKGLVDFRDVALALAALDGGRSLEELTRLAFEVMGGGGGGGCLVAMLTPLQEAYFGMLFPVASRY

SEQ ID NO: 819464 - protein, 496 aa, Homo sapiens; identical to SEQ ID NO: 819458

SEQ ID NO: 819465 - protein, 311 aa, Homo sapiens
RTKKNRLVRAGVNRPRNFLPVIGALLRFNQAILVSRHDPASRRRVVEEVRRRATSGGKWPQVLFFPEGTCSNKKALLKFKPGAFIAGVPVQPVLIRYPNSLDTTSWAWRGPGVLKVLWLTASQPCSIVDVEFLPVYHPSPEESRDPTLYANNVQRVMAQALGIPATECEFVGSLPVIVVGRLKVALEPQLWELGKVLRKAGLSAGYVDAGAEPGRSRMISQEEFARQLQLSDPQTVAGAFGYFQQDTKGLVDFRDVALALAALDGGRSLEELTRLAFEVMGGGGGGGCLVAMLTPLQEAYFGMLFPVASRY

SEQ ID NO: 819466 - protein, 573 aa, Homo sapiens; identical to SEQ ID NO: 819459

SEQ ID NO: 819467 - protein, 225 aa, Homo sapiens
ARTPYAPVLIRYPNSRHHQWAWRGPGVLKVLWLTASQPCSIVDVEFLPVYHPSPEESRDPTLYANNVQRVMAQALGIPATECEFVGSLPVIVVGRLKVALEPQLWELGKVLRKAGLSAGYVDAGAEPGRSRMISQEEFARQLQLSDPQTVAGAFGYFQQDTKGLVDFRDVALALAALDGGRSLEELTRLAFEVMGGGGGGGCLVAMLTPLQEAYFGMLFPVASRY

SEQ ID NO: 819468 - protein, 400 aa, Homo sapiens
RRLLPAPRPPAPGGARARAPPPPLLQQQLLCRVVAGARAGVPSLPPSPAMSQGSPGDWAPLDPTPGPPASPNPFVHELHLSRLQRVKFCLLGALLAPIRVLLAFIVLFLLWPFAWLQVAGLSEEQLQEPITGWRKTVCHNGVLGLSRLLFFLLGFLRIRVRGQRASRLQAPVLVAAPHSTFFDPIVLLPCDLPKVVSRAENLSVPVIGALLRFNQAILVSRHDPASRRRVVEEVRRRATSGGKWPQVLFFPEGTCSNKKALLKFKPGAFIAGVPVQPVLIRYPNSLDTTSWAWRGPGVLKVLWLTASQPCSIVDVEFLPVYHPSPEESRDPTLYANNVQRVMAQALGIPATECEFVGSLPVIVVGRLKVALEPQLWELGKVLRKAGIPRVWWTSEMWPLH

SEQ ID NO: 819469 - protein, 85 aa, Homo sapiens
GSRPASTSIGGRTAAVPWAFSQYAECDPQHPLKGQSDQVSRFLRLRRTVPEKSFPHLACSRAETKIQMPWSPMELVQQASSLCFS

SEQ ID NO: 819470 - protein, 573 aa, Homo sapiens; identical to SEQ ID NO: 819459

SEQ ID NO: 819471 - protein, 436 aa, Homo sapiens
RRLLPAPRPPAPGGARARAPPPPLLQQQLLCRVVAGARAGVPSLPPSPAMSQGSPGDWAPLDPTPGPPASPNPFVHELHLSRLQRVKFCLLGALLAPIRVLLAFIVLFLLWPFAWLQVAGLSEEQLQEPITGWRKTVCHNGVLGLSRLLFFLLGFLRIRVRGQRASRLQAPVLVAAPHSTFFDPIVLLPCDLPKVVSRAENLSVPVIGALLRFNQAILVSRHDPASRRRVVEEVRRRATSGGKWPQVLFFPEGTCSNKKALLKFKPGAFIAGVPVQPVLIRYPNSLDTTSWAWRGPGVLKVLWLTASQPCSIVDVEFLPVYHPSPEESRDPTLYANNVQRVMAQALGIPATECEFVGSLPPPTHLSRHLPDTKCLIPRQPHCSGQWDCASTQAEGRLSASASHPLLLRAALGASPMPQPHLCSCLNFVIVVWLLFF

SEQ ID NO: 819472 - protein, 408 aa, Homo sapiens
RRLLPAPRPPAPGGARARAPPPPLLQQQLLCRVVAGARAGVPSLPPSPAMSQGSPGDWAPLDPTPGPPASPNPFVHELHLSRLQRVKFCLLGALLAPIRVLLAFIVLFLLWPFAWLQVAGLSEEQLQEPITGWRKTVCHNGVLGLSRLLFFLLGFLRIRVRGQRASRLQAPVLVAAPHSTFFDPIVLLPCDLPKVVSRAENLSVPVIGALLRFNQAILVSRHDPASRRRVVEEVRRRATSGGKWPQVLFFPEGTCSNKKALLKFKPGAFIAGVPVQPVLIRYPNSLDTTSGHGGVLEYSKSLAHSSQPCSHVDVEFLLWYKPALKRRSTNLYGNMFKGPWHRPGISTKELRRNRNDVAVKGRHTLKASRTAPQRTGTAKKPNENTSTGVEQQAERQKKKNEKENKMGS

SEQ ID NO: 819473 - protein, 92 aa, Homo sapiens
LHTPRSTPRDNCGQRGASPWGRTAQIKRFRNYVCMFVCVICVWVLGVCMHTPNDHRPPHTSRGTSQTPNASSPGNPTALANGTVQAPKQKGD

SEQ ID NO: 819474 - protein, 76 aa, Homo sapiens
REDRRHGLSACAVWSFGVCVKIAITVWRFGVCMHTPNDHRPPHTSRGTSQTPNASSPGNPTALANGTVQAPKQKGD

SEQ ID NO: 819475 - protein, 298 aa, Homo sapiens
RRLLPAPRPPAPGGARARAPPPPLLQQQLLCRVVAGARAGVPSLPPSPAMSQGSPGDWAPLDPTPGPPASPNPFVHELHLSRLQRVKFCLLGALLAPIRVLLAFIVLFLLWPFAWLQVAGLSEEQLQEPITGWRKTVCHNGVLGLSRLLFFLLGFLRIRVRGQRASRLQAPVLVAAPHSTFFDPIVLLPCDLPKVVSRAENLSVPVIGALLRFNQAILVSRHDPASRRRVVEEVRRRATSGGKWPQVLFFPEGTCSNKKALLKFKPGAFIAGVPVQPVLIRYPNSLDTTSWAWRGPGV

SEQ ID NO: 819476 - protein, 226 aa, Homo sapiens
RRLLPAPRPPAPGGARARAPPPPLLQQQLLCRVVAGARAGVPSLPPSPAMSQGSPGDWAPLDPTPGPPASPNPFVHELHLSRLQRVKFCLLGALLAPIRVLLAFIVLFLLWPFAWLQVAGLSEEQLQEPITGWRKTVCHNGVLGLSRLLFFLLGFLRIRVRGQRASRLQAPVLVAAPHSTFFDPIVLLPCDLPKVVSRAENLSVPVIGCLGLLRIRVRGQRASREY

SEQ ID NO: 819477 - protein, 548 aa, Homo sapiens
MSASLNYKSFSKEQQTMDNLEKQLICPICLEMFTKPVVILPCQHNLCRKCASDIFQASNPYLPTRGGTTMASGGRFRCPSCRHEVVLDRHGVYGLQRNLLVENIIDIYKQESTRPEKKSDQPMCEEHEEERINIYCLNCEVPTCSLCKVFGAHKDCQVAPLTHVFQRQKSELSDGIAILVGSNDRVQGVISQLEDTCKTIEECCRKQKQELCEKFDYLYGILEERKNEMTQVITRTQEEKLEHVRALIKKYSDHLENVSKLVESGIQFMDEPEMAVFLQNAKTLLKKISEASKAFQMEKIEHGYENMNHFTVNLNREEKIIREIDFYREDEDEEEEEGGEGEKEGEGEVGGEAVEVEEVENVQTEFPGEDENPEKASELSQVELQAAPGALPVSSPEPPPALPPAADAPVTQGEVVPTGSEQTTESETPVPAAAETADPLFYPSWYKGQTRKATTNPPCTPGSEGLGQIGPPGSEDSNVRKAEVAAAAASERAAVSGKETSAPAATSQIGFEAPPLQGQAAAPASGSGADSEPARHIFSFSWLNSLNE

SEQ ID NO: 819478 - protein, 452 aa, Homo sapiens
MSASLNYKSFSKEQQTMDNLEKQLICPICLEMFTKPVVILPCQHNLCRKCASDIFQASNPYLPTRGGTTMASGGRFRCPSCRHEVVLDRHGVYGLQRNLLVENIIDIYKQESTRPEKKSDQPMCEEHEEERINIYCLNCEVPTCSLCKVFGAHKDCQVAPLTHVFQRQKSELSDGIAILVGSNDRVQGVISQLEDTCKTIEECCRKQKQELCEKFDYLYGILEERKNEMTQVITRTQEEKLEHVRALIKKYSDHLENVSKLVESGIQFMDEPEMAVFLQNAKTLLKKISEASKAFQMEKIEHGYENMNHFTVNLNREEKIIREIDFYREDEDEEEEEGGEGEKEGEGEVGGEAVEVEEVENVQTEFPGEDENPEKASELSQVELQAAPGALPVSSPEPPPALPPAADAPVTQIGFEAPPLQGQAAAPASGSGADSEPARHIFSFSWLNSLNE

SEQ ID NO: 819479 - protein, 548 aa, Homo sapiens; identical to SEQ ID NO: 819477

SEQ ID NO: 819480 - protein, 330 aa, Homo sapiens
MCEEHEEERINIYCLNCEVPTCSLCKVFGAHKDCQVAPLTHVFQRQKSELSDGIAILVGSNDRVQGVISQLEDTCKTIEECCRKQKQELCEKFDYLYGILEERKNEMTQVITRTQEEKLEHVRALIKKYSDHLENVSKLVESGIQFMDEPEMAVFLQNAKTLLKKISEASKAFQMEKIEHGYENMNHFTVNLNREEKIIREIDFYREDEDEEEEEGGEGEKEGEGEVGGEAVEVEEVENVQTEFPGEDENPEKASELSQVELQAAPGALPVSSPEPPPALPPAADAPVTQIGFEAPPLQGQAAAPASGSGADSEPARHIFSFSWLNSLNE

SEQ ID NO: 819481 - protein, 122 aa, Homo sapiens
MCEEHEEERINIYCLNCEVPTCSLCKVFGAHKDCQVAPLTHVFQRQKSELSDGIAILVGSNDRVQGVISQLEDTCKTIEVSQVTPTASQPSLQCLGVYDFLSATLDIPILTFHSLLLEWPPS

SEQ ID NO: 819482 - protein, 314 aa, Homo sapiens
KKKRCFLFPRYKFTSTPFTLKDILLGDREISAGISSYQLLNYEDESDVSLYGRRGNHIVNDVGINVAGSDSIAVKASFGIVTKHEVEVSTLLKEITTRKINFDHSLIRQSRSSRKAVLCVVMESIRTTRQCSLSVHAGIRGEAMRFHFMDEQNPKGRDKAIVFPAHTTIAFSVFELFIYLDGAFDLCVTSVSKGGFEREETATFALLYRLRNILFERNRRVMDVISRSQLYLDDLFSDYYDKPLSMTDISLKEGTHIRVNLLNHNIPKGPCILCGMGNFKRETVYGCFQCSVDGQKYVRLHAVPCFDIWHKRMK

SEQ ID NO: 819483 - protein, 164 aa, Homo sapiens
KKKRCFLFPRYKFTSTPFTLKDILLGDREISAGISSYQLLNYEDESDVSLYGRRGNHIVNDVGINVAGSDSIAVKASFGIVTKHEVEVSTLLKEITTRKINFDHSLIRQSRSSRKAVLCVVMESIRTTRQCSLSVHAGIRGEAMRVNHTCWVLLLTKVLPWEFF

SEQ ID NO: 819484 - protein, 115 aa, Homo sapiens [sequence omitted]

SEQ ID NO: 819485 - protein, 225 aa, Homo sapiens
DYLSDSLQGYLFIAMRIIWMCSRFMPKHKTTHLKKMLGLKGNGGAVLSMALPFQPEQRDSEDLLKNFNSECDTHCGLDTARQEYLGNSLRQESDLKKSTSSDNSSSHHGENKQNLTVDPCDILGGVDNQQRLLHIVWPHRWEHDKDPESFFKVLMHLKDLGLNFHVSVLGETFTDVPGWKLCTVGVTHFVLKIWFIPKYFQLNICILHLNSFQKGSRISARDQIL

SEQ ID NO: 819486 - protein, 309 aa, Homo sapiens
  misc_feature (298)..(298): Xaa can be any naturally occurring amino acid
  misc_feature (309)..(309): Xaa can be any naturally occurring amino acid
DYLSDSLQGYLFIAMRIIWMCSRFMPKHKTTHLKKMLGLKGNGGAVLSMALPFQPEQRDSEDLLKNFNSECDTHCGLDTARQEYLGNSLRQESDLKKSTSSDNSSSHHGENKQNLTVDPCDILGGVDNQQRLLHIVWPHRWEHDKDPESFFKVLMHLKDLGLNFHVSVLGETFTDVPDIFSEAKKALGSSVLHWGYLPSKDDYFQVLCMADVVISTAKHEFFGVAMLEAVYCGCYPLCPKDLVYPEIFPAEYLYSTPEQLSKRLQNFCKRPDIIRKHLYKGWKIGFPFFLGASPLHWXKIQGPSGFTNX

SEQ ID NO: 819487 - protein, 307 aa, Homo sapiens
DYLSDSLQGYLFIAMRIIWMCSRFMPKHKTTHLKKMLGLKGNGGAVLSMALPFQPEQRDSEDLLKNFNSECDTHCGLDTARQEYLGNSLRQESDLKKSTSSDNSSSHHGENKQNLTVDPCDILGGVDNQQRLLHIVWPHRWEHDKDPESFFKVLMHLKDLGLNFHVSVLGETFTDVPDIFSEAKKALGSSVLHWGYLPSKDDYFQVLCMADVVISTAKHEFFGVAMLEAVYCGCYPLCPKDLVYPEIFPAEYLYSTPEQLSKRLQNFCKRPDIIRKHLYKGEIAPFSWAALHGKFRSLLTTEPREDL

SEQ ID NO: 819488 - protein, 273 aa, Homo sapiens
FAESSQALKSSLFTSDMNLLLNSISLLTFLSEFVVIHNGIITNYKDLRKFLESKGYEFESETDTETIAKLIKYVFDNRETEDITFSTLVERVIQQLEGAFALVFKSVHYPGEAVATRRGSPLLIGVRSKYKLSTEQIPILYRTCTLENVKNICKTRMKRLDSSACLHAVGDKAVEFFFASDASAIIEHTNRVIFLEDDDIAAVADGKLSIHRVKRSASDDPSRAIQTLQMELQQIMKGTSVALLLKGTFDADRICFTTRGGGDIRSTDSLVDD

SEQ ID NO: 819489 - protein, 507 aa, Homo sapiens
MCSTTEKLRTLRFQRWSRESFSSWRGSPLLIGVRSKYKLSTEQIPILYRTCTLENVKNICKTRMKRLDSSACLHAVGDKAVEFFFASDASAIIEHTNRVIFLEDDDIAAVADGKLSIHRVKRSASDDPSRAIQTLQMELQQIMKGNFSAFMQKEIFEQPESVFNTMRGRVNFETNTVLLGGLKDHLKEIRRCRRLIVIGCGTSYHAAVATRQVLEELTELPVMVELASDFLDRNTPVFRDDVCFFISQSGETADTLLALRYCKDRGALTVGVTNTVGSSISRETDCGVHINAGPEIGVASTKAYTSQFISLVMFGLMMSEDRISLQNRRQEIIRGLRSLPELIKEVLSLEEKIHDLALELYTQRSLLVMGRGYNYATCLEGALKIKEITYMHSEGILAGELKHGPLALIDKQMPVIMVIMKDPCFAKCQNALQQVTARQGRPIILCSKDDTESSKFAYKTIELPHTVDCLQGILSVIPLQLLSFHLAVLRGYDVDFPRNLAKSVTVE

SEQ ID NO: 819490 - protein, 139 aa, Homo sapiens
MGRGYNYATCLEGALKIKEITYMHSEGILAGELKHGPLALIDKQMPVIMVIMKDPCFAKCQNALQQVTARQGRPIILCSKDDTESSKFAYKTIELPHTVDCLQGILSVIPLQLLSFHLAVLRGYDVDFPRNLAKSVTVE

SEQ ID NO: 819491 - protein, 334 aa, Homo sapiens
PSRRAPGYKGWRPSGRELEPAEPAEPTEPTEEPTEEPQRPNGQTPSSREGAREAATMCGIFAYMNYRVPRTRKEIFETLIKGLQRLEYRGYDSAGVAIDGNNHEVKERHIQLVKKRGKVKALDEELYKQDSMDLKVEFETHFGIAHTRWATHGVPSAVNSHPQRSDKGNEFVVIHNGIITNYKDLRKFLESKGYEFESETDTETIAKLIKYVFDNRETEDITFSTLVERVIQQLEGAFALVFKSVHYPGEAVATRRGSPLLIGVRSKYKLSTEQIPILYRTCKFLKKYRNSTAAGVAGLGSCSGTVSSPLRQGNPTLSQTQQAHSSRSKRFLCN

SEQ ID NO: 819492 - protein, 92 aa, Homo sapiens
CDSHCPVYPAGTPAGLPVGLGKPHIAHRGIHMFWFVVLPVAPSVLLSLVMSPRMRCSALSSPRDPRTSRHQEGPRETHLGCGQAAAAAAGTR

SEQ ID NO: 819493 - protein, 738 aa, Homo sapiens
PSRRAPGYKGWRPSGRELEPAEPAEPTEPTEEPTEEPQRPNGQTPSSREGAREAATMCGIFAYMNYRVPRTRKEIFETLIKGLQRLEYRGYDSAGVAIDGNNHEVKERHIQLVKKRGKVKALDEELYKQDSMDLKVEFETHFGIAHTRWATHGVPSAVNSHPQRSDKGNEFVVIHNGIITNYKDLRKFLESKGYEFESETDTETIAKLIKYVFDNRETEDITFSTLVERVIQQLEGAFALVFKSVHYPGEAVATRRGSPLLIGVRSKYKLSTEQIPILYRTCTLENVKNICKTRMKRLDSSACLHAVGDKAVEFFFASDASAIIEHTNRVIFLEDDDIAAVADGKLSIHRVKRSASDDPSRAIQTLQMELQQIMKGNFSAFMQKEIFEQPESVFNTMRGRVNFETNTVLLGGLKDHLKEIRRCRRLIVIGCGTSYHAAVATRQVLEELTELPVMVELASDFLDRNTPVFRDDVCFFISQSGETADTLLALRYCKDRGALTVGVTNTVGSSISRETDCGVHINAGPEIGVASTKAYTSQFISLVMFGLMMSEDRISLQNRRQEIIRGLRSLPELIKEVLSLEEKIHDLALELYTQRSLLVMGRGYNYATCLEGALKIKEITYMHSEGILAGELKHGPLALIDKQMPVIMVIMKDPCFAKCQNALQQVTARQGRPIILCSKDDTESSKFAYKTIELPHTVDCLQGILSVIPLQLLSFHLAVLRGYDVDFPRNLAKSVTVE

SEQ ID NO: 819494 - protein, 600 aa, Homo sapiens
FAESSQALKSSLFTSDMNLLLNSISLLTFLSEFVVIHNGIITNYKDLRKFLESKGYEFESETDTETIAKLIKYVFDNRETEDITFSTLVERVIQQLEGAFALVFKSVHYPGEAVATRRGSPLLIGVRSKYKLSTEQIPILYRTCTLENVKNICKTRMKRLDSSACLHAVGDKAVEFFFASDASAIIEHTNRVIFLEDDDIAAVADGKLSIHRVKRSASDDPSRAIQTLQMELQQIMKGNFSAFMQKEIFEQPESVFNTMRGRVNFETNTVLLGGLKDHLKEIRRCRRLIVIGCGTSYHAAVATRQVLEELTELPVMVELASDFLDRNTPVFRDDVCFFISQSGETADTLLALRYCKDRGALTVGVTNTVGSSISRETDCGVHINAGPEIGVASTKAYTSQFISLVMFGLMMSEDRISLQNRRQEIIRGLRSLPELIKEVLSLEEKIHDLALELYTQRSLLVMGRGYNYATCLEGALKIKEITYMHSEGILAGELKHGPLALIDKQMPVIMVIMKDPCFAKCQNALQQVTARQGRPIILCSKDDTESSKFAYKTIELPHTVDCLQGILSVIPLQLLSFHLAVLRGYDVDFPRNLAKSVTVE

SEQ ID NO: 819495 - protein, 474 aa, Homo sapiens
MQTKHPSGICNPFLHLLGTLENVKNICKTRMKRLDSSACLHAVGDKAVEFFFASDASAIIEHTNRVIFLEDDDIAAVADGKLSIHRVKRSASDDPSRAIQTLQMELQQIMKGNFSAFMQKEIFEQPESVFNTMRGRVNFETNTVLLGGLKDHLKEIRRCRRLIVIGCGTSYHAAVATRQVLEELTELPVMVELASDFLDRNTPVFRDDVCFFISQSGETADTLLALRYCKDRGALTVGVTNTVGSSISRETDCGVHINAGPEIGVASTKAYTSQFISLVMFGLMMSEDRISLQNRRQEIIRGLRSLPELIKEVLSLEEKIHDLALELYTQRSLLVMGRGYNYATCLEGALKIKEITYMHSEGILAGELKHGPLALIDKQMPVIMVIMKDPCFAKCQNALQQVTARQGRPIILCSKDDTESSKFAYKTIELPHTVDCLQGILSVIPLQLLSFHLAVLRGYDVDFPRNLAKSVTVE

SEQ ID NO: 819496 - protein, 321 aa, Homo sapiens
PSRRAPGYKGWRPSGRELEPAEPAEPTEPTEEPTEEPQRPNGQTPSSREGAREAATMCGIFAYMNYRVPRTRKEIFETLIKGLQRLEYRGYDSAGVAIDGNNHEVKERHIQLVKKRGKVKALDEELYKQDSMDLKVEFETHFGIAHTRWATHGVPSAVNSHPQRSDKGNEFVVIHNGIITNYKDLRKFLESKGYEFESETDTETIAKLIKYVFDNRETEDITFSTLVERVIQQLEGAFALVFKSVHYPGEAVATRRGSPLLIGVRSKYKLSTEQIPILYRTCTLENVKNICKTRMKRLDSSACLHAVGDKAVEFFFASDAR

SEQ ID NO: 819497 - protein, 369 aa, Homo sapiens
PSRRAPGYKGWRPSGRELEPAEPAEPTEPTEEPTEEPQRPNGQTPSSREGAREAATMCGIFAYMNYRVPRTRKEIFETLIKGLQRLEYRGYDSAGVAIDGNNHEVKERHIQLVKKRGKVKALDEELYKQDSMDLKVEFETHFGIAHTRWATHGVPSAVNSHPQRSDKGNEFVVIHNGIITNYKDLRKFLESKGYEFESETDTETIAKLIKYVFDNRETEDITFSTLVERVIQQLEGAFALVFKSVHYPGEAVATRRGSPLLIGVRSKYKLSTEQIPILYRTCTLENVKNICKTRMKRLDSSACLHPPMPPISPVEISASFNIFFSCVAHIPPLLQLLFNLITALFKPWQHFGPCSLPIVKQLEISHARE

SEQ ID NO: 819498 - protein, 38 aa, Homo sapiens
MLACWLQTRQVLEELTELPVMVELASDFLDRNTPVFRD

SEQ ID NO: 819499 - protein, 1046 aa, Homo sapiens
MQKPSGLKPPGRGGKHSSPMGRTSTGSASSSAAVAASSKEGSPLHKQSSGPSSSPAAAAAPEKPGPKAAEVGDDFLGDFVVGERVWVNGVKPGVVQYLGETQFAPGQWAGVVLDDPVGKNDGAVGGVRYFECPALQGIFTRPSKLTRQPTAEGSGSDAHSVESLTAQNLSLHSGTATPPLTSRVIPLRESVLNSSVKTGNESGSNLSDSGSVKRGEKDLRLGDRVLVGGTKTGVVRYVGETDFAKGEWCGVELDEPLGKNDGAVAGTRYFQCPPKFGLFAPIHKVIRIGFPSTSPAKAKKTKRMAMGVSALTHSPSSSSISSVSSVASSVGGRPSRSGLLTETSSRYARKISGTTALQEALKEKQQHIEQLLAERDLERAEVAKATSHICEVEKEIALLKAQHEQYVAEAEEKLQRARLLVESVRKEKVDLSNQLEEERRKVEDLQFRVEEESITKGDLETQTQLEHARIGELEQSLLLEKAQAERLLRELADNRLTTVAEKSRVLQLEEELTLRRGEIEELQQCLLHSGPPPPDHPDAAEILRLRERLLSASKEHQRESGVLRDKYEKALKAYQAEVDKLRAANEKYAQEVAGLKDKVQQATSENMGLMDNWKSKLDSLASDHQKSLEDLKATLNSGPGAQQKEIGELKAVMEGIKMEHQLELGNLQAKHDLETAMHVKEKEALREKLQEAQEELAGLQRHWRAQLEVQASQHRLELQEAQDQRRDAELRVHELEKLDVEYRGQAQAIEFLKEQISLAEKKMLDYERLQRAEAQGKQEVESLREKLLVAENRLQAVEALCSSQHTHMIESNDISEETIRTKETVEGLQDKLNKRDKEVTALTSQTEMLRAQVSALESKCKSGEKKVDALLKEKRRLEAELETVSRKTHDASGQLVLISQELLRKERSLNELRVLLLEANRHSPGPERDLSREVHKAEWRIKEQKLKDDIRGLREKLTGLDKEKSLSDQRRYSLIDPSSAPELLRLQHQLMSTEDALRDALDQAQQVEKLMEAMRSCPDKAQTIGNSGSANGIHQQDKAQKQEDKH

SEQ ID NO: 819500 - protein, 761 aa, Homo sapiens
VACGLPVACGDCGCGLTVLGMGVSALTHSPSSSSISSVSSVASSVGGRPSRSGLLTETSSRYARKISGTTALQEALKEKQQHIEQLLAERDLERAEVAKATSHICEVEKEIALLKAQHEQYVAEAEEKLQRARLLVESVRKEKVDLSNQLEEERRKVEDLQFRVEEESITKGDLETQTQLEHARIGELEQSLLLEKAQAERLLRELADNRLTTVAEKSRVLQLEEELTLRRGEIEELQQCLLHSGPPPPDHPDAAEILRLRERLLSASKEHQRESGVLRDKYEKALKAYQAEVDKLRAANEKYAQEVAGLKDKVQQATSENMGLMDNWKSKLDSLASDHQKSLEDLKATLNSGPGAQQKEIGELKAVMEGIKMEHQLELGNLQAKHDLETAMHVKEKEALREKLQEAQEELAGLQRHWRAQLEVQASQHRLELQEAQDQRRDAELRVHELEKLDVEYRGQAQAIEFLKEQISLAEKKMLDYERLQRAEAQGKQEVESLREKLLVAENRLQAVEALCSSQHTHMIESNDISEETIRTKETVEGLQDKLNKRDKEVTALTSQTEMLRAQVSALESKCKSGEKKVDALLKEKRRLEAELETVSRKTHDASGQLVLISQELLRKERSLNELRVLLLEANRHSPGPERDLSREVHKAEWRIKEQKLKDDIRGLREKLTGLDKEKSLSDQRRYSLIDPSSAPELLRLQHQLMSTEDALRDALDQAQQVEKLMEAMRSCPDKAQTIGNSGSANGIHQQDKAQKQEDKH

SEQ ID NO: 819501 - protein, 1011 aa, Homo sapiens; identical to SEQ ID NO: 746537

SEQ ID NO: 819502 - protein, 1018 aa, Homo sapiens
MQKPSGLKPPGRGGKHSSPMGRTSTGSASSSAAVAASSKEGSPLHKQSSGPSSSPAAAAAPEKPGPKAAEVGDDFLGDFVVGERVWVNGVKPGVVQYLGETQFAPGQWAGVVLDDPVGKNDGAVGGVRYFECPALQGIFTRPSKLTRQPTAEGSGSDAHSVESLTAQNLSLHSGTATPPLTSRVIPLRESVLNSSVKTGNESGSNLSDSGSVKRGEKDLRLGDRVLVGGTKTGVVRYVGETDFAKGEWCGVELDEPLGKNDGAVAGTRYFQCPPKFGLFAPIHKVIRIGFPSTSPAKAKKTKRMAMGVSALTHSPSSSSISSVSSVASSVGGRPSRSGLLTETSSRYARKISGTTALQEALKEKQQHIEQLLAERDLERAEVAKATSHICEVEKEIALLKAQHEQYVAEAEEKLQRARLLVESVRKEKVDLSNQLEEERRKVEDLQFRVEEESITKGDLETQTQLEHARIGELEQSLLLEKAQAERLLRELADNRLTTVAEKSRVLQLEEELTLRRGEIEELQQCLLHSGPPPPDHPDAAEILRLRERLLSASKEHQRESGVLRDKYEKALKAYQAEVDKLRAANEKYAQEVAGLKDKVQQATSENMGLMDNWKSKLDSLASDHQKSLEDLKATLNSGPGAQQKEIGELKAVMEGIKMEHQLELGNLQAKHDLETAMHVKEKEALREKLQEAQEELAGLQRHWRAQLEVQASQHRLELQEAQDQRRDAELRVHELEKLDVEYRGQAQAIEFLKEQISLAEKKMLDYERLQRAEAQGKQEMIESNDISEETIRTKETVEGLQDKLNKRDKEVTALTSQTEMLRAQVSALESKCKSGEKKVDALLKEKRRLEAELETVSRKTHDASGQLVLISQELLRKERSLNELRVLLLEANRHSPGPERDLSREVHKAEWRIKEQKLKDDIRGLREKLTGLDKEKSLSDQRRYSLIDPSSAPELLRLQHQLMSTEDALRDALDQAQQVEKLMEAMRSCPDKAQTIGNSGSANGIHQQDKAQKQEDKH

SEQ ID NO: 819503 - protein, 403 aa, Homo sapiens
MQKPSGLKPPGRGGKHSSPMGRTSTGSASSSAAVAASSKEGSPLHKQSSGPSSSPAAAAAPEKPGPKAAEVGDDFLGDFVVGERVWVNGVKPGVVQYLGETQFAPGQWAGVVLDDPVGKNDGAVGGVRYFECPALQGIFTRPSKLTRQPTAEGSGSDAHSVESLTAQNLSLHSGTATPPLTSRVIPLRESVLNSSVKTGNESGSNLSDSGSVKRGEKDLRLGDRVLVGGTKTGVVRYVGETDFAKGEWCGVELDEPLGKNDGAVAGTRYFQCPPKFGLFAPIHKVIRIGFPSTSPAKAKKTKRMAMGVSALTHSPSSSSISSVSSVASSVGGRPSRSGLLTETSSRYARKISGTTALQEALKEKQQHIEQLLAERDLERAEVAKATSHICEVEKEMPSPQWNC

SEQ ID NO: 819504 - protein, 806 aa, Homo sapiens
QARYEPGVNRPRGGGSASWARVSAAAMAAVDLEKLRASGAGKAIGVLTSGGDAQGMNAAVRAVTRMGIYVGAKVFLIYEGYEGLVEGGENIKQANWLSVSNIIQLGGTIIGSARCKAFTTREGRRAAAYNLVQHGITNLCVIGGDGSLTGANIFRSEWGSLLEELVAEGKISETTARTYSHLNIAGLVGSIDNDFCGTDMTIGTDSALHRIMEVIDAITTTAQSHQRTFVLEVMGRHCGYLALVSALASGADWLFIPEAPPEDGWENFMCERLGETRSRGSRLNIIIIAEGAIDRNGKPISSSYVKDLVVQRLGFDTRVTVLGHVQRGGTPSAFDRILSSKMGMEAVMALLEATPDTPACVVTLSGNQSVRLPLMECVQMTKEVQKAMDDKRFDEATQLRGGSFENNWNIYKLLAHQKPPKEKSNFSLAILNVGAPAAGMNAAVRSAVRTGISHGHTVYVVHDGFEGLAKGQVQEVGWHDVAGWLGRGGSMLGTKRTLPKGQLESIVENIRIYGIHALLVVGGFEAYEGVLQLVEARGRYEELCIVMCVIPATISNNVPGTDFSLGSDTAVNAAMESCDRIKQSASGTKRRVFIVETMGGYCGYLATVTGIAVGADAAYVFEDPFNIHDLKVNVEHMTEKMKTDIQRGLVLRNEKCHDYYTTEFLYNLYSSEGKGVFDCRTNVLGHLQQGGAPTPFDRNYGTKLGVKAMLWLSEKLREVYRKGRVFANAPDSACVIGLKKKAVAFSPVTELKKDTDFEHRMPREQWWLSLRLMLKMLAQYRISMAAYVSGELEHVTRRTLSMDKGF

SEQ ID NO: 819505 - protein, 70 aa, Homo sapiens
WFTYTAQRHGHHGRGQHSCLLRGRGAVGVWRLLPPGFGAPWALSVSPCWAHYMGQPLLYLAGRLLAPRLC

SEQ ID NO: 819506 - protein, 96 aa, Homo sapiens
ELGTPRLARQGSDGAWAVVSGACRQVGAASLLSPSPASIPGHLPGLPPAGVLRPACQALQQEDRVPWGIHLPAQGTWRCRSALSGCRGYQLNSIMY

SEQ ID NO: 819507 - protein, 105 aa, Homo sapiens
MTGQQGAGLGGRRQSLSPAHPGLGAALDLPLSLLLQAYEGVLQLVEARGRYEELCIVMCVIPATISNNVPGTDFSLGSDTAVNAAMEVRGSWTPACHAQALVGWG

SEQ ID NO: 819508 - protein, 780 aa, Homo sapiens
MAAVDLEKLRASGAGKAIGVLTSGGDAQGMNAAVRAVTRMGIYVGAKVFLIYEGYEGLVEGGENIKQANWLSVSNIIQLGGTIIGSARCKAFTTREGRRAAAYNLVQHGITNLCVIGGDGSLTGANIFRSEWGSLLEELVAEGKISETTARTYSHLNIAGLVGSIDNDFCGTDMTIGTDSALHRIMEVIDAITTTAQSHQRTFVLEVMGRHCGYLALVSALASGADWLFIPEAPPEDGWENFMCERLGETRSRGSRLNIIIIAEGAIDRNGKPISSSYVKDLVVQRLGFDTRVTVLGHVQRGGTPSAFDRILSSKMGMEAVMALLEATPDTPACVVTLSGNQSVRLPLMECVQMTKEVQKAMDDKRFDEATQLRGGSFENNWNIYKLLAHQKPPKEKSNFSLAILNVGAPAAGMNAAVRSAVRTGISHGHTVYVVHDGFEGLAKGQVQEVGWHDVAGWLGRGGSMLGTKRTLPKGQLESIVENIRIYGIHALLVVGGFEAYEGVLQLVEARGRYEELCIVMCVIPATISNNVPGTDFSLGSDTAVNAAMESCDRIKQSASGTKRRVFIVETMGGYCGYLATVTGIAVGADAAYVFEDPFNIHDLKVNVEHMTEKMKTDIQRGLVLRNEKCHDYYTTEFLYNLYSSEGKGVFDCRTNVLGHLQQGGAPTPFDRNYGTKLGVKAMLWLSEKLREVYRKGRVFANAPDSACVIGLKKKAVAFSPVTELKKDTDFEHRMPREQWWLSLRLMLKMLAQYRISMAAYVSGELEHVTRRTLSMDKGF

SEQ ID NO: 819509 - protein, 1028 aa, Homo sapiens
QARYEPGVNRPRGGGSASWARVSAAAMAAVDLEKLRASGAGKAIGVLTSGGDAQGMNAAVRAVTRMGIYVGAKVFLIYEGYEGLVEGGENIKQANWLSVSNIIQLGGTIIGSARCKAFTTREGRRAAAYNLVQHGITNLCVIGGDGSLTGANIFRSEWGSLLEELVAEGKISETTARTYSHLNIAGLVGSIDNDFCGTDMTIGTDSALHRIMEVIDAITTTAQSHQRTFVLEVMGRHCGYLALVSALASGADWLFIPEAPPEDGWENFMCERLGETRSRGSRLNIIIIAEGAIDRNGKPISSSYVKDLVVQRLGFDTRVTVLGHVQRGGTPSAFDRILSSKMGMEAVMALLEATPDTPACVVTLSGNQSVRLPLMECVQMTKEVQKAMDDKRFDEATQLRGGEAPSADPCTLTWLGPGARQHVLQWRYARLAWVILLGTASEDRGRKGPAGGTGGGLGGVVPQETLGGGTGRAQCTGIWAWRGDEKLWIQAQDMGWPRGGWEGWQMLGVGTTPLQASWRPGQAGLDVWVPMRASTRYQGGQPSLELDAGHVLCCTGWRGSCCVGGLAPSVEGALPGMRGVCCLMAELPSGRVPVTSLLGSVTAALWLYAVALQGCAGVTRIPSRSFENNWNIYKLLAHQKPPKEKSNFSLAILNVGAPAAGMNAAVRSAVRTGISHGHTVYVVHDGFEGLAKGQVQEVGWHDVAGWLGRGGSMLGTKRTLPKGQLESIVENIRIYGIHALLVVGGFEAYEGVLQLVEARGRYEELCIVMCVIPATISNNVPGTDFSLGSDTAVNAAMESCDRIKQSASGTKRRVFIVETMGGYCGYLATVTGIAVGADAAYVFEDPFNIHDLKVNVEHMTEKMKTDIQRGLVLRNEKCHDYYTTEFLYNLYSSEGKGVFDCRTNVLGHLQQGGAPTPFDRNYGTKLGVKAMLWLSEKLREVYRKGRVFANAPDSACVIGLKKKAVAFSPVTELKKDTDFEHRMPREQWWLSLRLMLKMLAQYRISMAAYVSGELEHVTRRTLSMDKGF

SEQ ID NO: 819510 - protein, 830 aa, Homo sapiens
MRSMCNQGRGRESSRGGLHVQGSCRGLSRSPQQETGFAKAPAGTDCFFHCSPGSRGQGDRKEEVTSEPGGTSIMSRLGGMNAAVRAVTRMGIYVGAKVFLIYEGYEGLVEGGENIKQANWLSVSNIIQLGGTIIGSARCKAFTTREGRRAAAYNLVQHGITNLCVIGGDGSLTGANIFRSEWGSLLEELVAEGKISETTARTYSHLNIAGLVGSIDNDFCGTDMTIGTDSALHRIMEVIDAITTTAQSHQRTFVLEVMGRHCGYLALVSALASGADWLFIPEAPPEDGWENFMCERLGETRSRGSRLNIIIIAEGAIDRNGKPISSSYVKDLVVQRLGFDTRVTVLGHVQRGGTPSAFDRILSSKMGMEAVMALLEATPDTPACVVTLSGNQSVRLPLMECVQMTKEVQKAMDDKRFDEATQLRGGSFENNWNIYKLLAHQKPPKEKSNFSLAILNVGAPAAGMNAAVRSAVRTGISHGHTVYVVHDGFEGLAKGQVQEVGWHDVAGWLGRGGSMLGTKRTLPKGQLESIVENIRIYGIHALLVVGGFEAYEGVLQLVEARGRYEELCIVMCVIPATISNNVPGTDFSLGSDTAVNAAMESCDRIKQSASGTKRRVFIVETMGGYCGYLATVTGIAVGADAAYVFEDPFNIHDLKVNVEHMTEKMKTDIQRGLVLRNEKCHDYYTTEFLYNLYSSEGKGVFDCRTNVLGHLQQGGAPTPFDRNYGTKLGVKAMLWLSEKLREVYRKGRVFANAPDSACVIGLKKKAVAFSPVTELKKDTDFEHRMPREQWWLSLRLMLKMLAQYRISMAAYVSGELEHVTRRTLSMDKGF

SEQ ID NO: 819511 - protein, 728 aa, Homo sapiens
QARYEPGVNRPRGGGSASWARVSAAAMAAVDLEKLRASGAGKAIGVLTSGGDAQGMNAAVRAVTRMGIYVGAKVFLIYEGYEGLVEGGENIKQANWLSVSNIIQLGGTIIGSARCKAFTTREGRRAAAYNLVQHGITNLCVIGGDGSLTGANIFRSEWGSLLEELVAEGKISETTARTYSHLNIAGLVGSIDNDFCGTDMTIGTDSALHRIMEVIDAITTTAQSHQRTFVLEVMGRHCGYLALVSALASGADWLFIPEAPPEDGWENFMCERLGETRSRGSRLNIIIIAEGAIDRNGKPISSSYVKDLVVQRLGFDTRVTVLGHVQRGGTPSAFDRILSSKMGMEAVMALLEATPDTPACVVTLSGNQSVRLPLMECVQMTKEVQKAMDDKRFDEATQLRGGSFENNWNIYKLLAHQKPPKEKSNFSLAILNVGAPAAGMNAAVRSAVRTGISHGHTVYVVHDGFEGLAKGQPATISNNVPGTDFSLGSDTAVNAAMESCDRIKQSASGTKRRVFIVETMGGYCGYLATVTGIAVGADAAYVFEDPFNIHDLKVNVEHMTEKMKTDIQRGLVLRNEKCHDYYTTEFLYNLYSSEGKGVFDCRTNVLGHLQQGGAPTPFDRNYGTKLGVKAMLWLSEKLREVYRKGRVFANAPDSACVIGLKKKAVAFSPVTELKKDTDFEHRMPREQWWLSLRLMLKMLAQYRISMAAYVSGELEHVTRRTLSMDKGF

SEQ ID NO: 819512 - protein, 806 aa, Homo sapiens; identical to SEQ ID NO: 819504

SEQ ID NO: 819513 - protein, 751 aa, Homo sapiens
MNAAVRAVTRMGIYVGAKVFLIYEGYEGLVEGGENIKQANWLSVSNIIQLGGTIIGSARCKAFTTREGRRAAAYNLVQHGITNLCVIGGDGSLTGANIFRSEWGSLLEELVAEGKISETTARTYSHLNIAGLVGSIDNDFCGTDMTIGTDSALHRIMEVIDAITTTAQSHQRTFVLEVMGRHCGYLALVSALASGADWLFIPEAPPEDGWENFMCERLGETRSRGSRLNIIIIAEGAIDRNGKPISSSYVKDLVVQRLGFDTRVTVLGHVQRGGTPSAFDRILSSKMGMEAVMALLEATPDTPACVVTLSGNQSVRLPLMECVQMTKEVQKAMDDKRFDEATQLRGGSFENNWNIYKLLAHQKPPKEKSNFSLAILNVGAPAAGMNAAVRSAVRTGISHGHTVYVVHDGFEGLAKGQVQEVGWHDVAGWLGRGGSMLGTKRTLPKGQLESIVENIRIYGIHALLVVGGFEAYEGVLQLVEARGRYEELCIVMCVIPATISNNVPGTDFSLGSDTAVNAAMESCDRIKQSASGTKRRVFIVETMGGYCGYLATVTGIAVGADAAYVFEDPFNIHDLKVNVEHMTEKMKTDIQRGLVLRNEKCHDYYTTEFLYNLYSSEGKGVFDCRTNVLGHLQQGGAPTPFDRNYGTKLGVKAMLWLSEKLREVYRKGRVFANAPDSACVIGLKKKAVAFSPVTELKKDTDFEHRMPREQWWLSLRLMLKMLAQYRISMAAYVSGELEHVTRRTLSMDKGF

SEQ ID NO: 819514 - protein, 751 aa, Homo sapiens; identical to SEQ ID NO: 819513

SEQ ID NO: 819515 - protein, 806 aa, Homo sapiens; identical to SEQ ID NO: 819504

SEQ ID NO: 819516 - protein, 419 aa, Homo sapiens
MDDKRFDEATQLRGGSFENNWNIYKLLAHQKPPKEKSNFSLAILNVGAPAAGMNAAVRSAVRTGISHGHTVYVVHDGFEGLAKGQVQEVGWHDVAGWLGRGGSMLGTKRTLPKGQLESIVENIRIYGIHALLVVGGFEAYEGVLQLVEARGRYEELCIVMCVIPATISNNVPGTDFSLGSDTAVNAAMESCDRIKQSASGTKRRVFIVETMGGYCGYLATVTGIAVGADAAYVFEDPFNIHDLKVNVEHMTEKMKTDIQRGLVLRNEKCHDYYTTEFLYNLYSSEGKGVFDCRTNVLGHLQQGGAPTPFDRNYGTKLGVKAMLWLSEKLREVYRKGRVFANAPDSACVIGLKKKAVAFSPVTELKKDTDFEHRMPREQWWLSLRLMLKMLAQYRISMAAYVSGELEHVTRRTLSMDKGF

SEQ ID NO: 819517 - protein, 780 aa, Homo sapiens
QARYEPGVNRPRGGGSASWARVSAAAMAAVDLEKLRASGAGKAIGVLTSGGDAQGMNAAVRAVTRMGIYVGAKVFLIYEGGTIIGSARCKAFTTREGRRAAAYNLVQHGITNLCVIGGDGSLTGANIFRSEWGSLLEELVAEGKISETTARTYSHLNIAGLVGSIDNDFCGTDMTIGTDSALHRIMEVIDAITTTAQSHQRTFVLEVMGRHCGYLALVSALASGADWLFIPEAPPEDGWENFMCERLGETRSRGSRLNIIIIAEGAIDRNGKPISSSYVKDLVVQRLGFDTRVTVLGHVQRGGTPSAFDRILSSKMGMEAVMALLEATPDTPACVVTLSGNQSVRLPLMECVQMTKEVQKAMDDKRFDEATQLRGGSFENNWNIYKLLAHQKPPKEKSNFSLAILNVGAPAAGMNAAVRSAVRTGISHGHTVYVVHDGFEGLAKGQVQEVGWHDVAGWLGRGGSMLGTKRTLPKGQLESIVENIRIYGIHALLVVGGFEAYEGVLQLVEARGRYEELCIVMCVIPATISNNVPGTDFSLGSDTAVNAAMESCDRIKQSASGTKRRVFIVETMGGYCGYLATVTGIAVGADAAYVFEDPFNIHDLKVNVEHMTEKMKTDIQRGLVLRNEKCHDYYTTEFLYNLYSSEGKGVFDCRTNVLGHLQQGGAPTPFDRNYGTKLGVKAMLWLSEKLREVYRKGRVFANAPDSACVIGLKKKAVAFSPVTELKKDTDFEHRMPREQWWLSLRLMLKMLAQYRISMAAYVSGELEHVTRRTLSMDKGF

SEQ ID NO: 819518 - protein, 863 aa, Homo sapiens
FPLLSAYVGRLSARPKLKAFLASPEYVSGHVAGQYTEFLYNLYSSEGKGVFDCRTNVLGHLQQGGAPTPFDRNYGTKLGVKAMLWLSEKLREVYRKGRVFANAPDSACVIGLKKKAVAFSPVTELKKDTDFQHRMPREQWWLSLRLMLKMLAQYRISMAAYVSGELVAEVTRRTLSMEQGRRAAAYNLVQHGITNLCVIGGDGSLTGANIFRSEWGSLLEELVAEGKISETTARTYSHLNIAGLVGSIDNDFCGTDMTIGTDSALHRIMEVIDAITTTAQSHQRTFVLEVMGRHCGYLALVSALASGADWLFIPEAPPEDGWENFMCERLGETRSRGSRLNIIIIAEGAIDRNGKPISSSYVKDLVVQRLGFDTRVTVLGHVQRGGTPSAFDRILSSKMGMEAVMALLEATPDTPACVVTLSGNQSVRLPLMECVQMTKEVQKAMDDKRFDEATQLRGGSFENNWNIYKLLAHQKPPKEKSNFSLAILNVGAPAAGMNAAVRSAVRTGISHGHTVYVVHDGFEGLAKGQVQEVGWHDVAGWLGRGGSMLGTKRTLPKGQLESIVENIRIYGIHALLVVGGFEAYEGVLQLVEARGRYEELCIVMCVIPATISNNVPGTDFSLGSDTAVNAAMESCDRIKQSASGTKRRVFIVETMGGYCGYLATVTGIAVGADAAYVFEDPFNIHDLKVNVEHMTEKMKTDIQRGLVLRNEKCHDYYTTEFLYNLYSSEGKGVFDCRTNVLGHLQQGGAPTPFDRNYGTKLGVKAMLWLSEKLREVYRKGRVFANAPDSACVIGLKKKAVAFSPVTELKKDTDFEHRMPREQWWLSLRLMLKMLAQYRISMAAYVSGELEHVTRRTLSMDKGF

SEQ ID NO: 819519 - protein, 807 aa, Homo sapiens
FPLLSAYVGRLSARPKLKAFLASPEYVSGHVAGQYTEFLYNLYSSEGKGVFDCRTNVLGHLQQGGAPTPFDRNYGTKLGVKAMLWLSEKLREVYRKGRVFANAPDSACVIGLKKKAVAFSPVTELKKDTDFQHRMPREQWWLSLRLMLKMLAQYRISMAAYVSGELVAEGKISETTARTYSHLNIAGLVGSIDNDFCGTDMTIGTDSALHRIMEVIDAITTTAQSHQRTFVLEVMGRHCGYLALVSALASGADWLFIPEAPPEDGWENFMCERLGETRSRGSRLNIIIIAEGAIDRNGKPISSSYVKDLVVQRLGFDTRVTVLGHVQRGGTPSAFDRILSSKMGMEAVMALLEATPDTPACVVTLSGNQSVRLPLMECVQMTKEVQKAMDDKRFDEATQLRGGSFENNWNIYKLLAHQKPPKEKSNFSLAILNVGAPAAGMNAAVRSAVRTGISHGHTVYVVHDGFEGLAKGQVQEVGWHDVAGWLGRGGSMLGTKRTLPKGQLESIVENIRIYGIHALLVVGGFEAYEGVLQLVEARGRYEELCIVMCVIPATISNNVPGTDFSLGSDTAVNAAMESCDRIKQSASGTKRRVFIVETMGGYCGYLATVTGIAVGADAAYVFEDPFNIHDLKVNVEHMTEKMKTDIQRGLVLRNEKCHDYYTTEFLYNLYSSEGKGVFDCRTNVLGHLQQGGAPTPFDRNYGTKLGVKAMLWLSEKLREVYRKGRVFANAPDSACVIGLKKKAVAFSPVTELKKDTDFEHRMPREQWWLSLRLMLKMLAQYRISMAAYVSGELEHVTRRTLSMDKGF

SEQ ID NO: 819520 - protein, 573 aa, Homo sapiens
QARYEPGVNLAEGRRECELGPCFGRRHGRGGPGEAAGVGRGQGHRRPDQRRRRASAEGAIDRNGKPISSSYVKDLVVQRLGFDTRVTVLGHVQRGGTPSAFDRILSSKMGMEAVMALLEATPDTPACVVTLSGNQSVRLPLMECVQMTKEVQKAMDDKRFDEATQLRGGSFENNWNIYKLLAHQKPPKEKSNFSLAILNVGAPAAGMNAAVRSAVRTGISHGHTVYVVHDGFEGLAKGQVQEVGWHDVAGWLGRGGSMLGTKRTLPKGQLESIVENIRIYGIHALLVVGGFEAYEGVLQLVEARGRYEELCIVMCVIPATISNNVPGTDFSLGSDTAVNAAMESCDRIKQSASGTKRRVFIVETMGGYCGYLATVTGIAVGADAAYVFEDPFNIHDLKVNVEHMTEKMKTDIQRGLVLRNEKCHDYYTTEFLYNLYSSEGKGVFDCRTNVLGHLQQGGAPTPFDRNYGTKLGVKAMLWLSEKLREVYRKGRVFANAPDSACVIGLKKKAVAFSPVTELKKDTDFEHRMPREQWWLSLRLMLKMLAQYRISMAAYVSGELEHVTRRTLSMDKGF

SEQ ID NO: 819521 - protein, 806 aa, Homo sapiens; identical to SEQ ID NO: 819504

SEQ ID NO: 819522 - protein, 521 aa, Homo sapiens
TRSPTMNTATVDMPISSSYVKDLVVQRLGFDTRVTVLGHVQRGGTPSAFDRILSSKMGMEAVMALLEATPDTPACVVTLSGNQSVRLPLMECVQMTKEVQKAMDDKRFDEATQLRGGSFENNWNIYKLLAHQKPPKEKSNFSLAILNVGAPAAGMNAAVRSAVRTGISHGHTVYVVHDGFEGLAKGQVQEVGWHDVAGWLGRGGSMLGTKRTLPKGQLESIVENIRIYGIHALLVVGGFEAYEGVLQLVEARGRYEELCIVMCVIPATISNNVPGTDFSLGSDTAVNAAMESCDRIKQSASGTKRRVFIVETMGGYCGYLATVTGIAVGADAAYVFEDPFNIHDLKVNVEHMTEKMKTDIQRGLVLRNEKCHDYYTTEFLYNLYSSEGKGVFDCRTNVLGHLQQGGAPTPFDRNYGTKLGVKAMLWLSEKLREVYRKGRVFANAPDSACVIGLKKKAVAFSPVTELKKDTDFEHRMPREQWWLSLRLMLKMLAQYRISMAAYVSGELEHVTRRTLSMDKGF

SEQ ID NO: 819523 - protein, 450 aa, Homo sapiens
MAALQVPTSSAASGAACWRSWWRKTKEVQKAMDDKRFDEATQLRGGSFENNWNIYKLLAHQKPPKEKSNFSLAILNVGAPAAGMNAAVRSAVRTGISHGHTVYVVHDGFEGLAKGQVQEVGWHDVAGWLGRGGSMLGTKRTLPKGQLESIVENIRIYGIHALLVVGGFEAYEGVLQLVEARGRYEELCIVMCVIPATISNNVPGTDFSLGSDTAVNAAMESCDRIKQSASGTKRRVFIVETMGGYCGYLATVTGIAVGADAAYVFEDPFNIHDLKVNVEHMTEKMKTDIQRGLVLRNEKCHDYYTTEFLYNLYSSEGKGVFDCRTNVLGHLQQGGAPTPFDRNYGTKLGVKAMLWLSEKLREVYRKGRVFANAPDSACVIGLKKKAVAFSPVTELKKDTDFEHRMPREQWWLSLRLMLKMLAQYRISMAAYVSGELEHVTRRTLSMDKGF

SEQ ID NO: 819524 - protein, 806 aa, Homo sapiens; identical to SEQ ID NO: 819504

SEQ ID NO: 819525 - protein, 1029 aa, Homo sapiens
FPLLSAYVGRLSARPKLKAFLASPEYVSGHVAGQYTEFLYNLYSSEGKGVFDCRTNVLGHLQQGGAPTPFDRNYGTKLGVKAMLWLSEKLREVYRKGRVFANAPDSACVIGLKKKAVAFSPVTELKKDTDFQHRMPREQWWLSLRLMLKMLAQYRISMAAYVSGELVAEGKISETTARTYSHLNIAGLVGSIDNDFCGTDMTIGTDSALHRIMEVIDAITTTAQSHQRTFVLEVMGRHCGYLALVSALASGADWLFIPEAPPEDGWENFMCERLGETRSRGSRLNIIIIAEGAIDRNGKPISSSYVKDLVVQRLGFDTRVTVLGHVQRGGTPSAFDRILSSKMGMEAVMALLEATPDTPACVVTLSGNQSVRLPLMECVQMTKEVQKAMDDKRFDEATQLRGGEAPSADPCTLTWLGPGARQHVLQWRYARLAWVILLGTASEDRGRKGPAGGTGGGLGGVVPQETLGGGTGRAQCTGIWAWRGDEKLWIQAQDMGWPRGGWEGWQMLGVGTTPLQASWRPGQAGLDVWVPMRASTRYQGGQPSLELDAGHVLCCTGWRGSCCVGGLAPSVEGALPGMRGVCCLMAELPSGRVPVTSLLGSVTAALWLYAVALQGCAWCDPNPFRSFENNWNIYKLLAHQKPPKEKSNFSLAILNVGAPAAGMNAAVRSAVRTGISHGHTVYVVHDGFEGLAKGQVQEVGWHDVAGWLGRGGSMLGTKRTLPKGQLESIVENIRIYGIHALLVVGGFEAYEGVLQLVEARGRYEELCIVMCVIPATISNNVPGTDFSLGSDTAVNAAMESCDRIKQSASGTKRRVFIVETMGGYCGYLATVTGIAVGADAAYVFEDPFNIHDLKVNVEHMTEKMKTDIQRGLVLRNEKCHDYYTTEFLYNLYSSEGKGVFDCRTNVLGHLQQGGAPTPFDRNYGTKLGVKAMLWLSEKLREVYRKGRVFANAPDSACVIGLKKKAVAFSPVTELKKDTDFEHRMPREQWWLSLRLMLKMLAQYRISMAAYVSGELEHVTRRTLSMDKGF

SEQ ID NO: 819526 - protein, 493 aa, Homo sapiens
MSMRGWLNRQRLGSALASGADWLFIPEAPPEDGWENFMCERLGEPACVVTLSGNQSVRLPLMECVQMTKEVQKAMDDKRFDEATQLRGGSFENNWNIYKLLAHQKPPKEKSNFSLAILNVGAPAAGMNAAVRSAVRTGISHGHTVYVVHDGFEGLAKGQVQEVGWHDVAGWLGRGGSMLGTKRTLPKGQLESIVENIRIYGIHALLVVGGFEAYEGVLQLVEARGRYEELCIVMCVIPATISNNVPGTDFSLGSDTAVNAAMESCDRIKQSASGTKRRVFIVETMGGYCGYLATVTGIAVGADAAYVFEDPFNIHDLKVNVEHMTEKMKTDIQRGLVLRNEKCHDYYTTEFLYNLYSSEGKGVFDCRTNVLGHLQQGGAPTPFDRNYGTKLGVKAMLWLSEKLREVYRKGRVFANAPDSACVIGLKKKAVAFSPVTELKKDTDFEHRMPREQWWLSLRLMLKMLAQYRISMAAYVSGELEHVTRRTLSMDKGF

SEQ ID NO: 819527 - protein, 806 aa, Homo sapiens; identical to SEQ ID NO: 819504

SEQ ID NO: 819528 - protein, 797 aa, Homo sapiens
QARYEPGVNRPRGGGSASWARVSAAAMAAVDLEKLRASGAGKAIGVLTSGGDAQGMNAAVRAVTRMGIYVGAKVFLIYEGYEGLVEGGENIKQANWLSVSNIIQLGGTIIGSARCKAFTTREGRRAAAYNLVQHGITNLCVIGGDGSLTGANIFRSEWGSLLEELVAEGKISETTARTYSHLNIAGLVGSIDNDFCGTDMTIGTDSALHRIMEVIDAITTTAQSHQRTFVLEVMGRHCGYLALVSALASGADWLFIPEAPPEDGWENFMCERLGETRSRGSRLNIIIIAEGAIDRNGKPISSSYVKDLVVQRLGFDTRVTVLGHVQRGGTPSAFDRILSSKMGMEAVMALLEATPDTPACVVTLSGNQSVRLPLMECVQMTKEVQKAMDDKRFDEATQLRGGSFENNWNIYKLLAHQKPPKEKSNFSLAILNVGAPAAGMNAAVRSAVRTGISHGHTVYVVHDGFEGLAKGQVQEVGWHDVAGWLGRGGSMLGTKRTLPKGQLESIVENIRIYGIHALLVVGGFEAYEGVLQLVEARGRYEELCIVMCVIPATISNNVPGTDFSLGSDTAVNAAMESCDRIKQSASGTKRRVFIVETMGGYCGYLATVTGIAVGADAAYVFEDPFNIHDLKVNVEHMTEKMKTDIQRGLVLRNEKCHDYYTTEFLYNLYSSEGKGVFDCRTNVLGHLQQGGAPTPFDRNYGTKLGVKAMLWLSEKLREVYRKGRVFANAPDSACVIGLKKKAVAFSPVTELKKDTDFEHRMPGSRGGEPGSMLKNGGPIPDQDGAYGSGSGAGTGGP

SEQ ID NO: 819529 - protein, 768 aa, Homo sapiens
QARYEPGVNRPRGGGSASWARVSAAAMAAVDLEKLRASGAGKAIGVLTSGGDAQGMNAAVRAVTRMGIYVGAKVFLIYEGYEGLVEGGENIKQANWLSVSNIIQLGGTIIGSARCKAFTTREGRRAAAYNLVQHGITNLCVIGGDGSLTGANIFRSEWGSLLEELVAEGKISETTARTYSHLNIAGLVGSIDNDFCGTDMTIGTDSALHRIMEVIDAITTTAQSHQRTFVLEVMGRHCGYLALVSALASGADWLFIPEAPPEDGWENFMCERLGETRSRGSRLNIIIIAEGAIDRNGKPISSSYVKDLVVQRLGFDTRVTVLGHVQRGGTPSAFDRILSSKMGMEAVMALLEATPDTPACVVTLSGNQSVRLPLMECVQMTKEVQKAMDDKRFDEATQLRGGSFENNWNIYKLLAHQKPPKEKSNFSLAILNVGAPAAGMNAAVRSAVRTGISHGHTVYVVHDGFEGLAKGQVQEVGWHDVAGWLGRGGSMLGTKRTLPKGQLESIVENIRIYGIHALLVVGGFEAYEGVLQLVEARGRYEELCIVMCVIPATISNNVPGTDFSLGSDTAVNAAMESCDRIKQSASGTKRRVFIVETMGGYCGYLATVTGIAVGADAAYVFEDPFNIHDLKVNVEHMTEKMKTDIQRGLVLRNEKCHDYYTTEFLYNLYSSEGKGVFDCRTNVLGHLQQGGAPTPFDRNYGTKLGVKAMLWLSEKLREVYRKGRVFANAPDSACVIGLKKKAVAFSPVTELKKDTDFEHARLRSRAPV

SEQ ID NO: 819530 - protein, 209 aa, Homo sapiens
MGGYCGYLATVTGIAVGADAAYVFEDPFNIHDLKVNVEHMTEKMKTDIQRGLVLRNEKCHDYYTTEFLYNLYSSEGKGVFDCRTNVLGHLQQGGAPTPFDRNYGTKLGVKAMLWLSEKLREVYRKGRVFANAPDSACVIGLKKKAVAFSPVTELKKDTDFEHRMPREQWWLSLRLMLKMLAQYRISMAAYVSGELEHVTRRTLSMDKGF

SEQ ID NO: 819531 - protein, 317 aa, Homo sapiens
MTGQQGAGLGGRRQSLSPAHPGLGAALDLPLSLLLQAYEGVLQLVEARGRYEELCIVMCVIPATISNNVPGTDFSLGSDTAVNAAMESCDRIKQSASGTKRRVFIVETMGGYCGYLATVTGIAVGADAAYVFEDPFNIHDLKVNVEHMTEKMKTDIQRGLVLRNEKCHDYYTTEFLYNLYSSEGKGVFDCRTNVLGHLQQGGAPTPFDRNYGTKLGVKAMLWLSEKLREVYRKGRVFANAPDSACVIGLKKKAVAFSPVTELKKDTDFEHRMPREQWWLSLRLMLKMLAQYRISMAAYVSGELEHVTRRTLSMDKGF

SEQ ID NO: 819532 - protein, 760 aa, Homo sapiens
QARYEPGVNRPRGGGSASWARVSAAAMAAVDLEKLRASGAGKAIGVLTSGGDAQGMNAAVRAVTRMGIYVGAKVFLIYEGYEGLVEGGENIKQANWLSVSNIIQLGGTIIGSARCKAFTTREGRRAAAYNLVQHGITNLCVIGGDGSLTGANIFRSEWGSLLEELVAEGKISETTARTYSHLNIAGLVGSIDNDFCGTDMTIGTDSALHRIMEVIDAITTTAQSHQRTFVLEVMGRHCGYLALVSALASGADWLFIPEAPPEDGWENFMCERLGETRSRGSRLNIIIIAEGAIDRNGKPISSSYVKDLVVQRLGFDTRVTVLGHVQRGGTPSAFDRILSSKMGMEAVMALLEATPDTPACVVTLSGNQSVRLPLMECVQMTKEVQKAMDDKRFDEATQLRGGSFENNWNIYKLLAHQKPPKEKSNFSLAILNVGAPAAGMNAAVRSAVRTGISHGHTVYVVHDGFEGLAKGQVQEVGWHDVAGWLGRGGSMLGTKRTLPKGQLESIVENIRIYGIHALLVVGGFEAYEGVLQLVEARGRYEELCIVMCVIPATISNNVPGTDFSLGSDTAVNAAMESCDRIKQSASGTKRRVFIVETMGGYCGYLATVTGIAVGADAAYVFEDPFNIHDLKVNVEHMTEKMKTDIQRGLVLRTGRAWIITQGPGQRIHQGRGLNGGTSVGVTAQGGGQNPCRRHVAPAGSSPRGGCNTAGNTREGVQTTHEEATQEGRPRENDARPDWTGRRDKEQERQQQSTNGWRGAT

SEQ ID NO: 819533 - protein, 636 aa, Homo sapiens
QARYEPGVNRPRGGGSASWARVSAAAMAAVDLEKLRASGAGKAIGVLTSGGDAQGMNAAVRAVTRMGIYVGAKVFLIYEGYEGLVEGGENIKQANWLSVSNIIQLGGTIIGSARCKAFTTREGRRAAAYNLVQHGITNLCVIGGDGSLTGANIFRSEWGSLLEELVAEGKISETTARTYSHLNIAGLVGSIDNDFCGTDMTIGTDSALHRIMEVIDAITTTAQSHQRTFVLEVMGRHCGYLALVSALASGADWLFIPEAPPEDGWENFMCERLGETRSRGSRLNIIIIAEGAIDRNGKPISSSYVKDLVVQRLGFDTRVTVLGHVQRGGTPSAFDRILSSKMGMEAVMALLEATPDTPACVVTLSGNQSVRLPLMECVQMTKEVQKAMDDKRFDEATQLRGGSFENNWNIYKLLAHQKPPKEKSNFSLAILNVGAPAAGMNAAVRSAVRTGISHGHTVYVVHDGFEGLAKGQVQEVGWHDVAGWLGRGGSMLGTKRTLPKGQLESIVENIRIYGIHALLVVGGFEAYEGVLQLVEARGRYEELCIVMCVIPATISNNVPGTDFSLGSDTAVNAAMESCDAFNSLLGTRAVWSRAPWGSPGSCPALLAVAAPYFRTTSPLGVGWAAHQGACERVRSG

SEQ ID NO: 819534 - protein, 655 aa, Homo sapiens
  misc_feature (605)..(605): Xaa can be any naturally occurring amino acid
  misc_feature (609)..(609): Xaa can be any naturally occurring amino acid
  misc_feature (613)..(613): Xaa can be any naturally occurring amino acid
QARYEPGVNRPRGGGSASWARVSAAAMAAVDLEKLRASGAGKAIGVLTSGGDAQGMNAAVRAVTRMGIYVGAKVFLIYEGYEGLVEGGENIKQANWLSVSNIIQLGGTIIGSARCKAFTTREGRRAAAYNLVQHGITNLCVIGGDGSLTGANIFRSEWGSLLEELVAEGKISETTARTYSHLNIAGLVGSIDNDFCGTDMTIGTDSALHRIMEVIDAITTTAQSHQRTFVLEVMGRHCGYLALVSALASGADWLFIPEAPPEDGWENFMCERLGETRSRGSRLNIIIIAEGAIDRNGKPISSSYVKDLVVQRLGFDTRVTVLGHVQRGGTPSAFDRILSSKMGMEAVMALLEATPDTPACVVTLSGNQSVRLPLMECVQMTKEVQKAMDDKRFDEATQLRGGSFENNWNIYKLLAHQKPPKEKSNFSLAILNVGAPAAGMNAAVRSAVRTGISHGHTVYVVHDGFEGLAKGQVQEVGWHDVAGWLGRGGSMLGTKRTLPKGQLESIVENIRIYGIHALLVVGGFEAYEGVLQLVEARGRYEELCIVMCVIPATISNNVPGTDFSLGSDTAVNAAMECVQMTKEVQKAMDDKRFDEATQLRGGSFXNNWXIYKXPRPPRKPPKEKSNFSLGILNCGGPGGWAWNAAVRFGVADPAS

SEQ ID NO: 819535 - protein, 594 aa, Homo sapiens
QARYEPGVNRPRGGGSASWARVSAAAMAAVDLEKLRASGAGKAIGVLTSGGDAQGMNAAVRAVTRMGIYVGAKVFLIYEGYEGLVEGGENIKQANWLSVSNIIQLGGTIIGSARCKAFTTREGRRAAAYNLVQHGITNLCVIGGDGSLTGANIFRSEWGSLLEELVAEGKISETTARTYSHLNIAGLVGSIDNDFCGTDMTIGTDSALHRIMEVIDAITTTAQSHQRTFVLEVMGRHCGYLALVSALASGADWLFIPEAPPEDGWENFMCERLGETRSRGSRLNIIIIAEGAIDRNGKPISSSYVKDLVVQRLGFDTRVTVLGHVQRGGTPSAFDRILSSKMGMEAVMALLEATPDTPACVVTLSGNQSVRLPLMECVQMTKEVQKAMDDKRFDEATQLRGGSFENNWNIYKLLAHQKPPKEKSNFSLAILNVGAPAAGMNAAVRSAVRTGISHGHTVYVVHDGFEGLAKGQVQEVGWHDVAGWLGRGGSMLGTKRTLPKGQLESIVENIRIYGIHALLVVGGFEAYEGVLQLVEARGRYEELCIVMCVIPATISNNVPGTDFSLGSDTAVNAAMEVRGSWTPACHAQALVGWG

SEQ ID NO: 819536 - protein, 285 aa, Homo sapiens
QARYEPGVNRPRGGGSASWARVSAAAMAAVDLEKLRASGAGKAIGVLTSGGDAQGMNAAVRAVTRMGIYVGAKVFLIYEGYEGLVEGGENIKQANWLSVSNIIQLGGTIIGSARCKAFTTREGRRAAAYNLVQHGITNLCVIGGDGSLTGANIFRSEWGSLLEELVAEGKISETTARTYSHLNIAGLVGSIDNDFCGTDMTRRVFANAPDSACVIGLKKKAVAFSPVTELKKDTDFEHRMPREQWWLSLRLMLKMLAQYRISMAAYVSGELEHVTRRTLSMDKGF

SEQ ID NO: 819537 - protein, 383 aa, Homo sapiens
QARYEPGVNRPRGGGSASWARVSAAAMAAVDLEKLRASGAGKAIGVLTSGGDAQGMNAAVRAVTRMGIYVGAKVFLIYEGYEGLVEGGENIKQANWLSVSNIIQLGGTIIGSARCKAFTTREGRRAAAYNLVQHGITNLCVIGGDGSLTGANIFRSEWGSLLEELVAEGKISETTARTYSHLNIAGLVGSIDNDFCGTDMTIGTDSALHRIMEVIDAITTTAQSHQRTFVLEVMGRHCGYLALVSALASGADWLFIPEAPPEDGWENFMCERLGETRSRGSRLNIIIIAEGAIDRNGKPISSSYVKDWGPTAGIKTGERGGAAATGRTATDLEGPEATGIRAKALLNHLAPLGAHRGKRGRTREEARRKDTEDTRDTRSTNEM

SEQ ID NO: 819538 - protein, 232 aa, Homo sapiens
QARYEPGVNRPRGGGSASWARVSAAAMAAVDLEKLRASGAGKAIGVLTSGGDAQGMNAAVRAVTRMGIYVGAKVFLIYEGYEGLVEGGENIKQANWLSVSNIIQLGGTIIGSARCKPPQPPPMPAQRQGSDGAWAVVSGACRQVGAASLLSPSPASIPGHLPGLPPAGVLRPACQALQQEDRVPWGIHLPAQGTWRCRCLEAAAPWLWRPMGPQRLPMLGSLHGPALALPGR

SEQ ID NO: 819539 - protein, 114 aa, Homo sapiens
ELGTPRLARQGSDGAWAVVSGACRQVGAASLLSPSPASIPGHLPGLPPAGVLRPACQALQQEDRVPWGIHLPAQGTWRCRCLEAAAPWLWRPMGPQRLPMLGSLHGPALALPGR

SEQ ID NO: 819540 - protein, 219 aa, Homo sapiens
QARYEPGVNRPRGGGSASWARVSAAAMAAVDLEKLRASGAGKAIGVLTSGGDAQGMNAAVRAVTRMGIYVGAKVFLIYEGYEGLVEGGENIKQANWLSVSNIIQLGGTIIGSARCKAFTTREGRRAAAYNLVQHGITNLCVIGGDGSLTGANIFRSEWGSLLEELVAEGKISETTARTYSHLNIAGLVGSIDNDFCGTDMTNHQSGVGGDDQDTSNYLS

SEQ ID NO: 819541 - protein, 180 aa, Homo sapiens
MRSMCNQGRGRESSRGGLHVQGSCRGLSRSPQQETGFAKAPAGTDCFFHCSPGSRGQGDRKEEVTSEPGGTSIMSRLGGMNAAVRAVTRMGIYVGAKVFLIYEGYEGLVEGGENIKQANWLSVSNIIQLVRPGNADACCTWTRRQTHRDRPAHTDTHTETDTCTNTHMQTHRHAHRRTHT

SEQ ID NO: 819542 - protein, 123 aa, Homo sapiens
PGRLSWELPLPLPGLAQRGLRIGGRPELVPADSGPAAPLRNEKCHDYYTTEFLYNLYSSEGKGVFDCRTNVLGHLQQVWGRGEALRGLPLFPATICPRPQGSQPSRAPTGTPGRPSGTCALPQ

SEQ ID NO: 819543 - protein, 669 aa, Homo sapiens
MDLRTAVYNAARDGKLQLLQKLLSGRSREELDELTGEVAGGGTPLLIAARYGHLDVVEYLVDRCGASVEAGGSVHFDGETIEGAPPLWAASAAGHLDVVRSLLRRGASVNRTTRTNSTPLRAACFDGHLEVVRYLVGEHQADLEVANRHGHTCLMISCYKGHREIARYLLEQGAQVNRRSAKGNTALHDCAESGSLEILQLLLGCKARMERDGYGMTPLLAASVTGHTNIVEYLIQEQPGQEQVAGGEAQPGLPQEDPSTSQGCAQPQGAPCCSSSPEEPLNGESYESCCPTSREAAVEALELLGATYVDKKRDLLGALKHWRRAMELRHQGGEYLPKPEPPQLVLAYDYSREVNTTEELEALITDPDEMRMQALLIRERILGPSHPDTSYYIRYRGAVYADSGNFERCIRLWKYALDMQQSNLEPLSPMTASSFLSFAELFSYVLQDRAAKGSLGTQIGFADLMGVLTKGVREVERALQLPREPGDSAQFTKALAIILHLLYLLEKVECTPSQEHLKHQTVYRLLKCAPRGKNGFTPLHMAVDKDTTNVGRYPVGRFPSLHVVKVLLDCGADPDSRDFDNNTPLHIAAQNNCPAIMNALIEAGAHMDATNAFKKTAYELLDEKLLARGTMQPFNYVTLQCLAARALDKNKIPYKGFIPEDLEAFIELH

SEQ ID NO: 819544 - protein, 669 aa, Homo sapiens; identical to SEQ ID NO: 819543

SEQ ID NO: 819545 - protein, 669 aa, Homo sapiens; identical to SEQ ID NO: 819543

SEQ ID NO: 819546 - protein, 669 aa, Homo sapiens; identical to SEQ ID NO: 819543

SEQ ID NO: 819547 - protein, 669 aa, Homo sapiens; identical to SEQ ID NO: 819543

SEQ ID NO: 819548 - protein, 718 aa, Homo sapiens
NGALQLPREPGDSAQFTKALAIILHLLYLLEKVECTPSQEHLKHQTVYRLLKCAPRGKNGFTPCPQPKMAAEGDGEGCLPPVRALILRLPVPRRPAHGLAEARTMDLRTAVYNAARDGKLQLLQKLLSGRSREELDELTGEVAGGGTPLLIAARYGHLDVVEYLVDRCGASVEAGGSVHFDGETIEGAPPLWAASAAGHLDVVRSLLRRGASVNRTTRTNSTPLRAACFDGHLEVVRYLVGEHQADLEVANRHGHTCLMISCYKGHREIARYLLEQGAQVNRRSAKGNTALHDCAESGSLEILQLLLGCKARMERDGYGMTPLLAASVTGHTNIVEYLIQEQPGQEQVAGGEAQPGLPQEDPSTSQGCAQPQGAPCCSSSPEEPLNGESYESCCPTSREAAVEALELLGATYVDKKRDLLGALKHWRRAMELRHQGGEYLPKPEPPQLVLAYDYSREVNTTEELEALITDPDEMRMQALLIRERILGPSHPDTSYYIRYRGAVYADSGNFERCIRLWKYALDMQQSNLEPLSPMTASSFLSFAELFSYVLQDRAAKGSLGTQIGFADLMGVLTKGVREVERALQLPREPGDSAQFTKALAIILHLLYLLEKVECTPSQEHLKHQTVYRLLKCAPRGKNGFTPLHMAVDKDTTNVGRYPVGRFPSLHVVKVLLDCGADPDSRDFDNNTPLHIAAQNNCPAIMNALIEAGAHMDATNALA

SEQ ID NO: 819549 - protein, 669 aa, Homo sapiens; identical to SEQ ID NO: 819543

SEQ ID NO: 819550 - protein, 548 aa, Homo sapiens
MDLRTAVYNAARDGKLQLLQKLLSGRSREELDELTGEVAGGGTPLLIAARYGHLDVVEYLVDRCGASVEAGGSVHFDGETIEGAPPLWAASAAGHLDVVRSLLRRGASVNRTTRTNSTPLRAACFDGHLEVVRYLVGEHQADLEVANRHGHTCLMISCYKGHREIARYLLEQGAQVNRRSAKGNTALHDCAESGSLEILQLLLGCKARMERDGYGMTPLLAASVTGHTNIVEYLIQEQPGQEQVAGGEAQPGLPQEDPSTSQGCAQPQGAPCCSSSPEEPLNGESYESCCPTSREAAVEALELLGATYVDKKRDLLGALKHWRRAMELRHQGGEYLPKPEPPQLVLAYDYSREVNTTEELEALITDPDEMRMQALLIRERILGPSHPDTSYYIRYRGAVYADSGNFERCIRLWKYALDMQQSNLEPLSPMTASSFLSFAELFSYVLQDRAAKGSLGTQIGFADLMGVLTKGVREVERALQLPREPGDSAQFTKALAIILHLLYLLEKVECTPSQEHLKHQTVYRLLKCAPRGKNGFTSLSLPKHRAQK

SEQ ID NO: 819551 - protein, 538 aa, Homo sapiens
MARELSESTALDAQSTEDQMELLVIKVEEEEAGFPSSPDLGSEGSRERFRGFRYPEAAGPREALSRLRELCRQWLQPEMHSKEQILELLVLEQFLTILPGNLQSWVREQHPESGEEVVVLLEYLERQLDEPAPQVSGVDQGQELLCCKMALLTPAPGSQSSQFQLMKALLKHESVGSQPLQDRVLQVPVLAHGGCCREDKVVASRLTPESQGLLKVEDVALTLTPEWTQQDSSQGNLCRDEKQENHGSLVSLGDEKQTKSRDLPPAEELPEKEHGKISCHLREDIAQIPTCAEAGEQEGRLQRKQKNATGGRRHICHECGKSFAQSSGLSKHRRIHTGEKPYECEECGKAFIGSSALVIHQRVHTGEKPYECEECGKAFSHSSDLIKHQRTHTGEKPYECDDCGKTFSQSCSLLEHHRIHTGEKPYQCSMCGKAFRRSSHLLRHQRIHTGDKNVQEPEQGEAWKSRMESQLENVETPMSYKCNECERSFTQNTGLIEHQKIHTGEKPYQCNACGKGFTRISYLVQHQRSHVGKNILSQ

SEQ ID NO: 819552 - protein, 538 aa, Homo sapiens; identical to SEQ ID NO: 819551

SEQ ID NO: 819553 - protein, 385 aa, Homo sapiens
MARELSESTALDAQSTEDQMELLVIKVEEEEAGFPSSPDLGSEGSRERFRGFRYPEAAGPREALSRLRELCRQWLQPEMHSKEQILELLVLEQFLTILPGNLQSWVREQHPESGEEVVVLLEYLERQLDEPAPQVSGVDQGQELLCCKMALLTPAPGSQSSQFQLMKALLKHESVGSQPLQDRVLQVPVLAHGGCCREDKVVASRLTPESQGLLKVEDVALTLTPEWTQQDSSQGNLCRDEKQENHGSLVSLGDEKQTKSRDLPPAEELPEKEHGKISCHLREDIAQIPTCAEAGEQEGRLQRKQKNATGGRRHICHECGKSFAQSSGLSKHRRIHTGEKPYECEECGKAFIGSSALVIHQRVHTGENRISAVCVAKPLGEVHIS

SEQ ID NO: 819554 - protein, 403 aa, Homo sapiens
TELPPRPANLAIQPPLSPLRALAPLPEKPGAVPPPQKRMAKVAKDLNPGVKKMSLGQLQSARGVACLGCKGTCSGFEPHSWRKICKSCKCSQEDHCLTSDLEDDRKIGRLLMDSKYSTLTARVKGGDGIRIYKRNRMIMTNPIATGKDPTFDTITYEWAPPGVTQKLGLQYMELIPKEKQPVTGTEGAFYRRRQLMHQLPIYDQDPSRCRGLLENELKLMEEFVKQYKSEALGVGEVALPGQGGLPKEEGKQQEKPEGAETTAATTNGSLSDPSKEVEYVCELCKGAAPPDSPVVYSDRAGYNKQWHPTCFVCAKCSEPLVDLIYFWKDGAPWCGRHYCESLRPRCSGCDEIIFAEDYQRVEDLAWHRKHFVCEGCEQLLSGRAYIVTKGQLLCPTCSKSKRS

SEQ ID NO: 819555 - protein, 371 aa, Homo sapiens
MGYTYKVIERILEIGAFRPHMSLGQLQSARGVACLGCKGTCSGFEPHSWRKICKSCKCSQEDHCLTSDLEDDRKIGRLLMDSKYSTLTARVKGGDGIRIYKRNRMIMTNPIATGKDPTFDTITYEWAPPGVTQKLGLQYMELIPKEKQPVTGTEGAFYRRRQLMHQLPIYDQDPSRCRGLLENELKLMEEFVKQYKSEALGVGEVALPGQGGLPKEEGKQQEKPEGAETTAATTNGSLSDPSKEVEYVCELCKGAAPPDSPVVYSDRAGYNKQWHPTCFVCAKCSEPLVDLIYFWKDGAPWCGRHYCESLRPRCSGCDEIIFAEDYQRVEDLAWHRKHFVCEGCEQLLSGRAYIVTKGQLLCPTCSKSKRS

SEQ ID NO: 819556 - protein, 373 aa, Homo sapiens
QSSLPGPRTWPFSRRCPRCAPSRLCLRSQALFPHPRRGWQRWLRTSTQELKRKICKSCKCSQEDHCLTSDLEDDRKIGRLLMDSKYSTLTARVKGGDGIRIYKRNRMIMTNPIATGKDPTFDTITYEWAPPGVTQKLGLQYMELIPKEKQPVTGTEGAFYRRRQLMHQLPIYDQDPSRCRGLLENELKLMEEFVKQYKSEALGVGEVALPGQGGLPKEEGKQQEKPEGAETTAATTNGSLSDPSKEVEYVCELCKGAAPPDSPVVYSDRAGYNKQWHPTCFVCAKCSEPLVDLIYFWKDGAPWCGRHYCESLRPRCSGCDEIIFAEDYQRVEDLAWHRKHFVCEGCEQLLSGRAYIVTKGQLLCPTCSKSKRS

SEQ ID NO: 819557 - protein, 143 aa, Homo sapiens
MSLCSPDFLVSYGPSPSFQVCELCKGAAPPDSPVVYSDRAGYNKQWHPTCFVCAKCSEPLVDLIYFWKDGAPWCGRHYCESLRPRCSGCDEIIFAEDYQRVEDLAWHRKHFVCEGCEQLLSGRAYIVTKGQLLCPTCSKSKRS

SEQ ID NO: 819558 - protein, 201 aa, Homo sapiens
TELPPRPANLAIQPPLSPLRALAPLPEKPGAVPPPQKRMAKVAKDLNPGVKKMSLGQLQSARGVACLGCKGTCSGFEPHSWRKICKSCKCSQEDHCLTSDLEDDRKIGRLLMDSKYSTLTARVKGGDGIRIYKRNRMIMTNPIATGKDPTFDTITYEWAPPGVTQKLGLQYMELIPKEKQPVTGKARGGRDHCCYHQRQSQ

SEQ ID NO: 819559 - protein, 171 aa, Homo sapiens
QSSLPGPRTWPFSRRCPRCAPSRLCLRSQALFPHPRRGWQRWLRTSTQELKRKICKSCKCSQEDHCLTSDLEDDRKIGRLLMDSKYSTLTARVKGGDGIRIYKRNRMIMTNPIATGKDPTFDTITYEWAPPGVTQKLGLQYMELIPKEKQPVTGKARGGRDHCCYHQRQSQ

SEQ ID NO: 819560 - protein, 226 aa, Homo sapiens
MFGMQGDVFGLRATFMEGLQYMELIPKEKQPVTGTEGAFYRRRQLMHQLPIYDQDPSRCRGLLENELKLMEEFVKQYKSEALGVGEVALPGSLSDPSKEVEYVCELCKGAAPPDSPVVYSDRAGYNKQWHPTCFVCAKCSEPLVDLIYFWKDGAPWCGRHYCESLRPRCSGCDEIIFAEDYQRVEDLAWHRKHFVCEGCEQLLSGRAYIVTKGQLLCPTCSKSKRS

SEQ ID NO: 819561 - protein, 285 aa, Homo sapiens
TELPPRPANLAIQPPLSPLRALAPLPEKPGAVPPPQKRMAKVAKDLNPGVKKMSLGQLQSARGVACLGCKGTCSGFEPHSWRKICKSCKCSQEDHCLTSDLEDDRKIGRLLMDSKYSTLTARVKGGDGIRIYKRNRMIMTNPIATGKDPTFDTITYEWAPPGVTQKLGLQYMELIPKEKQPVTGTEGAFYRRRQLMHQLPIYDQDPSRCRGLLENELKLMEEFVKQYKSEALGVGEVALPGQGGLPKEEGKQQEKPEGAETTAATTNGSLSDPSKEVEYKPVPLV

SEQ ID NO: 819562 - protein, 237 aa, Homo sapiens
TELPPRPANLAIQPPLSPLRALAPLPEKPGAVPPPQKRMAKVAKDLNPGVKKMSLGQLQSARGVACLGCKGTCSGFEPHSWRKICKSCKCSQEDHCLTSDLEDDRKIGRLLMDSKYSTLTARVKGGDGIRIYKRNRMIMTNPIATGKDPTFDTITYEWAPPGVTQKLGLQYMELIPKEKQPVTGTEGAFYRRRQLMHQLPIYDQDPSRCRGLLENELKLMEEFGQLLCPTCSKSKRS

SEQ ID NO: 819563 - protein, 507 aa, Homo sapiens
MGAPRSLLLALAAGLAVARPPNIVLIFADDLGYGDLGCYGHPSSTTPNLDQLAAGGLRFTDFYVPVSLCTPSRAALLTGRLPVRMGMYPGVLVPSSRGGLPLEEVTVAEVLAARGYLTGMAGKWHLGVGPEGAFLPPHQGFHRFLGIPYSHDQGPCQNLTCFPPATPCDGGCDQGLVPIPLLANLSVEAQPPWLPGLEARYMAFAHDLMADAQRQDRPFFLYYASHHTHYPQFSGQSFAERSGRGPFGDSLMELDAAVGTLMTAIGDLGLLEETLVIFTADNGPETMRMSRGGCSGLLRCGKGTTYEGGVREPALAFWPGHIAPGVTHELASSLDLLPTLAALAGAPLPNVTLDGFDLSPLLLGTGKSPRQSLFFYPSYPDEVRGVFAVRTGKYKAHFFTQGSAHSDTTADPACHASSSLTAHEPPLLYDLSKDPGENYNLLGGVAGATPEVLQALKQLQLLKAQLDAAVTFGPSQVARGEDPALQICCHPGCTPRPACCHCPDPHA

SEQ ID NO: 819564 - protein, 507 aa, Homo sapiens; identical to SEQ ID NO: 819563

SEQ ID NO: 819565 - protein, 423 aa, Homo sapiens
MGMYPGVLVPSSRGGLPLEEVTVAEVLAARGYLTGMAGKWHLGVGPEGAFLPPHQGFHRFLGIPYSHDQGPCQNLTCFPPATPCDGGCDQGLVPIPLLANLSVEAQPPWLPGLEARYMAFAHDLMADAQRQDRPFFLYYASHHTHYPQFSGQSFAERSGRGPFGDSLMELDAAVGTLMTAIGDLGLLEETLVIFTADNGPETMRMSRGGCSGLLRCGKGTTYEGGVREPALAFWPGHIAPGVTHELASSLDLLPTLAALAGAPLPNVTLDGFDLSPLLLGTGKSPRQSLFFYPSYPDEVRGVFAVRTGKYKAHFFTQGSAHSDTTADPACHASSSLTAHEPPLLYDLSKDPGENYNLLGGVAGATPEVLQALKQLQLLKAQLDAAVTFGPSQVARGEDPALQICCHPGCTPRPACCHCPDPHA

SEQ ID NO: 819566 - protein, 507 aa, Homo sapiens; identical to SEQ ID NO: 819563

SEQ ID NO: 819567 - protein, 501 aa, Homo sapiens [sequence omitted]

SEQ ID NO: 819568 - protein, 507 aa, Homo sapiens; identical to SEQ ID NO: 819563

SEQ ID NO: 819569 - protein, 507 aa, Homo sapiens; identical to SEQ ID NO: 819563

SEQ ID NO: 819570 - protein, 423 aa, Homo sapiens; identical to SEQ ID NO: 819565

SEQ ID NO: 819571 - protein, 569 aa, Homo sapiens
  misc_feature (32)..(32): Xaa can be any naturally occurring amino acid
RAEETSSPVIGELWSPDQTAEASHVSRYGGSXRDPVLTLRAFAGPLSPAKVSCCRSFWKWCLAVPILCGCGSQTSTCLCLCAHPLGKEGAAPLPRPDPPSLSSQWIAGGREKRLSLSLGKATFLSVSGLCDLSRRAALLTGRLPVRMGMYPGVLVPSSRGGLPLEEVTVAEVLAARGYLTGMAGKWHLGVGPEGAFLPPHQGFHRFLGIPYSHDQGPCQNLTCFPPATPCDGGCDQGLVPIPLLANLSVEAQPPWLPGLEARYMAFAHDLMADAQRQDRPFFLYYASHHTHYPQFSGQSFAERSGRGPFGDSLMELDAAVGTLMTAIGDLGLLEETLVIFTADNGPETMRMSRGGCSGLLRCGKGTTYEGGVREPALAFWPGHIAPGVTHELASSLDLLPTLAALAGAPLPNVTLDGFDLSPLLLGTGKSPRQSLFFYPSYPDEVRGVFAVRTGKYKAHFFTQGSAHSDTTADPACHASSSLTAHEPPLLYDLSKDPGENYNLLGGVAGATPEVLQALKQLQLLKAQLDAAVTFGPSQVARGEDPALQICCHPGCTPRPACCHCPDPHA

SEQ ID NO: 819572 - protein, 411 aa, Homo sapiens
MGAPRSLLLALAAGLAVARPPNIVLIFADDLGYGDLGCYGHPSSTTPNLDQLAAGGLRFTDFYVPVSLCTPSRAALLTGRLPVRMGMYPGVLVPSSRGGLPLEEVTVAEVLAARGYLTGMAGKWHLGVGPEGAFLPPHQGFHRFLGIPYSHDQSLMELDAAVGTLMTAIGDLGLLEETLVIFTADNGPETMRMSRGGCSGLLRCGKGTTYEGGVREPALAFWPGHIAPGVTHELASSLDLLPTLAALAGAPLPNVTLDGFDLSPLLLGTGKSPRQSLFFYPSYPDEVRGVFAVRTGKYKAHFFTQGSAHSDTTADPACHASSSLTAHEPPLLYDLSKDPGENYNLLGGVAGATPEVLQALKQLQLLKAQLDAAVTFGPSQVARGEDPALQICCHPGCTPRPACCHCPDPHA

SEQ ID NO: 819573 - protein, 397 aa, Homo sapiens
MGAPRSLLLALAAGLAVARPPNIVLIFADDLGYGDLGCYGHPSSTTPNLDQLAAGGLRFTDFYVPVSLCTPSRAALLTGRLPVRMGMYPGVLVPSSRGGLPLEEVTVAEVLAARGYLTGMAGKWHLGVGPEGAFLPPHQGFHRFLGIPYSHDQGPCQNLTCFPPATPCDGGCDQGLVPIPLLANLSVEAQPPWLPGLEARYMAFAHDLMADAQRQDRPFFLYYASHHTHYPQFSGQSFAERSGRGPFGDSLMELDAAVGTLMTAIGDLGLLEETLVIFTADNGPETMRMSRGGCSGLLRCGKGTTYEGGVREPALAFWPGHIAPGVTHELASSLDLLPTLAALAGAPLPNVTLDGFDLSPLLLGTGKSPRQSLFFYPSYPDEVRGVFAVRTGKLCPQ

SEQ ID NO: 819574 - protein, 250 aa, Homo sapiens
RCGATGHPRWLRGCGSMAHERLLCPRPETMRMSRGGCSGLLRCGKGTTYEGGVREPALAFWPGHIAPGVTHELASSLDLLPTLAALAGAPLPNVTLDGFDLSPLLLGTGKSPRQSLFFYPSYPDEVRGVFAVRTGKYKAHFFTQGSAHSDTTADPACHASSSLTAHEPPLLYDLSKDPGENYNLLGGVAGATPEVLQALKQLQLLKAQLDAAVTFGPSQVARGEDPALQICCHPGCTPRPACCHCPDPHA

SEQ ID NO: 819575 - protein, 324 aa, Homo sapiens
MGAPRSLLLALAAGLAVARPPNIVLIFADDLGYGDLGCYGHPSSTTPNLDQLAAGGLRFTDFYVPVSLCTPSRAALLTGRLPVRMGMYPGVLVPSSRGGLPLEEVTVAEVLAARGYLTGMAGKWHLGVGPEGAFLPPHQGFHRFLGIPYSHDQGPCQNLTCFPPATPCDGGCDQGLVPIPLLANLSVEAQPPWLPGLEARYMAFAHDLMADAQRQDRPFFLYYASHVSDLGPTPWLPVTPTQCYSSLCPQHTHYPQFSGQSFAERSGRGPFGDSLMELDAAVGTLMTAIGDRSSRLETYHGLRSIVCSEDDQRLFKQPPLWLFA

SEQ ID NO: 819576 - protein, 233 aa, Homo sapiens
EKEKAEREVIVREFQEELVDHLKTFSISESPLEGTSHCHINLNETWTSKKKLFQVEIQPEEKHEEFRKLFELISLLNYTADQIRKKNRELEEEATGYKKCLEMTINMLNAFANEDFSCHGDLNTDQLKMDILFKKLKQKFNDLVAEKEAVSSECVNLAKDNEVLHQELLSMRNVQEKCEKLEKDKKMLEEEVLNLKTHMEKDMVELGKLQEYKSELDERAVQEIEKLEEIHLQ

SEQ ID NO: 819577 - protein, 173 aa, Homo sapiens
MALRVVRSVRALLCTLRAVPLPAAPCPPRPWQLGVGAVRTLRTGPALLSVRKFTEKHEWVTTENGIGTVGISNFAQEALGDVVYCSLPEVGTKLNKQDEFGALESVKAASELYSPLSGEVTEINEALAENPGLVNKSCYEDGWLIKMTLSNPSELDELMSEEAYEKYIKSIEE

SEQ ID NO: 819578 - protein, 141 aa, Homo sapiens
PPRHRLRASIQPAPSGRELPLPAPPPGAGGRGVALRPPHPCEHGAASGAERAGPALHPARGPVTRRALPAEALAAGGGRRPYAAHWTRSALGRVREFLLRGKQLTLGIAIKNEMALVEHGRDTQATFGIRNAFGEIVGFDL

SEQ ID NO: 819579 - protein, 173 aa, Homo sapiens; identical to SEQ ID NO: 819577

SEQ ID NO: 819580 - protein, 173 aa, Homo sapiens; identical to SEQ ID NO: 819577

SEQ ID NO: 819581 - protein, 253 aa, Homo sapiens
APAAPPPRLHPAGSLRPRTAPPRPASRRGWPRRSAATPAPLRTWRCEWCGACGPCSAPCARSRYPPRPARRGPGSWGWAPSVRCALDPLCSRVKLISYMSHLYAASLNLITPNLSSEAQIFFSARQTSNMRKFTEKHEWVTTENGIGTVGISNFAQEALGDVVYCSLPEVGTKLNKQDEFGALESVKAASELYSPLSGEVTEINEALAENPGLVNKSCYEDGWLIKMTLSNPSELDELMSEEAYEKYIKSIEE

SEQ ID NO: 819582 - protein, 147 aa, Homo sapiens
ASLGWMWRPDPVIWLRTGPALLSVRKFTEKHEWVTTENGIGTVGISNFAQEALGDVVYCSLPEVGTKLNKQDEFGALESVKAASELYSPLSGEVTEINEALAENPGLVNKSCYEDGWLIKMTLSNPSELDELMSEEAYEKYIKSIEE

SEQ ID NO: 819583 - protein, 125 aa, Homo sapiens
MALRVVRSVRALLCTLRAVPLPAAPCPPRPWQLGVGAVRTLRTGPALLSDEFGALESVKAASELYSPLSGEVTEINEALAENPGLVNKSCYEDGWLIKMTLSNPSELDELMSEEAYEKYIKSIEE

SEQ ID NO: 819584 - protein, 189 aa, Homo sapiens
MALRVVRSVRALLCTLRAVPLPAAPCPPRPWQLGVGAVRTLRTGPALLSVRKFTEKHEWVTTENGIGTVGISNFAQEALGDVVYCSLPEVGTKLNKQDEFGALESVKAASELYSPLSGEVTEINEALAENPGLVNKSCYEDGFVLFCFVLFCLRWSFALLVQAGVQWHNLGLTATSASPGSSDSSASAP

SEQ ID NO: 819585 - protein, 177 aa, Homo sapiens
MALRVVRSVRALLCTLRAVPLPAAPCPPRPWQLGVGAVRTLRTGPALLSVRKFTEKHEWVTTENGIGTVGISNFAQEALGDVVYCSLPEVGTKLNKQDEFGALESVKAASELYSPLSGEVTEINEALAENPGLVNKSCYEDGWLIKMTLSNPSELDELMSEEAYEKYIKSIEEVVLN

SEQ ID NO: 819586 - protein, 93 aa, Homo sapiens
PPRHRLRASIQPAPSGRELPLPAPPPGAGGRGVALRPPHPCEHGAASGAERAGPALHPARGPVTRRALPAEALAAGGGRRPYAAHWTRSALGA

SEQ ID NO: 819587 - protein, 161 aa, Homo sapiens
MALRVVRSVRALLCTLRAVPLPAAPCPPRPWQLGVGAVRTLRTGPALLSVRKFTEKHEWVTTENGIGTVGISNFAQEALGDVVYCSLPEVGTKLNKQDEFGALESVKAASELYSPLSGEVTEINEALAENPGLVNKSCYEDGKLLLEISQGITTTVNILSR

SEQ ID NO: 819588 - protein, 100 aa, Homo sapiens
  misc_feature (79)..(79): Xaa can be any naturally occurring amino acid
MALRVVRSVRALLCTLRAVPLPAAPCPPRPWQLGVGAVRTLRTGPALLSVRKFTEKHEWVTTENGIGTVGISNFAQKRXEMLFIVASLTLGLNSILLYQG

SEQ ID NO: 819589 - protein, 560 aa, Homo sapiens
MECLYYFLGFLLLAARLPLDAAKRFHDVLGNERPSAYMREHNQLNGWSSDENDWNEKLYPVWKRGDMRWKNSWKGGRVQAVLTSDSPALVGSNITFAVNLIFPRCQKEDANGNIVYEKNCRNEAGLSADPYVYNWTAWSEDSDGENGTGQSHHNVFPDGKPFPHHPGWRRWNFIYVFHTLGQYFQKLGRCSVRVSVNTANVTLGPQLMEVTVYRRHGRAYVPIAQVKDVYVVTDQIPVFVTMFQKNDRNSSDETFLKDLPIMFDVLIHDPSHFLNYSTINYKWSFGDNTGLFVSTNHTVNHTYVLNGTFSLNLTVKAAAPGPCPPPPPPPRPSKPTPSLGPAGDNPLELSRIPDENCQINRYGHFQATITIVEGILEVNIIQMTDVLMPVPWPESSLIDFVVTCQGSIPTEVCTIISDPTCEITQNTVCSPVDVDEMCLLTVRRTFNGSGTYCVNLTLGDDTSLALTSTLISVPDRDPASPLRMANSALISVGCLAIFVTVISLLVYKKHKEYNPIENSPGNVVRSKGLSVFLNRAKAVFFPGNQEKDPLLKNQEFKGVS

SEQ ID NO: 819590 - protein, 206 aa, Homo sapiens
MECLYYFLGFLLLAARLPLDAAKRFHDVLGNERPSAYMREHNQLNGWSSDENDWNEKLYPVWKRGDMRWKNSWKGGRVQAVLTSDSPALVGSNITFAVNLIFPRCQKEDANGNIVYEKNCRNEAGLSADPYVYNWTAWSEDSDGENGTGQSHHNVFPDGKPFPHHPGWRRWNFIYVFHTLGWLLQTPKLLLYLSLKFQPSLFLLYN

SEQ ID NO: 819591 - protein, 77 aa, Homo sapiens
MECLYYFLGFLLLAARLPLDAAKPRVQTTEAVCRFARGRELSRCNPGPGIAGTGRVGSGQRRSGFWSEPQRPETWAA

SEQ ID NO: 819592 - protein, 572 aa, Homo sapiens
MECLYYFLGFLLLAARLPLDAAKRFHDVLGNERPSAYMREHNQLNGWSSDENDWNEKLYPVWKRGDMRWKNSWKGGRVQAVLTSDSPALVGSNITFAVNLIFPRCQKEDANGNIVYEKNCRNEAGLSADPYVYNWTAWSEDSDGENGTGQSHHNVFPDGKPFPHHPGWRRWNFIYVFHTLGQYFQKLGRCSVRVSVNTANVTLGPQLMEVTVYRRHGRAYVPIAQVKDVYVVTDQIPVFVTMFQKNDRNSSDETFLKDLPIMFDVLIHDPSHFLNYSTINYKWSFGDNTGLFVSTNHTVNHTYVLNGTFSLNLTVKAAAPGPCPPPPPPPRPSKPTPSLATTLKSYDSNTPGPAGDNPLELSRIPDENCQINRYGHFQATITIVEGILEVNIIQMTDVLMPVPWPESSLIDFVVTCQGSIPTEVCTIISDPTCEITQNTVCSPVDVDEMCLLTVRRTFNGSGTYCVNLTLGDDTSLALTSTLISVPDRDPASPLRMANSALISVGCLAIFVTVISLLVYKKHKEYNPIENSPGNVVRSKGLSVFLNRAKAVFFPGNQEKDPLLKNQEFKGVS

SEQ ID NO: 819593 - protein, 560 aa, Homo sapiens; identical to SEQ ID NO: 819589

SEQ ID NO: 819594 - protein, 540 aa, Homo sapiens
MTLGFHDVLGNERPSAYMREHNQLNGWSSDENDWNEKLYPVWKRGDMRWKNSWKGGRVQAVLTSDSPALVGSNITFAVNLIFPRCQKEDANGNIVYEKNCRNEAGLSADPYVYNWTAWSEDSDGENGTGQSHHNVFPDGKPFPHHPGWRRWNFIYVFHTLGQYFQKLGRCSVRVSVNTANVTLGPQLMEVTVYRRHGRAYVPIAQVKDVYVVTDQIPVFVTMFQKNDRNSSDETFLKDLPIMFDVLIHDPSHFLNYSTINYKWSFGDNTGLFVSTNHTVNHTYVLNGTFSLNLTVKAAAPGPCPPPPPPPRPSKPTPSLGPAGDNPLELSRIPDENCQINRYGHFQATITIVEGILEVNIIQMTDVLMPVPWPESSLIDFVVTCQGSIPTEVCTIISDPTCEITQNTVCSPVDVDEMCLLTVRRTFNGSGTYCVNLTLGDDTSLALTSTLISVPDRDPASPLRMANSALISVGCLAIFVTVISLLVYKKHKEYNPIENSPGNVVRSKGLSVFLNRAKAVFFPGNQEKDPLLKNQEFKGVS

SEQ ID NO: 819595 - protein, 542 aa, Homo sapiens
MECLYYFLGFLLLAARLPLDAAKRFHDVLGNERPSAYMREHNQLNGWSSDENDWNEKLYPVWKRGDMRWKNSWKGGRVQAVLTSDSPALVGSNITFAVNLIFPRCQKEDANGNIVYEKNCRNEAGLSADPYVYNWTAWSEDSDGPHHPGWRRWNFIYVFHTLGQYFQKLGRCSVRVSVNTANVTLGPQLMEVTVYRRHGRAYVPIAQVKDVYVVTDQIPVFVTMFQKNDRNSSDETFLKDLPIMFDVLIHDPSHFLNYSTINYKWSFGDNTGLFVSTNHTVNHTYVLNGTFSLNLTVKAAAPGPCPPPPPPPRPSKPTPSLGPAGDNPLELSRIPDENCQINRYGHFQATITIVEGILEVNIIQMTDVLMPVPWPESSLIDFVVTCQGSIPTEVCTIISDPTCEITQNTVCSPVDVDEMCLLTVRRTFNGSGTYCVNLTLGDDTSLALTSTLISVPDRDPASPLRMANSALISVGCLAIFVTVISLLVYKKHKEYNPIENSPGNVVRSKGLSVFLNRAKAVFFPGNQEKDPLLKNQEFKGVS

SEQ ID NO: 819596 - protein, 560 aa, Homo sapiens; identical to SEQ ID NO: 819589

SEQ ID NO: 819597 - protein, 239 aa, Homo sapiens
YIIGRGTHTTRLQNPPFFGPAGDNPLELSRIPDENCQINRYGHFQATITIVEGILEVNIIQMTDVLMPVPWPESSLIDFVVTCQGSIPTEVCTIISDPTCEITQNTVCSPVDVDEMCLLTVRRTFNGSGTYCVNLTLGDDTSLALTSTLISVPDRDPASPLRMANSALISVGCLAIFVTVISLLVYKKHKEYNPIENSPGNVVRSKGLSVFLNRAKAVFFPGNQEKDPLLKNQEFKGVS

SEQ ID NO: 819598 - protein, 115 aa, Homo sapiens
EPGKGTPVRGHGGLKEHGEYGQLSGFLAQLEDPASPLRMANSALISVGCLAIFVTVISLLVYKKHKEYNPIENSPGNVVRSKGLSVFLNRAKAVFFPGNQEKDPLLKNQEFKGVS

SEQ ID NO: 819599 - protein, 555 aa, Homo sapiens
MECLYYFLGFLLLAARLPLDAAKRFHDVLGNERPSAYMREHNQLNGWSSDENDWNEKLYPVWKRGDMRWKNSWKGGRVQAVLTSDSPALVGSNITFAVNLIFPRCQKEDANGNIVYEKNCRNEAGLSADPYVYNWTAWSEDSDGENGTGQSHHNVFPDGKPFPHHPGWRRWNFIYVFHTLGQYFQKLGRCSVRVSVNTANVTLGPQLMEVTVYRRHGRAYVPIAQVKDVYVVTDQIPVFVTMFQKNDRNSSDETFLKDLPIMFDVLIHDPSHFLNYSTINYKWSFGDNTGLFVSTNHTVNHTYVLNGTFSLNLTVKAAAPGPCPPPPPPPRPSKPTPSLGPAGDNPLELSRIPDENCQINRYGHFQATITIVEGILEVNIIQMTDVLMPVPWPESSLIDFVVTCQGSIPTEVCTIISDPTCEITQNTVCSPVDVDEMCLLTVRRTFNGSGTYCVNLTLGDDTSLALTSTLISVPDRDPASPLRMANSALISVGCLAIFVTVISLLVYKKHKEYNPIENSPGNVVRSKGLSVFLNRAKAVFFRPAGSEPYFSVALM

SEQ ID NO: 819600 - protein, 508 aa, Homo sapiens
MECLYYFLGFLLLAARLPLDAAKRFHDVLGNERPSAYMREHNQLNGWSSDENDWNEKLYPVWKRGDMRWKNSWKGGRVQAVLTSDSPALVGSNITFAVNLIFPRCQKEDANGNIVYEKNCRNEAGLSADPYVYNWTAWSEDSDGENGTGQSHHNVFPDGKPFPHHPGWRRWNFIYVFHTLGQYFQKLGRCSVRVSVNTANVTLGPQLMEVTVYRRHGRAYVPIAQVKDVYVVTDQIPVFVTMFQKNDRNSSDETFLKDLPIMFDVLIHDPSHFLNYSTINYKWSFGDNTGLFVSTNHTVNHTYVLNGTFSLNLTVKAAAPGPCPPPPPPPRPSKPTPSLGPAGDNPLELSRIPDENCQINRYGHFQATITIVEGILEVNIIQMTDVLMPVPWPESSLIDFVVTCQGSIPTEVCTIISDPTCEITQNTVCSPVDVDEMCLLTVRRTFNGSGTYCVNLTLGDDTSLALTSTLISVPDRDPASPLRMANSALISVGCLAIFVTVISLLVYK

SEQ ID NO: 819601 - protein, 341 aa, Homo sapiens
MECLYYFLGFLLLAARLPLDAAKRFHDVLGNERPSAYMREHNQLNGWSSDENDWNEKLYPVWKRGDMRWKNSWKGGRVQAVLTSDSPALVGSNITFAVNLIFPRCQKEDANGNIVYEKNCRNEAGLSADPYVYNWTAWSEDSDGENGTGQSHHNVFPDGKPFPHHPGWRRWNFIYVFHTLGQYFQKLGRCSVRVSVNTANVTLGPQLMEVTVYRRHGRAYVPIAQVKDVYVVTDQIPVFVTMFQKNDRNSSDETFLKDLPIMFDVLIHDPSHFLNYSTINYKWSFGDNTGLFVSTNHTVNHTYVLNGTFSLNLTVKAAAPGPCPPPPPPPRPSKPTPSLDL

SEQ ID NO: 819602 - protein, 344 aa, Homo sapiens [sequence omitted]

SEQ ID NO: 819603 - protein, 206 aa, Homo sapiens; identical to SEQ ID NO: 819590

SEQ ID NO: 819604 - protein, 363 aa, Homo sapiens
MASKSWLNFLTFLCGSAIGFLLCSQLFSILLGEKVDTQPNVLHNDPHARHSDDNGQNHLEGQMNFNADSSQHKDENTDIAENLYQKVRILCWVMTGPQNLEKKAKHVKATWAQRCNKVLFMSSEENKDFPAVGLKTKEGRDQLYWKTIKAFQYVHEHYLEDADWFLKADDDTYVILDNLRWLLSKYDPEEPIYFGRRFKPYVKQGYMSGGAGYVLSKEALKRFVDAFKTDKCTHSSSIEDLALGRCMEIMNVEAGDSRDTIGKETFHPFVPEHHLIKGYLPRTFWYWNYNYYPPVEGPGCCSDLAVSFHYVDSTTMYELEYLVYHLRPYGYLYRYQPTLPERILKEISQANKNEDTKVKLGNP

SEQ ID NO: 819605 - protein, 309 aa, Homo sapiens
MASKSWLNFLTFLCGSAIGFLLCSQLFSILLGEKVDTQPNVLHNDPHARHSDDNGQNHLEGQMNFNADSSQHKDENTDIAENLYQKVRILCWVMTGPQNLEKKAKHVKATWAQRCNKVLFMSSEENKDFPAVGLKTKEGRDQLYWKTIKAFQYVHEHYLEDADWFLKADDDTYVILDNLRWLLSKYDPEEPIYFGRRFKPYVKQGYMSGGAGYVLSKEALKRFVDAFKTDKCTHSSSIEDLALGRCMEIMNVEAGDSRDTIGKETFHPFVPEHHLIKGYLPRTFWYWNYNYYPPVEVSLEILLLCQYLD

SEQ ID NO: 819606 - protein, 363 aa, Homo sapiens; identical to SEQ ID NO: 819604

SEQ ID NO: 819607 - protein, 363 aa, Homo sapiens; identical to SEQ ID NO: 819604

SEQ ID NO: 819608 - protein, 1148 aa, Homo sapiens
MDIRKFFGVIPSGKKLVSETVKKNEKTKSDEETLKAKKGIKEIKVNSSRKEDDFKQKQPSKKKRIIYDSDSESEETLQVKNAKKPPEKLPVSSKPGKISRQDPVTYISETDEEDDFMCKKAASKSKENGRSTNSHLGTSNMKKNEENTKTKNKPLSPIKLTPTSVLDYFGTGSVQRSNKKMVASKRKELSQNTDESGLNDEAIAKQLQLDEDAELERQLHEDEEFARTLAMLDEEPKTKKARKDTEAGETFSSVQANLSKAEKHKYPHKVKTAQVSDERKSYSPRKQSKYESSKESQQHSKSSADKIGEVSSPKASSKLAIMKRKEESSYKEIEPVASKRKENAIKLKGETKTPKKTKSSPAKKESVSPEDSEKKRTNYQAYRSYLNREGPKALGSKEIPKGAENCLEGLIFVITGVLESIERDEAKSLIERYGGKVTGNVSKKTNYLVMGRDSGQSKSDKAAALGTKIIDEDGLLNLIRTMPGKKSKYEIAVETEMKKESKLERTPQKNVQGKRKISPSKKESESKKSRPTSKRDSLAKTIKKETDVFWKSLDFKEQVAEETSGDSKARNLADDSSENKVENLLWVDKYKPTSLKTIIGQQGDQSCANKLLRWLRNWQKSSSEDKKHAAKFGKFSGKDDGSSFKAALLSGPPGVGKTTTASLVCQELGYSYVELNASDTRSKSSLKAIVAESLNNTSIKGFYSNGAASSVSTKHALIMDEVDGMAGNEDRGGIQELIGLIKHTKIPIICMCNDRNHPKIRSLVHYCFDLRFQRPRVEQIKGAMMSIAFKEGLKIPPPAMNEIILGANQDIRQVLHNLSMWCARSKALTYDQAKADSHRAKKDIKMGPFDVARKVFAAGEETAHMSLVDKSDLFFHDYSIAPLFVQENYIHVKPVAAGGDMKKHLMLLSRAADSICDGDLVDSQIRSKQNWSLLPAQAIYASVLPGELMRGYMTQFPTFPSWLGKHSSTGKHDRIVQDLALHMSLRTYSSKRTVNMDYLSLLRDALVQPLTSQGVDGVQDVVALMDTYYLMKEDFENIMEISSWGGKPSPFSKLDPKVKAAFTRAYNKEAHLTPYSLQAIKASRHSTSPSLDSEYNEELNEDDSQSDEKDQDAIETDAMIKKKTKSSKPSKPEKDKEPRKGKGKSSKK

SEQ ID NO: 819609 - protein, 1148 aa, Homo sapiens; identical to SEQ ID NO: 819608

SEQ ID NO: 819610 - protein, 1148 aa, Homo sapiens; identical to SEQ ID NO: 819608

SEQ ID NO: 819611 - protein, 1148 aa, Homo sapiens; identical to SEQ ID NO: 819608

SEQ ID NO: 819612 - protein, 1148 aa, Homo sapiens; identical to SEQ ID NO: 819608

SEQ ID NO: 819613 - protein, 1037 aa, Homo sapiens
LLRIVCVAFTATVLKGTSHTCPSHLGTSNMKKNEENTKTKNKPLSPIKLTPTSVLDYFGTGSVQRSNKKMVASKRKELSQNTDESGLNDEAIAKQLQLDEDAELERQLHEDEEFARTLAMLDEEPKTKKARKDTEAGETFSSVQANLSKAEKHKYPHKVKTAQVSDERKSYSPRKQSKYESSKESQQHSKSSADKIGEVSSPKASSKLAIMKRKEESSYKEIEPVASKRKENAIKLKGETKTPKKTKSSPAKKESVSPEDSEKKRTNYQAYRSYLNREGPKALGSKEIPKGAENCLEGLIFVITGVLESIERDEAKSLIERYGGKVTGNVSKKTNYLVMGRDSGQSKSDKAAALGTKIIDEDGLLNLIRTMPGKKSKYEIAVETEMKKESKLERTPQKNVQGKRKISPSKKESESKKSRPTSKRDSLAKTIKKETDVFWKSLDFKEQVAEETSGDSKARNLADDSSENKVENLLWVDKYKPTSLKTIIGQQGDQSCANKLLRWLRNWQKSSSEDKKHAAKFGKFSGKDDGSSFKAALLSGPPGVGKTTTASLVCQELGYSYVELNASDTRSKSSLKAIVAESLNNTSIKGFYSNGAASSVSTKHALIMDEVDGMAGNEDRGGIQELIGLIKHTKIPIICMCNDRNHPKIRSLVHYCFDLRFQRPRVEQIKGAMMSIAFKEGLKIPPPAMNEIILGANQDIRQVLHNLSMWCARSKALTYDQAKADSHRAKKDIKMGPFDVARKVFAAGEETAHMSLVDKSDLFFHDYSIAPLFVQENYIHVKPVAAGGDMKKHLMLLSRAADSICDGDLVDSQIRSKQNWSLLPAQAIYASVLPGELMRGYMTQFPTFPSWLGKHSSTGKHDRIVQDLALHMSLRTYSSKRTVNMDYLSLLRDALVQPLTSQGVDGVQDVVALMDTYYLMKEDFENIMEISSWGGKPSPFSKLDPKVKAAFTRAYNKEAHLTPYSLQAIKASRHSTSPSLDSEYNEELNEDDSQSDEKDQDAIETDAMIKKKTKSSKPSKPEKDKEPRKGKGKSSKK

SEQ ID NO: 819614 - protein, 1209 aa, Homo sapiens
MDIRKFFGVIPSGKKLVSETVKKNEKTKSDEETLKAKKGIKEIKVNSSRKEDDFKQKQPSKKKRIIYDSDSESEETLQVKNAKKPPEKLPVSSKPGKISRQDPVTYISETEETITGIIRELYVKGPDPVPDTLSSSPKEKIKRKTKSIGELCRLRETFVDETVQNIKDKKYNEEDDFMCKKAASKSKENGRSTNSHLGTSNMKKNEENTKTKNKPLSPIKLTPTSVLDYFGTGSVQRSNKKMVASKRKELSQNTDESGLNDEAIAKQLQLDEDAELERQLHEDEEFARTLAMLDEEPKTKKARKDTEAGETFSSVQANLSKAEKHKYPHKVKTAQVSDERKSYSPRKQSKYESSKESQQHSKSSADKIGEVSSPKASSKLAIMKRKEESSYKEIEPVASKRKENAIKLKGETKTPKKTKSSPAKKESVSPEDSEKKRTNYQAYRSYLNREGPKALGSKEIPKGAENCLEGLIFVITGVLESIERDEAKSLIERYGGKVTGNVSKKTNYLVMGRDSGQSKSDKAAALGTKIIDEDGLLNLIRTMPGKKSKYEIAVETEMKKESKLERTPQKNVQGKRKISPSKKESESKKSRPTSKRDSLAKTIKKETDVFWKSLDFKEQVAEETSGDSKARNLADDSSENKVENLLWVDKYKPTSLKTIIGQQGDQSCANKLLRWLRNWQKSSSEDKKHAAKFGKFSGKDDGSSFKAALLSGPPGVGKTTTASLVCQELGYSYVELNASDTRSKSSLKAIVAESLNNTSIKGFYSNGAASSVSTKHALIMDEVDGMAGNEDRGGIQELIGLIKHTKIPIICMCNDRNHPKIRSLVHYCFDLRFQRPRVEQIKGAMMSIAFKEGLKIPPPAMNEIILGANQDIRQVLHNLSMWCARSKALTYDQAKADSHRAKKDIKMGPFDVARKVFAAGEETAHMSLVDKSDLFFHDYSIAPLFVQENYIHVKPVAAGGDMKKHLMLLSRAADSICDGDLVDSQIRSKQNWSLLPAQAIYASVLPGELMRGYMTQFPTFPSWLGKHSSTGKHDRIVQDLALHMSLRTYSSKRTVNMDYLSLLRDALVQPLTSQGVDGVQDVVALMDTYYLMKEDFENIMEISSWGGKPSPFSKLDPKVKAAFTRAYNKEAHLTPYSLQAIKASRHSTSPSLDSEYNEELNEDDSQSDEKDQDAIETDAMIKKKTKSSKPSKPEKDKEPRKGKGKSSKK

SEQ ID NO: 819615 - protein, 1032 aa, Homo sapiens
MCKKAASKSKENGRSTNSHLGTSNMKKNEENTKTKNKPLSPIKLTPTSVLDYFGTGSVQRSNKKMVASKRKELSQNTDESGLNDEAIAKQLQLDEDAELERQLHEDEEFARTLAMLDEEPKTKKARKDTEAGETFSSVQANLSKAEKHKYPHKVKTAQVSDERKSYSPRKQSKYESSKESQQHSKSSADKIGEVSSPKASSKLAIMKRKEESSYKEIEPVASKRKENAIKLKGETKTPKKTKSSPAKKESVSPEDSEKKRTNYQAYRSYLNREGPKALGSKEIPKGAENCLEGLIFVITGVLESIERDEAKSLIERYGGKVTGNVSKKTNYLVMGRDSGQSKSDKAAALGTKIIDEDGLLNLIRTMPGKKSKYEIAVETEMKKESKLERTPQKNVQGKRKISPSKKESESKKSRPTSKRDSLAKTIKKETDVFWKSLDFKEQVAEETSGDSKARNLADDSSENKVENLLWVDKYKPTSLKTIIGQQGDQSCANKLLRWLRNWQKSSSEDKKHAAKFGKFSGKDDGSSFKAALLSGPPGVGKTTTASLVCQELGYSYVELNASDTRSKSSLKAIVAESLNNTSIKGFYSNGAASSVSTKHALIMDEVDGMAGNEDRGGIQELIGLIKHTKIPIICMCNDRNHPKIRSLVHYCFDLRFQRPRVEQIKGAMMSIAFKEGLKIPPPAMNEIILGANQDIRQVLHNLSMWCARSKALTYDQAKADSHRAKKDIKMGPFDVARKVFAAGEETAHMSLVDKSDLFFHDYSIAPLFVQENYIHVKPVAAGGDMKKHLMLLSRAADSICDGDLVDSQIRSKQNWSLLPAQAIYASVLPGELMRGYMTQFPTFPSWLGKHSSTGKHDRIVQDLALHMSLRTYSSKRTVNMDYLSLLRDALVQPLTSQGVDGVQDVVALMDTYYLMKEDFENIMEISSWGGKPSPFSKLDPKVKAAFTRAYNKEAHLTPYSLQAIKASRHSTSPSLDSEYNEELNEDDSQSDEKDQDAIETDAMIKKKTKSSKPSKPEKDKEPRKGKGKSSKK

SEQ ID NO: 819616 - protein, 827 aa, Homo sapiens
MKRKEESSYKEIEPVASKRKENAIKLKGETKTPKKTKSSPAKKESVSPEDSEKKRTNYQAYRSYLNREGPKALGSKEIPKGAENCLEGLIFVITGVLESIERDEAKSLIERYGGKVTGNVSKKTNYLVMGRDSGQSKSDKAAALGTKIIDEDGLLNLIRTMPGKKSKYEIAVETEMKKESKLERTPQKNVQGKRKISPSKKESESKKSRPTSKRDSLAKTIKKETDVFWKSLDFKEQVAEETSGDSKARNLADDSSENKVENLLWVDKYKPTSLKTIIGQQGDQSCANKLLRWLRNWQKSSSEDKKHAAKFGKFSGKDDGSSFKAALLSGPPGVGKTTTASLVCQELGYSYVELNASDTRSKSSLKAIVAESLNNTSIKGFYSNGAASSVSTKHALIMDEVDGMAGNEDRGGIQELIGLIKHTKIPIICMCNDRNHPKIRSLVHYCFDLRFQRPRVEQIKGAMMSIAFKEGLKIPPPAMNEIILGANQDIRQVLHNLSMWCARSKALTYDQAKADSHRAKKDIKMGPFDVARKVFAAGEETAHMSLVDKSDLFFHDYSIAPLFVQENYIHVKPVAAGGDMKKHLMLLSRAADSICDGDLVDSQIRSKQNWSLLPAQAIYASVLPGELMRGYMTQFPTFPSWLGKHSSTGKHDRIVQDLALHMSLRTYSSKRTVNMDYLSLLRDALVQPLTSQGVDGVQDVVALMDTYYLMKEDFENIMEISSWGGKPSPFSKLDPKVKAAFTRAYNKEAHLTPYSLQAIKASRHSTSPSLDSEYNEELNEDDSQSDEKDQDAIETDAMIKKKTKSSKPSKPEKDKEPRKGKGKSSKK

SEQ ID NO: 819617 - protein, 827 aa, Homo sapiens; identical to SEQ ID NO: 819616

SEQ ID NO: 819618 - protein, 1148 aa, Homo sapiens; identical to SEQ ID NO: 819608

SEQ ID NO: 819619 - protein, 200 aa, Homo sapiens
MRGYMTQFPTFPSWLGKHSSTGKHDRIVQDLALHMSLRTYSSKRTVNMDYLSLLRDALVQPLTSQGVDGVQDVVALMDTYYLMKEDFENIMEISSWGGKPSPFSKLDPKVKAAFTRAYNKEAHLTPYSLQAIKASRHSTSPSLDSEYNEELNEDDSQSDEKDQDAIETDAMIKKKTKSSKPSKPEKDKEPRKGKGKSSKK

SEQ ID NO: 819620 - protein, 776 aa, Homo sapiens
MDIRKFFGVIPSGKKLVSETVKKNEKTKSDEETLKAKKGIKEIKVNSSRKEDDFKQKQPSKKKRIIYDSDSESEETLQVKNAKKPPEKLPVSSKPGKISRQDPVTYISETDEEDDFMCKKAASKSKENGRSTNSHLGTSNMKKNEENTKTKNKPLSPIKLTPTSVLDYFGTGSVQRSNKKMVASKRKELSQNTDESGLNDEAIAKQLQLDEDAELERQLHEDEEFARTLAMLDEEPKTKKARKDTEAGETFSSVQANLSKAEKHKYPHKVKTAQVSDERKSYSPRKQSKYESSKESQQHSKSSADKIGEVSSPKASSKLAIMKRKEESSYKEIEPVASKRKENAIKLKGETKTPKKTKSSPAKKESVSPEDSEKKRTNYQAYRSYLNREGPKALGSKEIPKGAENCLEGLIFVITGVLESIERDEAKSLIERYGGKVTGNVSKKTNYLVMGRDSGQSKSDKAAALGTKIIDEDGLLNLIRTMPGKKSKYEIAVETEMKKESKLERTPQKNVQGKRKISPSKKESESKKSRPTSKRDSLAKTIKKETDVFWKSLDFKEQVAEETSGDSKARNLADDSSENKVENLLWVDKYKPTSLKTIIGQQGDQSCANKLLRWLRNWQKSSSEDKKHAAKFGKFSGKDDGSSFKAALLSGPPGVGKTTTASLVCQELGYSYVELNASDTRSKSSLKAIVAESLNNTSIKGFYSNGAASSVSTKHALIMDEVDGMAGNEDRGGIQELIGLIKHTKIPIICMCNDRNHPKIRSLVHYCFDLVRRASE

SEQ ID NO: 819621 - protein, 783 aa, Homo sapiens
MDIRKFFGVIPSGKKLVSETVKKNEKTKSDEETLKAKKGIKEIKVNSSRKEDDFKQKQPSKKKRIIYDSDSESEETLQVKNAKKPPEKLPVSSKPGKISRQDPVTYISETDEEDDFMCKKAASKSKENGRSTNSHLGTSNMKKNEENTKTKNKPLSPIKLTPTSVLDYFGTGSVQRSNKKMVASKRKELSQNTDESGLNDEAIAKQLQLDEDAELERQLHEDEEFARTLAMLDEEPKTKKARKDTEAGETFSSVQANLSKAEKHKYPHKVKTAQVSDERKSYSPRKQSKYESSKESQQHSKSSADKIGEVSSPKASSKLAIMKRKEESSYKEIEPVASKRKENAIKLKGETKTPKKTKSSPAKKESVSPEDSEKKRTNYQAYRSYLNREGPKALGSKEIPKGAENCLEGLIFVITGVLESIERDEAKSLIERYGGKVTGNVSKKTNYLVMGRDSGQSKSDKAAALGTKIIDEDGLLNLIRTMPGKKSKYEIAVETEMKKESKLERTPQKNVQGKRKISPSKKESESKKSRPTSKRDSLAKTIKKETDVFWKSLDFKEQVAEETSGDSKARNLADDSSENKVENLLWVDKYKPTSLKTIIGQQGDQSCANKLLRWLRNWQKSSSEDKKHAAKFGKFSGKDDGSSFKAALLSGPPGVGKTTTASLVCQELGYSYVELNASDTRSKSSLKAIVAESLNNTSIKGFYSNGAASSVSTKHALIMDEVDGMAGNEDRGGIQELIGLIKHTKIPIICMCNDRNHPKIRSLVHYCFDLRFQRPRVEQIKVL

SEQ ID NO: 819622 - protein, 728 aa, Homo sapiens
ISFLAPHRSLSPKYSHLVLAHPPDYLKDQLSPRPRPPLGLCHPLPAGRRPVPGRVSPMGTQRLCGRGTQGWPGSSEQHVQEATSSAGLHSGVDELGVRSEPGGRLPERSLGPAHPAPAAMAGTLDLDKGCTVEELLRGCIEAFDDSGKVRDPQLVRMFLMMHPWYIPSSQLAAKLLHIYQQSRKDNSNSLQVKTCHLVRYWISAFPAEFDLNPELAEQIKELKALLDQEGNRRHSSLIDIDSVPTYKWKRQVTQRNPVGQKKRKMSLLFDHLEPMELAEHLTYLEYRSFCKILFQDYHSFVTHGCTVDNPVLERFISLFNSVSQWVQLMILSKPTAPQRALVITHFVHVAEKLLQLQNFNTLMAVVGGLSHSSISRLKETHSHVSPETIKLWEGLTELVTATGNYGNYRRRLAACVGFRFPILGVHLKDLVALQLALPDWLDPARTRLNGAKMKQLFSILEELAMVTSLRPPVQANPDLLSLLTVSLDQYQTEDELYQLSLQREPRSKSSPTSPTSCTPPPRPPVLEEWTSAAKPKLDQALVVEHIEKMVESVFRNFDVDGDGHISQEEFQIIRGNFPYLSAFGDLDQNQDGCISREEMVSYFLRSSSVLGGRMGFVHNFQESNSLRPVACRHCKALILGIYKQGLKCRACGVNCHKQCKDRLSVECRRRAQSVSLEGSAPSPSPMHSHHHRAFSFSLPRPGRRGSRPPEIREEEVQTVEDGVFDIHL

SEQ ID NO: 819623 - protein, 609 aa, Homo sapiens
MAGTLDLDKGCTVEELLRGCIEAFDDSGKVRDPQLVRMFLMMHPWYIPSSQLAAKLLHIYQQSRKDNSNSLQVKTCHLVRYWISAFPAEFDLNPELAEQIKELKALLDQEGNRRHSSLIDIDSVPTYKWKRQVTQRNPVGQKKRKMSLLFDHLEPMELAEHLTYLEYRSFCKILFQDYHSFVTHGCTVDNPVLERFISLFNSVSQWVQLMILSKPTAPQRALVITHFVHVAEKLLQLQNFNTLMAVVGGLSHSSISRLKETHSHVSPETIKLWEGLTELVTATGNYGNYRRRLAACVGFRFPILGVHLKDLVALQLALPDWLDPARTRLNGAKMKQLFSILEELAMVTSLRPPVQANPDLLSLLTVSLDQYQTEDELYQLSLQREPRSKSSPTSPTSCTPPPRPPVLEEWTSAAKPKLDQALVVEHIEKMVESVFRNFDVDGDGHISQEEFQIIRGNFPYLSAFGDLDQNQDGCISREEMVSYFLRSSSVLGGRMGFVHNFQESNSLRPVACRHCKALILGIYKQGLKCRACGVNCHKQCKDRLSVECRRRAQSVSLEGSAPSPSPMHSHHHRAFSFSLPRPGRRGSRPPEIREEEVQTVEDGVFDIHL

SEQ ID NO: 819624 - protein, 90 aa, Homo sapiens
AGSGAAAWRAGGSRSRSEAGGRERTEVGSARPVRAPCGRSQEGSVRARWEAPGAQPGPSPPRAGGHGRHPGPGQGLHGGGAAPRVHRSLR

SEQ ID NO: 819625 - protein, 80 aa, Homo sapiens
RRTSTVHPAFPSHLPAGPSPAYPHLADEKIEAPRGQVILKVTRGSGRARRGRLWVALRKSPPENSVQELPCPPAWGSEYV

SEQ ID NO: 819626 - protein, 312 aa, Homo sapiens
RGAGPRRGERAGAAAAARPAGGSARRWGRPGRCGLLAAGPKRVRSEPGGRLPERSLGPAHPAPAAMAGTLDLDKGCTVEELLRGCIEAFDDSGKVRDPQLVRMFLMMHPWYIPSSQLAAKLLHIYQQSRKDNSNSLQVKTCHLVRYWISAFPAEFDLNPELAEQIKELKALLDQEGNRRHSSLIDIDSVPTYKWKRQVTQRNPVGQKKRKMSLLFDHLEPMELAEHLTYLEYRSFCKILFQDYHSFVTHGCTVDNPVLERFISLFNSVSQWVQLMILSKPTAPQRALVITHFVHVAEEACLTAAEHIQHALM

SEQ ID NO: 819627 - protein, 87 aa, Homo sapiens
TKADIEQLPSYRFNPDSHQSEQTLCVVCFSDFEAGSCSESSPPPIEFPLLKNAVVGSRTHSCLGENTSTRAGSLGVSGQEAGDGGGI

SEQ ID NO: 819628 - protein, 609 aa, Homo sapiens; identical to SEQ ID NO: 819623

SEQ ID NO: 819629 - protein, 640 aa, Homo sapiens
RSASPGTGVRSEPGGRLPERSLGPAHPAPAAMAGTLDLDKGCTVEELLRGCIEAFDDSGKVRDPQLVRMFLMMHPWYIPSSQLAAKLLHIYQQSRKDNSNSLQVKTCHLVRYWISAFPAEFDLNPELAEQIKELKALLDQEGNRRHSSLIDIDSVPTYKWKRQVTQRNPVGQKKRKMSLLFDHLEPMELAEHLTYLEYRSFCKILFQDYHSFVTHGCTVDNPVLERFISLFNSVSQWVQLMILSKPTAPQRALVITHFVHVAEKLLQLQNFNTLMAVVGGLSHSSISRLKETHSHVSPETIKLWEGLTELVTATGNYGNYRRRLAACVGFRFPILGVHLKDLVALQLALPDWLDPARTRLNGAKMKQLFSILEELAMVTSLRPPVQANPDLLSLLTVSLDQYQTEDELYQLSLQREPRSKSSPTSPTSCTPPPRPPVLEEWTSAAKPKLDQALVVEHIEKMVESVFRNFDVDGDGHISQEEFQIIRGNFPYLSAFGDLDQNQDGCISREEMVSYFLRSSSVLGGRMGFVHNFQESNSLRPVACRHCKALILGIYKQGLKCRACGVNCHKQCKDRLSVECRRRAQSVSLEGSAPSPSPMHSHHHRAFSFSLPRPGRRGSRPPEIREEEVQTVEDGVFDIHL

SEQ ID NO: 819630 - protein, 674 aa, Homo sapiens
RGAGPRRGERAGAAAAARPAGGSARRWGRPGRCGLLAAGPKRVRSEPGGRLPERSLGPAHPAPAAMAGTLDLDKGCTVEELLRGCIEAFDDSGKVRDPQLVRMFLMMHPWYIPSSQLAAKLLHIYQQSRKDNSNSLQVKTCHLVRYWISAFPAEFDLNPELAEQIKELKALLDQEGNRRHSSLIDIDSVPTYKWKRQVTQRNPVGQKKRKMSLLFDHLEPMELAEHLTYLEYRSFCKILFQDYHSFVTHGCTVDNPVLERFISLFNSVSQWVQLMILSKPTAPQRALVITHFVHVAEKLLQLQNFNTLMAVVGGLSHSSISRLKETHSHVSPETIKLWEGLTELVTATGNYGNYRRRLAACVGFRFPILGVHLKDLVALQLALPDWLDPARTRLNGAKMKQLFSILEELAMVTSLRPPVQANPDLLSLLTVSLDQYQTEDELYQLSLQREPRSKSSPTSPTSCTPPPRPPVLEEWTSAAKPKLDQALVVEHIEKMVESVFRNFDVDGDGHISQEEFQIIRGNFPYLSAFGDLDQNQDGCISREEMVSYFLRSSSVLGGRMGFVHNFQESNSLRPVACRHCKALILGIYKQGLKCRACGVNCHKQCKDRLSVECRRRAQSVSLEGSAPSPSPMHSHHHRAFSFSLPRPGRRGSRPPEIREEEVQTVEDGVFDIHL

SEQ ID NO: 819631 - protein, 655 aa, Homo sapiens
KLPQGPPRAGREGAPGGGGAAGGVRSEPGGRLPERSLGPAHPAPAAMAGTLDLDKGCTVEELLRGCIEAFDDSGKVRDPQLVRMFLMMHPWYIPSSQLAAKLLHIYQQSRKDNSNSLQVKTCHLVRYWISAFPAEFDLNPELAEQIKELKALLDQEGNRRHSSLIDIDSVPTYKWKRQVTQRNPVGQKKRKMSLLFDHLEPMELAEHLTYLEYRSFCKILFQDYHSFVTHGCTVDNPVLERFISLFNSVSQWVQLMILSKPTAPQRALVITHFVHVAEKLLQLQNFNTLMAVVGGLSHSSISRLKETHSHVSPETIKLWEGLTELVTATGNYGNYRRRLAACVGFRFPILGVHLKDLVALQLALPDWLDPARTRLNGAKMKQLFSILEELAMVTSLRPPVQANPDLLSLLTVSLDQYQTEDELYQLSLQREPRSKSSPTSPTSCTPPPRPPVLEEWTSAAKPKLDQALVVEHIEKMVESVFRNFDVDGDGHISQEEFQIIRGNFPYLSAFGDLDQNQDGCISREEMVSYFLRSSSVLGGRMGFVHNFQESNSLRPVACRHCKALILGIYKQGLKCRACGVNCHKQCKDRLSVECRRRAQSVSLEGSAPSPSPMHSHHHRAFSFSLPRPGRRGSRPPEIREEEVQTVEDGVFDIHL

SEQ ID NO: 819632 - protein, 609 aa, Homo sapiens; identical to SEQ ID NO: 819623

SEQ ID NO: 819633 - protein, 511 aa, Homo sapiens [sequence omitted]

SEQ ID NO: 819634 - protein, 464 aa, Homo sapiens
MSLLFDHLEPMELAEHLTYLEYRSFCKILFQDYHSFVTHGCTVDNPVLERFISLFNSVSQWVQLMILSKPTAPQRALVITHFVHVAEKLLQLQNFNTLMAVVGGLSHSSISRLKETHSHVSPETIKLWEGLTELVTATGNYGNYRRRLAACVGFRFPILGVHLKDLVALQLALPDWLDPARTRLNGAKMKQLFSILEELAMVTSLRPPVQANPDLLSLLTVSLDQYQTEDELYQLSLQREPRSKSSPTSPTSCTPPPRPPVLEEWTSAAKPKLDQALVVEHIEKMVESVFRNFDVDGDGHISQEEFQIIRGNFPYLSAFGDLDQNQDGCISREEMVSYFLRSSSVLGGRMGFVHNFQESNSLRPVACRHCKALILGIYKQGLKCRACGVNCHKQCKDRLSVECRRRAQSVSLEGSAPSPSPMHSHHHRAFSFSLPRPGRRGSRPPEIREEEVQTVEDGVFDIHL

SEQ ID NO: 819635 - protein, 349 aa, Homo sapiens
WGYDSSVLCPQLWEGLTELVTATGNYGNYRRRLAACVGFRFPILGVHLKDLVALQLALPDWLDPARTRLNGAKMKQLFSILEELAMVTSLRPPVQANPDLLSLLTVSLDQYQTEDELYQLSLQREPRSKSSPTSPTSCTPPPRPPVLEEWTSAAKPKLDQALVVEHIEKMVESVFRNFDVDGDGHISQEEFQIIRGNFPYLSAFGDLDQNQDGCISREEMVSYFLRSSSVLGGRMGFVHNFQESNSLRPVACRHCKALILGIYKQGLKCRACGVNCHKQCKDRLSVECRRRAQSVSLEGSAPSPSPMHSHHHRAFSFSLPRPGRRGSRPPEIREEEVQTVEDGVFDIHL

SEQ ID NO: 819636 - protein, 626 aa, Homo sapiens
ISFLAPHRSLSPKYSHLVLAHPPDYLKDQLSPRPRPPLGLCHPLPAGRRPVPGRVSPMGTQRLCGRGTQGWPGSSEQHVQEATSSAGLHSGVDELGVRSEPGGRLPERSLGPAHPAPAAMAGTLDLDKGCTVEELLRGCIEAFDDSGKVRDPQLVRMFLMMHPWYIPSSQLAAKLLHIYQQSRKDNSNSLQVKTCHLVRYWISAFPAEFDLNPELAEQIKELKALLDQEGNRRHSSLIDIDSVPTYKWKRQVTQRNPVGQKKRKMSLLFDHLEPMELAEHLTYLEYRSFCKILFQDYHSFVTHGCTVDNPVLERFISLFNSVSQWVQLMILSKPTAPQRALVITHFVHVAEKLLQLQNFNTLMAVVGGLSHSSISRLKETHSHVSPETIKLWEGLTELVTATGNYGNYRRRLAACVGFRFPILGVHLKDLVALQLALPDWLDPARTRLNGAKMKQLFSILEELAMVTSLRPPVQANPDLLSLLTVSLDQYQTEDELYQLSLQREPRSKSSPTAHEVDPNTPGPGTDGVDSVQTKWIRPRGSNREEGELGPNCVMGRHISHEIRPPGMLLRLGPTPTEVAHEEESNRPTVWAGTQDTRHTNKREKRHSRKRTKRRRDTTNTQKLDGE

SEQ ID NO: 819637 - protein, 163 aa, Homo sapiens
MCRAGVPFRGARLCQNLGVRGVRELGPQGGPCTANGRGATEWACAPMGVCACVWECTCVERHCLACVHTCEDVSACVAAGLKAGLAQVNSTSRRRPRPRGFGPSPVGGSRSAAWAQPTPRRRPWQAPWTWTRAARWRSCSAGASKPSMTPGRCGTRSWCACSS

SEQ ID NO: 819638 - protein, 150 aa, Homo sapiens
MCRAGVPFRGARLCQNLGVRGVRELGPQGGPCTANGRGATEWACAPMGVCACVWECTCVERHCLACVHTCEDVSACVAAGLKAGLAQVNSTSRRRPRPRGFGPSPVGGSRSAAWAQPTPRRRPWQAPWTWTRAARWRSCSAGASKPSLAA

SEQ ID NO: 819639 - protein, 148 aa, Homo sapiens
MAGTLDLDKGCTVEELLRGCIEAFDDSGKVRDPQLVRMFLMMHPWYIPSSQLAAKLLHIYQQSRKDNSNSLQVKTCHLVRYWISAFPAEFDLNPELAEQIKELKALLDQEGNRRHSSLIDIDSVCVGGAQRAGGALSILYHLCLINVC

SEQ ID NO: 819640 - protein, 219 aa, Homo sapiens
VAVFVEAIQQQSFPNHSSCSGVPLPKEENISAPLISSSPVKAAREYEDPPSEEEDKIKEEPLTISELVYNPSASLLPTPVDDDEIDMLFDCPSRLELEREDTDSFEDLEADENAFLIAEEEELKEARRALSWSYDILTGHIRVNPLVKSFSRLLVVGLGLLLFVFPLLLLLLESGIDLSFLCEIRQTPEFEQFHYEYYCPLKEWVAGKVHLILYMLGCS

SEQ ID NO: 819641 - protein, 213 aa, Homo sapiens
MQAEETKGIGITSMAKCLVKIQTRRSLQLHMVNHCNSNVFVRLLRLGSKVTARNTGVPLPKEENISAPLISSSPVKAAREYEDPPSEEEDKIKEEPLTISELVYNPSASLLPTPVDDDEIDMLFDCPSRLELEREDTDSFEDLEADENAFLIAEEEELKEARRALSWSYDILTGHIRVNPLVKSFSRLLVVGLGLLLFVFPLLLLLLESVSMQ

SEQ ID NO: 819642 - protein, 668 aa, Homo sapiens
GGEAEASEQREGPARRAPAAGHVCPQAPDAADVPGLSRAQVSRTVRASVCVRAGEHRAGPEPPARSPRPRCMFASCHCVPRGRRTMKMIHFRSSSVKSLSQEMRCTIRLLDDSEISCHIQRETKGQFLIDHICNYYSLLEKDYFGIRYVDPEKQRHWLEPNKSIFKQMKTHPPYTMCFRVKFYPHEPLKIKEELTRYLLYLQIKRDIFHGRLLCSFSDAAYLGACIVQAELGDYDPDEHPENYISEFEIFPKQSQKLERKIVEIHNNELRGQSPPVAEFNLLLKAHTLETYGVDPHPCKDSTGTTTFLGFTAAGFVVFQGNKRIHLIKWPDVCKLKFEGKTFYVIGTQKEKKAMLAFHTSTPAACKHLWKCGVENQAFYKYAKSSQIKTVSSSKIFFKGSRFRYSGKVAKEVVEASSKIQREPPEVHRANITQSRSSHSLNKQLIINMEPLQPLLPSPSEQEEELPLGEGVPLPKEENISAPLISSSPVKAAREYEDPPSEEEDKIKEEPLTISELVYNPSASLLPTPVDDDEIDMLFDCPSRLELEREDTDSFEDLEADENAFLIAEEEELKEARRALSWSYDILTGHIRVNPLVKSFSRLLVVGLGLLLFVFPLLLLLLESGIDLSFLCEIRQTPEFEQFHYEYYCPLKEWVAGKVHLILYMLGCS

SEQ ID NO: 819643 - protein, 254 aa, Homo sapiens
MQAEETKGIGITSMAKCLVKIQTRRSLQLHMVNHCNSNVFVRLLRLGSKVTARNTGVPLPKEENISAPLISSSPVKAAREYEDPPSEEEDKIKEEPLTISELVYNPSASLLPTPVDDDEIDMLFDCPSRLELEREDTDSFEDLEADENAFLIAEEEELKEARRALSWSYDILTGHIRVNPLVKSFSRLLVVGLGLLLFVFPLLLLLLESGIDLSFLCEIRQTPEFEQFHYEYYCPLKEWVAGKVHLILYMLGCS

SEQ ID NO: 819644 - protein, 403 aa, Homo sapiens
MVFRRGQSPPVAEFNLLLKAHTLETYGVDPHPCKDSTGTTTFLGFTAAGFVVFQGNKRIHLIKWPDVCKLKFEGKTFYVIGTQKEKKAMLAFHTSTPAACKHLWKCGVENQAFYKYAKSSQIKTVSSSKIFFKGSRFRYSGKVAKEVVEASSKIQREPPEVHRANITQSRSSHSLNKQLIINMEPLQPLLPSPSEQEEELPLGEGVPLPKEENISAPLISSSPVKAAREYEDPPSEEEDKIKEEPLTISELVYNPSASLLPTPVDDDEIDMLFDCPSRLELEREDTDSFEDLEADENAFLIAEEEELKEARRALSWSYDILTGHIRVNPLVKSFSRLLVVGLGLLLFVFPLLLLLLESGIDLSFLCEIRQTPEFEQFHYEYYCPLKEWVAGKVHLILYMLGCS

SEQ ID NO: 819645 - protein, 627 aa, Homo sapiens
GGEAEASEQREGPARRAPAAGHVCPQAPDAADVPGLSRAQVSRTVRASVCVRAGEHRAGPEPPARSPRPRCMFASCHCVPRGRRTMKMIHFRSSSVKSLSQEMRCTIRLLDDSEISCHIQRETKGQFLIDHICNYYSLLEKDYFGIRYVDPEKQRHWLEPNKSIFKQMKTHPPYTMCFRVKFYPHEPLKIKEELTRYLLYLQIKRDIFHGRLLCSFSDAAYLGACIVQAELGDYDPDEHPENYISEFEIFPKQSQKLERKIVEIHNNELRGQSPPVAEFNLLLKAHTLETYGVDPHPCKDSTGTTTFLGFTAAGFVVFQGNKRIHLIKWPDVCKLKFEGKTFYVIGTQKEKKAMLAFHTSTPAACKHLWKCGVENQAFYKYAKSSQIKTVSSSKIFFKGSRFRYSGKVAKEVVEASSKIQREPPEVHRANITQSRSSHSLNKQLIINMEPLQPLLPSPSEQEEELPLGEGVPLPKEENISAPLISSSPVKAAREYEDPPSEEEDKIKEEPLTISELVYNPSASLLPTPVDDDEIDMLFDCPSRLELEREDTDSFEDLEADENAFLIAEEEELKEARRALSWSYDILTGHIRVNPLVKSFSRLLVVGLGLLLFVFPLLLLLLESVSMQ

SEQ ID NO: 819646 - protein, 442 aa, Homo sapiens
GGEAEASEQREGPARRAPAAGHVCPQAPDAADVPGLSRAQVSRTVRASVCVRAGEHRAGPEPPARSPRPRCMFASCHCVPRGRRTMKMIHFRSSSVKSLSQEMRCTIRLLDDSEISCHIQRETKGQFLIDHICNYYSLLEKDYFGIRYVDPEKQRHWLEPNKSIFKQMKTHPPYTMCFRVKFYPHEPLKIKEELTRYLLYLQIKRDIFHGRLLCSFSDAAYLGACIVQAELGDYDPDEHPENYISEFEIFPKQSQKLERKIVEIHNNELRGQSPPVAEFNLLLKAHTLETYGVDPHPCKDSTGTTTFLGFTAAGFVVFQGNKRIHLIKWPDVCKLKFEGKTFYVIGTQKEKKAMLAFHTSTPAACKHLWKCGVENQAFYKYAKSSQIKTVSSSKIFFKGSRFRYSGKVAKEVVEASSKIQREPPEVHRCVQKKICSCFGVTW

SEQ ID NO: 819647 - protein, 57 aa, Homo sapiens
EITLQTPSHPQTPSHPQTPRSGVRTKFGINMVTSRERGTTRLPIGGVKFVGERGGYR

SEQ ID NO: 819648 - protein, 373 aa, Homo sapiens
MLRSVWNFLKRHKKKCIFLGTVLGGVYILGKYGQKKIREIQEREAAEYIAQARRQYHFESNQRTCNMTVLSMLPTLREALMQQLNSESLTALLKNRPSNKLEIWEDLKIISFTRSTVAVYSTCMLVVLLRVQLNIIGGYIYLDNAAVGKNGTTILAPPDVQQQYLSSIQHLLGDGLTELITVIKQAVQKVLGSVSLKHSLSLLDLEQKLKEIRNLVEQHKSSSWINKDGSKPLLCHYMMPDEETPLAVQACGLSPRDITTIKLLNETRDMLESPDFSTVLNTCLNRGFSRLLDNMAEFFRPTEQDLQHGNSMNSLSSVSLPLAKIIPIVNGQIHSVCSETPSHFVQDLLTMEQVKDFAANVYEAFSTPQQLEK

SEQ ID NO: 819649 - protein, 373 aa, Homo sapiens; identical to SEQ ID NO: 819648

SEQ ID NO: 819650 - protein, 373 aa, Homo sapiens; identical to SEQ ID NO: 819648

SEQ ID NO: 819651 - protein, 316 aa, Homo sapiens
MLRSVWNFLKRHKKKCIFLGTVLGGVYILGKYGQKKIREIQEREAAEYIAQARRQYHFESNQRTCNMTVLSMLPTLREALMQQLNSESLTALLKNRPSNKLEIWEDLKIISFTRSTVAVYSTCMLVVLLRVQLNIIGGYIYLDNAAVGKNGTTILAPPDVQQQYLSSIQHLLGDGLTELITVIKQAVQKVLGSVSLKHSLSLLDLEQKLKEIRNLVEQHKSSSWINKDGSKPLLCHYMMPDEETPLAVQACGLSPRDITTIKLLNETRDMLESPDFSTVLNTCLNRGFSRLLDNMAEFFRPTEQDLQHGNSMNRIC

SEQ ID NO: 819652 - protein, 373 aa, Homo sapiens; identical to SEQ ID NO: 819648

SEQ ID NO: 819653 - protein, 219 aa, Homo sapiens
MLRSVWNFLKRHKKKCIFLGTVLGGVYILGKYGQKKIREIQEREAAEYIAQARRQYHFESNQRTCNMTVLSMLPTLREALMQQLNSESLTALLKNRPSNKLEIWEDLKIISFTRSTVAVYSTCMLVVLLRVQLNIIGGYIYLDNAAVGKNGTTILAPPDVQQQYLSSIQHLLGDGLTELITVIKQAVQKVLGSVSLKHSLSLLDLEQKLMDPNLYYAII

SEQ ID NO: 819654 - protein, 329 aa, Homo sapiens
MLRSVWNFLKRHKKKCIFLGTVLGVLSMLPTLREALMQQLNSESLTALLKNRPSNKLEIWEDLKIISFTRSTVAVYSTCMLVVLLRVQLNIIGGYIYLDNAAVGKNGTTILAPPDVQQQYLSSIQHLLGDGLTELITVIKQAVQKVLGSVSLKHSLSLLDLEQKLKEIRNLVEQHKSSSWINKDGSKPLLCHYMMPDEETPLAVQACGLSPRDITTIKLLNETRDMLESPDFSTVLNTCLNRGFSRLLDNMAEFFRPTEQDLQHGNSMNSLSSVSLPLAKIIPIVNGQIHSVCSETPSHFVQDLLTMEQVKDFAANVYEAFSTPQQLEK

SEQ ID NO: 819655 - protein, 149 aa, Homo sapiens
MISLFFLMSPRLECSGTILVHCNLHLPGSSDPPTPASRVDGTTGMCHHAWLIFVFLVQTRFHHVDQAGLELLILSDLPALASQSAGITGVSYCTRPAFFLVKRICGSFYSHGCLPQVNLFPRKWHHLWTVVSPSSFSSFSSSSSSTMPG

SEQ ID NO: 819656 - protein, 147 aa, Homo sapiens
MALKRIHKELNDLARDPPAQCSAGPVGDDMFHWQATIMGPNDSPYQGGVFFLTIHFPTDYPFKPPKVAFTTRIYHPNINSNGSICLDILRSQWSPALTISKVLLSICSLLCDPNPDDPLVPEIARIYKTDREKYNRIAREWTQKYAM

SEQ ID NO: 819657 - protein, 147 aa, Homo sapiens; identical to SEQ ID NO: 819656

SEQ ID NO: 819658 - protein, 187 aa, Homo sapiens
AGFAASRPPGPWRRRRCVAYSQGRPVSLRRRRGSALPPLAANPRASRPAPRSGPPRAPTAPPRRRSPPARASLGPPAAGRKTGNPSGCPTKRGRPSPRLGLLLSGGGICGGLGGGADPGRKRQLRRRRRWRLGRRRIKGPPPGDAVTAAAGPGAEWAPALSPSRRTRFPQLSIFSCRPRSPRRPQAP

SEQ ID NO: 819659 - protein, 126 aa, Homo sapiens
MIWHGTLQHSVQQVLLEMINDSPYQGGVFFLTIHFPTDYPFKPPKVAFTTRIYHPNINSNGSICLDILRSQWSPALTISKVLLSICSLLCDPNPDDPLVPEIARIYKTDREKYNRIAREWTQKYAM

SEQ ID NO: 819660 - protein, 147 aa, Homo sapiens; identical to SEQ ID NO: 819656

SEQ ID NO: 819661 - protein, 156 aa, Homo sapiens
MALKRIHKELNDLARDPPAQCSAGPVGDDMFHWQATIMGPNDSPYQGGVFFLTIHFPTDYPFKPPKVAFTTRIYHPNINSNGSICLDILRSQWSPALTISKVLLSICSLLCDPNPDDPLVPEIARIYKTDREKNYWITSTNKDRGTLKEKVLLISI

SEQ ID NO: 819662 - protein, 147 aa, Homo sapiens; identical to SEQ ID NO: 819656

SEQ ID NO: 819663 - protein, 147 aa, Homo sapiens; identical to SEQ ID NO: 819656

SEQ ID NO: 819664 - protein, 147 aa, Homo sapiens; identical to SEQ ID NO: 819656

SEQ ID NO: 819665 - protein, 193 aa, Homo sapiens [sequence omitted]

SEQ ID NO: 819666 - protein, 193 aa, Homo sapiens [sequence omitted]

SEQ ID NO: 819667 - protein, 193 aa, Homo sapiens [sequence omitted]

SEQ ID NO: 819668 - protein, 193 aa, Homo sapiens [sequence omitted]

SEQ ID NO: 819669 - protein, 193 aa, Homo sapiens [sequence omitted]

SEQ ID NO: 819670 - protein, 193 aa, Homo sapiens [sequence omitted]

SEQ ID NO: 819671 - protein, 193 aa, Homo sapiens [sequence omitted]

SEQ ID NO: 819672 - protein, 193 aa, Homo sapiens [sequence omitted]

SEQ ID NO: 819673 - protein, 193 aa, Homo sapiens [sequence omitted]

SEQ ID NO: 819674 - protein, 193 aa, Homo sapiens [sequence omitted]

SEQ ID NO: 819675 - protein, 208 aa, Homo sapiens
MSWVEAAGVSSTALEDRIVAKHEEVPEVSVQYEEKFQNHHKLPSQLSSFSWDNCDEGKDPAVIRSLTLEPDPIVVPGNVTLSVVGSTSVPLSSPLKVDLVLEKEVAGLWIKIPCTDYIGSCTFEHFCDVLDMLIPTGEPCPEPLRTYGLPCHCPFKEGTYSLPKSEFVVPDLELPSWLTTGNYRIESVLSSSGKRLGCIKIAASLKGI

SEQ ID NO: 819676 - protein, 193 aa, Homo sapiens [sequence omitted]

SEQ ID NO: 819677 - protein, 193 aa, Homo sapiens [sequence omitted]

SEQ ID NO: 819678 - protein, 145 aa, Homo sapiens
MQSLMQAPLLIALGLLLAAPAQAHLKKPSQLSSFSWDNCDEGKDPAVIRSLTLEPDPIVVPGNVTLSVVGSTSVPLSSPLKVDLVLEKEVAGLWIKIPCTDYIGSCTFEHFCDVLDMLIPTGEPCPEPLRTYGLPCHCPFKEVST

SEQ ID NO: 819679 - protein, 81 aa, Homo sapiens
DPAVIRSLTLEPDPIVVPGNVTLSVVGSTSVPLSSPLKVSLGVGGEGEVRGSGQQGYWGMYAWGTVKNFRILDSQRIVQDM

SEQ ID NO: 819680 - protein, 336 aa, Homo sapiens
MKTLMRHGLAVCLALTTMCTSLLLVYSSLGGQKERPPQQQQQQQQQQQQASATGSSQPAAESSTQQRPGVPAGPRPLDGYLGVADHKPLKMHCRDCALVTSSGHLLHSRQGSQIDQTECVIRMNDAPTRGYGRDVGNRTSLRVIAHSSIQRILRNRHDLLNVSQGTVFIFWGPSSYMRRDGKGQVYNNLHLLSQVLPRLKAFMITRHKMLQFDELFKQETGKDRKISNTWLSTGWFTMTIALELCDRINVYGMVPPDFCRDPNHPSVPYHYYEPFGPDECTMYLSHERGRKGSHHRFITEKRVFKNWARTFNIHFFQPDWKPESLAINHPENKPVF

SEQ ID NO: 819681 - protein, 336 aa, Homo sapiens; identical to SEQ ID NO: 819680

SEQ ID NO: 819682 - protein, 246 aa, Homo sapiens
MHCRDCALVTSSGHLLHSRQGSQIDQTECVIRMNDAPTRGYGRDVGNRTSLRVIAHSSIQRILRNRHDLLNVSQGTVFIFWGPSSYMRRDGKGQVYNNLHLLSQVLPRLKAFMITRHKMLQFDELFKQETGKDRKISNTWLSTGWFTMTIALELCDRINVYGMVPPDFCRDPNHPSVPYHYYEPFGPDECTMYLSHERGRKGSHHRFITEKRVFKNWARTFNIHFFQPDWKPESLAINHPENKPVF

SEQ ID NO: 819683 - protein, 314 aa, Homo sapiens
MKTLMRHGLAVCLALTTMCTSLLLVYSSLGGQKERPPQQQQQQQQQQQQASATGSSQPAAESSTQQRPGVPAGPRPLDGYLGVADHKPLKMHCRDCALVTSSGHLLHSRQGSQIDQTECVIRMNDAPTRGYGRDVGNRTSLRVIAHSSIQRILRNRHDLLNVSQGTVFIFWGPSSYMRRDGKGQVYNNLHLLSQVLPRLKAFMITRHKMLQFDELFKQETGKDRYKGTGKKMQGRVRISHHWLTHPKQSFCYRLLLWAPLLMSLLEFTCRVLCVTGLLKLTLQDKVKRSMEIIIWIFQGLIFEEEATQLLAFIG

SEQ ID NO: 819684 - protein, 377 aa, Homo sapiens
MAATEDERLAGSGEGERLDFLRDRHVRFFQRCLQVLPERYSSLETSRLTIAFFALSGLDMLDSLDVVNKDDIIEWIYSLQVLPTEDRSNLNRCGFRGSSYLGIPFNPSKAPGTAHPYDSGHIAMTYTGLSCLVILGDDLSRVNKEACLAGLRALQLEDGSFCAVPEGSENDMRFVYCASCICYMLNNWSGMDMKKAITYIRRSMSYDNGLAQGAGLESHGGSTFCGIASLCLMGKLEEVFSEKELNRIKRWCIMRQQNGYHGRPNKPVDTCYSFWVGATLKLLKIFQYTNFEKNRNYILSTQDRLVGGFAKWPDSHPDALHAYFGICGLSLMEESGICKVHPALNVSTRTSERLLDLHQSWKTKDSKQCSENVHIST

SEQ ID NO: 819685 - protein, 377 aa, Homo sapiens; identical to SEQ ID NO: 819684

SEQ ID NO: 819686 - protein, 424 aa, Homo sapiens
MIAVSNTGLVCGGRRSPHPAPCGSAQEGSFSPRALIPGRGGRRFRSSMAATEDERLAGSGEGERLDFLRDRHVRFFQRCLQVLPERYSSLETSRLTIAFFALSGLDMLDSLDVVNKDDIIEWIYSLQVLPTEDRSNLNRCGFRGSSYLGIPFNPSKAPGTAHPYDSGHIAMTYTGLSCLVILGDDLSRVNKEACLAGLRALQLEDGSFCAVPEGSENDMRFVYCASCICYMLNNWSGMDMKKAITYIRRSMSYDNGLAQGAGLESHGGSTFCGIASLCLMGKLEEVFSEKELNRIKRWCIMRQQNGYHGRPNKPVDTCYSFWVGATLKLLKIFQYTNFEKNRNYILSTQDRLVGGFAKWPDSHPDALHAYFGICGLSLMEESGICKVHPALNVSTRTSERLLDLHQSWKTKDSKQCSENVHIST

SEQ ID NO: 819687 - protein, 428 aa, Homo sapiens
MIAVSNTGLVCGGRRSPHPAPCGSAQEGSFSPRALIPGRGGRRFRSSMAATEDERLAGSGEGERLDFLRDRHVRFFQRCLQVLPERYSSLETSRLTIAFFALSGLDMLDSLDVVNKDDIIEWIYSLQVLPTEDRSNLNRCGFRGSSYLGIPFNPSKAPGTAHPYDSGHIAMTYTGLSCLVILGDDLSRVNKEACLAGLRALQLEDGSFCAVPEGSENDMRFVYCASCICYMLNNWSGMDMKKAITYIRRSMSYDNGLAQGAGLESHGGSTFCGIASLCLMGKLEEVFSEKELNRIKRWCIMRQQNGYHGRPNKPVDTCYSFWVGATLKLLKIFQYTNFEKNRNYILSTQDRLVGGFAKWPDSHPDALHAYFGICGLSLMEESGICKVHPALNVSTRTSERLLDLHQSWKTKDSKQCSENVESYNQISC

SEQ ID NO: 819688 - protein, 638 aa, Homo sapiens
MLLAQINRDSQGMTEFPGGGMEAQHVTLCLTEAVTVADGDNLENMEGVSLQAVTLADGSTAYIQHNSKDAKLIDGQVIQLEDGSAAYVQHVPIPKSTGDSLRLEDGQAVQLEDGTTAFIHHTSKDSYDQSALQAVQLEDGTTAYIHHAVQVPQSDTILAIQADGTVAGLHTGDATIDPDTISALEQYAAKVSIDGSESVAGTGMIGENEQEKKMQIVLQGHATRVTAKSQQSGEKAFRCEYDGCGKLYTTAHHLKVHERSHTGDRPYQCEHAGCGKAFATGYGLKSHVRTHTGEKPYRCSEDNCTKSFKTSGDLQKHIRTHTGERPFKCPFEGCGRSFTTSNIRKVHVRTHTGERPYYCTEPGCGRAFASATNYKNHVRIHTGEKPYVCTVPGCDKRFTEYSSLYKHHVVHTHSKPYNCNHCGKTYKQISTLAMHKRTAHNDTEPIEEEQEAFFEPPPGQGEDVLKGSQITYVTGVEGDDVVSTQVATVTQSGLSQQVTLISQDGTQHVNISQADMQAIGNTITMVTQDGTPITVPAHDAVISSAGTHSVAMVTAEGTEGQQVAIVAQDLAAFHTASSEMGHQQHSHHLVTTETRPLTLVATSNGTQIAVQLGEQPSLEEAIRIASRIQQGETPGLDD

SEQ ID NO: 819689 - protein, 638 aa, Homo sapiens; identical to SEQ ID NO: 819688

SEQ ID NO: 819690 - protein, 638 aa, Homo sapiens; identical to SEQ ID NO: 819688

SEQ ID NO: 819691 - protein, 638 aa, Homo sapiens; identical to SEQ ID NO: 819688

SEQ ID NO: 819692 - protein, 638 aa, Homo sapiens; identical to SEQ ID NO: 819688

SEQ ID NO: 819693 - protein, 638 aa, Homo sapiens; identical to SEQ ID NO: 819688

SEQ ID NO: 819694 - protein, 607 aa, Homo sapiens [sequence omitted]

SEQ ID NO: 819695 - protein, 638 aa, Homo sapiens; identical to SEQ ID NO: 819688

SEQ ID NO: 819696 - protein, 205 aa, Homo sapiens
MHKRTAHNDTEPIEEEQEAFFEPPPGQGEDVLKGSQITYVTGVEGDDVVSTQVATVTQSGLSQQVTLISQDGTQHVNISQADMQAIGNTITMVTQDGTPITVPAHDAVISSAGTHSVAMVTAEGTEGQQVAIVAQDLAAFHTASSEMGHQQHSHHLVTTETRPLTLVATSNGTQIAVQLGEQPSLEEAIRIASRIQQGETPGLDD

SEQ ID NO: 819697 - protein, 364 aa, Homo sapiens
TCPGSSTATVSVFRISGSSPSVNTNAPPLPSSSTPTSPTNPCQGTVFKSSKNWRKRNANTLRKSALRSLLCELAKLFLKLYHIRTGPPGCGRAFASATNYKNHVRIHTGEKPYVCTVPGCDKRFTEYSSLYKHHVVHTHSKPYNCNHCGKTYKQISTLAMHKRTAHNDTEPIEEEQEAFFEPPPGQGEDVLKGSQITYVTGVEGDDVVSTQVATVTQSGLSQQVTLISQDGTQHVNISQADMQAIGNTITMVTQDGTPITVPAHDAVISSAGTHSVAMVTAEGTEGQQVAIVAQDLAAFHTASSEMGHQQHSHHLVTTETRPLTLVATSNGTQIAVQLGEQPSLEEAIRIASRIQQGETPGLDD

SEQ ID NO: 819698 - protein, 129 aa, Homo sapiens
MVHLTPEEKTAVNALWGKVNVDAVGGEALGRLLVVYPWTQRFFESFGDLSSPDAVMGNPKVKAHGKKVLGAFSDGLAHLDNLKGTFSQLSELHCDKLHVDPENFRLLGNVLVCVLARNFGKEFTPQMQA

SEQ ID NO: 819699 - protein, 141 aa, Homo sapiens
MVHLTPEEKTAVNALWGKVNVDAVGGEALGRLLVVYPWTQRFFESFGDLSSPDAVMGNPKVKAHGKKVLGAFSDGLAHLDNLKGTFSQLSELHCDKLHVDPENFRVCKKVPEALQIGSTCLFYKEYMGKEKSKGTVQGING

SEQ ID NO: 819700 - protein, 55 aa, Homo sapiens
MVHLTPEEKTAVNALWGKVNVDAVGGEALGSSWAMCWCVCWPATLARNSPHKCRL

SEQ ID NO: 819701 - protein, 700 aa, Homo sapiens
MADAGIRRVVPSDLYPLVLGFLRDNQLSEVANKFAKATGATQQDANASSLLDIYSFWLNRSAKVPERKLQANGPVAKKAKKKASSSDSEDSSEEEEEVQGPPAKKAAVPAKRVGLPPGKAAAKASESSSSEESSDDDDEEDQKKQPVQKGVKPQAKAAKAPPKKAKSSDSDSDSSSEDEPPKNQKPKITPVTVKAQTKAPPKPARAAPKIANGKAASSSSSSSSSSSSDDSEEEKAAATPKKTVPKKQVVAKAPVKAATTPTRKSSSSEDSSSDEEEEQKKPMKNKPGPYSSVPPPSAPPPKKSLGTQPPKKAVEKQQPVESSEDSSDESDSSSEEEKKPPTKAVVSKATTKPPPAKKAAESSSDSSDSDSSEDDEAPSKPAGTTKNSSNKPAVTTKSPAVKPAAAPKQPVGGGQKLLTRKADSSSSEEESSSSEEEKTKKMVATTKPKATAKAALSLPAKQAPQGSRDSSSDSDSSSSEEEEEKTSKSAVKKKPQKVAGGAAPSKPASAKKGKAESSNSSSSDDSSEEEEEKLKGKGSPRPQAPKANGTSALTAQNGKAAKNSEEEEEEKKKAAVVVSKSGSLKKRKQNEAAKEAETPQAKKIKLQTPNTFPKRKKGEKRASSPFRRVREEEIEVDSRVADNSFDAKRGAAGDWGERANQVLKFTKGKSFRHEKTKKKRGSYRGGSISVQVNSIKFDSE

SEQ ID NO: 819702 - protein, 155 aa, Homo sapiens
MADAGIRRVVPSDLYPLVLGFLRDNQLSEVANKFAKATGATQQDANASSLLDIYSFWLNRSAKVPERKLQANGPVAKKAKKKASSSDSEDSSEEEEEVQGPPAKKAAAPATPFALASAYAPPLSPTHAPFLPVSRSTLSQRSLPLLTASHRPFRP

SEQ ID NO: 819703 - protein, 700 aa, Homo sapiens; identical to SEQ ID NO: 819701

SEQ ID NO: 819704 - protein, 710 aa, Homo sapiens
MADAGIRRVVPSDLYPLVLGFLRDNQLSEVANKFAKATGATQQDANASSLLDIYSFWLNRSAKVPERKLQANGPVAKKAKKKASSSDSEDSSEEEEEVQGPPAKKAAVPAKRVGLPPGKAAAKASESSSSEESSDDDDEEDQKKQPVQKGVKPQAKAAKAPPKKAKSSDSDSDSSSEDEPPKNQKPKITPVTVKAQTKAPPKPARAAPKIANGKAASSSSSSSSSSSSDDSEEEKAAATPKKVWTITSVRAETVPKKQVVAKAPVKAATTPTRKSSSSEDSSSDEEEEQKKPMKNKPGPYSSVPPPSAPPPKKSLGTQPPKKAVEKQQPVESSEDSSDESDSSSEEEKKPPTKAVVSKATTKPPPAKKAAESSSDSSDSDSSEDDEAPSKPAGTTKNSSNKPAVTTKSPAVKPAAAPKQPVGGGQKLLTRKADSSSSEEESSSSEEEKTKKMVATTKPKATAKAALSLPAKQAPQGSRDSSSDSDSSSSEEEEEKTSKSAVKKKPQKVAGGAAPSKPASAKKGKAESSNSSSSDDSSEEEEEKLKGKGSPRPQAPKANGTSALTAQNGKAAKNSEEEEEEKKKAAVVVSKSGSLKKRKQNEAAKEAETPQAKKIKLQTPNTFPKRKKGEKRASSPFRRVREEEIEVDSRVADNSFDAKRGAAGDWGERANQVLKFTKGKSFRHEKTKKKRGSYRGGSISVQVNSIKFDSE

SEQ ID NO: 819705 - protein, 308 aa, Homo sapiens
MADAGIRRVVPSDLYPLVLGFLRDNQLSEVANKFAKATGATQQDANASSLLDIYSFWLNRSAKVPERKLQANGPVAKKAKKKASSSDSEDSSEEEEEVQGPPAKKAAVPAKRVGLPPGKAAAKASESSSSEESSDDDDEEDQKKQPVQKGVKPQAKAAKAPPKKAKSSDSDSDSSSEDEPPKNQKPKITPVTVKAQTKAPPKPARAAPKIANGKAASSSSSSSSSSSSDDSEEEKAAATPKKTVPKKQVVAKAPVKAATTPTRKSSSSEDSSSDEEEEQKKPMKNKPEVSGNPASQEGCGEAAACGKQ

SEQ ID NO: 819706 - protein, 418 aa, Homo sapiens [sequence omitted]

SEQ ID NO: 819707 - protein, 648 aa, Homo sapiens
MVQSTSARSAKVPERKLQANGPVAKKAKKKASSSDSEDSSEEEEEVQGPPAKKAAVPAKRVGLPPGKAAAKASESSSSEESSDDDDEEDQKKQPVQKGVKPQAKAAKAPPKKAKSSDSDSDSSSEDEPPKNQKPKITPVTVKAQTKAPPKPARAAPKIANGKAASSSSSSSSSSSSDDSEEEKAAATPKKTVPKKQVVAKAPVKAATTPTRKSSSSEDSSSDEEEEQKKPMKNKPGPYSSVPPPSAPPPKKSLGTQPPKKAVEKQQPVESSEDSSDESDSSSEEEKKPPTKAVVSKATTKPPPAKKAAESSSDSSDSDSSEDDEAPSKPAGTTKNSSNKPAVTTKSPAVKPAAAPKQPVGGGQKLLTRKADSSSSEEESSSSEEEKTKKMVATTKPKATAKAALSLPAKQAPQGSRDSSSDSDSSSSEEEEEKTSKSAVKKKPQKVAGGAAPSKPASAKKGKAESSNSSSSDDSSEEEEEKLKGKGSPRPQAPKANGTSALTAQNGKAAKNSEEEEEEKKKAAVVVSKSGSLKKRKQNEAAKEAETPQAKKIKLQTPNTFPKRKKGEKRASSPFRRVREEEIEVDSRVADNSFDAKRGAAGDWGERANQVLKFTKGKSFRHEKTKKKRGSYRGGSISVQVNSIKFDSE

SEQ ID NO: 819708 - protein, 418 aa, Homo sapiens [sequence omitted]

SEQ ID NO: 819709 - protein, 586 aa, Homo sapiens
RRLLWPVEKQQPVESSEESSDDDDEEDQKKQPVQKGVKPQAKAAKAPPKKAKSSDSDSDSSSEDEPPKNQKPKITPVTVKAQTKAPPKPARAAPKIANGKAASSSSSSSSSSSSDDSEEEKAAATPKKTVPKKQVVAKAPVKAATTPTRKSSSSEDSSSDEEEEQKKPMKNKPGPYSSVPPPSAPPPKKSLGTQPPKKAVEKQQPVESSEDSSDESDSSSEEEKKPPTKAVVSKATTKPPPAKKAAESSSDSSDSDSSEDDEAPSKPAGTTKNSSNKPAVTTKSPAVKPAAAPKQPVGGGQKLLTRKADSSSSEEESSSSEEEKTKKMVATTKPKATAKAALSLPAKQAPQGSRDSSSDSDSSSSEEEEEKTSKSAVKKKPQKVAGGAAPSKPASAKKGKAESSNSSSSDDSSEEEEEKLKGKGSPRPQAPKANGTSALTAQNGKAAKNSEEEEEEKKKAAVVVSKSGSLKKRKQNEAAKEAETPQAKKIKLQTPNTFPKRKKGEKRASSPFRRVREEEIEVDSRVADNSFDAKRGAAGDWGERANQVLKFTKGKSFRHEKTKKKRGSYRGGSISVQVNSIKFDSE

SEQ ID NO: 819710 - protein, 529 aa, Homo sapiens
MADAGIRRVVPSDLYPLVLGFLRDNQLSEVANKFAKATGATQQDANASSLLDIYSFWLNRSAKVPERKLQANGPVAKKAKKKASSSDSEDSSEEEEEVQGPPAKKAAVPAKRVGLPPGKAAAKASESSSSEESSDDDDEEDQKKQPVQKGVKPQAKAAKAPPKKAKSSDSDSDSSSEDEPPKNQKPKITPVTVKAQNSDSSEDDEAPSKPAGTTKNSSNKPAVTTKSPAVKPAAAPKQPVGGGQKLLTRKADSSSSEEESSSSEEEKTKKMVATTKPKATAKAALSLPAKQAPQGSRDSSSDSDSSSSEEEEEKTSKSAVKKKPQKVAGGAAPSKPASAKKGKAESSNSSSSDDSSEEEEEKLKGKGSPRPQAPKANGTSALTAQNGKAAKNSEEEEEEKKKAAVVVSKSGSLKKRKQNEAAKEAETPQAKKIKLQTPNTFPKRKKGEKRASSPFRRVREEEIEVDSRVADNSFDAKRGAAGDWGERANQVLKFTKGKSFRHEKTKKKRGSYRGGSISVQVNSIKFDSE

SEQ ID NO: 819711 - protein, 555 aa, Homo sapiens
MADAGIRRVVPSDLYPLVLGFLRDNQLSEVANKFAKATGAKGVKPQAKAAKAPPKKAKSSDSDSDSSSEDEPPKNQKPKITPVTVKAQTKAPPKPARAAPKIANGKAASSSSSSSSSSSSDDSEEEKAAATPKKTVPKKQVVAKAPVKAATTPTRKSSSSEDSSSDEEEEQKKPMKNKPGPYSSVPPPSAPPPKKSLGTQPPKKAVEKQQPVESSEDSSDESDSDSSEDDEAPSKPAGTTKNSSNKPAVTTKSPAVKPAAAPKQPVGGGQKLLTRKADSSSSEEESSSSEEEKTKKMVATTKPKATAKAALSLPAKQAPQGSRDSSSDSDSSSSEEEEEKTSKSAVKKKPQKVAGGAAPSKPASAKKGKAESSNSSSSDDSSEEEEEKLKGKGSPRPQAPKANGTSALTAQNGKAAKNSEEEEEEKKKAAVVVSKSGSLKKRKQNEAAKEAETPQAKKIKLQTPNTFPKRKKGEKRASSPFRRVREEEIEVDSRVADNSFDAKRGAAGDWGERANQVLKFTKGKSFRHEKTKKKRGSYRGGSISVQVNSIKFDSE

SEQ ID NO: 819712 - protein, 700 aa, Homo sapiens; identical to SEQ ID NO: 819701

SEQ ID NO: 819713 - protein, 700 aa, Homo sapiens; identical to SEQ ID NO: 819701

SEQ ID NO: 819714 - protein, 700 aa, Homo sapiens; identical to SEQ ID NO: 819701

SEQ ID NO: 819715 - protein, 288 aa, Homo sapiens
LSGHLLLKQSGPTQPERTAFLSNPQPLIFANLKHYQKQQSLPSLCSTSDPDTPLGAPSSSDSDSSSSEEEEEKTSKSAVKKKPQKVAGGAAPSKPASAKKGKAESSNSSSSDDSSEEEEEKLKGKGSPRPQAPKANGTSALTAQNGKAAKNSEEEEEEKKKAAVVVSKSGSLKKRKQNEAAKEAETPQAKKIKLQTPNTFPKRKKGEKRASSPFRRVREEEIEVDSRVADNSFDAKRGAAGDWGERANQVLKFTKGKSFRHEKTKKKRGSYRGGSISVQVNSIKFDSE

SEQ ID NO: 819716 - protein, 700 aa, Homo sapiens; identical to SEQ ID NO: 819701

SEQ ID NO: 819717 - protein, 700 aa, Homo sapiens; identical to SEQ ID NO: 819701

SEQ ID NO: 819718 - protein, 173 aa, Homo sapiens
MHELTKGMSYDNVEKRFKDRLLEYSNVKKNGKAAKNSEEEEEEKKKAAVVVSKSGSLKKRKQNEAAKEAETPQAKKIKLQTPNTFPKRKKGEKRASSPFRRVREEEIEVDSRVADNSFDAKRGAAGDWGERANQVLKFTKGKSFRHEKTKKKRGSYRGGSISVQVNSIKFDSE

SEQ ID NO: 819719 - protein, 700 aa, Homo sapiens; identical to SEQ ID NO: 819701

SEQ ID NO: 819720 - protein, 700 aa, Homo sapiens; identical to SEQ ID NO: 819701

SEQ ID NO: 819721 - protein, 360 aa, Homo sapiens
MADAGIRRVVPSDLYPLVLGFLRDNQLSEVANKFAKATGATQQDANASSLLDIYSFWLNRSAKVPERKLQANGPVAKKAKKKASSSDSEDSSEEEEEVQGPPAKKAAVPAKRVGLPPGKAAAKASESSSSEESSDDDDEEDQKKQPVQKGVKPQAKAAKAPPKKAKSSDSDSDSSSEDEPPKNQKPKITPVTVKAQTKAPPKPARAAPKIANGKAASSSSSSSSSSSSDDSEEEKAAATPKKTVPKKQVVAKAPVKAATTPTRKSSSSEDSSSDEEEEQKKPMKNKPGPYSSVPPPSAPPPKKSLGTQPPKKAVEKQQPVESSEDSSDESDFLFYTSFPEVSSPVLCCCCCAGAGCCWHL

SEQ ID NO: 819722 - protein, 288 aa, Homo sapiens
MADAGIRRVVPSDLYPLVLGFLRDNQLSEVANKFAKATGATQQDANASSLLDIYSFWLNRSAKVPERKLQANGPVAKKAKKKASSSDSEDSSEEEEEVQGPPAKKAAVPAKRVGLPPGKAAAKASESSSSEESSDDDDEEDQKKQPVQKGVKPQAKAAKAPPKKAKSSDSDSDSSSEDEPPKNQKPKITPVTVKAQTKAPPKPARAAPKIANGKAASSSSSSSSSSSSDDSEEEKAAATPKKTVPKKQVVAKAPVKAATTPTRKSSSSEDSSSDEEEEQKKPMKNKPA

SEQ ID NO: 819723 - protein, 1815 aa, Homo sapiens
AANMAVDSAMELLFLDTFKHPSAEQSSHIDVVRFPCVVYINEVRVIPPGVRAHSSLPDNRAYGETSPHTFQLDLFFNNVSKPSAPVFDRLGSLEYDENTSIIFRPNSKVNTDGLVLRGWYNCLTLAIYGSVDRVISHDRDSPPPPPPPPPPPQPQPSLKRNPKHADGEKEDQFNGSPPRPQPRGPRTPPGPPPPDDDEDDPVPLPVSGDKEEDAPHREDYFEPISPDRNSVPQEGQYSDEGEVEEEQQEEGEEDEDDVDVEEEEDEDEDDRRTVDSIPEEEEEDEEEEGEEDEEGEGDDGYEQISSDEDGIADLERETFKYPNFDVEYTAEDLASVPPMTYDPYDRELVPLLYFSCPYKTTFEIEISRMKDQGPDKENSGAIEASVKLTELLDLYREDRGAKWVTALEEIPSLIIKGLSYLQLKNTKQDSLGQLVDWTMQALNLQVALRQPIALNVRQLKAGTKLVSSLAECGAQGVTGLLQAGVISGLFELLFADHVSSSLKLNAFKALDSVISMTEGMEAFLRGRQNEKSGYQKLLELILLDQTVRVVTAGSAILQKCHFYEVLSEIKRLGDHLAEKTSSLPNHSEPDHDTDAGLERTNPEYENEVEASMDMDLLESSNISEGEIERLINLLEEVFHLMETAPHTMIQQPVKSFPTMARITGPPERDDPYPVLFRYLHSHHFLELVTLLLSIPVTSAHPGVLQATKDVLKFLAQSQKGLLFFMSEYEATNLLIRALCHFYDQDEEEGLQSDGVIDDAFALWLQDSTQTLQCITELFSHFQRCTASEETDHSDLLGTLHNLYLITFNPVGRSAVGHVFSLEKNLQSLITLMEYYSKEALGDSKSKKSVAYNYACILILVVVQSSSDVQMLEQHAASLLKLCKADENNAKLQELGKWLEPLKNLRFEINCIPNLIEYVKQNIDNLMTPEGVGLTTALRVLCNVACPPPPVEGQQKDLKWNLAVIQLFSAEGMDTFIRVLQKLNSILTQPWRLHVNMGTTLHRVTTISMARCTLTLLKTMLTELLRGGSFEFKDMRVPSALVTLHMLLCSIPLSGRLDSDEQKIQNDIIDILLTFTQGVNEKLTISEETLANNTWSLMLKEVLSSILKVPEGFFSGLILLSELLPLPLPMQTTQVIEPHDISVALNTRKLWSMHLHVQAKLLQEIVRSFSGTTCQPIQHMLRRICVQLCDLASPTALLIMRTVLDLIVEDLQSTSEDKEKQYTSQTTRLLALLDALASHKACKLAILHLINGTIKGDERYAEIFQDLLALVRSPGDSVIRQQCVEYVTSILQSLCDQDIALILPSSSEGSISELEQLSNSLPNKELMTSICDCLLATLANSESSYNCLLTCVRTMMFLAEHDYGLFHLKSSLRKNSSALHSLLKRVVSTFSKDTGELASSFLEFMRQILNSDTIGCCGDDNGLMEVEGAHTSRTMSINAAELKQLLQSKEESPENLFLELEKLVLEHSKDDDNLDSLLDSVVGLKQMLESSGDPLPLSDQDVEPVLSAPESLQNLFNNRTAYVLADVMDDQLKSMWFTPFQAEEIDTDLDLVKVDLIELSEKCCSDFDLHSELERSFLSEPSSPGRTKTTKGFKLGKHKHETFITSSGKSEYIEPAKRAHVVPPPRGRGRGGFGQGIRPHDIFRQRKQNTSRPPSMHVDDFVAAESKEVVPQDGIPPPKRPLKVSQKISSRGGFSGNRGGRGAFHSQNRFFTPPASKGNYSRREGTRGSSWSAQNTPRGNYNESRGGQSNFNRGPLPPLRPLSSTGYRPSPRDRASRGRGGLGPSWASANSGSGGSRGKFVSGGSGRGRHVRSFTR

SEQ ID NO: 819724 - protein, 1759 aa, Homo sapiens
AANMAVDSAMELLFLDTFKHPSAEQSSHIDVVRFPCVVYINEVRVIPPGVRAHSSLPDNRAYGETSPHTFQLDLFFNNVSKPSAPVFDRLGSLEYDENTSIIFRPNSKLMGRKKISLMEALQDHSQGDQELLQDPLHLMMMKMILCLCQCLVTRKRMLLIEKITLSPFLLIGILFPRKGNILMKEKYEEEQQEEGEEDEDDVDVEEEEDEDEDDRRTVDSIPEEEEEDEEEEGEEDEEGEGDDGYEQISSDEDGIADLERETFKYPNFDVEYTAEDLASVPPMTYDPYDRELVPLLYFSCPYKTTFEIEISRMKDQGPDKENSGAIEASVKLTELLDLYREDRGAKWVTALEEIPSLIIKGLSYLQLKNTKQDSLGQLVDWTMQALNLQVALRQPIALNVRQLKAGTKLVSSLAECGAQGVTGLLQAGVISGLFELLFADHVSSSLKLNAFKALDSVISMTEGMEAFLRGRQNEKSGYQKLLELILLDQTVRVVTAGSAILQKCHFYEVLSEIKRLGDHLAEKTSSLPNHSEPDHDTDAGLERTNPEYENEVEASMDMDLLESSNISEGEIERLINLLEEVFHLMETAPHTMIQQPVKSFPTMARITGPPERDDPYPVLFRYLHSHHFLELVTLLLSIPVTSAHPGVLQATKDVLKFLAQSQKGLLFFMSEYEATNLLIRALCHFYDQDEEEGLQSDGVIDDAFALWLQDSTQTLQCITELFSHFQRCTASEETDHSDLLGTLHNLYLITFNPVGRSAVGHVFSLEKNLQSLITLMEYYSKEALGDSKSKKSVAYNYACILILVVVQSSSDVQMLEQHAASLLKLCKADENNAKLQELGKWLEPLKNLRFEINCIPNLIEYVKQNIDNLMTPEGVGLTTALRVLCNVACPPPPVEGQQKDLKWNLAVIQLFSAEGMDTFIRVLQKLNSILTQPWRLHVNMGTTLHRVTTISMARCTLTLLKTMLTELLRGGSFEFKDMRVPSALVTLHMLLCSIPLSGRLDSDEQKIQNDIIDILLTFTQGVNEKLTISEETLANNTWSLMLKEVLSSILKVPEGFFSGLILLSELLPLPLPMQTTQVIEPHDISVALNTRKLWSMHLHVQAKLLQEIVRSFSGTTCQPIQHMLRRICVQLCDLASPTALLIMRTVLDLIVEDLQSTSEDKEKQYTSQTTRLLALLDALASHKACKLAILHLINGTIKGDERYAEIFQDLLALVRSPGDSVIRQQCVEYVTSILQSLCDQDIALILPSSSEGSISELEQLSNSLPNKELMTSICDCLLATLANSESSYNCLLTCVRTMMFLAEHDYGLFHLKSSLRKNSSALHSLLKRVVSTFSKDTGELASSFLEFMRQILNSDTIGCCGDDNGLMEVEGAHTSRTMSINAAELKQLLQSKEESPENLFLELEKLVLEHSKDDDNLDSLLDSVVGLKQMLESSGDPLPLSDQDVEPVLSAPESLQNLFNNRTAYVLADVMDDQLKSMWFTPFQAEEIDTDLDLVKVDLIELSEKCCSDFDLHSELERSFLSEPSSPGRTKTTKGFKLGKHKHETFITSSGKSEYIEPAKRAHVVPPPRGRGRGGFGQGIRPHDIFRQRKQNTSRPPSMHVDDFVAAESKEVVPQDGIPPPKRPLKVSQKISSRGGFSGNRGGRGAFHSQNRFFTPPASKGNYSRREGTRGSSWSAQNTPRGNYNESRGGQSNFNRGPLPPLRPLSSTGYRPSPRDRASRGRGGLGPSWASANSGSGGSRGKFVSGGSGRGRHVRSFTR

SEQ ID NO: 819725 - protein, 1797 aa, Homo sapiens
AANMAVDSAMELLFLDTFKHPSAEQSSHIDVVRFPCVVYINEVRVIPPGVRAHSSLPDNRAYGETSPHTFQLDLFFNNVSKPSAPVFDRLGSLEYDENTSIIFRPNSKVNTDGLVLRGWYNCLTLAIYGSVDRVISHDRDSPPPPPPPPPPPQPQPSLKRNPKHADGEKEDQFNGSPPRPQPRGPRTPPGPPPPDDDEDDPVPLPVSGDKEEDAPHREDYFEPISPDRNSVPQEGQYSDEGEVEEEQQEEGEEDEDDVDVEEEEDEDEDDRRTVDSIPEEEEEDEEEEGEEDEEGEGDDGYEQISSDEDGIADLERETFKYPNFDVEYTAEDLASVPPMTYDPYDRELVPLLYFSCPYKTTFEIEISRMKDQGPDKENSGAIEASVKLTELLDLYREDRGAKWVTALEEIPSLIIKGLSYLQLKNTKQDSLGQLVDWTMQALNLQVALRQPIALNVRQLKAGTKLVSSLAECGAQGVTGLLQAGVISGLFELLFADHVSSSLKLNAFKALDSVISMTEGMEAFLRGRQNEKSGYQKLLELILLDQTVRVVTAGSAILQKCHFYEVLSEIKRLGDHLAEKTSSLPNHSEPDHDTDAGLERTNPEYENEVEASMDMDLLESSNISEGEIERLINLLEEVFHLMETAPHTMIQQPVKSFPTMARITGPPERDDPYPVLFRYLHSHHFLELVTLLLSIPVTSAHPGVLQATSEYEATNLLIRALCHFYDQDEEEGLQSDGVIDDAFALWLQDSTQTLQCITELFSHFQRCTASEETDHSDLLGTLHNLYLITFNPVGRSAVGHVFSLEKNLQSLITLMEYYSKEALGDSKSKKSVAYNYACILILVVVQSSSDVQMLEQHAASLLKLCKADENNAKLQELGKWLEPLKNLRFEINCIPNLIEYVKQNIDNLMTPEGVGLTTALRVLCNVACPPPPVEGQQKDLKWNLAVIQLFSAEGMDTFIRVLQKLNSILTQPWRLHVNMGTTLHRVTTISMARCTLTLLKTMLTELLRGGSFEFKDMRVPSALVTLHMLLCSIPLSGRLDSDEQKIQNDIIDILLTFTQGVNEKLTISEETLANNTWSLMLKEVLSSILKVPEGFFSGLILLSELLPLPLPMQTTQVIEPHDISVALNTRKLWSMHLHVQAKLLQEIVRSFSGTTCQPIQHMLRRICVQLCDLASPTALLIMRTVLDLIVEDLQSTSEDKEKQYTSQTTRLLALLDALASHKACKLAILHLINGTIKGDERYAEIFQDLLALVRSPGDSVIRQQCVEYVTSILQSLCDQDIALILPSSSEGSISELEQLSNSLPNKELMTSICDCLLATLANSESSYNCLLTCVRTMMFLAEHDYGLFHLKSSLRKNSSALHSLLKRVVSTFSKDTGELASSFLEFMRQILNSDTIGCCGDDNGLMEVEGAHTSRTMSINAAELKQLLQSKEESPENLFLELEKLVLEHSKDDDNLDSLLDSVVGLKQMLESSGDPLPLSDQDVEPVLSAPESLQNLFNNRTAYVLADVMDDQLKSMWFTPFQAEEIDTDLDLVKVDLIELSEKCCSDFDLHSELERSFLSEPSSPGRTKTTKGFKLGKHKHETFITSSGKSEYIEPAKRAHVVPPPRGRGRGGFGQGIRPHDIFRQRKQNTSRPPSMHVDDFVAAESKEVVPQDGIPPPKRPLKVSQKISSRGGFSGNRGGRGAFHSQNRFFTPPASKGNYSRREGTRGSSWSAQNTPRGNYNESRGGQSNFNRGPLPPLRPLSSTGYRPSPRDRASRGRGGLGPSWASANSGSGGSRGKFVSGGSGRGRHVRSFTR

SEQ ID NO: 819726 - protein, 1815 aa, Homo sapiens; identical to SEQ ID NO: 819723

SEQ ID NO: 819727 - protein, 1724 aa, Homo sapiens
AANMAVDSAMELLFLDTFKHPSAEQSSHIDVVRFPCVVYINEVRVIPPGVRAHSSLPDNRAYGETSPHTFQLDLFFNNVSKPSAPVFDRLGSLEYDENTSIIFRPNSKVNTDGLVLRGWYNCLTLAIYGSVDRVISHDRDSPPPPPPPPPPPQPQPSLKRNPKHADGEKEDQFNGSPPRPQPRGPRTPPGPPPPDDDEDDPVPLPVSGDKEEDAPHREDYFEPISPDRNSVPQEGQYSDEGEVEEEQQEEGEEDEDDVDVEEEEDEDEDDRRTVDSIPEEEEEDEEEEGEEDEEGEGDDGYEQISSDEDGIADLERETFKYPNFDVEYTAEDLASVPPMTYDPYDRELVPLLYFSCPYKTTFEIEISRMKDQGPDKENSGAIEASVKLTELLDLYREDRGAKWVTALEEIPSLIIKGLSYLQLKNTKQDSLGQLVDWTMQALNLQVALRQPIALNVRQLKAGTKLVSSLAECGAQGVTGLLQAGVISGLFELLFADHVSSSLKLNAFKALDSVISMTEGMEAFLRGRQNEKSGYQKLLELILLDQTVRVVTAGSAILQKCHFYEVLSEIKRLGDHLAEKTSSLPNHSEPDHDTDAGLERTNPEYENEVEASMDMDLLESSNISEGEIERLINLLEEVFHLMETAPHTMIQQPVKSFPTMARITGPPERDDPYPVLFRYLHSHHFLELVTLLLSIPVTSAHPGVLQATKDVLKFLAQSQKGLLFFMSEYEATNLLIRALCHFYDQDEEEGLQSDGVIDDAFALWLQDSTQTLQCITELFSHFQRCTASEETDHSDLLGTLHNLYLITFNPVGRSAVGHVFSLEKNLQSLITLMEYYSKEALGDSKSKKSVAYNYACILILVVVQSSSDVQMLEQHAASLLKLCKADENNAKLQELGKWLEPLKNLRFEINCIPNLIEYVKQNIDNLMTPEGVGLTTALRVLCNVACPPPPVEGQQKDLKWNLAVIQLFSAEGMDTFIRVLQKLNSILTQPWRLHVNMGTTLHRVTTISMARCTLTLLKTMLTELLRGGSFEFKDMRVPSALVTLHMLLCSIPLSGRLDSDEQKIQNDIIDILLTFTQGVNEKLTISEETLANNTWSLMLKEVLSSILKVPEGFFSGLILLSELLPLPLPMQTTQVIEPHDISVALNTRKLWSMHLHVQAKLLQEIVRSFSGTTCQPIQHMLRRICVQLCDLASPTALLIMRTVLDLIVEDLQSTSEDKEKQYTSQTTRLLALLDALASHKACKLAILHLINGTIKGDERYAEIFQDLLALVRSPGDSVIRQQCVEYVTSILQSLCDQDIALILPSSSEGSISELEQLSNSLPNKELMTSICDCLLATLANSESSYNCLLTCVRTMMFLAEHDYGLFHLKSSLRKNSSALHSLLKRVVSTFSKDTGELASSFLEFMRQILNSDTIGCCGDDNGLMEVEGAHTSRTMSINAAELKQLLQSKEESPENLFLELEKLVLEHSKDDDNLDSLLDSVVGLKQMLESSGDPLPLSDQDVEPVLSAPESLQNLFNNRTAYVLADVMDDQLKSMWFTPFQAEEIDTDLDLVKVDLIELSEKCCSDFDLHSELERSFLSEPSSPGRTKTTKGFKLGKHKHETFITSSGKSEYIEPAKRAHVVPPPRGRGRGGFGQGIRPHDIFRQRKQNTSRPPSMHVDDFVAAESKEVVPQDGIPPPKRPLKVSQKISSRGGFSGNRGGRGAFHSQNRFFTPPASKEYSSRKLQ

SEQ ID NO: 819728 - protein, 1490 aa, Homo sapiens
AANMAVDSAMELLFLDTFKHPSAEQSSHIDVVRFPCVVYINEVRVIPPGVRAHSSLPDNRAYGETSPHTFQLDLFFNNVSKPSAPVFDRLGSLEYDENTSIIFRPNSKVNTDGLVLRGWYNCLTLAIYGSVDRVISHDRDSPPPPPPPPPPPQPQPSLKRNPKHADGEKEDQFNGSPPRPQPRGPRTPPGPPPPDDDEDDPVPLPVSGDKEEDAPHREDYFEPISPDRNSVPQEGQYSDEGEVEEEQQEEGEEDEDDVDVEEEEDEDEDDRRTVDSIPEEEEEDEEEEGEEDEEGEGDDGYEQISSDEDGIADLERETFKYPNFDVEYTAEDLASVPPMTYDPYDRELVPLLYFSCPYKTTFEIEISRMKDQGPDKENSGAIEASVKLTELLDLYREDRGAKWVTALEEIPSLIIKGLSYLQLKNTKQDSLGQLVDWTMQALNLQVALRQPIALNVRQLKAGTKLVSSLAECGAQGVTGLLQAGVISGLFELLFADHVSSSLKLNAFKALDSVISMTEGMEAFLRGRQNEKSGYQKLLELILLDQTVRVVTAGSAILQKCHFYEVLSEIKRLGDHLAEKTSSLPNHSEPDHDTDAGLERTNPEYENEVEASMDMDLLESSNISEGEIERLINLLEEVFHLMETAPHTMIQQPVKSFPTMARITGPPERDDPYPVLFRYLHSHHFLELVTLLLSIPVTSAHPGVLQATKDVLKFLAQSQKGLLFFMSEYEATNLLIRALCHFYDQDEEEGLQSDGVIDDAFALWLQDSTQTLQCITELFSHFQRCTASEETDHSDLLGTLHNLYLITFNPVGRSAVGHVFSLEKNLQSLITLMEYYSKEALGDSKSKKSVAYNYACILILVVVQSSSDVQMLEQHAASLLKLCKADENNAKLQELGKWLEPLKNLRFEINCIPNLIEYVKQNIDNLMTPEGVGLTTALRVLCNVACPPPPVEGQQKDLKWNLAVIQLFSAEGMDTFIRVLQKLNSILTQPWRLHVNMGTTLHRVTTISMARCTLTLLKTMLTELLRGGSFEFKDMRVPSALVTLHMLLCSIPLSGRLDSDEQKIQNDIIDILLTFTQGVNEKLTISEETLANNTWSLMLKEVLSSILKVPEGFFSGLILLSELLPLPLPMQTTQVIEPHDISVALNTRKLWSMHLHVQAKLLQEIVRSFSGTTCQPIQHMLRRICVQLCDLASPTALLIMRTVLDLIVEDLQSTSEDKEKQYTSQTTRLLALLDALASHKACKLAILHLINGTIKGDERYAEIFQDLLALVRSPGDSVIRQQCVEYVTSILQSLCDQDIALILPSSSEGSISELEQLSNSLPNKELMTSICDCLLATLANSESSYNCLLTCVRTMMFLAEHDYGLFHLKSSLRKNSSALHSLLKRVVSTFSKDTGELASSFLEFMRQILNSDTIGCCGDDNGLMEVEGAHTSRTMSINAAELKQLLQSKEESPENLFLELEKLVLEHSKDDDNLDSLLDSVESERDPLDPR

SEQ ID NO: 819729 - protein, 1226 aa, Homo sapiens
AANMAVDSAMELLFLDTFKHPSAEQSSHIDVVRFPCVVYINEVRVIPPGVRAHSSLPDNRAYGETSPHTFQLDLFFNNVSKPSAPVFDRLGSLEYDENTSIIFRPNSKVNTDGLVLRGWYNCLTLAIYGSVDRVISHDRDSPPPPPPPPPPPQPQPSLKRNPKHADGEKEDQFNGSPPRPQPRGPRTPPGPPPPDDDEDDPVPLPVSGDKEEDAPHREDYFEPISPDRNSVPQEGQYSDEGEVEEEQQEEGEEDEDDVDVEEEEDEDEDDRRTVDSIPEEEEEDEEEEGEEDEEGEGDDGYEQISSDEDGIADLERETFKYPNFDVEYTAEDLASVPPMTYDPYDRELVPLLYFSCPYKTTFEIEISRMKDQGPDKENSGAIEASVKLTELLDLYREDRGAKWVTALEEIPSLIIKGLSYLQLKNTKQDSLGQLVDWTMQALNLQVALRQPIALNVRQLKAGTKLVSSLAECGAQGVTGLLQAGVISGLFELLFADHVSSSLKLNAFKALDSVISMTEGMEAFLRGRQNEKSGYQKLLELILLDQTVRVVTAGSAILQKCHFYEVLSEIKRLGDHLAEKTSSLPNHSEPDHDTDAGLERTNPEYENEVEASMDMDLLESSNISEGEIERLINLLEEVFHLMETAPHTMIQQPVKSFPTMARITGPPERDDPYPVLFRYLHSHHFLELVTLLLSIPVTSAHPGVLQATKDVLKFLAQSQKGLLFFMSEYEATNLLIRALCHFYDQDEEEGLQSDGVIDDAFALWLQDSTQTLQCITELFSHFQRCTASEETDHSDLLGTLHNLYLITFNPVGRSAVGHVFSLEKNLQSLITLMEYYSKEALGDSKSKKSVAYNYACILILVVVQSSSDVQMLEQHAASLLKLCKADENNAKLQELGKWLEPLKNLRFEINCIPNLIEYVKQNIDNLMTPEGVGLTTALRVLCNVACPPPPVEGQQKDLKWNLAVIQLFSAEGMDTFIRVLQKLNSILTQPWRLHVNMGTTLHRVTTISMARCTLTLLKTMLTELLRGGSFEFKDMRVPSALVTLHMLLCSIPLSGRLDSDEQKIQNDIIDILLTFTQGVNEKLTISEETLANNTWSLMLKEVLSSILKVPEGFFSGLILLSELLPLPLPMQTTQVIEPHDISVALNTRKLWSMHLHVQAKLLQEIVRSFSGTTCQPIQHMLRRICVQLCDLASPTALLIMRTVLDLIVEDLQRYFHFALKIFSSNYF

SEQ ID NO: 819730 - protein, 1212 aa, Homo sapiens
AANMAVDSAMELLFLDTFKHPSAEQSSHIDVVRFPCVVYINEVRVIPPGVRAHSSLPDNRAYGETSPHTFQLDLFFNNVSKPSAPVFDRLGSLEYDENTSIIFRPNSKVNTDGLVLRGWYNCLTLAIYGSVDRVISHDRDSPPPPPPPPPPPQPQPSLKRNPKHADGEKEDQFNGSPPRPQPRGPRTPPGPPPPDDDEDDPVPLPVSGDKEEDAPHREDYFEPISPDRNSVPQEGQYSDEGEVEEEQQEEGEEDEDDVDVEEEEDEDEDDRRTVDSIPEEEEEDEEEEGEEDEEGEGDDGYEQISSDEDGIADLERETFKYPNFDVEYTAEDLASVPPMTYDPYDRELVPLLYFSCPYKTTFEIEISRMKDQGPDKENSGAIEASVKLTELLDLYREDRGAKWVTALEEIPSLIIKGLSYLQLKNTKQDSLGQLVDWTMQALNLQVALRQPIALNVRQLKAGTKLVSSLAECGAQGVTGLLQAGVISGLFELLFADHVSSSLKLNAFKALDSVISMTEGMEAFLRGRQNEKSGYQKLLELILLDQTVRVVTAGSAILQKCHFYEVLSEIKRLGDHLAEKTSSLPNHSEPDHDTDAGLERTNPEYENEVEASMDMDLLESSNISEGEIERLINLLEEVFHLMETAPHTMIQQPVKSFPTMARITGPPERDDPYPVLFRYLHSHHFLELVTLLLSIPVTSAHPGVLQATKDVLKFLAQSQKGLLFFMSEYEATNLLIRALCHFYDQDEEEGLQSDGVIDDAFALWLQDSTQTLQCITELFSHFQRCTASEETDHSDLLGTLHNLYLITFNPVGRSAVGHVFSLEKNLQSLITLMEYYSKEALGDSKSKKSVAYNYACILILVVVQSSSDVQMLEQHAASLLKLCKADENNAKLQELGKWLEPLKNLRFEINCIPNLIEYVKQNIDNLMTPEGVGLTTALRVLCNVACPPPPVEGQQKDLKWNLAVIQLFSAEGMDTFIRVLQKLNSILTQPWRLHVNMGTTLHRVTTISMARCTLTLLKTMLTELLRGGSFEFKDMRVPSALVTLHMLLCSIPLSGRLDSDEQKIQNDIIDILLTFTQGVNEKLTISEETLANNTWSLMLKEVLSSILKVPEGFFSGLILLSELLPLPLPMQTTQVIEPHDISVALNTRKLWSMHLHVQAKLLQEIVRSFSGTTCQPIQHMLRRICVQLCDLASPTALLIMRTVLDLIVEDLQS

SEQ ID NO: 819731 - protein, 1800 aa, Homo sapiens
AANMAVDSAMELLFLDTFKHPSAEQSSHIDVVRFPCVVYINEVRVIPPGVRAHSSLPDNRAYGETSPHTFQLDLFFNNVSKPSAPVFDRLGSLEYDENTSIIFRPNSKVNTDGLVLRGWYNCLTLAIYGSVDRVISHDRDSPPPPPPPPPPPQPQPSLKRNPKHADGEKEDQFNGSPPRPQPRGPRTPPGPPPPDDDEDDPVPLPVSGDKEEDAPHREDYFEPISPDRNSVPQEGQYSDEGEVEEEQQEEGEEDEDDVDVEEEEDEDEDDRRTVDSIPEEEEEDEEEEGEEDEEGEGDDGYEQISSDEDGIADLERETFKYPNFDVEYTAEDLASVPPMTYDPYDRELVPLLYFSCPYKTTFEIEISRMKDQGPDKENSGAIEASVKLTELLDLYREDRGAKWVTALEEIPSLIIKGLSYLQLKNTKQDSLGQLVDWTMQALNLQVALRQPIALNVRQLKAGTKLVSSLAECGAQGVTGLLQAGVISGLFELLFADHVSSSLKLNAFKALDSVISMTEGMEAFLRGRQNEKSGYQKLLELILLDQTVRVVTAGSAILQKCHFYEVLSEIKRLGDHLAEKTSSLPNHSEPDHDTDAGLERTNPEYENEVEASMDMDLLESSNISEGEIERLINLLEEVFHLMETAPHTMIQQPVKSFPTMARITGPPERDDPYPVLFRYLHSHHFLELVTLLLSIPVTSAHPGVLQATKDVLKFLAQSQKGLLFFMSEYEATNLLIRALCHFYDQDEEEGLQSDGVIDDAFALWLQDSTQTLQCITELFSHFQRCTASEETDHSDLLGTLHNLYLITFNPVGRSAVGHVFSLEKNLQSLITLMEYYSKEALGDSKSKKSVAYNYACILILVVVQSSSDVQMLEQHAASLLKLCKADENNAKLQELGKWLEPLKNLRFEINCIPNLIEYVKQNIDNLMTPEGVGLTTALRVLCNVACPPPPVEGQQKDLKWNLAVIQLFSAEGMDTFIRVLQKLNSILTQPWRLHVNMGTTLHRVTTISMARCTLTLLKTMLTELLRGGSFEFKDMRVPSALVTLHMLLCSIPLSGRLDSDEQKIQNDIIDILLTFTQGVNEKLTISEETLANNTWSLMLKEVLSSILKVPEGFFSGLILLSELLPLPLPMQTTQVIEPHDISVALNTRKLWSMHLHVQAKLLQEIVRSFSGTTCQPIQHMLRRICVQLCDLASPTALLIMRTVLDLIVEDLQSTSEDKEKQYTSQTTRLLALLDALASHKACKLAILHLINGTIKGDERYAEIFQDLLALVRSPGDSVIRQQCVEYVTSILQSLCDQDIALILPSSSEGSISELEQLSNSLPNKELMTSICDCLLATLANSESSYNCLLTCVRTMMFLAEHDYGLFHLKSSLRKNSSALHSLLKRVVSTFSKDTGELASSFLEFMRQILNSDTIGCCGDDNGLMEVEGAHTSRTMSINAAELKQLLQSKEESPENLFLELEKLVLEHSKDDDNLDSLLDSVVGLKQMLESSGDPLPLSDQDVEPVLSAPESLQNLFNNRTAYVLADVMDDQLKSMWFTPFQAEEIDTDLDLVKVDLIELSEKCCSDFDLHSELERSFLSEPSSPGRTKTTKGFKLGKHKHETFITSSGKSEYIEPAKRAHVVPPPRGRGRGGFGQGIRPHDIFRQRKQNTSRPPSMHVDDFVAAESKEVVPQDGIPPPKRPLKVSQKEQEAPVGVLRILLEEITMKVVEARAILTEALFHHYDPLVLQVTAQVLGTVLLEVVGDLDLPGLVQIAAVEAQEESLLVEAVVEVVMYAPLHDKNPFGNILTVYEHFTRTIKIRH

SEQ ID NO: 819732 - protein, 1757 aa, Homo sapiens
MIEFGETSPHTFQLDLFFNNVSKPSAPVFDRLGSLEYDENTSIIFRPNSKVNTDGLVLRGWYNCLTLAIYGSVDRVISHDRDSPPPPPPPPPPPQPQPSLKRNPKHADGEKEDQFNGSPPRPQPRGPRTPPGPPPPDDDEDDPVPLPVSGDKEEDAPHREDYFEPISPDRNSVPQEGQYSDEGEVEEEQQEEGEEDEDDVDVEEEEDEDEDDRRTVDSIPEEEEEDEEEEGEEDEEGEGDDGYEQISSDEDGIADLERETFKYPNFDVEYTAEDLASVPPMTYDPYDRELVPLLYFSCPYKTTFEIEISRMKDQGPDKENSGAIEASVKLTELLDLYREDRGAKWVTALEEIPSLIIKGLSYLQLKNTKQDSLGQLVDWTMQALNLQVALRQPIALNVRQLKAGTKLVSSLAECGAQGVTGLLQAGVISGLFELLFADHVSSSLKLNAFKALDSVISMTEGMEAFLRGRQNEKSGYQKLLELILLDQTVRVVTAGSAILQKCHFYEVLSEIKRLGDHLAEKTSSLPNHSEPDHDTDAGLERTNPEYENEVEASMDMDLLESSNISEGEIERLINLLEEVFHLMETAPHTMIQQPVKSFPTMARITGPPERDDPYPVLFRYLHSHHFLELVTLLLSIPVTSAHPGVLQATKDVLKFLAQSQKGLLFFMSEYEATNLLIRALCHFYDQDEEEGLQSDGVIDDAFALWLQDSTQTLQCITELFSHFQRCTASEETDHSDLLGTLHNLYLITFNPVGRSAVGHVFSLEKNLQSLITLMEYYSKEALGDSKSKKSVAYNYACILILVVVQSSSDVQMLEQHAASLLKLCKADENNAKLQELGKWLEPLKNLRFEINCIPNLIEYVKQNIDNLMTPEGVGLTTALRVLCNVACPPPPVEGQQKDLKWNLAVIQLFSAEGMDTFIRVLQKLNSILTQPWRLHVNMGTTLHRVTTISMARCTLTLLKTMLTELLRGGSFEFKDMRVPSALVTLHMLLCSIPLSGRLDSDEQKIQNDIIDILLTFTQGVNEKLTISEETLANNTWSLMLKEVLSSILKVPEGFFSGLILLSELLPLPLPMQTTQVIEPHDISVALNTRKLWSMHLHVQAKLLQEIVRSFSGTTCQPIQHMLRRICVQLCDLASPTALLIMRTVLDLIVEDLQSTSEDKEKQYTSQTTRLLALLDALASHKACKLAILHLINGTIKGDERYAEIFQDLLALVRSPGDSVIRQQCVEYVTSILQSLCDQDIALILPSSSEGSISELEQLSNSLPNKELMTSICDCLLATLANSESSYNCLLTCVRTMMFLAEHDYGLFHLKSSLRKNSSALHSLLKRVVSTFSKDTGELASSFLEFMRQILNSDTIGCCGDDNGLMEVEGAHTSRTMSINAAELKQLLQSKEESPENLFLELEKLVLEHSKDDDNLDSLLDSVVGLKQMLESSGDPLPLSDQDVEPVLSAPESLQNLFNNRTAYVLADVMDDQLKSMWFTPFQAEEIDTDLDLVKVDLIELSEKCCSDFDLHSELERSFLSEPSSPGRTKTTKGFKLGKHKHETFITSSGKSEYIEPAKRAHVVPPPRGRGRGGFGQGIRPHDIFRQRKQNTSRPPSMHVDDFVAAESKEVVPQDGIPPPKRPLKVSQKISSRGGFSGNRGGRGAFHSQNRFFTPPASKGNYSRREGTRGSSWSAQNTPRGNYNESRGGQSNFNRGPLPPLRPLSSTGYRPSPRDRASRGRGGLGPSWASANSGSGGSRGKFVSGGSGRGRHVRSFTR

SEQ ID NO: 819733 - protein, 1797 aa, Homo sapiens
AANMAVDSAMELLFLDTFKHPSAEQSSHIDVVRFPCVVYINEVRVIPPGVRAHSSLPDNRAYGETSPHTFQLDLFFNNVSKPSAPVFDRLGSLEYDENTSIIFRPNSKVNTDGLVLRGWYNCLTLAIYGSVDRVISHDRDSPPPPPPPPPPPQPQPSLKRNPKHADGEKEDQFNGSPPRPQPRGPRTPPGPPPPDDDEDDPVPLPVSGDKEEDAPHREDYFEPISPDRNSVPQEGQYSDEGEVEEEQQEEGEEDEDDVDVEEEEDEDEDDRRTVDSIPEEEEEDEEEEGEEDEEGEGDDGYEQISSDEDGIADLERETFKYPNFDVEYTAEDLASVPPMTYDPYDRELVPLLYFSCPYKTTFEIEISRMKDQGPDKENSGAIEASVKLTELLDLYREDRGAKWVTALEEIPSLIIKGLSYLQLKNTKQDSLGQLVDWTMQALNLQVALRQPIALNVRQLKAGTKLVSSLAECGAQGVTGLLQAGVISGLFELLFADHVSSSLKLNAFKALDSVISMTEGMEAFLRGRQNEKSGYQKLLELILLDQTVRVVTAGSAILQKCHFYEVLSEIKRLGDHLAEKTSSLPNHSEPDHDTDAGLERTNPEYENEVEASMDMDLLESSNISEGEIERLINLLEEVFHLMETAPHTMIQQPVKSFPTMARITGPPERDDPYPVLFRYLHSHHFLELVTLLLSIPVTSAHPGVLQATKDVLKFLAQSQKGLLFFMSEYEATNLLIRALCHFYDQDEEEGLQSDGVIDDAFALWLQDSTQTLQCITELFSHFQRCTASEETDHSDLLGTLHNLYLITFNPVGRSAVGHVFSLEKNLQSLITLMEYYSKEALGDSKSKKSVAYNYACILILVVVQSSSDVQMLEQHAASLLKLCKADENNAKLQELGKWLEPLKNLRFEINCIPNLIEYVKQNIDNLMTPEGVGLTTALRVLCNVACPPPPVEGQQKDLKWNLAVIQLFSAEGMDTFIRVLQKLNSILTQPWRLHVNMGTTLHRVTTISMARCTLTLLKTMLTELLRGGSFEFKDMRVPSALVTLHMLLCSIPLSGRLDSDEQKIQNDIIDILLTFTQGVNEKLTISEETLANNTWSLMLKEVLSSILKVPEGFFSGLILLSELLPLPLPMQTTQVIEPHDISVALNTRKLWSMHLHVQAKLLQEIVRSFSGTTCQPIQHMLRRICVQLCDLASPTALLIMRTVLDLIVEDLQSTSEDKEKQYTSQTTRLLALLDALASHKACKLAILHLINGTIKGDERYAEIFQDLLALVRSPGDSVIRQQCVEYVTSILQSLCDQDIALILPSSSEGSISELEQLSNSLPNKELMTSICDCLLATLANSESSYNCLLTCVRTMMFLAEHDYGLFHLKSTFSKDTGELASSFLEFMRQILNSDTIGCCGDDNGLMEVEGAHTSRTMSINAAELKQLLQSKEESPENLFLELEKLVLEHSKDDDNLDSLLDSVVGLKQMLESSGDPLPLSDQDVEPVLSAPESLQNLFNNRTAYVLADVMDDQLKSMWFTPFQAEEIDTDLDLVKVDLIELSEKCCSDFDLHSELERSFLSEPSSPGRTKTTKGFKLGKHKHETFITSSGKSEYIEPAKRAHVVPPPRGRGRGGFGQGIRPHDIFRQRKQNTSRPPSMHVDDFVAAESKEVVPQDGIPPPKRPLKVSQKISSRGGFSGNRGGRGAFHSQNRFFTPPASKGNYSRREGTRGSSWSAQNTPRGNYNESRGGQSNFNRGPLPPLRPLSSTGYRPSPRDRASRGRGGLGPSWASANSGSGGSRGKFVSGGSGRGRHVRSFTR

SEQ ID NO: 819734 - protein, 1630 aa, Homo sapiens
AANMAVDSAMELLFLDTFKHPSAEQSSHIDVVRFPCVVYINEVRVIPPGVRAHSSLPDNRAYGETSPHTFQLDLFFNNVSKPSAPVFDRLGSLEYDENTSIIFRPNSKVNTDGLVLRGWYNCLTLAIYGSVDRVISHDRDSPPPPPPPPPPPQPQPSLKRNPKHADGEKEDQFNGSPPRPQPRGPRTPPGPPPPDDDEDDPVPLPVSGDKEEDAPHREDYFEPISPDRNSVPQEGQYSDEGEVEEEQQEEGEEDEDDVDVEEEEDEDEDDRRTVDSIPEEEEEDEEEEGEEDEEGEGDDGYEQISSDEDGIADLERETFKYPNFDVEYTAEDLASVPPMTYDPYDRELVPLLYFSCPYKTTFEIEISRMKDQGPDKENSGAIEASVKLTELLDLYREDRGAKWVTALEEIPSLIIKGLSYLQLKNTKQDSLGQLVDWTMQALNLQVALRQPIALNVRQLKAGTKLVSSLAECGAQGVTGLLQAGVISGLFELLFADHVSSSLKLNAFKALDSVISMTEGMEAFLRGRQNEKSGYQKLLELILLDQTVRVVTAGSAILQKCHFYEVLSEIKRLGDHLAEKTSSLPNHSEPDHDTDAGLERTNPEYENEVEASMDMDLLESSNISEGEIERLINLLEEVFHLMETAPHTMIQQPVKSFPTMARITGPPERDDPYPVLFRYLHSHHFLELVTLLLSIPVTSAHPGVLQATKDVLKFLAQSQKGLLFFMSEYEATNLLIRALCHFYDQDEEEGLQSDGVIDDAFALWLQDSTQTLQCITELFSHFQRCTASEETDHSDLLGTLHNLYLITFNPVGRSAVGHVFSLEKNLQSLITLMEYYSKEALGDSKSKKSVAYNYACILILVVVQSSSDVQMLEQHAASLLKLCKADENNAKLQELGKWLEPLKNLRFEINCIPNLIEYVKQNIDNLMTPEGVGLTTALRVLCNVACPPPPVEGQQKDLKWNLAVIQLFSAEGMDTFIRVLQKLNSILTQPWRLHVNMGTTLHRVTTISMARCTLTLLKTMLTELLRGGSFEFKDMRVPSALVTLHMLLCSIPLSGRLDSDEQKIQNDIIDILLTFTQGVNEKLTISEETLANNTWSLMLKEVLSSILKVPEGFFSGLILLSELLPLPLPMQTTQVIEPHDISVALNTRKLWSMHLHVQAKLLQEIVRSFSGTTCQPIQHMLRRICVQLCDLASPTALLIMRTVLDLIVEDLQSTSEDKEKQYTSQTTRLLALLDALASHKACKLAILHLINGTIKGDERYAEIFQDLLALVRSPGDSVIRQQCVEYVTSILQSLCDQDIALILPSSSEGSISELEQLSNSLPNKELMTSICDCLLATLANSESSYNCLLTCVRTMMFLAEHDYGLFHLKSSLRKNSSALHSLLKRVVSTFSKDTGELASSFLEFMRQILNSDTIGCCGDDNGLMEVEGAHTSRTMSINAAELKQLLQSKEESPENLFLELEKLVLEHSKDDDNLDSLLDSVVGLKQMLESSGDPLPLSDQDVEPVLSAPESLQNLFNNRTAYVLADVMDDQLKSMWFTPFQAEEIDTDLDLVKVDLIELSEKCCSDFDLHSELERSFLSEPSSPGRTKTTKGFKLGKHKHETFITSRKLQSSGRNKRLQLECSEYSSRKLQ

SEQ ID NO: 819735 - protein, 259 aa, Homo sapiens
SSGKSEYIDVIKVLMLVLPKFETFITSVENLNTLNLPKELMLCHHQEEGAGEDLDRVYDLMIFFVRENRTQVDHHLCMWMTLLLLKVKKWFLKMEYLHQNGHSKYHRRFLPVVGFQAIEEDGVLSTVRIGFSHHLLQKETTVVGKEQEAPVGVLRILLEEITMKVVEARAILTEALFHHYDPLVLQVTAQVLGTVLLEVVGDLDLPGLVQIAAVEAQEESLLVEAVVEVVMYAPLHDKNPFGNILTVYEHFTRTIKIRH

SEQ ID NO: 819736 - protein, 1150 aa, Homo sapiens
AANMAVDSAMELLFLDTFKHPSAEQSSHIDVVRFPCVVYINEVRVIPPGVRAHSSLPDNRAYGETSPHTFQLDLFFNNVSKPSAPVFDRLGSLEYDENTSIIFRPNSKVNTDGLVLRGWYNCLTLAIYGSVDRVISHDRDSPPPPPPPPPPPQPQPSLKRNPKHADGEKEDQFNGSPPRPQPRGPRTPPGPPPPDDDEDDPVPLPVSGDKEEDAPHREDYFEPISPDRNSVPQEGQYSDEGEVEEEQQEEGEEDEDDVDVEEEEDEDEDDRRTVDSIPEEEEEDEEEEGEEDEEGEGDDGYEQISSDEDGIADLERETFKYPNFDVEYTAEDLASVPPMTYDPYDRELVPLLYFSCPYKTTFEIEISRMKDQGPDKENSGAIEASVKLTELLDLYREDRGAKWVTALEEIPSLIIKGLSYLQLKNTKQDSLGQLVDWTMQALNLQVALRQPIALNVRQLKAGTKLVSSLAECGAQGVTGLLQAGVISGLFELLFADHVSSSLKLNAFKALDSVISMTEGMEAFLRGRQNEKSGYQKLLELILLDQTVRVVTAGSAILQKCHFYEVLSEIKRLGDHLAEKTSSLPNHSEPDHDTDAGLERTNPEYENEVEASMDMDLLESSNISEGEIERLINLLEEVFHLMETAPHTMIQQPVKSFPTMARITGPPERDDPYPVLFRYLHSHHFLELVTLLLSIPVTSAHPGVLQATKDVLKFLAQSQKGLLFFMSEYEATNLLIRALCHFYDQDEEEGLQSDGVIDDAFALWLQDSTQTLQCITELFSHFQRCTASEETDHSDLLGTLHNLYLITFNPVGRSAVGHVFSLEKNLQSLITLMEYYSKEALGDSKSKKSVAYNYACILILVVVQSSSDVQMLEQHAASLLKLCKADENNAKLQELGKWLEPLKNLRFEINCIPNLIEYVKQNIDNLMTPEGVGLTTALRVLCNVACPPPPVEGQQKDLKWNLAVIQLFSAEGMDTFIRVLQKLNSILTQPWRLHVNMGTTLHRVTTISMARCTLTLLKTMLTELLRGGSFEFKDMRVPSALVTLHMLLCSIPLSGRLDSDEQKIQNDIIDILLTFTQGVNEKLTISEETLANNTWSLMLKEVLSSILKVPEGFFSGLILLSELLPLPLPMQTTQVSLPYNMHLINDCSNTF

SEQ ID NO: 819737 - protein, 307 aa, Homo sapiens
AANMAVDSAMELLFLDTFKHPSAEQSSHIDVVRFPCVVYINEVRVIPPGVRAHSSLPDNRAYGETSPHTFQLDLFFNNVSKPSAPVFDRLGSLEYDENTSIIFRPNSKVNTDGLVLRGWYNCLTLAIYGSVDRVISHDRDSPPPPPPPPPPPQPQPSLKRNPKHADGEKEDQFNGSPPRPQPRGPRTPPGPPPPDDDEDDPVPLPVSGDKEEDAPHREDYFEPISPDRNSVPQEGQYSDEGEVEEEQQEEGEEDEDDVDVEEEEDEDEDDRRTVDSIPEEEEEDEEEEGEEDEEGEGDDGYEQISRD

SEQ ID NO: 819738 - protein, 405 aa, Homo sapiens
MRPSGTAGAALLALLAALCPASRALEEKKVCQGTSNKLTQLGTFEDHFLSLQRMFNNCEVVLGNLEITYVQRNYDLSFLKTIQEVAGYVLIALNTVERIPLENLQIIRGNMYYENSYALAVLSNYDANKTGLKELPMRNLQEILHGAVRFSNNPALCNVESIQWRDIVSSDFLSNMSMDFQNHLGSCQKCDPSCPNGSCWGAGEENCQKLTKIICAQQCSGRCRGKSPSDCCHNQCAAGCTGPRESDCLVCRKFRDEATCKDTCPPLMLYNPTTYQMDVNPEGKYSFGATCVKKCPRNYVVTDHGSCVRACGADSYEMEEDGVRKCKKCEGPCRKVCNGIGIGEFKDSLSINATNIKHFKNCTSISGDLHILPVAFRGDSFTHTPPLDPQELDILKTVKEITGLS

SEQ ID NO: 819739 - protein, 224 aa, Homo sapiens
MVPSTQHTANGPMAPISCGICHQNTTSSAPGCPGYHQNTPCAQQHLLLCTPGSFSRGSGRGSTENMESHLALIDAIAKGEDSRHPLSGARVPGSHQEEDLSSTVRHISVFPAASTTTLSFQSRSASGKPSLCPPPSGVASMSVSPKVMEHRAPPGKVPSPPAPRVPALSLTAVTHSVSAEATGQVCHALCSPEGCWGPEPRDCVSCRNVSRGRECVDKCNLLEG

SEQ ID NO: 819740 - protein, 304 aa, Homo sapiens
MYELGVNSAGLGLRSLKEISDGDVIISGNKNLCYANTINWKKLFGTSGQKTKIISNRGENSCKATGQVCHALCSPEGCWGPEPRDCVSCRNVSRGRECVDKCNLLEGEPREFVENSECIQCHPECLPQAMNITCTGRGPDNCIQCAHYIDGPHCVKTCPAGVMGENNTLVWKYADAGHVCHLCHPNCTYGCTGPGLEGCPTNGPKIPSIATGMVGALLLLLVVALGIGLFMRRRHIVRKRTLRRLLQERELVEPLTPSGEAPNQALLRILKETEFKKIKVLGSGAFGTVYKGPGPQGELIRGSG

SEQ ID NO: 819741 - protein, 76 aa, Homo sapiens
MHLPSPTDSNFYRALMDEEDMDDVVDADEYLIPQQGFFSSPLTSHYYRLHPQAHNLYPYYYRPYPQYHMAQVQTTT

SEQ ID NO: 819742 - protein, 140 aa, Homo sapiens
GSSSTASHSPGQSTAYPGAVGPHVPPQAARPAGSVQNPVYHNQPLNPAPSRDPHYQDPHSTAVGNPEYLNTVQPTCVNSTFDSPAHWAQKGSHQISLDNPDYQQDFFPKEAKPNGIFKGSTAENAEYLRVAPQSSEFIGA

SEQ ID NO: 819743 - protein, 1025 aa, Homo sapiens
MRPSGTAGAALLALLAALCPASRALEEKKVCQGTSNKLTQLGTFEDHFLSLQRMFNNCEVVLGNLEITYVQRNYDLSFLKTIQEVAGYVLIALNTVERIPLENLQIIRGNMYYENSYALAVLSNYDANKTGLKELPMRNLQEILHGAVRFSNNPALCNVESIQWRDIVSSDFLSNMSMDFQNHLGSCQKCDPSCPNGSCWGAGEENCQKLTKIICAQQCSGRCRGKSPSDCCHNQCAAGCTGPRESDCLVCRKFRDEATCKDTCPPLMLYNPTTYQMDVNPEGKYSFGATCVKKCPRNYVVTDHGSCVRACGADSYEMEEDGVRKCKKCEGPCRKVCNGIGIGEFKDSLSINATNIKHFKNCTSISGDLHILPVAFRGDSFTHTPPLDPQELDILKTVKEITGFLLIQAWPENRTDLHAFENLEIIRGRTKQHGQFSLAVVSLNITSLGLRSLKEISDGDVIISGNKNLCYANTINWKKLFGTSGQKTKIISNRGENSCKATGQVCHALCSPEGCWGPEPRDCVSCRNVSRGRECVDKCNLLEGEPREFVENSECIQCHPECLPQAMNITCTGRGPDNCIQCAHYIDGPHCVKTCPAGVMGENNTLVWKYADAGHVCHLCHPNCTYGCTGPGLEGCPTNGPKIPSIATGMVGALLLLLVVALGIGLFMRRRHIVRKRTLRRLLQERELVEPLTPSGEAPNQALLRILKETEFKKIKVLGSGAFGTVYKGLWIPEGEKVKIPVAIKELREATSPKANKEILDEAYVMASVDNPHVCRLLGICLTSTVQLITQLMPFGCLLDYVREHKDNIGSQYLLNWCVQIAKGMNYLEDRRLVHRDLAARNVLVKTPQHVKITDFGLAKLLGAEEKEYHAEGGKVPIKWMALESILHRIYTHQSDVWSYGVTVWELMTFGSKPYDGIPASEISSILEKGERLPQPPICTIDVYMIMVKCWMIDADSRPKFRELIIEFSKMARDPQRYLVIQVQIAVCASIGKSPSNEHLMSLCSVTCQPGLPVSQIALLNPPAH

SEQ ID NO: 819744 - protein, 705 aa, Homo sapiens
MRPSGTAGAALLALLAALCPASRALEEKKVCQGTSNKLTQLGTFEDHFLSLQRMFNNCEVVLGNLEITYVQRNYDLSFLKTIQEVAGYVLIALNTVERIPLENLQIIRGNMYYENSYALAVLSNYDANKTGLKELPMRNLQEILHGAVRFSNNPALCNVESIQWRDIVSSDFLSNMSMDFQNHLGSCQKCDPSCPNGSCWGAGEENCQKLTKIICAQQCSGRCRGKSPSDCCHNQCAAGCTGPRESDCLVCRKFRDEATCKDTCPPLMLYNPTTYQMDVNPEGKYSFGATCVKKCPRNYVVTDHGSCVRACGADSYEMEEDGVRKCKKCEGPCRKVCNGIGIGEFKDSLSINATNIKHFKNCTSISGDLHILPVAFRGDSFTHTPPLDPQELDILKTVKEITGFLLIQAWPENRTDLHAFENLEIIRGRTKQHGQFSLAVVSLNITSLGLRSLKEISDGDVIISGNKNLCYANTINWKKLFGTSGQKTKIISNRGENSCKATGQVCHALCSPEGCWGPEPRDCVSCRNVSRGRECVDKCNLLEGEPREFVENSECIQCHPECLPQAMNITCTGRGPDNCIQCAHYIDGPHCVKTCPAGVMGENNTLVWKYADAGHVCHLCHPNCTYGPGNESLKAMLFCLFKLSSCNQSNDGSVSHQSGSPAAQESCLGWIPSLLPSEFQLGWGGCSHLHAWPSASVIITASSCH

SEQ ID NO: 819745 - protein, 657 aa, Homo sapiens
MRPSGTAGAALLALLAALCPASRALEEKKVCQGTSNKLTQLGTFEDHFLSLQRMFNNCEVVLGNLEITYVQRNYDLSFLKTIQEVAGYVLIALNTVERIPLENLQIIRGNMYYENSYALAVLSNYDANKTGLKELPMRNLQEILHGAVRFSNNPALCNVESIQWRDIVSSDFLSNMSMDFQNHLGSCQKCDPSCPNGSCWGAGEENCQKLTKIICAQQCSGRCRGKSPSDCCHNQCAAGCTGPRESDCLVCRKFRDEATCKDTCPPLMLYNPTTYQMDVNPEGKYSFGATCVKKCPRNYVVTDHGSCVRACGADSYEMEEDGVRKCKKCEGPCRKVCNGIGIGEFKDSLSINATNIKHFKNCTSISGDLHILPVAFRGDSFTHTPPLDPQELDILKTVKEITGFLLIQAWPENRTDLHAFENLEIIRGRTKQHGQFSLAVVSLNITSLGLRSLKEISDGDVIISGNKNLCYANTINWKKLFGTSGQKTKIISNRGENSCKATGQVCHALCSPEGCWGPEPRDCVSCRNVSRGRECVDKCNLLEGEPREFVENSECIQCHPECLPQAMNITCTGRGPDNCIQCAHYIDGPHCVKTCPAGVMGENNTLVWKYADAGHVCHLCHPNCTYGCTGPGLEGCPTNGSYIVSHFPRSFYKMSVH

SEQ ID NO: 819746 - protein, 350 aa, Homo sapiens [sequence omitted]

SEQ ID NO: 819747 - protein, 350 aa, Homo sapiens [sequence omitted]

SEQ ID NO: 819748 - protein, 350 aa, Homo sapiens [sequence omitted]

SEQ ID NO: 819749 - protein, 385 aa, Homo sapiens
MRPSGTAGAALLALLAALCPASRALEEKKVCQGTSNKLTQLGTFEDHFLSLQRMFNNCEVVLGNLEITYVQRNYDLSFLKTIQEVAGYVLIALNTVERIPLENLQIIRGNMYYENSYALAVLSNYDANKTGLKELPMRNLQEILHGAVRFSNNPALCNVESIQWRDIVSSDFLSNMSMDFQNHLGSCQKCDPSCPNGSCWGAGEENCQKLTKIICAQQCSGRCRGKSPSDCCHNQCAAGCTGPRESDCLVCRKFRDEATCKDTCPPLMLYNPTTYQMDVNPEGKYSFGATCVKKCPRNYVVTDHGSCVRACGADSYEMEEDGVRKCKKCEGPCRKVCNGIGIGEFKDSLSINATNIKHFKNCTSISGDLHIRTGPRASTDVGGHI

SEQ ID NO: 819750 - protein, 215 aa, Homo sapiens
MRPSGTAGAALLALLAALCPASRALEEKKVCQGTSNKLTQLGTFEDHFLSLQRMFNNCEVVLGNLEITYVQRNYDLSFLKTIQEVAGYVLIALNTVERIPLENLQIIRGNMYYENSYALAVLSNYDANKTGLKELPMRNLQEILHGAVRFSNNPALCNVESIQWRDIVSSDFLSNMSMDFQNHLGSCKCRIHTISASSSYGGQLYSTGAGERSHV

SEQ ID NO: 819751 - protein, 215 aa, Homo sapiens; identical to SEQ ID NO: 819750

SEQ ID NO: 819752 - protein, 1590 aa, Homo sapiens
MSTPTDPGAMPHPGPSPGPGPSPGPILGPSPGPGPSPGSVHSMMGPSPGPPSVSHPMPTMGSTDFPQEGMHQMHKPIDGIHDKGIVEDIHCGSMKGTGMRPPHPGMGPPQSPMDQHSQGYMSPHPSPLGAPEHVSSPMSGGGPTPPQMPPSQPGALIPGDPQAMSQPNRGPSPFSPVQLHQLRAQILAYKMLARGQPLPETLQLAVQGKRTLPGLQQQQQQQQQQQQQQQQQQQQQQQPQQQPPQPQTQQQQQPALVNYNRPSGPGPELSGPSTPQKLPVPAPGGRPSPAPPAAAQPPAAAVPGPSVPQPAPGQPSPVLQLQQKQSRISPIQKPQGLDPVEILQEREYRLQARIAHRIQELENLPGSLPPDLRTKATVELKALRLLNFQRQLRQEVVACMRRDTTLETALNSKAYKRSKRQTLREARMTEKLEKQQKIEQERKRRQKHQEYLNSILQHAKDFKEYHRSVAGKIQKLSKAVATWHANTEREQKKETERIEKERMRRLMAEDEEGYRKLIDQKKDRRLAYLLQQTDEYVANLTNLVWEHKQAQAAKEKKKRRRRKKKAEENAEGGESALGPDGEPIDESSQMSDLPVKVTHTETGKVLFGPEAPKASQLDAWLEMNPGYEVAPRSDSEESDSDYEEEDEEEESSRQETEEKILLDPNSEEVSEKDAKQIIETAKQDVDDEYSMQYSARGSQSYYTVAHAISERVEKQSALLINGTLKHYQLQGLEWMVSLYNNNLNGILADEMGLGKTIQTIALITYLMEHKRLNGPYLIIVPLSTLSNWTYEFDKWAPSVVKISYKGTPAMRRSLVPQLRSGKFNVLLTTYEYIIKDKHILAKIRWKYMIVDEGHRMKNHHCKLTQVLNTHYVAPRRILLTGTPLQNKLPELWALLNFLLPTIFKSCSTFEQWFNAPFAMTGERVDLNEEETILIIRRLHKVLRPFLLRRLKKEVESQLPEKVEYVIKCDMSALQKILYRHMQAKGILLTDGSEKDKKGKGGAKTLMNTIMQLRKICNHPYMFQHIEESFAEHLGYSNGVINGAELYRASGKFELLDRILPKLRATNHRVLLFCQMTSLMTIMEDYFAFRNFLYLRLDGTTKSEDRAALLKKFNEPGSQYFIFLLSTRAGGLGLNLQAADTVVIFDSDWNPHQDLQAQDRAHRIGQQNEVRVLRLCTVNSVEEKILAAAKYKLNVDQKVIQAGMFDQKSSSHERRAFLQAILEHEEENEEEDEVPDDETLNQMIARREEEFDLFMRMDMDRRREDARNPKRKPRLMEEDELPSWIIKDDAEVERLTCEEEEEKIFGRGSRQRRDVDYSDALTEKQWLRAIEDGNLEEMEEEVRLKKRKRRRNVDKDPAKEDVEKAKKRRGRPPAEKLSPNPPKLTKQMNAIIDTVINYKDRCNVEKVPSNSQLEIEGNSSGRQLSEVFIQLPSRKELPEYYELIRKPVDFKKIKERIRNHKYRSLGDLEKDVMLLCHNAQTFNLEGSQIYEDSIVLQSVFKSARQKIAKEEESEDESNEEEEEEDEEESESEAKSVKVKIKLNKKDDKGRDKGKGKKRPNRGKAKPVVSDFDSDEEQDEREQSEGSGTDDE

SEQ ID NO: 819753 - protein, 132 aa, Homo sapiens
MEYLNSILQHAKDFKEYHRSVAGKIQKLSKAVATWHANTEREQKKETERIEKERMRRLMAEDEEGYRKLIDQKKDRRLAYLLQQTDEYVANLTNLVWEHKQAQAAKEKKKRRRRKKVRILVVVAESRVYGQG

SEQ ID NO: 819754 - protein, 1563 aa, Homo sapiens
MPHPGPSPGPGPSPGPILGPSPGPGPSPGSVHSMMGPSPGPPSVSHPMPTMGSTDFPQEGMHQMHKPIDGIHDKGIVEDIHCGSMKGTGMRPPHPGMGPPQSPMDQHSQGYMSPHPSPLGAPEHVSSPMSGGGPTPPQMPPSQPGALIPGDPQAMSQPNRGPSPFSPVQLHQLRAQILAYKMLARGQPLPETLQLAVQGKRTLPGLQQQQQQQQQQQQQQQQQQQQQQQPQQQPPQPQTQQQQQPALVNYNRPSGPGPELSGPSTPQKLPVPAPGGRPSPAPPAAAQPPAAAVPGPSVPQPAPGQPSPVLQLQQKQSRISPIQKPQGLDPVEILQEREYRLQARIAHRIQELENLPGSLPPDLRTKATVELKALRLLNFQRQLRQEVVACMRRDTTLETALNSKAYKRSKRQTLREARMTEKLEKQQKIEQERKRRQKHQEYLNSILQHAKDFKEYHRSVAGKIQKLSKAVATWHANTEREQKKETERIEKERMRRLMAEDEEGYRKLIDQKKDRRLAYLLQQTDEYVANLTNLVWEHKQAQAAKEKKKRRRRKKKAEENAEGGESALGPDGEPIDESSQMSDLPVKVTHTETGKVLFGPEAPKASQLDAWLEMNPGYEVAPRSDSEESDSDYEEEDEEEESSRQETEEKILLDPNSEEVSEKDAKQIIETAKQDVDDEYSMQYSARGSQSYYTVAHAISERVEKQSALLINGTLKHYQLQGLEWMVSLYNNNLNGILADEMGLGKTIQTIALITYLMEHKRLNGPYLIIVPLSTLSNWTYEFDKWAPSVVKISYKGTPAMRRSLVPQLRSGKFNVLLTTYEYIIKDKHILAKIRWKYMIVDEGHRMKNHHCKLTQVLNTHYVAPRRILLTGTPLQNKLPELWALLNFLLPTIFKSCSTFEQWFNAPFAMTGERVDLNEEETILIIRRLHKVLRPFLLRRLKKEVESQLPEKVEYVIKCDMSALQKILYRHMQAKGILLTDGSEKDKKGKGGAKTLMNTIMQLRKICNHPYMFQHIEESFAEHLGYSNGVINGAELYRASGKFELLDRILPKLRATNHRVLLFCQMTSLMTIMEDYFAFRNFLYLRLDGTTKSEDRAALLKKFNEPGSQYFIFLLSTRAGGLGLNLQAADTVVIFDSDWNPHQDLQAQDRAHRIGQQNEVRVLRLCTVNSVEEKILAAAKYKLNVDQKVIQAGMFDQKSSSHERRAFLQAILEHEEENEEEDEVPDDETLNQMIARREEEFDLFMRMDMDRRREDARNPKRKPRLMEEDELPSWIIKDDAEVERLTCEEEEEKIFGRGSRQRRDVDYSDALTEKQWLRAIEDGNLEEMEEEVRLKKRKRRRNVDKDPAKEDVEKAKKRRGRPPAEKLSPNPPKLTKQMNAIIDTVINYKDSSGRQLSEVFIQLPSRKELPEYYELIRKPVDFKKIKERIRNHKYRSLGDLEKDVMLLCHNAQTFNLEGSQIYEDSIVLQSVFKSARQKIAKEEESEDESNEEEEEEDEEESESEAKSVKVKIKLNKKDDKGRDKGKGKKRPNRGKAKPVVSDFDSDEEQDEREQSEGSGTDDE

SEQ ID NO: 819755 - protein, 1563 aa, Homo sapiens; identical to SEQ ID NO: 819754

SEQ ID NO: 819756 - protein, 1563 aa, Homo sapiens; identical to SEQ ID NO: 819754

SEQ ID NO: 819757 - protein, 1563 aa, Homo sapiens; identical to SEQ ID NO: 819754

SEQ ID NO: 819758 - protein, 1563 aa, Homo sapiens; identical to SEQ ID NO: 819754

SEQ ID NO: 819759 - protein, 1572 aa, Homo sapiens
MSTPTDPGAMPHPGPSPGPGPSPGPILGPSPGPGPSPGSVHSMMGPSPGPPSVSHPMPTMGSTDFPQEGMHQMHKPIDGIHDKGIVEDIHCGSMKGTGMRPPHPGMGPPQSPMDQHSQGYMSPHPSPLGAPEHVSSPMSGGGPTPPQMPPSQPGALIPGDPQAMSQPNRGPSPFSPVQLHQLRAQILAYKMLARGQPLPETLQLAVQGKRTLPGLQQQQQQQQQQQQQQQQQQQQQQQPQQQPPQPQTQQQQQPALVNYNRPSGPGPELSGPSTPQKLPVPAPGGRPSPAPPAAAQPPAAAVPGPSVPQPAPGQPSPVLQLQQKQSRISPIQKPQGLDPVEILQEREYRLQARIAHRIQELENLPGSLPPDLRTKATVELKALRLLNFQRQLRQEVVACMRRDTTLETALNSKAYKRSKRQTLREARMTEKLEKQQKIEQERKRRQKHQEYLNSILQHAKDFKEYHRSVAGKIQKLSKAVATWHANTEREQKKETERIEKERMRRLMAEDEEGYRKLIDQKKDRRLAYLLQQTDEYVANLTNLVWEHKQAQAAKEKKKRRRRKKKAEENAEGGESALGPDGEPIDESSQMSDLPVKVTHTETGKVLFGPEAPKASQLDAWLEMNPGYEVAPRSDSEESDSDYEEEDEEEESSRQETEEKILLDPNSEEVSEKDAKQIIETAKQDVDDEYSMQYSARGSQSYYTVAHAISERVEKQSALLINGTLKHYQLQGLEWMVSLYNNNLNGILADEMGLGKTIQTIALITYLMEHKRLNGPYLIIVPLSTLSNWTYEFDKWAPSVVKISYKGTPAMRRSLVPQLRSGKFNVLLTTYEYIIKDKHILAKIRWKYMIVDEGHRMKNHHCKLTQVLNTHYVAPRRILLTGTPLQNKLPELWALLNFLLPTIFKSCSTFEQWFNAPFAMTGERVDLNEEETILIIRRLHKVLRPFLLRRLKKEVESQLPEKVEYVIKCDMSALQKILYRHMQAKGILLTDGSEKDKKGKGGAKTLMNTIMQLRKICNHPYMFQHIEESFAEHLGYSNGVINGAELYRASGKFELLDRILPKLRATNHRVLLFCQMTSLMTIMEDYFAFRNFLYLRLDGTTKSEDRAALLKKFNEPGSQYFIFLLSTRAGGLGLNLQAADTVVIFDSDWNPHQDLQAQDRAHRIGQQNEVRVLRLCTVNSVEEKILAAAKYKLNVDQKVIQAGMFDQKSSSHERRAFLQAILEHEEENEEEDEVPDDETLNQMIARREEEFDLFMRMDMDRRREDARNPKRKPRLMEEDELPSWIIKDDAEVERLTCEEEEEKIFGRGSRQRRDVDYSDALTEKQWLRAIEDGNLEEMEEEVRLKKRKRRRNVDKDPAKEDVEKAKKRRGRPPAEKLSPNPPKLTKQMNAIIDTVINYKDSSGRQLSEVFIQLPSRKELPEYYELIRKPVDFKKIKERIRNHKYRSLGDLEKDVMLLCHNAQTFNLEGSQIYEDSIVLQSVFKSARQKIAKEEESEDESNEEEEEEDEEESESEAKSVKVKIKLNKKDDKGRDKGKGKKRPNRGKAKPVVSDFDSDEEQDEREQSEGSGTDDE

SEQ ID NO: 819760 - protein, 1487 aa, Homo sapiens
MSTPTDPGAMPHPGPSPGPGPSPGPILGPSPGPGPSPGSVHSMMGPSPGPPSVSHPMPTMGSTDFPQEGMHQMHKPIDGIHDKGIVEDIHCGSMKGTGMRPPHPGMGPPQSPMDQHSQGYMSPHPSPLGAPEHVSSPMSGGGPTPPQMPPSQPGALIPGDPQAMSQPNRGPSPFSPVQLHQLRAQILAYKMLARGQPLPETLQLAVQGKRTLPGLQQQQQQQQQQQQQQQQQQQQQQQPQQQPPQPQTQQQQQPALVNYNRPSGPGPELSGPSTPQKLPVPAPGGRPSPAPPAAAQPPAAAVPGPSVPQPAPGQPSPVLQLQQKQSRISPIQKPQGLDPVEILQEREYRLQARIAHRIQELENLPGSLPPDLRTKATVELKALRLLNFQRQLRQEVVACMRRDTTLETALNSKAYKRSKRQTLREARMTEKLEKQQKIEQERKRRQKHQEYLNSILQHAKDFKEYHRSVAGKIQKLSKAVATWHANTEREQKKETERIEKERMRRLMAEDEEGYRKLIDQKKDRRLAYLLQQTDEYVANLTNLVWEHKQAQAAKEKKKRRRRKKKAEENAEGGESALGPDGEPIDESSQMSDLPVKVTHTETGKVLFGPEAPKASQLDAWLEMNPGYEVAPRSDSEESDSDYEEEDEEEESSRQETEEKILLDPNSEEVSEKDAKQIIETAKQDVDDEYSMQYSARGSQSYYTVAHAISERVEKQSALLINGTLKHYQLQGLEWMVSLYNNNLNGILADEMGLGKTIQTIALITYLMEHKRLNGPYLIIVPLSTLSNWTYEFDKWAPSVVKISYKGTPAMRRSLVPQLRSGKFNVLLTTYEYIIKDKHILAKIRWKYMIVDEGHRMKNHHCKLTQVLNTHYVAPRRILLTGTPLQNKLPELWALLNFLLPTIFKSCSTFEQWFNAPFAMTGERVDLNEEETILIIRRLHKVLRPFLLRRLKKEVESQLPEKVEYVIKCDMSALQKILYRHMQPRGSFSQMTSLMTIMEDYFAFRNFLYLRLDGTTKSEDRAALLKKFNEPGSQYFIFLLSTRAGGLGLNLQAADTVVIFDSDWNPHQDLQAQDRAHRIGQQNEVRVLRLCTVNSVEEKILAAAKYKLNVDQKVIQAGMFDQKSSSHERRAFLQAILEHEEENEEEDEVPDDETLNQMIARREEEFDLFMRMDMDRRREDARNPKRKPRLMEEDELPSWIIKDDAEVERLTCEEEEEKIFGRGSRQRRDVDYSDALTEKQWLRAIEDGNLEEMEEEVRLKKRKRRRNVDKDPAKEDVEKAKKRRGRPPAEKLSPNPPKLTKQMNAIIDTVINYKDSSGRQLSEVFIQLPSRKELPEYYELIRKPVDFKKIKERIRNHKYRSLGDLEKDVMLLCHNAQTFNLEGSQIYEDSIVLQSVFKSARQKIAKEEESEDESNEEEEEEDEEESESEAKSVKVKIKLNKKDDKGRDKGKGKKRPNRGKAKPVVSDFDSDEEQDEREQSEGSGTDDE

SEQ ID NO: 819761 - protein, 1140 aa, Homo sapiens
LRGHILGFSNKDNQKHQEYLNSILQHAKDFKEYHRSVAGKIQKLSKAVATWHANTEREQKKETERIEKERMRRLMAEDEEGYRKLIDQKKDRRLAYLLQQTDEYVANLTNLVWEHKQAQAAKEKKKRRRRKKKAEENAEGGESALGPDGEPIDESSQMSDLPVKVTHTETGKVLFGPEAPKASQLDAWLEMNPGYEVAPRSDSEESDSDYEEEDEEEESSRQETEEKILLDPNSEEVSEKDAKQIIETAKQDVDDEYSMQYSARGSQSYYTVAHAISERVEKQSALLINGTLKHYQLQGLEWMVSLYNNNLNGILADEMGLGKTIQTIALITYLMEHKRLNGPYLIIVPLSTLSNWTYEFDKWAPSVVKISYKGTPAMRRSLVPQLRSGKFNVLLTTYEYIIKDKHILAKIRWKYMIVDEGHRMKNHHCKLTQVLNTHYVAPRRILLTGTPLQNKLPELWALLNFLLPTIFKSCSTFEQWFNAPFAMTGERVDLNEEETILIIRRLHKVLRPFLLRRLKKEVESQLPEKVEYVIKCDMSALQKILYRHMQAKGILLTDGSEKDKKGKGGAKTLMNTIMQLRKICNHPYMFQHIEESFAEHLGYSNGVINGAELYRASGKFELLDRILPKLRATNHRVLLFCQMTSLMTIMEDYFAFRNFLYLRLDGTTKSEDRAALLKKFNEPGSQYFIFLLSTRAGGLGLNLQAADTVVIFDSDWNPHQDLQAQDRAHRIGQQNEVRVLRLCTVNSVEEKILAAAKYKLNVDQKVIQAGMFDQKSSSHERRAFLQAILEHEEENEEEDEVPDDETLNQMIARREEEFDLFMRMDMDRRREDARNPKRKPRLMEEDELPSWIIKDDAEVERLTCEEEEEKIFGRGSRQRRDVDYSDALTEKQWLRAIEDGNLEEMEEEVRLKKRKRRRNVDKDPAKEDVEKAKKRRGRPPAEKLSPNPPKLTKQMNAIIDTVINYKDSSGRQLSEVFIQLPSRKELPEYYELIRKPVDFKKIKERIRNHKYRSLGDLEKDVMLLCHNAQTFNLEGSQIYEDSIVLQSVFKSARQKIAKEEESEDESNEEEEEEDEEESESEAKSVKVKIKLNKKDDKGRDKGKGKKRPNRGKAKPVVSDFDSDEEQDEREQSEGSGTDDE

SEQ ID NO: 819762 - protein, 1496 aa, Homo sapiens
MSTPTDPGAMPHPGPSPGPGPSPGPILGPSPGPGPSPGSVHSMMGPSPGPPSVSHPMPTMGSTDFPQEGMHQMHKPIDGIHDKGIVEDIHCGSMKGTGMRPPHPGMGPPQSPMDQHSQGYMSPHPSPLGAPEHVSSPMSGGGPTPPQMPPSQPGALIPGDPQAMSQPNRGPSPFSPVQLHQLRAQILAYKMLARGQPLPETLQLAVQGKRTLPGLQQQQQQQQQQQQQQQQQQQQQQQPQQQPPQPQTQQQQQPALVNYNRPSGPGPELSGPSTPQKLPVPAPGGRPSPAPPAAAQPPAAAVPGPSVPQPAPGQPSPVLQLQQKQSRISPIQKPQGLDPVEILQEREYRLQARIAHRIQELENLPGSLPPDLRTKATVELKALRLLNFQRQLRQEVVACMRRDTTLETALNSKAYKRSKRQTLREARMTEKLEKQQKIEQERKRRQKHQEYLNSILQHAKDFKEYHRSVAGKIQKLSKAVATWHANTEREQKKETERIEKERMRRLMAEDEEGYRKLIDQKKDRRLAYLLQQTDEYVANLTNLVWEHKQAQAAKEKKKRRRRKKKAEENAEGGESALGPDGEPIDESSQMSDLPVKVTHTETGKVLFGPEAPKASQLDAWLEMNPGYEVAPRSDSEESDSDYEEEDEEEESSRQETEEKILLDPNSEEVSEKDAKQIIETAKQDVDDEYSMQYSARGSQSYYTVAHAISERVEKQSALLINGTLKHYQLQGLEWMVSLYNNNLNGILADEMGLGKTIQTIALITYLMEHKRLNGPYLIIVPLSTLSNWTYEFDKWAPSVVKISYKGTPAMRRSLVPQLRSGKFNVLLTTYEYIIKDKHILAKIRWKYMIVDEGHRMKNHHCKLTQVLNTHYVAPRRILLTGTPLQNKLPELWALLNFLLPTIFKSCSTFEQWFNAPFAMTGERVDLNEEETILIIRRLHKVLRPFLLRRLKKEVESQLPEKVEYVIKCDMSALQKILYRHMQAKGILLTDGSEKDKKGKGGAKTLMNTIMQLRKICNHPYMFQHIEESFAEHLGYSNGVINGAELYRASGKFELLDRILPKLRATNHRVLLFCQMTSLMTIMEDYFAFRNFLYLRLDGTTKSEDRAALLKKFNEPGSQYFIFLLSTRAGGLGLNLQAADTVVIFDSDWNPHQEEDEVPDDETLNQMIARREEEFDLFMRMDMDRRREDARNPKRKPRLMEEDELPSWIIKDDAEVERLTCEEEEEKIFGRGSRQRRDVDYSDALTEKQWLRAIEDGNLEEMEEEVRLKKRKRRRNVDKDPAKEDVEKAKKRRGRPPAEKLSPNPPKLTKQMNAIIDTVINYKDSSGRQLSEVFIQLPSRKELPEYYELIRKPVDFKKIKERIRNHKYRSLGDLEKDVMLLCHNAQTFNLEGSQIYEDSIVLQSVFKSARQKIAKEEESEDESNEEEEEEDEEESESEAKSVKVKIKLNKKDDKGRDKGKGKKRPNRGKAKPVVSDFDSDEEQDEREQSEGSGTDDE

SEQ ID NO: 819763 - protein, 370 aa, Homo sapiens
MFDQKSSSHERRAFLQAILEHEEENEEEDEVPDDETLNQMIARREEEFDLFMRMDMDRRREDARNPKRKPRLMEEDELPSWIIKDDAEVERLTCEEEEEKIFGRGSRQRRDVDYSDALTEKQWLRAIEDGNLEEMEEEVRLKKRKRRRNVDKDPAKEDVEKAKKRRGRPPAEKLSPNPPKLTKQMNAIIDTVINYKDSSGRQLSEVFIQLPSRKELPEYYELIRKPVDFKKIKERIRNHKYRSLGDLEKDVMLLCHNAQTFNLEGSQIYEDSIVLQSVFKSARQKIAKEEESEDESNEEEEEEDEEESESEAKSVKVKIKLNKKDDKGRDKGKGKKRPNRGKAKPVVSDFDSDEEQDEREQSEGSGTDDE

SEQ ID NO: 819764 - protein, 1499 aa, Homo sapiens
MSTPTDPGAMPHPGPSPGPGPSPGPILGPSPGPGPSPGSVHSMMGPSPGPPSVSHPMPTMGSTDFPQEGMHQMHKPIDGIHDKGIVEDIHCGSMKGTGMRPPHPGMGPPQSPMDQHSQGYMSPHPSPLGAPEHVSSPMSGGGPTPPQMPPSQPGALIPGDPQAMSQPNRGPSPFSPVQLHQLRAQILAYKMLARGQPLPETLQLAVQGKRTLPGLQQQQQQQQQQQQQQQQQQQQQQQPQQQPPQPQTQQQQQPALVNYNRPSGPGPELSGPSTPQKLPVPAPGGRPSPAPPAAAQPPAAAVPGPSVPQPAPGQPSPVLQLQQKQSRISPIQKPQGLDPVEILQEREYRLQARIAHRIQELENLPGSLPPDLRTKATVELKALRLLNFQRQLRQEVVACMRRDTTLETALNSKAYKRSKRQTLREARMTEKLEKQQKIEQERKRRQKHQEYLNSILQHAKDFKEYHRSVAGKIQKLSKAVATWHANTEREQKKETERIEKERMRRLMAEDEEGYRKLIDQKKDRRLAYLLQQTDEYVANLTNLVWEHKQAQAAKEKKKRRRRKKKAEENAEGGESALGPDGEPIDESSQMSDLPVKVTHTETGKVLFGPEAPKASQLDAWLEMNPGYEVAPRSDSEESDSDYEEEDEEEESSRQETEEKILLDPNSEEVSEKDAKQIIETAKQDVDDEYSMQYSARGSQSYYTVAHAISERVEKQSALLINGTLKHYQLQGLEWMVSLYNNNLNGILADEMGLGKTIQTIALITYLMEHKRLNGPYLIIVPLSTLSNWTYEFDKWAPSVVKISYKGTPAMRRSLVPQLRSGKFNVLLTTYEYIIKDKHILAKIRWKYMIVDEGHRMKNHHCKLTQVLNTHYVAPRRILLTGTPLQNKLPELWALLNFLLPTIFKSCSTFEQWFNAPFAMTGERVDLNEEETILIIRRLHKVLRPFLLRRLKKEVESQLPEKVEYVIKCDMSALQKILYRHMQAKGILLTDGSEKDKKGKGGAKTLMNTIMQLRKICNHPYMFQHIEESFAEHLGYSNGVINGAELYRASGKFELLDRILPKLRATNHRVLLFCQMTSLMTIMEDYFAFRNFLYLRLDGTTKSEDRAALLKKFNEPGSQYFIFLLSTRAGGLGLNLQAADTVVIFDSDWNPHQDLQAQDRAHRIGQQNEVRVLRLCTVNSVEEKILAAAKYKLNVDQKVIQAGMFDQKSSSHERRAFLQAILEHEEENEEEDEVPDDETLNQMIARREEEFDLFMRMDMDRRREDARNPKRKPRLMEEDELPSWIIKDDAEVERLTCEEEEEKIFGRGSRQRRDVDYSDALTEKQWLRAIEDGNLEEMEEEVRLKKRKRRRNVDKDPAKEDVEKAKKRRGRPPAEKLSPNPPKLTKQMNAIIDTVINYKDSSGRQLSEVFIQLPSRKELPEYYELIRKPVDFKKIKERIRNHKYRSLGDLEKDVMLLCHNAQTFNLEGSQIYEDSIVLQSVFKSARQKIAKKKKKKKKKT

SEQ ID NO: 819765 - protein, 276 aa, Homo sapiens
MKRLAARCFAGLLILSPLTVISDSRPADSGKAIEDGNLEEMEEEVRLKKRKRRRNVDKDPAKEDVEKAKKRRGRPPAEKLSPNPPKLTKQMNAIIDTVINYKDSSGRQLSEVFIQLPSRKELPEYYELIRKPVDFKKIKERIRNHKYRSLGDLEKDVMLLCHNAQTFNLEGSQIYEDSIVLQSVFKSARQKIAKEEESEDESNEEEEEEDEEESESEAKSVKVKIKLNKKDDKGRDKGKGKKRPNRGKAKPVVSDFDSDEEQDEREQSEGSGTDDE

SEQ ID NO: 819766 - protein, 236 aa, Homo sapiens
MEEEVRLKKRKRRRNVDKDPAKEDVEKAKKRRGRPPAEKLSPNPPKLTKQMNAIIDTVINYKDSSGRQLSEVFIQLPSRKELPEYYELIRKPVDFKKIKERIRNHKYRSLGDLEKDVMLLCHNAQTFNLEGSQIYEDSIVLQSVFKSARQKIAKEEESEDESNEEEEEEDEEESESEAKSVKVKIKLNKKDDKGRDKGKGKKRPNRGKAKPVVSDFDSDEEQDEREQSEGSGTDDE

SEQ ID NO: 819767 - protein, 236 aa, Homo sapiens; identical to SEQ ID NO: 819766

SEQ ID NO: 819768 - protein, 254 aa, Homo sapiens
MCLLCFQRTAIEDGNLEEMEEEVRLKKRKRRRNVDKDPAKEDVEKAKKRRGRPPAEKLSPNPPKLTKQMNAIIDTVINYKDSSGRQLSEVFIQLPSRKELPEYYELIRKPVDFKKIKERIRNHKYRSLGDLEKDVMLLCHNAQTFNLEGSQIYEDSIVLQSVFKSARQKIAKEEESEDESNEEEEEEDEEESESEAKSVKVKIKLNKKDDKGRDKGKGKKRPNRGKAKPVVSDFDSDEEQDEREQSEGSGTDDE

SEQ ID NO: 819769 - protein, 254 aa, Homo sapiens
MEEEVRLKKRKRRRNVDKDPAKEDVEKAKKRRGRPPAEKLSPNPPKLTKQMNAIIDTVINYKDRCNVEKVPSNSQLEIEGNSSGRQLSEVFIQLPSRKELPEYYELIRKPVDFKKIKERIRNHKYRSLGDLEKDVMLLCHNAQTFNLEGSQIYEDSIVLQSVFKSARQKIAKEEESEDESNEEEEEEDEEESESEAKSVKVKIKLNKKDDKGRDKGKGKKRPNRGKAKPVVSDFDSDEEQDEREQSEGSGTDDE

SEQ ID NO: 819770 - protein, 266 aa, Homo sapiens
MWLAIEDGNLEEMEEEVRLKKRKRRRNVDKDPAKEDVEKAKKRRGRPPAEKLSPNPPKLTKQMNAIIDTVINYKDRCNVEKVPSNSQLEIEGNSSGRQLSEVFIQLPSRKELPEYYELIRKPVDFKKIKERIRNHKYRSLGDLEKDVMLLCHNAQTFNLEGSQIYEDSIVLQSVFKSARQKIAKEEESEDESNEEEEEEDEEESESEAKSVKVKIKLNKKDDKGRDKGKGKKRPNRGKAKPVVSDFDSDEEQDEREQSEGSGTDDE

SEQ ID NO: 819771 - protein, 202 aa, Homo sapiens
TYKRVGCRRGTKGVAPKLTISQVMGKKKETSGRQLSEVFIQLPSRKELPEYYELIRKPVDFKKIKERIRNHKYRSLGDLEKDVMLLCHNAQTFNLEGSQIYEDSIVLQSVFKSARQKIAKEEESEDESNEEEEEEDEEESESEAKSVKVKIKLNKKDDKGRDKGKGKKRPNRGKAKPVVSDFDSDEEQDEREQSEGSGTDDE

SEQ ID NO: 819772 - protein, 1386 aa, Homo sapiens
MSTPTDPGAMPHPGPSPGPGPSPGPILGPSPGPGPSPGSVHSMMGPSPGPPSVSHPMPTMGSTDFPQEGMHQMHKPIDGIHDKGIVEDIHCGSMKGTGMRPPHPGMGPPQSPMDQHSQGYMSPHPSPLGAPEHVSSPMSGGGPTPPQMPPSQPGALIPGDPQAMSQPNRGPSPFSPVQLHQLRAQILAYKMLARGQPLPETLQLAVQGKRTLPGLQQQQQQQQQQQQQQQQQQQQQQQPQQQPPQPQTQQQQQPALVNYNRPSGPGPELSGPSTPQKLPVPAPGGRPSPAPPAAAQPPAAAVPGPSVPQPAPGQPSPVLQLQQKQSRISPIQKPQGLDPVEILQEREYRLQARIAHRIQELENLPGSLPPDLRTKATVELKALRLLNFQRQLRQEVVACMRRDTTLETALNSKAYKRSKRQTLREARMTEKLEKQQKIEQERKRRQKHQEYLNSILQHAKDFKEYHRSVAGKIQKLSKAVATWHANTEREQKKETERIEKERMRRLMAEDEEGYRKLIDQKKDRRLAYLLQQTDEYVANLTNLVWEHKQAQAAKEKKKRRRRKKKAEENAEGGESALGPDGEPIDESSQMSDLPVKVTHTETGKVLFGPEAPKASQLDAWLEMNPGYEVAPRSDSEESDSDYEEEDEEEESSRQETEEKILLDPNSEEVSEKDAKQIIETAKQDVDDEYSMQYSARGSQSYYTVAHAISERVEKQSALLINGTLKHYQLQGLEWMVSLYNNNLNGILADEMGLGKTIQTIALITYLMEHKRLNGPYLIIVPLSTLSNWTYEFDKWAPSVVKISYKGTPAMRRSLVPQLRSGKFNVLLTTYEYIIKDKHILAKIRWKYMIVDEGHRMKNHHCKLTQVLNTHYVAPRRILLTGTPLQNKLPELWALLNFLLPTIFKSCSTFEQWFNAPFAMTGERVDLNEEETILIIRRLHKVLRPFLLRRLKKEVESQLPEKVEYVIKCDMSALQKILYRHMQAKGILLTDGSEKDKKGKGGAKTLMNTIMQLRKICNHPYMFQHIEESFAEHLGYSNGVINGAELYRASGKFELLDRILPKLRATNHRVLLFCQMTSLMTIMEDYFAFRNFLYLRLDGTTKSEDRAALLKKFNEPGSQYFIFLLSTRAGGLGLNLQAADTVVIFDSDWNPHQDLQAQDRAHRIGQQNEVRVLRLCTVNSVEEKILAAAKYKLNVDQKVIQAGMFDQKSSSHERRAFLQAILEHEEENEEEDEVPDDETLNQMIARREEEFDLFMRMDMDRRREDARNPKRKPRLMEEDELPSWIIKDDAEVERLTCEEEEEKIFGRGSRQRRDVDYSDALTEKQWLRSLLQVESAGRQKCRSLKRHLKTPILGSTIVILSTGVTGEVTNLVTSGKNTWLLFHLHTS

SEQ ID NO: 819773 - protein, 1170 aa, Homo sapiens
MSTPTDPGAMPHPGPSPGPGPSPGPILGPSPGPGPSPGSVHSMMGPSPGPPSVSHPMPTMGSTDFPQEGMHQMHKPIDGIHDKGIVEDIHCGSMKGTGMRPPHPGMGPPQSPMDQHSQGYMSPHPSPLGAPEHVSSPMSGGGPTPPQMPPSQPGALIPGDPQAMSQPNRGPSPFSPVQLHQLRAQILAYKMLARGQPLPETLQLAVQGKRTLPGLQQQQQQQQQQQQQQQQQQQQQQQPQQQPPQPQTQQQQQPALVNYNRPSGPGPELSGPSTPQKLPVPAPGGRPSPAPPAAAQPPAAAVPGPSVPQPAPGQPSPVLQLQQKQSRISPIQKPQGLDPVEILQEREYRLQARIAHRIQELENLPGSLPPDLRTKATVELKALRLLNFQRQLRQEVVACMRRDTTLETALNSKAYKRSKRQTLREARMTEKLEKQQKIEQERKRRQKHQEYLNSILQHAKDFKEYHRSVAGKIQKLSKAVATWHANTEREQKKETERIEKERMRRLMAEDEEGYRKLIDQKKDRRLAYLLQQTDEYVANLTNLVWEHKQAQAAKEKKKRRRRKKKAEENAEGGESALGPDGEPIDESSQMSDLPVKVTHTETGKVLFGPEAPKASQLDAWLEMNPGYEVAPRSDSEESDSDYEEEDEEEESSRQETEEKILLDPNSEEVSEKDAKQIIETAKQDVDDEYSMQYSARGSQSYYTVAHAISERVEKQSALLINGTLKHYQLQGLEWMVSLYNNNLNGILADEMGLGKTIQTIALITYLMEHKRLNGPYLIIVPLSTLSNWTYEFDKWAPSVVKISYKGTPAMRRSLVPQLRSGKFNVLLTTYEYIIKDKHILAKIRWKYMIVDEGHRMKNHHCKLTQVLNTHYVAPRRILLTGTPLQNKLPELWALLNFLLPTIFKSCSTFEQWFNAPFAMTGERVDLNEEETILIIRRLHKVLRPFLLRRLKKEVESQLPEKVEYVIKCDMSALQKILYRHMQAKGILLTDGSEKDKKGKGGAKTLMNTIMQLRKICNHPYMFQHIEESFAEHLGYSNGVINGAELYRASGKFELLDRILPKLRATNHRVLLFCQMTSLMTIMEDYFAFRNFLYLRLDGTTKSEDRAALLKKFNEPGSQYFIFLLSTRAGGLGLNLQAADTVVIFDSDWNPHQVCMSHSGAQASLWRATKR

SEQ ID NO: 819774 - protein, 244 aa, Homo sapiens
MKRLAARCFAGLLILSPLTVISDSRPADSGKAIEDGNLEEMEEEVRLKKRKRRRNVDKDPAKEDVEKAKKRRGRPPAEKLSPNPPKLTKQMNAIIDTVINYKDRCNVEKVPSNSQLEIEGNSSGRQLSEVFIQLPSRKELPEYYELIRKPVDFKKIKERIRNHKYRSLGDLEKDVMLLCHNAQTFNLEGSQIYEDSIVLQSVFKSARQKIAKEEESEDESNEEEEEEDEEESESEGKPRHSGPV

SEQ ID NO: 819775 - protein, 110 aa, Homo sapiens
GSPRPSSSCSRSRAASAPSRNRKAWTPWKFCKSGNTGNAPRQQGAPCGVLAPAAQAEGGEAPASLVGQTVIFTRAVGKLSSTPGAFPVLRGGTGVLKIKSRRGLPVDPRE

SEQ ID NO: 819776 - protein, 1021 aa, Homo sapiens
MATEGAAQLGNRVAGMVCSLWVLLLVSSVLALEEVLLDTTGETSEIGWLTYPPGGWDEVSVLDDQRRLTRTFEACHVAGAPPGTGQDNWLQTHFVERRGAQRAHIRLHFSVRACSSLGVSGGTCRETFTLYYRQAEEPDSPDSVSSWHLKRWTKVDTIAADESFPSSSSSSSSSSSAAWAVGPHGAGQRAGLQLNVKERSFGPLTQRGFYVAFQDTGACLALVAVRLFSYTCPAVLRSFASFPETQASGAGGASLVAAVGTCVAHAEPEEDGVGGQAGGSPPRLHCNGEGKWMVAVGGCRCQPGYQPARGDKACQACPRGLYKSSAGNAPCSPCPARSHAPNPAAPVCPCLEGFYRASSDPPEAPCTGPPSAPQELWFEVQGSALMLHWRLPRELGGRGDLLFNVVCKECEGRQEPASGGGGTCHRCRDEVHFDPRQRGLTESRVLVGGLRAHVPYILEVQAVNGVSELSPDPPQAAAINVSTSHEVPSAVPVVHQVSRASNSITVSWPQPDQTNGNILDYQLRYYDQAEDESHSFTLTSETNTATVTQLSPGHIYGFQVRARTAAGHGPYGGKVYFQTLPQGELSSQLPERLSLVIGSILGALAFLLLAAITVLAVVFQRKRRGTGYTEQLQQYSSPGLGVKYYIDPSTYEDPCQAIRELAREVDPAYIKIEEVIGTGSFGEVRQGRLQPRGRREQTVAIQALWAGGAESLQMTFLGRAAVLGQFQHPNILRLEGVVTKSRPLMVLTEFMELGPLDSFLRQREGQFSSLQLVAMQRGVAAAMQYLSSFAFVHRSLSAHSVLVNSHLVCKVARLGHSPQGPSCLLRWAAPEVIAHGKHTTSSDVWSFGILMWEVMSYGERPYWDMSEQEVLNAIEQEFRLPPPPGCPPGLHLLMLDTWQKDRARRPHFDQLVAAFDKMIRKPDTLQAGGDPGERPSQALLTPVALDFPCLDSPQAWLSAIGLECYQDNFSKFGLCTFSDVAQLSLEDLPALGITLAGHQKKLLHHIQLLQQHLRQQGSVEV

SEQ ID NO: 819777 - protein, 130 aa, Homo sapiens
  misc_feature (34)..(34): Xaa can be any naturally occurring amino acid
YRIRTIPSELPLEEQTESRVRRLAADPGSRLGQXGFHTGGGTRDPAWRRRSRRGPPGSPGAPPLEQPLPPASGPPRNPRDSRRRTDPGRVQRGPRTGEDAGGTVRAPGAPGPLRGLGGRRPAETAANGKK

SEQ ID NO: 819778 - protein, 932 aa, Homo sapiens
MATEGAAQLGNRVAGMVCSLWVLLLVSSVLALEEVLLDTTGETSEIGWLTYPPGGWDEVSVLDDQRRLTRTFEACHVAGAPPGTGQDNWLQTHFVERRGAQRAHIRLHFSVRACSSLGVSGGTCRETFTLYYRQAEEPDSPDSVSSWHLKTLDQETQASGAGGASLVAAVGTCVAHAEPEEDGVGGQAGGSPPRLHCNGEGKWMVAVGGCRCQPGYQPARGDKACQACPRGLYKSSAGNAPCSPCPARSHAPNPAAPVCPCLEGFYRASSDPPEAPCTGPPSAPQELWFEVQGSALMLHWRLPRELGGRGDLLFNVVCKECEGRQEPASGGGGTCHRCRDEVHFDPRQRGLTESRVLVGGLRAHVPYILEVQAVNGVSELSPDPPQAAAINVSTSHEVPSAVPVVHQVSRASNSITVSWPQPDQTNGNILDYQLRYYDQAEDESHSFTLTSETNTATVTQLSPGHIYGFQVRARTAAGHGPYGGKVYFQTLPQGELSSQLPERLSLVIGSILGALAFLLLAAITVLAVVFQRKRRGTGYTEQLQQYSSPGLGVKYYIDPSTYEDPCQAIRELAREVDPAYIKIEEVIGTGSFGEVRQGRLQPRGRREQTVAIQALWAGGAESLQMTFLGRAAVLGQFQHPNILRLEGVVTKSRPLMVLTEFMELGPLDSFLRQREGQFSSLQLVAMQRGVAAAMQYLSSFAFVHRSLSAHSVLVNSHLVCKVARLGHSPQGPSCLLRWAAPEVIAHGKHTTSSDVWSFGILMWEVMSYGERPYWDMSEQEVLNAIEQEFRLPPPPGCPPGLHLLMLDTWQKDRARRPHFDQLVAAFDKMIRKPDTLQAGGDPGERPSQALLTPVALDFPCLDSPQAWLSAIGLECYQDNFSKFGLCTFSDVAQLSLEDLPALGITLAGHQKKLLHHIQLLQQHLRQQGSVEV

SEQ ID NO: 819779 - protein, 705 aa, Homo sapiens
GQALKPGQALKPGQALKPGQALKPGQALKPGQALKPGQALKPGQALKPGQALRPGQALKPGQALKPGQALKAWRLPRELGGRGDLLFNVVCKECEGRQEPASGGGGTCHRCRDEVHFDPRQRGLTESRVLVGGLRAHVPYILEVQAVNGVSELSPDPPQAAAINVSTSHEVPSAVPVVHQVSRASNSITVSWPQPDQTNGNILDYQLRYYDQAEDESHSFTLTSETNTATVTQLSPGHIYGFQVRARTAAGHGPYGGKVYFQTLPQGELSSQLPERLSLVIGSILGALAFLLLAAITVLAVVFQRKRRGTGYTEQLQQYSSPGLGVKYYIDPSTYEDPCQAIRELAREVDPAYIKIEEVIGTGSFGEVRQGRLQPRGRREQTVAIQALWAGGAESLQMTFLGRAAVLGQFQHPNILRLEGVVTKSRPLMVLTEFMELGPLDSFLRQREGQFSSLQLVAMQRGVAAAMQYLSSFAFVHRSLSAHSVLVNSHLVCKVARLGHSPQGPSCLLRWAAPEVIAHGKHTTSSDVWSFGILMWEVMSYGERPYWDMSEQEVLNAIEQEFRLPPPPGCPPGLHLLMLDTWQKDRARRPHFDQLVAAFDKMIRKPDTLQAGGDPGERPSQALLTPVALDFPCLDSPQAWLSAIGLECYQDNFSKFGLCTFSDVAQLSLEDLPALGITLAGHQKKLLHHIQLLQQHLRQQGSVEV

SEQ ID NO: 819780 - protein, 756 aa, Homo sapiens
MATEGAAQLGNRVAGMVCSLWVLLLVSSVLALEEVLLDTTGETSEIGWLTYPPGGWDEVSVLDDQRRLTRTFEACHVAGAPPGTGQDNWLQTHFVERRGAQRAHIRLHFSVRACSSLGVSGGTCRETFTLYYRQAEEPDSPDSVSSWHLKRWTKVDTIAADESFPSSSSSSSSSSSAAWAVGPHGAGQRAGLQLNVKERSFGPLTQRGFYVAFQDTGACLALVAVRLFSYTCPAVLRSFASFPETQASGAGGASLVAAVGTCVAHAEPEEDGVGGQAGGSPPRLHCNGEGKWMVAVGGCRCQPGYQPARGDKACQACPRGLYKSSAGNAPCSPCPARSHAPNPAAPVCPCLEGFYRASSDPPEAPCTGPPSAPQELWFEVQGSALMLHWRLPRELGGRGDLLFNVVCKECEGRQEPASGGGGTCHRCRDEVHFDPRQRGLTESRVLVGGLRAHVPYILEVQAVNGVSELSPDPPQAAAINVSTSHEVPSAVPVVHQVSRASNSITVSWPQPDQTNGNILDYQLRYYDQAEDESHSFTLTSETNTATVTQLSPGHIYGFQVRARTAAGHGPYGGKVYFQTLPQGELSSQLPERLSLVIGSILGALAFLLLAAITVLAVVFQRKRRGTGYTEQLQQYSSPGLGVKYYIDPSTYEDPCQAIRELAREVDPAYIKIEEVIGTGSFGEVRQGRLQPRGRREQTVAIQALWAGGAESLQMTFLGRAAVLGQFQHPNILRLEGVVLRLSTSPLLIKGKEGNLQ

SEQ ID NO: 819781 - protein, 130 aa, Homo sapiens; identical to SEQ ID NO: 819777
  misc_feature (34)..(34): Xaa can be any naturally occurring amino acid

SEQ ID NO: 819782 - protein, 1175 aa, Homo sapiens
MPKKKRLSAGRVPLILFLCQMISALEVPLDPKLLEDLVQPPTITQQSPKDYIIDPRENIVIQCEAKGKPPPSFSWTRNGTHFDIDKDPLVTMKPGTGTLIINIMSEGKAETYEGVYQCTARNERGAAVSNNIVVRPSRSPLWTKEKLEPITLQSGQSLVLPCRPPIGLPPPIIFWMDNSFQRLPQSERVSQGLNGDLYFSNVLPEDTREDYICYARFNHTQTIQQKQPISVKVISAKSSRERPPTFLTPEGNASNKEELRGNVLSLECIAEGLPTPIIYWAKEDGMLPKNRTVYKNFEKTLQIIHVSEADSGNYQCIAKNALGAIHHTISVRVKAAPYWITAPQNLVLSPGEDGTLICRANGNPKPRISWLTNGVPIEIAPDDPSRKIDGDTIIFSNVQERSSAVYQCNASNEYGYLLANAFVNVLAEPPRILTPANTLYQVIANRPALLDCAFFGSPLPTIEWFKGAKGSALHEDIYVLHENGTLEIPVAQKDSTGTYTCVARNKLGMAKNEVHLEIKDPTWIVKQPEYAVVQRGSMVSFECKVKHDHTLSLTVLWLKDNRELPSDERFTVDKDHLVVADVSDDDSGTYTCVANTTLDSVSASAVLSVVAPTPTPAPVYDVPNPPFDLELTDQLDKSVQLSWTPGDDNNSPITKFIIEYEDAMHKPGLWHHQTEVSGTQTTAQLKLSPYVNYSFRVMAVNSIGKSLPSEASEQYLTKASEPDKNPTAVEGLGSEPDNLVITWKPLNGFESNGPGLQYKVSWRQKDGDDEWTSVVVANVSKYIVSGTPTFVPYLIKVQALNDMGFAPEPAVVMGHSGEDLPMVAPGNVRVNVVNSTLAEVHWDPVPLKSIRGHLQGYRIYYWKTQSSSKRNRRHIEKKILTFQGSKTHGMLPGLEPFSHYTLNVRVVNGKGEGPASPDRVFNTPEGVPSAPSSLKIVNPTLDSLTLEWDPPSHPNGILTEYTLKYQPINSTHELGPLVDLKIPANKTRWTLKNLNFSTRYKFYFYAQTSAGSGSQITEEAVTTVDEAMASRQVDIATQGWFIGLMCAVALLILILLIVCFIRRNKGGKYPVKEKEDAHADPEIQPMKEDDGTFGEYSDAEDHKPLKKGSRTPSDRTVKKEDSDDSLVDYGEGVNGQFNEDGSFIGQYSGKKEKEPAEGNESSEAPSPVNAMNSFV

SEQ ID NO: 819783 - protein, 1301 aa, Homo sapiens
MPKKKRLSAGRVPLILFLCQMISALEVPLDRKYERFKDLVQPPTITQQSPKDYIIDPRENIVIQCEAKGKPPPSFSWTRNGTHFDIDKDPLVTMKPGTGTLIINIMSEGKAETYEGVYQCTARNERGAAVSNNIVVRPSRSPLWTKEKLEPITLQSGQSLVLPCRPPIGLPPPIIFWMDNSFQRLPQSERVSQGLNGDLYFSNVLPEDTREDYICYARFNHTQTIQQKQPISVKVISVDELNDTIAANLSDTEFYGAKSSRERPPTFLTPEGNASNKEELRGNVLSLECIAEGLPTPIIYWAKEDGMLPKNRTVYKNFEKTLQIIHVSEADSGNYQCIAKNALGAIHHTISVRVKAAPYWITAPQNLVLSPGEDGTLICRANGNPKPRISWLTNGVPIEIAPDDPSRKIDGDTIIFSNVQERSSAVYQCNASNEYGYLLANAFVNVLAEPPRILTPANTLYQVIANRPALLDCAFFGSPLPTIEWFKGAKGSALHEDIYVLHENGTLEIPVAQKDSTGTYTCVARNKLGMAKNEVHLEIKDPTWIVKQPEYAVVQRGSMVSFECKVKHDHTLSLTVLWLKDNRELPSDERFTVDKDHLVVADVSDDDSGTYTCVANTTLDSVSASAVLSVVAPTPTPAPVYDVPNPPFDLELTDQLDKSVQLSWTPGDDNNSPITKFIIEYEDAMHKPGLWHHQTEVSGTQTTAQLKLSPYVNYSFRVMAVNSIGKSLPSEASEQYLTKASEPDKNPTAVEGLGSEPDNLVITWKPLNGFESNGPGLQYKVSWRQKDGDDEWTSVVVANVSKYIVSGTPTFVPYLIKVQALNDMGFAPEPAVVMGHSGEDLPMVAPGNVRVNVVNSTLAEVHWDPVPLKSIRGHLQGYRIYYWKTQSSSKRNRRHIEKKILTFQGSKTHGMLPGLEPFSHYTLNVRVVNGKGEGPASPDRVFNTPEGVPSAPSSLKIVNPTLDSLTLEWDPPSHPNGILTEYTLKYQPINSTHELGPLVDLKIPANKTRWTLKNLNFSTRYKFYFYAQTSAGSGSQITEEAVTTVDEAGILPPDVGAGKVQAVNPRISNLTAAAAETYANISWEYEGPEHVNFYVEYGVAGSKEEWRKEIVNGSRSFFGLKGLMPGTAYKVRVGAVGDSGFVSSEDVFETGPAMASRQVDIATQGWFIGLMCAVALLILILLIVCFIRRNKGGKYPVKEKEDAHADPEIQPMKEDDGTFGEYSDAEDHKPLKKGSRTPSDRTVKKEDSDDSLVDYGEGVNGQFNEDGSFIGQYSGKKEKEPAEGNESSEAPSPVNAMNSFV

SEQ ID NO: 819784 - protein, 1301 aa, Homo sapiens; identical to SEQ ID NO: 819783

SEQ ID NO: 819785 - protein, 1301 aa, Homo sapiens; identical to SEQ ID NO: 819783

SEQ ID NO: 819786 - protein, 1301 aa, Homo sapiens; identical to SEQ ID NO: 819783

SEQ ID NO: 819787 - protein, 1169 aa, Homo sapiens
MPKKKRLSAGRVPLILFLCQMISALEVPLDLVQPPTITQQSPKDYIIDPRENIVIQCEAKGKPPPSFSWTRNGTHFDIDKDPLVTMKPGTGTLIINIMSEGKAETYEGVYQCTARNERGAAVSNNIVVRPSRSPLWTKEKLEPITLQSGQSLVLPCRPPIGLPPPIIFWMDNSFQRLPQSERVSQGLNGDLYFSNVLPEDTREDYICYARFNHTQTIQQKQPISVKVISAKSSRERPPTFLTPEGNASNKEELRGNVLSLECIAEGLPTPIIYWAKEDGMLPKNRTVYKNFEKTLQIIHVSEADSGNYQCIAKNALGAIHHTISVRVKAAPYWITAPQNLVLSPGEDGTLICRANGNPKPRISWLTNGVPIEIAPDDPSRKIDGDTIIFSNVQERSSAVYQCNASNEYGYLLANAFVNVLAEPPRILTPANTLYQVIANRPALLDCAFFGSPLPTIEWFKGAKGSALHEDIYVLHENGTLEIPVAQKDSTGTYTCVARNKLGMAKNEVHLEIKDPTWIVKQPEYAVVQRGSMVSFECKVKHDHTLSLTVLWLKDNRELPSDERFTVDKDHLVVADVSDDDSGTYTCVANTTLDSVSASAVLSVVAPTPTPAPVYDVPNPPFDLELTDQLDKSVQLSWTPGDDNNSPITKFIIEYEDAMHKPGLWHHQTEVSGTQTTAQLKLSPYVNYSFRVMAVNSIGKSLPSEASEQYLTKASEPDKNPTAVEGLGSEPDNLVITWKPLNGFESNGPGLQYKVSWRQKDGDDEWTSVVVANVSKYIVSGTPTFVPYLIKVQALNDMGFAPEPAVVMGHSGEDLPMVAPGNVRVNVVNSTLAEVHWDPVPLKSIRGHLQGYRIYYWKTQSSSKRNRRHIEKKILTFQGSKTHGMLPGLEPFSHYTLNVRVVNGKGEGPASPDRVFNTPEGVPSAPSSLKIVNPTLDSLTLEWDPPSHPNGILTEYTLKYQPINSTHELGPLVDLKIPANKTRWTLKNLNFSTRYKFYFYAQTSAGSGSQITEEAVTTVDEAMASRQVDIATQGWFIGLMCAVALLILILLIVCFIRRNKGGKYPVKEKEDAHADPEIQPMKEDDGTFGEYSDAEDHKPLKKGSRTPSDRTVKKEDSDDSLVDYGEGVNGQFNEDGSFIGQYSGKKEKEPAEGNESSEAPSPVNAMNSFV

SEQ ID NO: 819788 - protein, 943 aa, Homo sapiens
MPKKKRLSAGRVPLILFLCQMISALEVPLDLVQPPTITQQSPKDYIIDPRENIVIQCEAKGKPPPSFSWTRNGTHFDIDKDPLVTMKPGTGTLIINIMSEGKAETYEGVYQCTARNERGAAVSNNIVVRPSRSPLWTKEKLEPITLQSGQSLVLPCRPPIGLPPPIIFWMDNSFQRLPQSERVSQGLNGDLYFSNVLPEDTREDYICYARFNHTQTIQQKQPISVKVISAKSSRERPPTFLTPEGNASNKEELRGNVLSLECIAEGLPTPIIYWAKEDGMLPKNRTVYKNFEKTLQIIHVSEADSGNYQCIAKNALGAIHHTISVRVKAAPYWITAPQNLVLSPGEDGTLICRANGNPKPRISWLTNGVPIEIAPDDPSRKIDGDTIIFSNVQERSSAVYQCNASNEYGYLLANAFVNVLAEPPRILTPANTLYQVIANRPALLDCAFFGSPLPTIEWFKGAKGSALHEDIYVLHENGTLEIPVAQKDSTGTYTCVARNKLGMAKNEVHLEIKDPTWIVKQPEYAVVQRGSMVSFECKVKHDHTLSLTVLWLKDNRELPSDERFTVDKDHLVVADVSDDDSGTYTCVANTTLDSVSASAVLSVVAPTPTPAPVYDVPNPPFDLELTDQLDKSVQLSWTPGDDNNSPITKFIIEYEDAMHKPGLWHHQTEVSGTQTTAQLKLSPYVNYSFRVMAVNSIGKSLPSEASEQYLTKASEPDKNPTAVEGLGSEPDNLVITWKPLNGFESNGPGLQYKVSWRQKDGDDEWTSVVVANVSKYIVSGTPTFVPYLIKVQALNDMGFAPEPAVVMGHSGEDLPMVAPGNVRVNVVNSTLAEVHWDPVPLKSIRGHLQGYRIYYWKTQSSSKRNRRHIEKKILTFQGSKTHGMLPGLEPFSHYTLNVRVVNGKGEGPASPDRVFNTPEGVPSAPSSLKIVNPTRVHLKVSAN

SEQ ID NO: 819789 - protein, 537 aa, Homo sapiens
MTGVPAGDDNRYVPITKFIIEYEDAMHKPGLWHHQTEVSGTQTTAQLKLSPYVNYSFRVMAVNSIGKSLPSEASEQYLTKASEPDKNPTAVEGLGSEPDNLVITWKPLNGFESNGPGLQYKVSWRQKDGDDEWTSVVVANVSKYIVSGTPTFVPYLIKVQALNDMGFAPEPAVVMGHSGEDLPMVAPGNVRVNVVNSTLAEVHWDPVPLKSIRGHLQGYRIYYWKTQSSSKRNRRHIEKKILTFQGSKTHGMLPGLEPFSHYTLNVRVVNGKGEGPASPDRVFNTPEGVPSAPSSLKIVNPTLDSLTLEWDPPSHPNGILTEYTLKYQPINSTHELGPLVDLKIPANKTRWTLKNLNFSTRYKFYFYAQTSAGSGSQITEEAVTTVDEAMASRQVDIATQGWFIGLMCAVALLILILLIVCFIRRNKGGKYPVKEKEDAHADPEIQPMKEDDGTFGEYSDAEDHKPLKKGSRTPSDRTVKKEDSDDSLVDYGEGVNGQFNEDGSFIGQYSGKKEKEPAEGNESSEAPSPVNAMNSFV

SEQ ID NO: 819790 - protein, 1301 aa, Homo sapiens; identical to SEQ ID NO: 819783

SEQ ID NO: 819791 - protein, 376 aa, Homo sapiens
MPKKKRLSAGRVPLILFLCQMISALEVPLDLVQPPTITQQSPKDYIIDPRENIVIQCEAKGKPPPSFSWTRNGTHFDIDKDPLVTMKPGTGTLIINIMSEGKAETYEGVYQCTARNERGAAVSNNIVVRPSRSPLWTKEKLEPITLQSGQSLVLPCRPPIGLPPPIIFWMDNSFQRLPQSERVSQGLNGDLYFSNVLPEDTREDYICYARFNHTQTIQQKQPISVKVISAKSSRERPPTFLTPEGNASNKEELRGNVLSLECIAEGLPTPIIYWAKEDGMLPKNRTVYKNFEKTLQIIHVSEADSGNYQCIAKNALGAIHHTISVRVKAAPYWITAPQNLVLSPGEDGTLICRANGNPKPRISWLTNGVPIESKLP

SEQ ID NO: 819792 - protein, 72 aa, Homo sapiens
WKTQSSSKRNRRHIEKKILTFQGSKTHGMLPGLEPFSHYTLNVRVVNGKGEGPASPDRVFNTPEGGMEWTCL

SEQ ID NO: 819793 - protein, 153 aa, Homo sapiens
MAPAAATGGSTLPSGFSVFTTLPDLLFIFEFIFGGLVWILVASSLVPWPLVQGWVMFVSVFCFVATTTLIILYIIGAHGGETSWVTLDAAYHCTAALFYLSASVLEALATITMQDGFTYRHYHENIAAVVFSYIATLLYVVHAVFSLIRWKSS

SEQ ID NO: 819794 - protein, 138 aa, Homo sapiens
MPLMVEKRKQPPPHCPKKKALPCCSWVLCLLSRVPSRPGWELAVSNLQLLCCLLGSPPVCERGPSCSGVGSGDRDLRRKERSSADPWSSSRELPVGIVHKLSRAPHLVPCFKSSWMFCMSWGLKLTQQIFPEVHGGRR

SEQ ID NO: 819795 - protein, 111 aa, Homo sapiens
MAPAAATGGSTLPSGFSVFTTLPDLLFIFEFIFGGLVWILVASSLVPWPLVQGWVMFVSVFCFVATTTLIILYIIGAHGGETSWVTLVFSYIATLLYVVHAVFSLIRWKSS

SEQ ID NO: 819796 - protein, 138 aa, Homo sapiens; identical to SEQ ID NO: 819794

SEQ ID NO: 819797 - protein, 206 aa, Homo sapiens
  misc_feature (61)..(61): Xaa can be any naturally occurring amino acid
KVAESIQSRGLGESLKETLVQMLDGPSDDHCLHRGTPRLGSVVQRDEYKKRLRAGETLHRXLCNKLDALRCALYRHLDVIHSGRALAVQSWMSHHLPWLPWPLVQGWVMFVSVFCFVATTTLIILYIIGAHGGETSWVTLDAAYHCTAALFYLSASVLEALATITMQDGFTYRHYHENIAAVVFSYIATLLYVVHAVFSLIRWKSS

SEQ ID NO: 819798 - protein, 153 aa, Homo sapiens; identical to SEQ ID NO: 819793

SEQ ID NO: 819799 - protein, 137 aa, Homo sapiens
SSVPPPSHRPPPHCPKKKALPCCSWVLCLLSRVPSRPGWELAVSNLQLLCCLLGSPPVCERGPSCSGVGSGDRDLRRKERSSADPWSSSRELPVGIVHKLSRAPHLVPCFKSSWMFCMSWGLKLTQQIFPEVHGGRR

SEQ ID NO: 819800 - protein, 97 aa, Homo sapiens
SVAMNREKLASRGNGLITNGSQVRQPRSKKPGDHEHHLRYTEQTVTFTVRPGTSQPITLQSRPPDYESRTSGTRRAPSPVVSPTEMNKETLPAPLSG

SEQ ID NO: 819801 - protein, 475 aa, Homo sapiens
ALKDSRRFLNHLNNRLGDQRRVYSFPCIAAFADEHEMRKPADEKLEKFWIDFNLGSQSVTFYIDNAENTLWDSVTLPKEAVMNFSITETEKIKIFIIYLKKPMIISYKEVMKIEIHFDLQFNISQVSIQALGEDKQMLPDQTKISSELFSKSDKEDRESPSGLERETEQAEESTNMVEFMSAEDDRCLITLHLNDQSEPPVIGEPASDSHLQPVPPFGVPDFPQQPKSHYRKHLFSESNQDSSTSELSWTSNQKKKSLKSYSSRKKTRTRSNLRILPVFPPSSGSGHEKDQAKLLSPSEKEIPEQNNTTSPKTSEQKFQDSFAFLTAEDSAQKTELQDPHSLSELSSLKHSEDEEKPKIVNQESLTESTSLKHKLRNLEDKDIPEGSFAKSQQSRLEEEVAPGSPFSITEERELPEGISTSSLEVVPENLNGSAILPTFENFTKKRKRKYELRYRKRPFNSENAKKAPDCLIKLF

SEQ ID NO: 819802 - protein, 475 aa, Homo sapiens; identical to SEQ ID NO: 819801

SEQ ID NO: 819803 - protein, 475 aa, Homo sapiens; identical to SEQ ID NO: 819801

SEQ ID NO: 819804 - protein, 192 aa, Homo sapiens
GVSFAAPRRHQLRGKMEALILEPSLYTVKAILILDNDGDRLFAKYYDDTYPSVKEQKAFEKNIFNKTHRTDSEIALLEGLTVVYKSSIDLYFYVIGSSYENELMLMAVLNCLFDSLSQMLRKNVEKRALLENMEGLFLAVDEIVDGGVILESDPQQVVHRVALRGEDVPLTEQTVSQVLQSAKEQIKWSLLR

SEQ ID NO: 819805 - protein, 192 aa, Homo sapiens; identical to SEQ ID NO: 819804

SEQ ID NO: 819806 - protein, 192 aa, Homo sapiens; identical to SEQ ID NO: 819804

SEQ ID NO: 819807 - protein, 200 aa, Homo sapiens
DPRVRGRVVSTHASARRHQLRGKMEALILEPSLYTVKAILILDNDGDRLFAKYYDDTYPSVKEQKAFEKNIFNKTHRTDSEIALLEGLTVVYKSSIDLYFYVIGSSYENELMLMAVLNCLFDSLSQMLRKNVEKRALLENMEGLFLAVDEIVDGGVILESDPQQVVHRVALRGEDVPLTEQTVSQVLQSAKEQIKWSLLR

SEQ ID NO: 819808 - protein, 192 aa, Homo sapiens; identical to SEQ ID NO: 819804

SEQ ID NO: 819809 - protein, 177 aa, Homo sapiens
MEALILEPSLYTVKAILILDNDGDRLFAKYYDDTYPSVKEQKAFEKNIFNKTHRTDSEIALLEGLTVVYKSSIDLYFYVIGSSYENELMLMAVLNCLFDSLSQMLRKNVEKRALLENMEGLFLAVDEIVDGGVILESDPQQVVHRVALRGEDVPLTEQTVSQVLQSAKEQIKWSLLR

SEQ ID NO: 819810 - protein, 192 aa, Homo sapiens; identical to SEQ ID NO: 819804

SEQ ID NO: 819811 - protein, 178 aa, Homo sapiens
MSRKRDKEPSLYTVKAILILDNDGDRLFAKYYDDTYPSVKEQKAFEKNIFNKTHRTDSEIALLEGLTVVYKSSIDLYFYVIGSSYENELMLMAVLNCLFDSLSQMLRKNVEKRALLENMEGLFLAVDEIVDGGVILESDPQQVVHRVALRGEDVPLTEQTVSQVLQSAKEQIKWSLLR

SEQ ID NO: 819812 - protein, 205 aa, Homo sapiens
QTFISEHHYCLWPWKLKWITEVNGTKGKMEALILEPSLYTVKAILILDNDGDRLFAKYYDDTYPSVKEQKAFEKNIFNKTHRTDSEIALLEGLTVVYKSSIDLYFYVIGSSYENELMLMAVLNCLFDSLSQMLRKNVEKRALLENMEGLFLAVDEIVDGGVILESDPQQVVHRVALRGEDVPLTEQTVSQVLQSAKEQIKWSLLR

SEQ ID NO: 819813 - protein, 172 aa, Homo sapiens
MEPSLYTVKAILILDNDGDRLFAKYYDDTYPSVKEQKAFEKNIFNKTHRTDSEIALLEGLTVVYKSSIDLYFYVIGSSYENELMLMAVLNCLFDSLSQMLRKNVEKRALLENMEGLFLAVDEIVDGGVILESDPQQVVHRVALRGEDVPLTEQTVSQVLQSAKEQIKWSLLR

SEQ ID NO: 819814 - protein, 182 aa, Homo sapiens
VPCIADRVLILEPSLYTVKAILILDNDGDRLFAKYYDDTYPSVKEQKAFEKNIFNKTHRTDSEIALLEGLTVVYKSSIDLYFYVIGSSYENELMLMAVLNCLFDSLSQMLRKNVEKRALLENMEGLFLAVDEIVDGGVILESDPQQVVHRVALRGEDVPLTEQTVSQVLQSAKEQIKWSLLR

SEQ ID NO: 819815 - protein, 177 aa, Homo sapiens
MFVSLQEPSLYTVKAILILDNDGDRLFAKYYDDTYPSVKEQKAFEKNIFNKTHRTDSEIALLEGLTVVYKSSIDLYFYVIGSSYENELMLMAVLNCLFDSLSQMLRKNVEKRALLENMEGLFLAVDEIVDGGVILESDPQQVVHRVALRGEDVPLTEQTVSQVLQSAKEQIKWSLLR

SEQ ID NO: 819816 - protein, 192 aa, Homo sapiens; identical to SEQ ID NO: 819804

SEQ ID NO: 819817 - protein, 125 aa, Homo sapiens
MEIDFLPSTMTTPTPVSRSKRPLRRTFSTRPIGLTLMLMAVLNCLFDSLSQMLRKNVEKRALLENMEGLFLAVDEIVDGGVILESDPQQVVHRVALRGEDVPLTEQTVSQVLQSAKEQIKWSLLR

SEQ ID NO: 819818 - protein, 192 aa, Homo sapiens; identical to SEQ ID NO: 819804

SEQ ID NO: 819819 - protein, 192 aa, Homo sapiens; identical to SEQ ID NO: 819804

SEQ ID NO: 819820 - protein, 173 aa, Homo sapiens
QTFISEHHYCLWPWKLKWITEVNGTKGKMEALILEPSLYTVKAILILDNDGDRLFAKYYDDTYPSVKEQKAFEKNIFNKTHRTDSEIALLEGLTVVYKSSIDLYFYVIGSSYENEGLFLAVDEIVDGGVILESDPQQVVHRVALRGEDVPLTEQTVSQVLQSAKEQIKWSLLR

SEQ ID NO: 819821 - protein, 192 aa, Homo sapiens; identical to SEQ ID NO: 819804

SEQ ID NO: 819822 - protein, 126 aa, Homo sapiens
ERIDDRFEDLLYQILVLRQVKFSVALVWNRLTSETDYKGLESSHTCLEMQYKTEDIADKWRKENGETSEYPHEKNEIVDGGVILESDPQQVVHRVALRGEDVPLTEQTVSQVLQSAKEQIKWSLLR

SEQ ID NO: 819823 - protein, 192 aa, Homo sapiens; identical to SEQ ID NO: 819804

SEQ ID NO: 819824 - protein, 177 aa, Homo sapiens
GVSFAAPRRHQLRGKMEALILEPSLYTVKAILILDNDGDRLFAKYYDDTYPSVKEQKAFEKNIFNKTHRTDSEIALLEGLTVVYKSSIDLYFYVIGSSYENELMLMAVLNCPLQKICMSAVNFHLVPQSMLSGSSRGSQGSLNLHSVCGCPLNLPYTLPILFHSSCSSGSKAPSIFR

SEQ ID NO: 819825 - protein, 192 aa, Homo sapiens; identical to SEQ ID NO: 819804

SEQ ID NO: 819826 - protein, 134 aa, Homo sapiens
GVSFAAPRRHQLRGKMEALILEPSLYTVKAILILDNDGDRLFAKLMLMAVLNCLFDSLSQMLRKNVEKRALLENMEGLFLAVDEIVDGGVILESDPQQVVHRVALRGEDVPLTEQTVSQVLQSAKEQIKWSLLR

SEQ ID NO: 819827 - protein, 343 aa, Homo sapiens
MASNSSDVKEFLAKAKEDFLKKWESPAQNTAHLDQFERIKTLGTGSFGRVMLVKHKETGNHYAMKILDKQKVVKLKQIEHTLNEKRILQAVNFPFLVKLEFSFKDNSNLYMVMEYVPGGEMFSHLRRIGRFSEPHARFYAAQIVLTFEYLHSLDLIYRDLKPENLLIDQQGYIQVTDFGFAKRVKGRTWTLCGTPEYLAPEIILSKGYNKAVDWWALGVLIYEMAAGYPPFFADQPIQIYEKIVSGKVRFPSHFSSDLKDLLRNLLQVDLTKRFGNLKNGVNDIKNHKWFATTDWIAIYQRKVEAPFIPKFKGPGDTSNFDDYEEEEIRVSINEKCGKEFSEF

SEQ ID NO: 819828 - protein, 322 aa, Homo sapiens
MGIVPLMNTAHLDQFERIKTLGTGSFGRVMLVKHKETGNHYAMKILDKQKVVKLKQIEHTLNEKRILQAVNFPFLVKLEFSFKDNSNLYMVMEYVPGGEMFSHLRRIGRFSEPHARFYAAQIVLTFEYLHSLDLIYRDLKPENLLIDQQGYIQVTDFGFAKRVKGRTWTLCGTPEYLAPEIILSKGYNKAVDWWALGVLIYEMAAGYPPFFADQPIQIYEKIVSGKVRFPSHFSSDLKDLLRNLLQVDLTKRFGNLKNGVNDIKNHKWFATTDWIAIYQRKVEAPFIPKFKGPGDTSNFDDYEEEEIRVSINEKCGKEFSEF

SEQ ID NO: 819829 - protein, 298 aa, Homo sapiens
TASPPRPLTPGLTLSVLLGGLADPAPPPIGGLAGRTPGPVQRLGQSDASARPAAASRASEWPRVRVKEFLAKAKEDFLKKWESPAQNTAHLDQFERIKTLGTGSFGRVMLVKHKETGNHYAMKILDKQKVTDFGFAKRVKGRTWTLCGTPEYLAPEIILSKGYNKAVDWWALGVLIYEMAAGYPPFFADQPIQIYEKIVSGKVRFPSHFSSDLKDLLRNLLQVDLTKRFGNLKNGVNDIKNHKWFATTDWIAIYQRKVEAPFIPKFKGPGDTSNFDDYEEEEIRVSINEKCGKEFSEF

SEQ ID NO: 819830 - protein, 99 aa, Homo sapiens
ERRGKQGLGGGRGAAASAASPRAAAAAAQRAPGPPAAASTRRAAAPGPAPAAAAAMGNAAAAKKGSEQESVKEFLAKAKEDFLKKWESPAQLPAHFCLF

SEQ ID NO: 819831 - protein, 343 aa, Homo sapiens; identical to SEQ ID NO: 819827

SEQ ID NO: 819832 - protein, 343 aa, Homo sapiens; identical to SEQ ID NO: 819827

SEQ ID NO: 819833 - protein, 343 aa, Homo sapiens; identical to SEQ ID NO: 819827

SEQ ID NO: 819834 - protein, 280 aa, Homo sapiens
MASNSSDVKEFLAKAKEDFLKKWESPAQNTAHLDQFERIKTLGTGSFGRVMLVKHKETGNHYAMKILDKQKVVKLKQIEHTLNEKRILQAVNFPFLVKLEFSFKDNSNLYMVMEYVPGGEMFSHLRRIGRFSEPHARFYAAQIVLTFEYLHSLDLIYRDLKPENLLIDQQGYIQVTDFGFAKRVKGRTWTLCGTPEYLAPEIILSKGYNKAVDWWALGVLIYEMAAGYPPFFADQPIQIYEKIVSGKVRSGCGDTALEETDRSLLTHPIPWGALLVVRII

SEQ ID NO: 819835 - protein, 406 aa, Homo sapiens
ERRGKQGLGGGRGAAASAASPRAAAAAAQRAPGPPAAASTRRAAAPGPAPAAAAAMGNAAAAKKGSEQESVKEFLAKAKEDFLKKWESPAQNTAHLDQFERIKTLGTGSFGRVMLVKHKETGNHYAMKILDKQKVVKLKQIEHTLNEKRILQAVNFPFLVKLEFSFKDNSNLYMVMEYVPGGEMFSHLRRIGRFSEPHARFYAAQIVLTFEYLHSLDLIYRDLKPENLLIDQQGYIQVTDFGFAKRVKGRTWTLCGTPEYLAPEIILSKGYNKAVDWWALGVLIYEMAAGYPPFFADQPIQIYEKIVSGKVRFPSHFSSDLKDLLRNLLQVDLTKRFGNLKNGVNDIKNHKWFATTDWIAIYQRKVEAPFIPKFKGPGDTSNFDDYEEEEIRVSINEKCGKEFSEF

SEQ ID NO: 819836 - protein, 375 aa, Homo sapiens
MASNSSDVKEFLAKAKEDFLKKWESPAQNTAHLDQFERIKTLGTGSFGRVMLVKHKETGNHYAMKILDKQKVVKLKQIEHTLNEKRILQAVNFPFLVKLEFSFKDNSNLYMVMEYVPGGEMFSHLRRIGRFSEPHARFYAAQIVLTFEYLHSLDLIYRDLKPENLLIDQQGYIQVTDFGFAKRVKGRTWTLCGTPEYLAPEIILSKVGASPALPFSLRPALLSCSRLLLTLCPPILLQGYNKAVDWWALGVLIYEMAAGYPPFFADQPIQIYEKIVSGKVRFPSHFSSDLKDLLRNLLQVDLTKRFGNLKNGVNDIKNHKWFATTDWIAIYQRKVEAPFIPKFKGPGDTSNFDDYEEEEIRVSINEKCGKEFSEF

SEQ ID NO: 819837 - protein, 240 aa, Homo sapiens
MASNSSDVKEFLAKAKEDFLKKWESPAQNTAHLDQFERIKTLGTGSFGRVMLVKHKETGNHYAMKILDKQKVTDFGFAKRVKGRTWTLCGTPEYLAPEIILSKGYNKAVDWWALGVLIYEMAAGYPPFFADQPIQIYEKIVSGKVRFPSHFSSDLKDLLRNLLQVDLTKRFGNLKNGVNDIKNHKWFATTDWIAIYQRKVEAPFIPKFKGPGDTSNFDDYEEEEIRVSINEKCGKEFSEF

SEQ ID NO: 819838 - protein, 343 aa, Homo sapiens; identical to SEQ ID NO: 819827

SEQ ID NO: 819839 - protein, 343 aa, Homo sapiens; identical to SEQ ID NO: 819827

SEQ ID NO: 819840 - protein, 216 aa, Homo sapiens
MASNSSDVKEFLAKAKEDFLKKWESPAQNTAHLDQFERIKTLGTGSFGRVMLVKHKETGNHYAMKILDKQKVVKLKQIEHTLNEKRILQAVNFPFLVKLEFSFKDNSNLYMVMEYVPGGEMFSHLRRIGRFSEPHARFYAAQIVLTFEYLHSLDLIYRDLKPENLLIDQQGYIQVTDFGFAKRVKGRTWTLCGTPEYLAPEIILSKVGASPALPFP

SEQ ID NO: 819841 - protein, 131 aa, Homo sapiens
CLFNFSSAAPSSRKRCLIPPSPDHARYFTWASWGLLLHNPKIPSTTALTSVGVTHVFFALDLVPCKDKQPLASLMLCPQHQLRARQATGTQMILAEGTGLAPASLVPGIRGNEAPLTSPSFLPSPPSLPRW

SEQ ID NO: 819842 - protein, 1008 aa, Homo sapiens
ALCNCGEPSLHGQRELRRFELPFDWPRCPVVSPGGSPGPNEAVLPSEDLSQIGFPEGLTPAHLGEPGGSCWAHHWCAAWSAGVWGQEGPELCGVDKAIFSGISQRCSHCTRLGASIPCRSPGCPRLYHFPCATASGSFLSMKTLQLLCPEHSEGAAYLEEARCAVCEGPGELCDLFFCTSCGHHYHGACLDTALTARKRAGWQCPECKVCQACRKPGNDSKMLVCETCDKGYHTFCLKPPMEELPAHSWKCKACRVCRACGAGSAELNPNSEWFENYSLCHRCHKAQGGQTIRSVAEQHTPVCSRFSPPEPGDTPTDEPDALYVACQGQPKGGHVTSMQPKEPGPLQCEAKPLGKAGVQLEPQLEAPLNEEMPLLPPPEESPLSPPPEESPTSPPPEASRLSPPPEELPASPLPEALHLSRPLEESPLSPPPEESPLSPPPESSPFSPLEESPLSPPEESPPSPALETPLSPPPEASPLSPPFEESPLSPPPEELPTSPPPEASRLSPPPEESPMSPPPEESPMSPPPEASRLFPPFEESPLSPPPEESPLSPPPEASRLSPPPEDSPMSPPPEESPMSPPPEVSRLSPLPVVSRLSPPPEESPLSPPPEESPTSPPPEASRLSPPPEDSPTSPPPEDSPASPPPEDSLMSLPLEESPLLPLPEEPQLCPRSEGPHLSPRPEEPHLSPRPEEPHLSPQAEEPHLSPQPEEPCLCAVPEEPHLSPQAEGPHLSPQPEELHLSPQTEEPHLSPVPEEPCLSPQPEESHLSPQSEEPCLSPRPEESHLSPELEKPPLSPRPEKPPEEPGQCPAPEELPLFPPPGEPSLSPLLGEPALSEPGEPPLSPLPEELPLSPSGEPSLSPQLMPPDPLPPPLSPIITAAAPPALSPLGELEYPFGAKGDSDPESPLAAPILETPISPPPEANCTDPEPVPPMILPPSPGSPVGPASPILMEPLPPQCSPLLQHSLVPQNSPPSQCSPPALPLSVPSPLSPIGKVVGVSDEAELHEME

SEQ ID NO: 819843 - protein, 756 aa, Homo sapiens
SWYRRSLCGAGSAELNPNSEWFENYSLCHRCHKAQGGQTIRSVAEQHTPVCSRFSPPEPGDTPTDEPDALYVACQGQPKGGHVTSMQPKEPGPLQCEAKPLGKAGVQLEPQLEAPLNEEMPLLPPPEESPLSPPPEESPTSPPPEASRLSPPPEELPASPLPEALHLSRPLEESPLSPPPEESPLSPPPESSPFSPLEESPLSPPEESPPSPALETPLSPPPEASPLSPPFEESPLSPPPEELPTSPPPEASRLSPPPEESPMSPPPEESPMSPPPEASRLFPPFEESPLSPPPEESPLSPPPEASRLSPPPEDSPMSPPPEESPMSPPPEVSRLSPLPVVSRLSPPPEESPLSPPPEESPTSPPPEASRLSPPPEDSPTSPPPEDSPASPPPEDSLMSLPLEESPLLPLPEEPQLCPRSEGPHLSPRPEEPHLSPRPEEPHLSPQAEEPHLSPQPEEPCLCAVPEEPHLSPQAEGPHLSPQPEELHLSPQTEEPHLSPVPEEPCLSPQPEESHLSPQSEEPCLSPRPEESHLSPELEKPPLSPRPEKPPEEPGQCPAPEELPLFPPPGEPSLSPLLGEPALSEPGEPPLSPLPEELPLSPSGEPSLSPQLMPPDPLPPPLSPIITAAAPPALSPLGELEYPFGAKGDSDPESPLAAPILETPISPPPEANCTDPEPVPPMILPPSPGSPVGPASPILMEPLPPQCSPLLQHSLVPQNSPPSQCSPPALPLSVPSPLSPIGKVVGVSDEAELHEME

SEQ ID NO: 819844 - protein, 787 aa, Homo sapiens
MLVCETCDKGYHTFCLKPPMEELPAHSWKCKACRVCRACGAGSAELNPNSEWFENYSLCHRCHKAQGGQTIRSVAEQHTPVCSRFSPPEPGDTPTDEPDALYVACQGQPKGGHVTSMQPKEPGPLQCEAKPLGKAGVQLEPQLEAPLNEEMPLLPPPEESPLSPPPEESPTSPPPEASRLSPPPEELPASPLPEALHLSRPLEESPLSPPPEESPLSPPPESSPFSPLEESPLSPPEESPPSPALETPLSPPPEASPLSPPFEESPLSPPPEELPTSPPPEASRLSPPPEESPMSPPPEESPMSPPPEASRLFPPFEESPLSPPPEESPLSPPPEASRLSPPPEDSPMSPPPEESPMSPPPEVSRLSPLPVVSRLSPPPEESPLSPPPEESPTSPPPEASRLSPPPEDSPTSPPPEDSPASPPPEDSLMSLPLEESPLLPLPEEPQLCPRSEGPHLSPRPEEPHLSPRPEEPHLSPQAEEPHLSPQPEEPCLCAVPEEPHLSPQAEGPHLSPQPEELHLSPQTEEPHLSPVPEEPCLSPQPEESHLSPQSEEPCLSPRPEESHLSPELEKPPLSPRPEKPPEEPGQCPAPEELPLFPPPGEPSLSPLLGEPALSEPGEPPLSPLPEELPLSPSGEPSLSPQLMPPDPLPPPLSPIITAAAPPALSPLGELEYPFGAKGDSDPESPLAAPILETPISPPPEANCTDPEPVPPMILPPSPGSPVGPASPILMEPLPPQCSPLLQHSLVPQNSPPSQCSPPALPLSVPSPLSPIGKVVGVSDEAELHEME

SEQ ID NO: 819845 - protein, 784 aa, Homo sapiens
ALCNCGEPSLHGQRELRRFELPFDWPRCPVVSPGGSPGPNEAVLPSEDLSQIGFPEGLTPAHLGEPGGSCWAHHWCAAWSAGVWGQEGPELCGVDKAIFSGISQRCSHCTRLGASIPCRSPGCPRLYHFPCATASGSFLSMKTLQLLCPEHSEGAAYLEEARCAVCEGPGELCDLFFCTSCGHHYHGACLDTALTARKRAGWQCPECKVCQACRKPGNDSKMLVCETCDKGYHTFCLKPPMEELPAHSWKCKACRVCRACGAGSAELNPNSEWFENYSLCHRCHKAQGGQTIRSVAEQHTPVCSRFSPPEPGDTPTDEPDALYVACQGQPKGGHVTSMQPKEPGPLQCEAKPLGKAGVQLEPQLEAPLNEEMPLLPPPEESPLSPPPEESPTSPPPEASRLSPPPEELPASPLPEALHLSRPLEESPLSPPPEESPLSPPPESSPFSPLEESPLSPPEESPPSPALETPLSPPPEASPLSPPFEESPLSPPPEELPTSPPPEASRLSPPPEESPMSPPPEESPMSPPPEASRLFPPFEESPLSPPPEESPLSPPPEASRLSPPPEDSPMSPPPEESPMSPPPEVSRLSPLPVVSRLSPPPEESPLSPPPEESPTSPPPEASRLSPPPEDSPTSPPPEDSPASPPPEDSLMSLPLEESPLLPLPEEPQLCPRSEGPHLSPRPEEPHLSPRPEEPHLSPQAEEPHLSPQPEEPCLCAVPEEPHLSPQAEGPHLSPQPEELHLSPQTEEPHLSPVPEEPCLSPQPEESHLSPQAGGTGMAPQTGGGY

SEQ ID NO: 819846 - protein, 637 aa, Homo sapiens
MPLLPPPEESPLSPPPEESPTSPPPEASRLSPPPEELPASPLPEALHLSRPLEESPLSPPPEESPLSPPPESSPFSPLEESPLSPPEESPPSPALETPLSPPPEASPLSPPFEESPLSPPPEELPTSPPPEASRLSPPPEESPMSPPPEESPMSPPPEASRLFPPFEESPLSPPPEESPLSPPPEASRLSPPPEDSPMSPPPEESPMSPPPEVSRLSPLPVVSRLSPPPEESPLSPPPEESPTSPPPEASRLSPPPEDSPTSPPPEDSPASPPPEDSLMSLPLEESPLLPLPEEPQLCPRSEGPHLSPRPEEPHLSPRPEEPHLSPQAEEPHLSPQPEEPCLCAVPEEPHLSPQAEGPHLSPQPEELHLSPQTEEPHLSPVPEEPCLSPQPEESHLSPQSEEPCLSPRPEESHLSPELEKPPLSPRPEKPPEEPGQCPAPEELPLFPPPGEPSLSPLLGEPALSEPGEPPLSPLPEELPLSPSGEPSLSPQLMPPDPLPPPLSPIITAAAPPALSPLGELEYPFGAKGDSDPESPLAAPILETPISPPPEANCTDPEPVPPMILPPSPGSPVGPASPILMEPLPPQCSPLLQHSLVPQNSPPSQCSPPALPLSVPSPLSPIGKVVGVSDEAELHEME

SEQ ID NO: 819847 - protein, 563 aa, Homo sapiens
ELGTGQYGCAPPEESPPSPALETPLSPPPEASPLSPPFEESPLSPPPEELPTSPPPEASRLSPPPEESPMSPPPEESPMSPPPEASRLFPPFEESPLSPPPEESPLSPPPEASRLSPPPEDSPMSPPPEESPMSPPPEVSRLSPLPVVSRLSPPPEESPLSPPPEESPTSPPPEASRLSPPPEDSPTSPPPEDSPASPPPEDSLMSLPLEESPLLPLPEEPQLCPRSEGPHLSPRPEEPHLSPRPEEPHLSPQAEEPHLSPQPEEPCLCAVPEEPHLSPQAEGPHLSPQPEELHLSPQTEEPHLSPVPEEPCLSPQPEESHLSPQSEEPCLSPRPEESHLSPELEKPPLSPRPEKPPEEPGQCPAPEELPLFPPPGEPSLSPLLGEPALSEPGEPPLSPLPEELPLSPSGEPSLSPQLMPPDPLPPPLSPIITAAAPPALSPLGELEYPFGAKGDSDPESPLAAPILETPISPPPEANCTDPEPVPPMILPPSPGSPVGPASPILMEPLPPQCSPLLQHSLVPQNSPPSQCSPPALPLSVPSPLSPIGKVVGVSDEAELHEME

SEQ ID NO: 819848 - protein, 441 aa, Homo sapiens
ALCNCGEPSLHGQRELRRFELPFDWPRCPVVSPGGSPGPNEAVLPSEDLSQIGFPEGLTPAHLGEPGGSCWAHHWCAAWSAGVWGQEGPELCGVDKAIFSGISQRCSHCTRLGASIPCRSPGCPRLYHFPCATASGSFLSMKTLQLLCPEHSEGAAYLEEARCAVCEGPGELCDLFFCTSCGHHYHGACLDTALTARKRAGWQCPECKVCQACRKPGNDSKMLVCETCDKGYHTFCLKPPMEELPAHSWKCKACRVCRACGAGSAELNPNSEWFENYSLCHRCHKAQGGQTIRSVAEQHTPVCSRFSPPEPGDTPTDEPDALYVACQGQPKGGHVTSMQPKEPGPLQCEAKPLGKAGVQLEPQLEAPLNEEMPLLPPPEESPLSPPPEESPTSPPPWHATYRASGSSVGVSPGSGGENLLHTGICCSATEQDSLTSLGFVT

SEQ ID NO: 819849 - protein, 404 aa, Homo sapiens
ALCNCGEPSLHGQRELRRFELPFDWPRCPVVSPGGSPGPNEAVLPSEDLSQIGFPEGLTPAHLGEPGGSCWAHHWCAAWSAGVWGQEGPELCGVDKAIFSGISQRCSHCTRLGASIPCRSPGCPRLYHFPCATASGSFLSMKTLQLLCPEHSEGAAYLEEARCAVCEGPGELCDLFFCTSCGHHYHGACLDTALTARKRAGWQCPECKVCQACRKPGNDSKMLVCETCDKGYHTFCLKPPMEELPAHSWKCKACRVCRACGAGSAELNPNSEWFENYSLCHRCHKAQGGQTIRSVAEQHTPVCSRFSPPEPGDTPTDEPDALYVACQGQPKGGHVTSMQPKEPGPLQCEAKPLGKAGVQLEPQLEAPLNEEMPLLPPPEESPLSPPPNISSTTTNHHPGTCMHH

SEQ ID NO: 819850 - protein, 400 aa, Homo sapiens
ALCNCGEPSLHGQRELRRFELPFDWPRCPVVSPGGSPGPNEAVLPSEDLSQIGFPEGLTPAHLGEPGGSCWAHHWCAAWSAGVWGQEGPELCGVDKAIFSGISQRCSHCTRLGASIPCRSPGCPRLYHFPCATASGSFLSMKTLQLLCPEHSEGAAYLEEARCAVCEGPGELCDLFFCTSCGHHYHGACLDTALTARKRAGWQCPECKVCQACRKPGNDSKMLVCETCDKGYHTFCLKPPMEELPAHSWKCKACRVCRACGAGSAELNPNSEWFENYSLCHRCHKAQGGQTIRSVAEQHTPVCSRFSPPEPGDTPTDEPDALYVACQGQPKGGHVTSMQPKEPGPLQCEAKPLGKAGVQLEPQLEAPLNEENHLNLEAEVAVSRGCATALQPGQQRETLS

SEQ ID NO: 819851 - protein, 339 aa, Homo sapiens
ALCNCGEPSLHGQRELRRFELPFDWPRCPVVSPGGSPGPNEAVLPSEDLSQIGFPEGLTPAHLGEPGGSCWAHHWCAAWSAGVWGQEGPELCGVDKAIFSGISQRCSHCTRLGASIPCRSPGCPRLYHFPCATASGSFLSMKTLQLLCPEHSEGAAYLEEARCAVCEGPGELCDLFFCTSCGHHYHGACLDTALTARKRAGWQCPECKVCQACRKPGNDSKMLVCETCDKGYHTFCLKPPMEELPAHSWKCKACRVCRACGAGSAELNPNSEWFENYSLCHRCHKAQGGQTIRSVAEQHTPVCSRFSPPEPGDTPTDEPDALYVACQGQPKVLRPGPCN

SEQ ID NO: 819852 - protein, 318 aa, Homo sapiens
ALCNCGEPSLHGQRELRRFELPFDWPRCPVVSPGGSPGPNEAVLPSEDLSQIGFPEGLTPAHLGEPGGSCWAHHWCAAWSAGVWGQEGPELCGVDKAIFSGISQRCSHCTRLGASIPCRSPGCPRLYHFPCATASGSFLSMKTLQLLCPEHSEGAAYLEEARCAVCEGPGELCDLFFCTSCGHHYHGACLDTALTARKRAGWQCPECKVCQACRKPGNDSKMLVCETCDKGYHTFCLKPPMEELPAHSWKCKACRVCRACGAGSAELNPNSEWFENYSLCHRCHKAQGGQTIRSVAEQHTPVCSRVFTPRASGSSRTP

SEQ ID NO: 819853 - protein, 68 aa, Homo sapiens
NSIPSEVAKDIMTILKRRYTNGQPTYEEMLNITNDQGNANPNHHEILPYSCKNAIIQKSKNRCWHECG

SEQ ID NO: 819854 - protein, 527 aa, Homo sapiens
MSEDSSALPWSINRDDYELQEVIGSGATAVVQAAYCAPKKEKVAIKRINLEKCQTSMDELLKEIQAMSQCHHPNIVSYYTSFVVKDELWLVMKLLSGGSVLDIIKHIVAKGEHKSGVLDESTIATILREVLEGLEYLHKNGQIHRDVKAGNILLGEDGSVQIADFGVSAFLATGGDITRNKVRKTFVGTPCWMAPEVMEQVRGYDFKADIWSFGITAIELATGAAPYHKYPPMKVLMLTLQNDPPSLETGVQDKEMLKKYGKSFRKMISLCLQKDPEKRPTAAELLRHKFFQKAKNKEFLQEKTLQRAPTISERAKKVRRVPGSSGRLHKTEDGGWEWSDDEFDEESEEGKAAISQLRSPRVKESISNSELFPTTDPVGTLLQVPEQISAHLPQPAGQIATQPTQVSLPPTAEPAKTAQALSSGSGSQETKIPISLVLRLRNSKKELNDIRFEFTPGRDTAEGVSQELISAGLVDGRDLVIVAANLQKIVEEPQSNRSVTFKLASGVEGSDIPDDGKLIGFAQLSIS

SEQ ID NO: 819855 - protein, 527 aa, Homo sapiens; identical to SEQ ID NO: 819854

SEQ ID NO: 819856 - protein, 527 aa, Homo sapiens; identical to SEQ ID NO: 819854

SEQ ID NO: 819857 - protein, 252 aa, Homo sapiens
MLTLQNDPPSLETGVQDKEMNKEFLQEKTLQRAPTISERAKKVRRVPGSSGRLHKTEDGGWEWSDDEFDEESEEGKAAISQLRSPRVKESISNSELFPTTDPVGTLLQVPEQISAHLPQPAGQIATQPTQVSLPPTAEPAKTAQALSSGSGSQETKIPISLVLRLRNSKKELNDIRFEFTPGRDTAEGVSQELISAGLVDGRDLVIVAANLQKIVEEPQSNRSVTFKLASGVEGSDIPDDGKLIGFAQLSIS

SEQ ID NO: 819858 - protein, 222 aa, Homo sapiens
FLVPGPQMSGPNMKVHVIFNYKGKNVLINKDIRCKDDEFTHLYTLIVRPDNTYEVKMKESISNSELFPTTDPVGTLLQVPEQISAHLPQPAGQIATQPTQVSLPPTAEPAKTAQALSSGSGSQETKIPISLVLRLRNSKKELNDIRFEFTPGRDTAEGVSQELISAGLVDGRDLVIVAANLQKIVEEPQSNRSVTFKLASGVEGSDIPDDGKLIGFAQLSIS

SEQ ID NO: 819859 - protein, 527 aa, Homo sapiens; identical to SEQ ID NO: 819854

SEQ ID NO: 819860 - protein, 527 aa, Homo sapiens; identical to SEQ ID NO: 819854

SEQ ID NO: 819861 - protein, 97 aa, Homo sapiens
MIPSGGLWPDLGLVLEESLQQQQQEQEEALKQCREQHAAELKGKEEELQDVRDQLEQAQEERDCHLKTISSLKQEVKDTGPGQRTNVDPAANLVVVV

SEQ ID NO: 819862 - protein, 834 aa, Homo sapiens
EEFQRMQAQLLELRTNNYQLSDELRKNGVELTSLRQKVAYLDKEFSKAQKALSKSKKAQEVEVLLSENEMLQAKLHSQEEDFRLQNSTLMAEFSKLCSQMEQLEQENQQLKEGAAGAGVAQAGPLVDGELLRLQAENTALQKNVAALQERYGKEAGKFSAVSEGQGDPPGGPAPTVLAPMPLAEVELKWEMEKEEKRLLWEQLQGLESSKQAETSRLQEELAKLSEKLKKKQESFCRLQTEKETLFNDSRNKIEELQQRKEADHKAQLARTQKLQQELEAANQSLAELRDQRQGERLEHAAALRALQDQVSIQSADAQEQVEGLLAENNALRTSLAALEQIQTAKTQELNMLREQTTGLAAELQQQQAEYEDLMGQKDDLNSQLQESLRANSRLLEQLQEIGQEKEQLTQELQEARKSAEKRKAMLDELAMETLQEKSQHKEELGAVRLRHEKEVLGVRARYERELRELHEDKKRQEEELRGQIREEKARTRELETLQQTVEELQAQVHSMDGAKGWFERRLKEAEESLQQQQQEQEEALKQCREQHAAELKGKEEELQDVRDQLEQAQEERDCHLKTISSLKQEVKDTVDGQRILEKKGSAALKDLKRQLHLERKRADKLQERLQDILTNSKSRSGLEELVLSEMNSPSRTQTGDSSSISSFSYREILREKESSAVPARSLSSSPQAQPPRPAELSDEEVAELFQRLAETQQEKWMLEEKVKHLEVSSASMAEDLCRKSAIIETYVMDSRIDVSVAAGHTDRSGLGSVLRDLVKPGDENLREMNKKLQNMLEEQLTKNMHLHKDMEVLSQEIVRLSKECVGPPDPDLEPGETS

SEQ ID NO: 819863 - protein, 593 aa, Homo sapiens
LDTLRATGAENMLLGGQTESLYGLYAPQERLRCKMGSPGLLQSLAELRDQRQGERLEHAAALRALQDQVSIQSADAQEQVEGLLAENNALRTSLAALEQIQTAKTQELNMLREQTTGLAAELQQQQAEYEDLMGQKDDLNSQLQESLRANSRLLEQLQEIGQEKEQLTQELQEARKSAEKRKAMLDELAMETLQEKSQHKEELGAVRLRHEKEVLGVRARYERELRELHEDKKRQEEELRGQIREEKARTRELETLQQTVEELQAQVHSMDGAKGWFERRLKEAEESLQQQQQEQEEALKQCREQHAAELKGKEEELQDVRDQLEQAQEERDCHLKTISSLKQEVKDTVDGQRILEKKGSAALKDLKRQLHLERKRADKLQERLQDILTNSKSRSGLEELVLSEMNSPSRTQTGDSSSISSFSYREILREKESSAVPARSLSSSPQAQPPRPAELSDEEVAELFQRLAETQQEKWMLEEKVKHLEVSSASMAEDLCRKSAIIETYVMDSRIDVSVAAGHTDRSGLGSVLRDLVKPGDENLREMNKKLQNMLEEQLTKNMHLHKDMEVLSQEIVRLSKECVGPPDPDLEPGETS

SEQ ID NO: 819864 - protein, 748 aa, Homo sapiens
EEFQRMQAQLLELRTNNYQLSDELRKNGVELTSLRQKVAYLDKEFSKAQKALSKSKKAQEVEVLLSENEMLQAKLHSQEEDFRLQNSTLMAEFSKLCSQMEQLEQENQQLKEGAAGAGVAQAGPLVDGELLRLQAENTALQKNVAALQERYGKEAGKFSAVSEGQGDPPGGPAPTVLAPMPLAEVELKWEMEKEEKRLLWEQLQGLESSKQAETSRLQEELAKLSEKLKKKQESFCRLQTEKETLFNDSRNKIEELQQRKEADHKAQLARTQKLQQELEAANQSLAELRDQRQGERLEHAAALRALQDQVSIQSADAQEQVEGLLAENNALRTSLAALEQIQTAKTQELNMLREQTTGLAAELQQQQAEYEDLMGQKDDLNSQLQESLRANSRLLEQLQEIGQEKEQLTQELQEARKSAEKRKAMLDELAMETLQEKSQHKEELGAVRLRHEKEVLGVRARYERELRELHEDKKRQEEELRGQIREEKARTRELETLQQTVEELQAQVHSMDGAKGWFERRLKEAEESLQQQQQEQEEALKQCREQHAAELKGKEEELQDVRDQLEQAQEERDCHLKTISSLKQEVKDTVDGQRILEKKGSAALKDLKRQLHLERKRADKLQERLQDILTNSKSRSGLEELVLSEMNSPSRTQTGDSSSISSFSYREILREKESSAVPARSLSSSPQAQPPRPAELSDEEVAELFQRLAETQQEKWMLEEKVLPACLPAHPHLKCPCGCGVCPGPPHV

SEQ ID NO: 819865 - protein, 1070 aa, Homo sapiens
EEFQRMQAQLLELRTNNYQLSDELRKNGVELTSLRQKVAYLDKEFSKAQKALSKSKKAQEVEVLLSENEMLQAKLHSQEEDFRLQNSTLMAEFSKLCSQMEQLEQENQQLKEGAAGAGVAQAGPLVDGELLRLQAENTALQKNVAALQERYGKEAGKFSAVSEGQGDPPGGPAPTVLAPMPLAEVELKWEMEKEEKRLLWEQLQGLESSKQAETSRLQEELAKLSEKLKKKQESFCRLQTEKETLFNDSRNKIEELQQRKEADHKAQLARTQKLQQELEAANQSLAELRDQRQGERLEHAAALRALQDQVSIQSADAQEQVEGLLAENNALRTSLAALEQIQTAKTQELNMLREQTTGLAAELQQQQAEYEDLMGQKDDLNSQLQESLRANSRLLEQLQEIGQEKEQLTQELQEARKSAEKRKAMLDELAMETLQEKSQHKEELGAVRLRHEKEVLGVRARYERELRELHEDKKRQEEELRGQIREEKARTRELETLQQTVEELQAQVHSMDGAKGWFERRLKEAEESLQQQQQEQEEALKQCREQHAAELKGKEEELQDVRDQLEQAQEERDCHLKTISSLKQEVKDTVDGQRILEKKGSAALKDLKRQLHLERKRADKLQERLQDILTNSKSRSGLEELVLSEMNSPSRTQTGDSSSISSFSYREILREKESSAVPARSLSSSPQAQPPRPAELSDEEVAELFQRLAETQQEKWMLEEKVKHLEVSSASMAEDLCRKSAIIETYVMDSRIGQCPLPGPQPGPAFTWPSLSILCCGFSPLLSELSEATDKTMACGGENRKALSLDLASSLFSLSLSSLHSPFSIVSLCPLSPFLSLCLIFLSSLSPFSLLRFSFSPHSFILSRCLYCFPSLYLHCFCFLSNFLLHRFFFINQNHTDQHVLRTFCVLCASHTVMCIFPVPQVSYSSFLGAIELVSDRARFCMSKPLSYMTWLFLLPSPLVFVSLFSPLALPGSPLALPRGWFSAWALADVSVAAGHTDRSGLGSVLRDLVKPGDENLREMNKKLQNMLEEQLTKNMHLHKDMEVLSQEIVRLSKECVGPPDPDLEPGETS

SEQ ID NO: 819866 - protein, 129 aa, Homo sapiens [sequence omitted]

SEQ ID NO: 819867 - protein, 815 aa, Homo sapiens
EEFQRMQAQLLELRTNNYQLSDELRKNGVELTSLRQKVAYLDKEFSKAQKALSKSKKAQEVEVLLSENEMLQAKLHSQEEDFRLQNSTLMAEFSKLCSQMEQLEQENQQLKEGAAGAGVAQAGPLVDGELLRLQAENTALQKNVAALQERYGKEAGKFSAVSEGQGDPPGGPAPTVLAPMPLAEVELKWEMEKEEKRLLWEQLQGLESSKQAETSRLQEELAKLSEKLKKKQESFCRLQTEKETLFNDSRNKIEELQQRKEADHKAQLARTQKLQQELEAANQSLAELRDQRQGERLEHAAALRALQDQVSIQSADAQEQVEGLLAENNALRTSLAALEQIQTAKTQELNMLREQTTGLAAELQQQQAEYEDLMGQKDDLNSQLQESLRANSRLLEQLQEIGQEKEQLTQELQEARKSAEKRKAMLDELAMETLQEKSQHKEELGAVRLRHEKEVLGVRARYERELRELHEDKKRQEEELRGQIREEKARTRELETLQQTVEELQAQVHSMDGAKGWFERRLKEAEESLQQQQQEQEEALKQCREQHAAELKGKEEELQDVRDQLEQAQEERDCHLKTISSLKQEVKDTVDGQRILEKKGSAALKDLKRQLHLERKRADKLQERLQDILTNSKSRSGLEELVLSEMNSPSRTQTGDSSSISSFSYREILREKESSAVPARSLSSSPQAQPPRPAELSDEEVAELFQRLAETQQEKWMLEEKVKHLEVSSASMAEDLCRKSAIIETYVMDSRIDVSVAAGHTDRSGLGSVLRDLVKPETNSFLFYFILFFNLCLEPGYSAFGIGDAGWVCGPCSAF

SEQ ID NO: 819868 - protein, 706 aa, Homo sapiens
EEFQRMQAQLLELRTNNYQLSDELRKNGVELTSLRQKVAYLDKEFSKAQKALSKSKKAQEVEVLLSENEMLQAKLHSQEEDFRLQNSTLMAEFSKLCSQMEQLEQENQQLKEGAAGAGVAQAGPLVDGELLRLQAENTALQKNVAALQERYGKEAGKFSAVSEGQGDPPGGPAPTVLAPMPLAEVELKWEMEKEEKRLLWEQLQGLESSKQAETSRLQEELAKLSEKLKKKQESFCRLQTEKETLFNDSRNKIEELQQRKEADHKAQLARTQKLQQELEAANQSLAELRDQRQGERLEHAAALRALQDQVSIQSADAQEQVEGLLAENNALRTSLAALEQIQTAKTQELNMLREQTTGLAAELQQQQAEYEDLMGQKDDLNSQLQESLRANSRLLEQLQEIGQEKEQLTQELQEARKSAEKRKAMLDELAMETLQEKSQHKEELGAVRLRHEKEVLGVRARYERELRELHEDKKRQEEELRGQIREEKTPFYTNTYSDATVTLKSISYPTRLRTNLPYCNLLLRKKRTIWIHRYGLELMISIGFPRRHPCEHTIYAQTGTETVDNTSIFQLRYHNPLYSQPGVKQLADVRKSTGNARTAKRPAALTTKTKDTDNITTDRGPEGEEAIPKHNRDNEPHQNDKTRNAHTQKSRHKSAAIPTSQRTTPRRHQHQRSTTKTHTHTHSITDSARPTTHHTAQKARDKLTAR

SEQ ID NO: 819869 - protein, 387 aa, Homo sapiens
MACTIQKAEALDGAHLMQILWYDEEESLYPAVWLRDNCPCSDCYLDSAKARKLLVEALDVNIGIKGLIFDRKKVYITWPDEHYSEFQADWLKKRCFSKQARAKLQRELFFPECQYWGSELQLPTLDFEDVLRYDEHAYKWLSTLKKVGIVRLTGASDKPGEVSKLGKRMGFLYLTFYGHTWQVQDKIDANNVAYTTGKLSFHTDYPALHHPPGVQLLHCIKQTVTGGDSEIVDGFNVCQKLKKNNPQAFQILSSTFVDFTDIGVDYCDFSVQSKHKIIELDDKGQVVRINFNNATRDTIFDVPVERVQPFYAALKEFVDLMNSKESKFTFKMNPGDVITFDNWRLLHGRRSYEAGTEISRHLEGAYADWDVVMSRLRILRQRVENGN

SEQ ID NO: 819870 - protein, 387 aa, Homo sapiens; identical to SEQ ID NO: 819869

SEQ ID NO: 819871 - protein, 227 aa, Homo sapiens
MLFQAGQSKAPKRIVFSRHTWQVQDKIDANNVAYTTGKLSFHTDYPALHHPPGVQLLHCIKQTVTGGDSEIVDGFNVCQKLKKNNPQAFQILSSTFVDFTDIGVDYCDFSVQSKHKIIELDDKGQVVRINFNNATRDTIFDVPVERVQPFYAALKEFVDLMNSKESKFTFKMNPGDVITFDNWRLLHGRRSYEAGTEISRHLEGAYADWDVVMSRLRILRQRVENGN

SEQ ID NO: 819872 - protein, 219 aa, Homo sapiens
MGFLYLTFYGHTWQVQDKIDANNVAYTTGKLSFHTDYPALHHPPGVQLLHCIKQTVTGGDSEIVDGFNVCQKLKKNNPQAFQILSSTFVDFTDIGVDYCDFSVQSKHKIIELDDKGQVVRINFNNATRDTIFDVPVERVQPFYAALKEFVDLMNSKESKFTFKMNPGDVITFDNWRLLHGRRSYEAGTEISRHLEGAYADWDVVMSRLRILRQRVENGN

SEQ ID NO: 819873 - protein, 279 aa, Homo sapiens
MACTIQKAEALDGAHLMQILWYDEEESLYPAVWLRDNCPCSDCYLDSAKARKLLVEALDVNIGIKGLIFDRKKVYITWPDEHYSEFQADWLKKRCFSKQARAKLQRELFFPECQYWGSELQLPTLDFEDVLRYDEHAYKWLSTLKKVGIVRLTGASDKPGEVSKLGKRMGFLYLTFYGHTWQVQDKIDANNVAYTTGKLSFHTDYPALHHPPGVQLLHCIKQTVTGGDSEIVDGFNVCQKLKKNNPQAFQILSSTFVDFTDIGVDYCDFSVQSKHKIIE

SEQ ID NO: 819874 - protein, 150 aa, Homo sapiens
MACTIQKAEALDGAHLMQILWYDEEESLYPAVWLRDNCPCSDCYLDSAKARKLLVEALDVNIGIKGLIFDRKKVYITWPDEHYSEFQADWLKKRCFSKQARAKLQRELFFPGNFAKVFNVFLNPYSKGFLLRNLLTENSNLCALIKICDM

SEQ ID NO: 819875 - protein, 72 aa, Homo sapiens
GRVGRPTLSLAMDPNCSCAAGDSCTCAGSCKCKECKCTSCKKSCCSCCPVGCAKCAQGCICKGASDKCSCCA

SEQ ID NO: 819876 - protein, 81 aa, Homo sapiens
GRLLLLLLLLEFKLLTMYGDMDPNCSCAAGDSCTCAGSCKCKECKCTSCKKSCCSCCPVGCAKCAQGCICKGASDKCSCCA

SEQ ID NO: 819877 - protein, 72 aa, Homo sapiens; identical to SEQ ID NO: 819875

SEQ ID NO: 819878 - protein, 118 aa, Homo sapiens
KSQRTRVQTVPDSSRLFSSPWIPTAPAPPVTPAPAPAPANAKSANAPPARKAAAPAALWAVPSVPRAASAKGRRTSAAAAPDAGTAPLPDVKNATSTNLDFLCTTLTVTVCYIPFSMK

SEQ ID NO: 819879 - protein, 105 aa, Homo sapiens
MHLLQEKVSGILSFLYPFPVLQPVPSPPSSGELKQSGDAPLRGNCCLLSDPYQGEQESLFPVSLVLISAASCLPPGCCSCCPVGCAKCAQGCICKGASDKCSCCA

SEQ ID NO: 819880 - protein, 116 aa, Homo sapiens
ASALSNMVAALREGGFLLLHTLLRGHPLGDIVAFLTSTEPQYGQGILSQDAWESLFSRVSLRLVGLKKSFYGSCKCKECKCTSCKKSCCSCCPVGCAKCAQGCICKGASDKCSCCA

SEQ ID NO: 819881 - protein, 118 aa, Homo sapiens; identical to SEQ ID NO: 819878

SEQ ID NO: 819882 - protein, 72 aa, Homo sapiens
KSQRTRVQTVPDSSRLFSSPWIPTAPAPPVTPAPAPAPANAKSANAPPARKQRGVGQVQLLRLMLGQPRSQM

SEQ ID NO: 819883 - protein, 91 aa, Homo sapiens
KSQRTRVQTVPDSSRLFSSPWIPTAPAPPVTPAPAPAPANAKTKGRRTSAAAAPDAGTAPLPDVKNATSTNLDFLCTTLTVTVCYIPFSMK

SEQ ID NO: 819884 - protein, 72 aa, Homo sapiens; identical to SEQ ID NO: 819875

SEQ ID NO: 819885 - protein, 81 aa, Homo sapiens; identical to SEQ ID NO: 819876

SEQ ID NO: 819886 - protein, 72 aa, Homo sapiens; identical to SEQ ID NO: 819875

SEQ ID NO: 819887 - protein, 72 aa, Homo sapiens; identical to SEQ ID NO: 819875

SEQ ID NO: 819888 - protein, 72 aa, Homo sapiens; identical to SEQ ID NO: 819875

SEQ ID NO: 819889 - protein, 105 aa, Homo sapiens; identical to SEQ ID NO: 819879

SEQ ID NO: 819890 - protein, 95 aa, Homo sapiens
SEEKGGVEVLESCQGSSNGAQDQEASEQFGSPVAERGKRLPGVAGQYLFKCLINVKKEVDDALVEMHWVEGQNRDLMNQLCTYIRNQIFRLVAVN

SEQ ID NO: 819891 - protein, 95 aa, Homo sapiens; identical to SEQ ID NO: 819890

SEQ ID NO: 819892 - protein, 95 aa, Homo sapiens; identical to SEQ ID NO: 819890

SEQ ID NO: 819893 - protein, 95 aa, Homo sapiens; identical to SEQ ID NO: 819890

SEQ ID NO: 819894 - protein, 95 aa, Homo sapiens; identical to SEQ ID NO: 819890

SEQ ID NO: 819895 - protein, 95 aa, Homo sapiens; identical to SEQ ID NO: 819890

SEQ ID NO: 819896 - protein, 95 aa, Homo sapiens; identical to SEQ ID NO: 819890

SEQ ID NO: 819897 - protein, 95 aa, Homo sapiens; identical to SEQ ID NO: 819890

SEQ ID NO: 819898 - protein, 69 aa, Homo sapiens
VFDRLSGLSNISLVALHSMMALPHAFWSTMVLLDYMMSVYLTSDCPGCSQVRYCERCWLEDLARGSDLL

SEQ ID NO: 819899 - protein, 95 aa, Homo sapiens; identical to SEQ ID NO: 819890

SEQ ID NO: 819900 - protein, 95 aa, Homo sapiens; identical to SEQ ID NO: 819890

SEQ ID NO: 819901 - protein, 2042 aa, Homo sapiens
MLEAIDKNRALHAAERLQTKLRERGDVANEDKLSLLKSVLQSPLFSQILSLQTSVQQLKDQVNIATSATSNIEYAHVPHLSPAVIPTLQNESFLLSPNNGNLEALTGPGIPHINGKPACDEFDQLIKNMAQGRHVEVFELLKPPSGGLGFSVVGLRSENRGELGIFVQEIQEGSVAHRDGRLKETDQILAINGQALDQTITHQQAISILQKAKDTVQLVIARGSLPQLVSPIVSRSPSAASTISAHSNPVHWQHMETIELVNDGSGLGFGIIGGKATGVIVKTILPGGVADQHGRLCSGDHILKIGDTDLAGMSSEQVAQVLRQCGNRVKLMIARGAIEERTAPTALGITLSSSPTSTPELRVDASTQKGEESETFDVELTKNVQGLGITIAGYIGDKKLEPSGIFVKSITKSSAVEHDGRIQIGDQIIAVDGTNLQGFTNQQAVEVLRHTGQTVLLTLMRRGMKQEAELMSREDVTKDADLSPVNASIIKENYEKDEDFLSSTRNTNILPTEEEGYPLLSAEIEEIEDAQKQEAALLTKWQRIMGINYEIVVAHVSKFSENSGLGISLEATVGHHFIRSVLPEGPVGHSGKLFSGDELLEVNGITLLGENHQDVVNILKELPIEVTMVCCRRTVPPTTQSELDSLDLCDIELTEKPHVDLGEFIGSSETEDPVLAMTDAGQSTEEVQAPLAMWEAGIQHIELEKGSKGLGFSILDYQDPIDPASTVIIIRSLVPGGIAEKDGRLLPGDRLMFVNDVNLENSSLEEAVEALKGAPSGTVRIGVAKPLPLSPEEGYVSAKEDSFLYPPHSCEEAGLADKPLFRADLALVGTNDADLVDESTFESPYSPENDSIYSTQASILSLHGSSCGDGLNYGSSLPSSPPKDVIENSCDPVLDLHMSLEELYTQNLLQRQDENTPSVDISMGPASGFTINDYTPANAIEQQYECENTIVWTESHLPSEVISSAELPSVLPDSAGKGSEYLLEQSSLACNAECVMLQNVSKESFERTINIAKGNSSLGMTVSANKDGLGMIVRSIIHGGAISRDGRIAIGDCILSINEESTISVTNAQARAMLRRHSLIGPDIKITYVPAEHLEEFKISLGQQSGRVMALDIFSSYTGRDIPELPEREEGEGEESELQNTAYSNWNQPRRVELWREPSKSLGISIVGGRGMGSRLSNGEVMRGIFIKHVLEDSPAGKNGTLKPGDRIVEVDGMDLRDASHEQAVEAIRKAGNPVVFMVQSIINRPRKSPLPSLLHNLYPKYNFSSTNPFADSLQINADKAPSQSESEPEKAPLCSVPPPPPSAFAEMGSDHTQSSASKISQDVDKEDEFGYSWKNIRERYGTLTGELHMIELEKGHSGLGLSLAGNKDRSRMSVFIVGIDPNGAAGKDGRLQIADELLEINGQILYGRSHQNASSIIKCAPSKVKIIFIRNKDAVNQMAVCPGNAVEPLPSNSENLQNKETEPTVTTSDAAVDLSSFKNVQHLELPKDQGGLGIAISEEDTLSGVIIKSLTEHGVAATDGRLKVGDQILAVDDEIVVGYPIEKFISLLKTAKMTVKLTIHAENPDSQAVPSAAGAASGEKKNSSQSLMVPQSGSPEPESIRNTSRSSTPAIFASDPATCPIIPGCETTIEISKGRTGLGLSIVGGSDTLLGAIIIHEVYEEGAACKDGRLWAGDQILEVNGIDLRKATHDEAINVLRQTPQRVRLTLYRDEAPYKEEEVCDTLTIELQKKPGKGLGLSIVGKRNDTGVFVSDIVKGGIADADGRLMQGDQILMVNGEDVRNATQEAVAALLKCSLGTVTLEVGRIKAGSSTSESLESSSKKNALASEIQGLRTVEMKKGPTDSLGISIAGGVGSPLGDVPIFIAMMHPTGVAAQTQKLRVGDRIVTICGTSTEGMTHTQAVNLLKNASGSIEMQVVAGGDVSVVTGHQQEPASSSLSFTGLTSSSIFQDDLGPPQCKSITLERGPDGLGFSIVGGYGSPHGDLPIYVKTVFAKGAASEDGRLKRGDQIIAVNGQSLEGVTHEEAVAILKRTKGTVTLMVLS

SEQ ID NO: 819902 - protein, 2053 aa, Homo sapiens
MLEAIDKNRALHAAERLQTKLRERGDVANEDKLSLLKSVLQSPLFSQILSLQTSVQQLKDQVNIATSATSNIEYAHVPHLSPAVIPTLQNESFLLSPNNGNLEALTGPGIPHINGKPACDEFDQLIKNMAQGRHVEVFELLKPPSGGLGFSVVGLRSENRGELGIFVQEIQEGSVAHRDGRLKETDQILAINGQALDQTITHQQAISILQKAKDTVQLVIARGSLPQLVSPIVSRSPSAASTISAHSNPVHWQHMETIELVNDGSGLGFGIIGGKATGVIVKTILPGGVADQHGRLCSGDHILKIGDTDLAGMSSEQVAQVLRQCGNRVKLMIARGAIEERTAPTALGITLSSSPTSTPELRVDASTQKGEESETFDVELTKNVQGLGITIAGYIGDKKLEPSGIFVKSITKSSAVEHDGRIQIGDQIIAVDGTNLQGFTNQQAVEVLRHTGQTVLLTLMRRGMKQEAELMSREDVTKDADLSPVNASIIKENYEKDEDFLSSTRNTNILPTEEEGYPLLSAEIEEIEDAQKQEAALLTKWQRIMGINYEIVVAHVSKFSENSGLGISLEATVGHHFIRSVLPEGPVGHSGKLFSGDELLEVNGITLLGENHQDVVNILKELPIEVTMVCCRRTVPPTTQSELDSLDLCDIELTEKPHVDLGEFIGSSETEDPVLAMTDAGQSTEEVQAPLAMWEAGIQHIELEKGSKGLGFSILDYQDPIDPASTVIIIRSLVPGGIAEKDGRLLPGDRLMFVNDVNLENSSLEEAVEALKGAPSGTVRIGVAKPLPLSPEEGYVSAKEDSFLYPPHSCEEAGLADKPLFRADLALVGTNDADLVDESTFESPYSPENDSIYSTQASILSLHGSSCGDGLNYGSSLPSSPPKDVIENSCDPVLDLHMSLEELYTQNLLQRQDENTPSVDISMGPASGFTINDYTPANAIEQQYECENTIVWTESHLPSEVISSAELPSVLPDSAGKGSEYLLEQSSLACNAECVMLQNVSKESFERTINIAKGNSSLGMTVSANKDGLGMIVRSIIHGGAISRDGRIAIGDCILSINEESTISVTNAQARAMLRRHSLIGPDIKITYVPAEHLEEFKISLGQQSGRVMALDIFSSYTGRDIPELPEREEGEGEESELQNTAYSNWNQPRRVELWREPSKSLGISIVGGRGMGSRLSNGEVMRGIFIKHVLEDSPAGKNGTLKPGDRIVEVDGMDLRDASHEQAVEAIRKAGNPVVFMVQSIINRPRKSPLPSLLHNLYPKYNFSSTNPFADSLQINADKAPSQSESEPEKAPLCSVPPPPPSAFAEMGSDHTQSSASKISQDVDKEDEFGYSWKNIRERYGTLTGELHMIELEKGHSGLGLSLAGNKDRSRMSVFIVGIDPNGAAGKDGRLQIADELLEINGQILYGRSHQNASSIIKCAPSKVKIIFIRNKDAVNQMAVCPGNAVEPLPSNSENLQNKETEPTVTTSDAAVDLSSFKNVQHLELPKDQGGLGIAISEEDTLSGVIIKSLTEHGVAATDGRLKVGDQILAVDDEIVVGYPIEKFISLLKTAKMTVKLTIHAENPDSQAVPSAAGAASGEKKNSPNTSRSSTPAIFASDPATCPIIPGCETTIEISKGRTGLGLSIVGGSDTLLGAIIIHEVYEEGAACKDGRLWAGDQILEVNGIDLRKATHDEAINVLRQTPQRVRLTLYRDEAPYKEEEVCDTLTIELQKKPGKGLGLSIVGKRNDTGVFVSDIVKGGIADADGRLMQGDQILMVNGEDVRNATQEAVAALLKCSLGTVTLEVGRIKAGPFHSERRPSQSSQVSEGSLSSFTFPLSGSSTSESLESSSKKNALASEIQGLRTVEMKKGPTDSLGISIAGGVGSPLGDVPIFIAMMHPTGVAAQTQKLRVGDRIVTICGTSTEGMTHTQAVNLLKNASGSIEMQVVAGGDVSVVTGHQQEPASSSLSFTGLTSSSIFQDDLGPPQCKSITLERGPDGLGFSIVGGYGSPHGDLPIYVKTVFAKGAASEDGRLKRGDQIIAVNGQSLEGVTHEEAVAILKRTKGTVTLMVLS

SEQ ID NO: 819903 - protein, 1377 aa, Homo sapiens
MTDAGQSTEEVQAPLAMWEAGIQHIELEKGSKGLGFSILDYQDPIDPASTVIIIRSLVPGGIAEKDGRLLPGDRLMFVNDVNLENSSLEEAVEALKGAPSGTVRIGVAKPLPLSPEEGYVSAKEDSFLYPPHSCEEAGLADKPLFRADLALVGTNDADLVDESTFESPYSPENDSIYSTQASILSLHGSSCGDGLNYGSSLPSSPPKDVIENSCDPVLDLHMSLEELYTQNLLQRQDENTPSVDISMGPASGFTINDYTPANAIEQQYECENTIVWTESHLPSEVISSAELPSVLPDSAGKGSEYLLEQSSLACNAECVMLQNVSKESFERTINIAKGNSSLGMTVSANKDGLGMIVRSIIHGGAISRDGRIAIGDCILSINEESTISVTNAQARAMLRRHSLIGPDIKITYVPAEHLEEFKISLGQQSGRVMALDIFSSYTGRDIPELPEREEGEGEESELQNTAYSNWNQPRRVELWREPSKSLGISIVGGRGMGSRLSNGEVMRGIFIKHVLEDSPAGKNGTLKPGDRIVEVDGMDLRDASHEQAVEAIRKAGNPVVFMVQSIINRPRKSPLPSLLHNLYPKYNFSSTNPFADSLQINADKAPSQSESEPEKAPLCSVPPPPPSAFAEMGSDHTQSSASKISQDVDKEDEFGYSWKNIRERYGTLTGELHMIELEKGHSGLGLSLAGNKDRSRMSVFIVGIDPNGAAGKDGRLQIADELLEINGQILYGRSHQNASSIIKCAPSKVKIIFIRNKDAVNQMAVCPGNAVEPLPSNSENLQNKETEPTVTTSDAAVDLSSFKNVQHLELPKDQGGLGIAISEEDTLSGVIIKSLTEHGVAATDGRLKVGDQILAVDDEIVVGYPIEKFISLLKTAKMTVKLTIHAENPDSQAVPSAAGAASGEKKNSPNTSRSSTPAIFASDPATCPIIPGCETTIEISKGRTGLGLSIVGGSDTLLGAIIIHEVYEEGAACKDGRLWAGDQILEVNGIDLRKATHDEAINVLRQTPQRVRLTLYRDEAPYKEEEVCDTLTIELQKKPGKGLGLSIVGKRNDTGVFVSDIVKGGIADADGRLMQGDQILMVNGEDVRNATQEAVAALLKCSLGTVTLEVGRIKAGPFHSERRPSQSSQVSEGSLSSFTFPLSGSSTSESLESSSKKNALASEIQGLRTVEMKKGPTDSLGISIAGGVGSPLGDVPIFIAMMHPTGVAAQTQKLRVGDRIVTICGTSTEGMTHTQAVNLLKNASGSIEMQVVAGGDVSVVTGHQQEPASSSLSFTGLTSSSIFQDDLGPPQCKSITLERGPDGLGFSIVGGYGSPHGDLPIYVKTVFAKGAASEDGRLKRGDQIIAVNGQSLEGVTHEEAVAILKRTKGTVTLMVLS

SEQ ID NO: 819904 - protein, 1594 aa, Homo sapiens
MRRGMKQEAELMSREDVTKDADLSPVNASIIKENYEKDEDFLSSTRNTNILPTEEEGYPLLSAEIEEIEDAQKQEAALLTKWQRIMGINYEIVVAHVSKFSENSGLGISLEATVGHHFIRSVLPEGPVGHSGKLFSGDELLEVNGITLLGENHQDVVNILKELPIEVTMVCCRRTVPPTTQSELDSLDLCDIELTEKPHVDLGEFIGSSETEDPVLAMTDAGQSTEEVQAPLAMWEAGIQHIELEKGSKGLGFSILDYQDPIDPASTVIIIRSLVPGGIAEKDGRLLPGDRLMFVNDVNLENSSLEEAVEALKGAPSGTVRIGVAKPLPLSPEEGYVSAKEDSFLYPPHSCEEAGLADKPLFRADLALVGTNDADLVDESTFESPYSPENDSIYSTQASILSLHGSSCGDGLNYGSSLPSSPPKDVIENSCDPVLDLHMSLEELYTQNLLQRQDENTPSVDISMGPASGFTINDYTPANAIEQQYECENTIVWTESHLPSEVISSAELPSVLPDSAGKGSEYLLEQSSLACNAECVMLQNVSKESFERTINIAKGNSSLGMTVSANKDGLGMIVRSIIHGGAISRDGRIAIGDCILSINEESTISVTNAQARAMLRRHSLIGPDIKITYVPAEHLEEFKISLGQQSGRVMALDIFSSYTGRDIPELPEREEGEGEESELQNTAYSNWNQPRRVELWREPSKSLGISIVGGRGMGSRLSNGEVMRGIFIKHVLEDSPAGKNGTLKPGDRIVEVDGMDLRDASHEQAVEAIRKAGNPVVFMVQSIINRPRKSPLPSLLHNLYPKYNFSSTNPFADSLQINADKAPSQSESEPEKAPLCSVPPPPPSAFAEMGSDHTQSSASKISQDVDKEDEFGYSWKNIRERYGTLTGELHMIELEKGHSGLGLSLAGNKDRSRMSVFIVGIDPNGAAGKDGRLQIADELLEINGQILYGRSHQNASSIIKCAPSKVKIIFIRNKDAVNQMAVCPGNAVEPLPSNSENLQNKETEPTVTTSDAAVDLSSFKNVQHLELPKDQGGLGIAISEEDTLSGVIIKSLTEHGVAATDGRLKVGDQILAVDDEIVVGYPIEKFISLLKTAKMTVKLTIHAENPDSQAVPSAAGAASGEKKNSPNTSRSSTPAIFASDPATCPIIPGCETTIEISKGRTGLGLSIVGGSDTLLGAIIIHEVYEEGAACKDGRLWAGDQILEVNGIDLRKATHDEAINVLRQTPQRVRLTLYRDEAPYKEEEVCDTLTIELQKKPGKGLGLSIVGKRNDTGVFVSDIVKGGIADADGRLMQGDQILMVNGEDVRNATQEAVAALLKCSLGTVTLEVGRIKAGPFHSERRPSQSSQVSEGSLSSFTFPLSGSSTSESLESSSKKNALASEIQGLRTVEMKKGPTDSLGISIAGGVGSPLGDVPIFIAMMHPTGVAAQTQKLRVGDRIVTICGTSTEGMTHTQAVNLLKNASGSIEMQVVAGGDVSVVTGHQQEPASSSLSFTGLTSSSIFQDDLGPPQCKSITLERGPDGLGFSIVGGYGSPHGDLPIYVKTVFAKGAASEDGRLKRGDQIIAVNGQSLEGVTHEEAVAILKRTKGTVTLMVLS

SEQ ID NO: 819905 - protein, 920 aa, Homo sapiens
AAYASHSRFSAAPADDRAPFYVITYVPAEHLEEFKISLGQQSGRVMALDIFSSYTGRDIPELPEREEGEGEESELQNTAYSNWNQPRRVELWREPSKSLGISIVGGRGMGSRLSNGEVMRGIFIKHVLEDSPAGKNGTLKPGDRIVEAPSQSESEPEKAPLCSVPPPPPSAFAEMGSDHTQSSASKISQDVDKEDEFGYSWKNIRERYGTLTGELHMIELEKGHSGLGLSLAGNKDRSRMSVFIVGIDPNGAAGKDGRLQIADELLEINGQILYGRSHQNASSIIKCAPSKVKIIFIRNKDAVNQMAVCPGNAVEPLPSNSENLQNKETEPTVTTSDAAVDLSSFKNVQHLELPKDQGGLGIAISEEDTLSGVIIKSLTEHGVAATDGRLKVGDQILAVDDEIVVGYPIEKFISLLKTAKMTVKLTIHAENPDSQAVPSAAGAASGEKKNSPNTSRSSTPAIFASDPATCPIIPGCETTIEISKGRTGLGLSIVGGSDTLLGAIIIHEVYEEGAACKDGRLWAGDQILEVNGIDLRKATHDEAINVLRQTPQRVRLTLYRDEAPYKEEEVCDTLTIELQKKPGKGLGLSIVGKRNDTGVFVSDIVKGGIADADGRLMQGDQILMVNGEDVRNATQEAVAALLKCSLGTVTLEVGRIKAGPFHSERRPSQSSQVSEGSLSSFTFPLSGSSTSESLESSSKKNALASEIQGLRTVEMKKGPTDSLGISIAGGVGSPLGDVPIFIAMMHPTGVAAQTQKLRVGDRIVTICGTSTEGMTHTQAVNLLKNASGSIEMQVVAGGDVSVVTGHQQEPASSSLSFTGLTSSSIFQDDLGPPQCKSITLERGPDGLGFSIVGGYGSPHGDLPIYVKTVFAKGAASEDGRLKRGDQIIAVNGQSLEGVTHEEAVAILKRTKGTVTLMVLS

SEQ ID NO: 819906 - protein, 1134 aa, Homo sapiens
  misc_feature (3)..(3): Xaa can be any naturally occurring amino acid
  misc_feature (7)..(8): Xaa can be any naturally occurring amino acid
  misc_feature (10)..(10): Xaa can be any naturally occurring amino acid
  misc_feature (19)..(19): Xaa can be any naturally occurring amino acid
  misc_feature (26)..(26): Xaa can be any naturally occurring amino acid
  misc_feature (30)..(30): Xaa can be any naturally occurring amino acid
VIXFDLXXAXGSPPFDQVXPGKPNLXPGHXLLWTESHLPSEVISSAELPSVLPDSAGKGSEYLLEQSSLACNAECVMLQNVSKESFERTINIAKGNSSLGMTVSANKDGLGMIVRSIIHGGAISRDGRIAIGDCILSINEESTISVTNAQARAMLRRHSLIGPDIKITYVPAEHLEEFKISLGQQSGRVMALDIFSSYTGRDIPELPEREEGEGEESELQNTAYSNWNQPRRVELWREPSKSLGISIVGGRGMGSRLSNGEVMRGIFIKHVLEDSPAGKNGTLKPGDRIVEVDGMDLRDASHEQAVEAIRKAGNPVVFMVQSIINRPRKSPLPSLLHNLYPKYNFSSTNPFADSLQINADKAPSQSESEPEKAPLCSVPPPPPSAFAEMGSDHTQSSASKISQDVDKEDEFGYSWKNIRERYGTLTGELHMIELEKGHSGLGLSLAGNKDRSRMSVFIVGIDPNGAAGKDGRLQIADELLEINGQILYGRSHQNASSIIKCAPSKVKIIFIRNKDAVNQMAVCPGNAVEPLPSNSENLQNKETEPTVTTSDAAVDLSSFKNVQHLELPKDQGGLGIAISEEDTLSGVIIKSLTEHGVAATDGRLKVGDQILAVDDEIVVGYPIEKFISLLKTAKMTVKLTIHAENPDSQAVPSAAGAASGEKKNSPNTSRSSTPAIFASDPATCPIIPGCETTIEISKGRTGLGLSIVGGSDTLLGAIIIHEVYEEGAACKDGRLWAGDQILEVNGIDLRKATHDEAINVLRQTPQRVRLTLYRDEAPYKEEEVCDTLTIELQKKPGKGLGLSIVGKRNDTGVFVSDIVKGGIADADGRLMQGDQILMVNGEDVRNATQEAVAALLKCSLGTVTLEVGRIKAGPFHSERRPSQSSQVSEGSLSSFTFPLSGSSTSESLESSSKKNALASEIQGLRTVEMKKGPTDSLGISIAGGVGSPLGDVPIFIAMMHPTGVAAQTQKLRVGDRIVTICGTSTEGMTHTQAVNLLKNASGSIEMQVVAGGDVSVVTGHQQEPASSSLSFTGLTSSSIFQDDLGPPQCKSITLERGPDGLGFSIVGGYGSPHGDLPIYVKTVFAKGAASEDGRLKRGDQIIAVNGQSLEGVTHEEAVAILKRTKGTVTLMVLS

SEQ ID NO: 819907 - protein, 774 aa, Homo sapiens
WRAQREGTAWEVWDSQQWMVSKTVILRVFRRLSKLSMRVTNNNFIIYSQYLISDFESSIRGCYPMLCEALYDELEKGHSGLGLSLAGNKDRSRMSVFIVGIDPNGAAGKDGRLQIADELLEINGQILYGRSHQNASSIIKCAPSKVKIIFIRNKDAVNQMAVCPGNAVEPLPSNSENLQNKETEPTVTTSDAAVDLSSFKNVQHLELPKDQGGLGIAISEEDTLSGVIIKSLTEHGVAATDGRLKVGDQILAVDDEIVVGYPIEKFISLLKTAKMTVKLTIHAENPDSQAVPSAAGAASGEKKNSPNTSRSSTPAIFASDPATCPIIPGCETTIEISKGRTGLGLSIVGGSDTLLGAIIIHEVYEEGAACKDGRLWAGDQILEVNGIDLRKATHDEAINVLRQTPQRVRLTLYRDEAPYKEEEVCDTLTIELQKKPGKGLGLSIVGKRNDTGVFVSDIVKGGIADADGRLMQGDQILMVNGEDVRNATQEAVAALLKCSLGTVTLEVGRIKAGPFHSERRPSQSSQVSEGSLSSFTFPLSGSSTSESLESSSKKNALASEIQGLRTVEMKKGPTDSLGISIAGGVGSPLGDVPIFIAMMHPTGVAAQTQKLRVGDRIVTICGTSTEGMTHTQAVNLLKNASGSIEMQVVAGGDVSVVTGHQQEPASSSLSFTGLTSSSIFQDDLGPPQCKSITLERGPDGLGFSIVGGYGSPHGDLPIYVKTVFAKGAASEDGRLKRGDQIIAVNGQSLEGVTHEEAVAILKRTKGTVTLMVLS

SEQ ID NO: 819908 - protein, 2042 aa, Homo sapiens
MLEAIDKNRALHAAERLQTKLRERGDVANEDKLSLLKSVLQSPLFSQILSLQTSVQQLKDQVNIATSATSNIEYAHVPHLSPAVIPTLQNESFLLSPNNGNLEALTGPGIPHINGKPACDEFDQLIKNMAQGRHVEVFELLKPPSGGLGFSVVGLRSENRGELGIFVQEIQEGSVAHRDGRLKETDQILAINGQALDQTITHQQAISILQKAKDTVQLVIARGSLPQLVSPIVSRSPSAASTISAHSNPVHWQHMETIELVNDGSGLGFGIIGGKATGVIVKTILPGGVADQHGRLCSGDHILKIGDTDLAGMSSEQVAQVLRQCGNRVKLMIARGAIEERTAPTALGITLSSSPTSTPELRVDASTQKGEESETFDVELTKNVQGLGITIAGYIGDKKLEPSGIFVKSITKSSAVEHDGRIQIGDQIIAVDGTNLQGFTNQQAVEVLRHTGQTVLLTLMRRGMKQEAELMSREDVTKDADLSPVNASIIKENYEKDEDFLSSTRNTNILPTEEEGYPLLSAEIEEIEDAQKQEAALLTKWQRIMGINYEIVVAHVSKFSENSGLGISLEATVGHHFIRSVLPEGPVGHSGKLFSGDELLEVNGITLLGENHQDVVNILKELPIEVTMVCCRRTVPPTTQSELDSLDLCDIELTEKPHVDLGEFIGSSETEDPVLAMTDAGQSTEEVQAPLAMWEAGIQHIELEKGSKGLGFSILDYQDPIDPASTVIIIRSLVPGGIAEKDGRLLPGDRLMFVNDVNLENSSLEEAVEALKGAPSGTVRIGVAKPLPLSPEEGYVSAKEDSFLYPPHSCEEAGLADKPLFRADLALVGTNDADLVDESTFESPYSPENDSIYSTQASILSLHGSSCGDGLNYGSSLPSSPPKDVIENSCDPVLDLHMSLEELYTQNLLQRQDENTPSVDISMGPASGFTINDYTPANAIEQQYECENTIVWTESHLPSEVISSAELPSVLPDSAGKGSEYLLEQSSLACNAECVMLQNVSKESFERTINIAKGNSSLGMTVSANKDGLGMIVRSIIHGGAISRDGRIAIGDCILSINEESTISVTNAQARAMLRRHSLIGPDIKITYVPAEHLEEFKISLGQQSGRVMALDIFSSYTGRDIPELPEREEGEGEESELQNTAYSNWNQPRRVELWREPSKSLGISIVGGRGMGSRLSNGEVMRGIFIKHVLEDSPAGKNGTLKPGDRIVEVDGMDLRDASHEQAVEAIRKAGNPVVFMVQSIINRPRKSPLPSLLHNLYPKYNFSSTNPFADSLQINADKAPSQSESEPEKAPLCSVPPPPPSAFAEMGSDHTQSSASKISQDVDKEDEFGYSWKNIRERYGTLTGELHMIELEKGHSGLGLSLAGNKDRSRMSVFIVGIDPNGAAGKDGRLQIADELLEINGQILYGRSHQNASSIIKCAPSKVKIIFIRNKDAVNQMAVCPGNAVEPLPSNSENLQNKETEPTVTTSDAAVDLSSFKNVQHLELPKDQGGLGIAISEEDTLSGVIIKSLTEHGVAATDGRLKVGDQILAVDDEIVVGYPIEKFISLLKTAKMTVKLTIHAENPDSQAVPSAAGAASGEKKNSSQSLMVPQSGSPEPESIRNTSRSSTPAIFASDPATCPIIPGCETTIEISKGRTGLGLSIVGGSDTLLVNGIDLRKATHDEAINVLRQTPQRVRLTLYRDEAPYKEEEVCDTLTIELQKKPGKGLGLSIVGKRNDTGVFVSDIVKGGIADADGRLMQGDQILMVNGEDVRNATQEAVAALLKCSLGTVTLEVGRIKAGPFHSERRPSQSSQVSEGSLSSFTFPLSGSSTSESLESSSKKNALASEIQGLRTVEMKKGPTDSLGISIAGGVGSPLGDVPIFIAMMHPTGVAAQTQKLRVGDRIVTICGTSTEGMTHTQAVNLLKNASGSIEMQVVAGGDVSVVTGHQQEPASSSLSFTGLTSSSIFQDDLGPPQCKSITLERGPDGLGFSIVGGYGSPHGDLPIYVKTVFAKGAASEDGRLKRGDQIIAVNGQSLEGVTHEEAVAILKRTKGTVTLMVLS

SEQ ID NO: 819909 - protein, 1598 aa, Homo sapiens
MLEAIDKNRALHAAERLQTKLRERGDVANEDKLSLLKSVLQSPLFSQILSLQTSVQQLKDQVNIATSATSNIEYAHVPHLSPAVIPTLQNESFLLSPNNGNLEALTGPGIPHINGKPACDEFDQLIKNMAQGRHVEVFELLKPPSGGLGFSVVGLRSENRGELGIFVQEIQEGSVAHRDGRLKETDQILAINGQALDQTITHQQAISILQKAKDTVQLVIARGSLPQLVSPIVSRSPSAASTISAHSNPVHWQHMETIELVNDGSGLGFGIIGGKATGVIVKTILPGGVADQHGRLCSGDHILKIGDTDLAGMSSEQVAQVLRQCGNRVKLMIARGAIEERTAPTALGITLSSSPTSTPELRVDASTQKGEESETFDVELTKNVQGLGITIAGYIGDKKLEPSGIFVKSITKSSAVEHDGRIQIGDQIIAVDGTNLQGFTNQQAVEVLRHTGQTVLLTLMRRGMKQEAELMSREDVTKDADLSPVNASIIKENYEKDEDFLSSTRNTNILPTEEEGYPLLSAEIEEIEDAQKQEAALLTKWQRIMGINYEIVVAHVSKFSENSGLGISLEATVGHHFIRSVLPEGPVGHSGKLFSGDELLEVNGITLLGENHQDVVNILKELPIEVTMVCCRRTVPPTTQSELDSLDLCDIELTEKPHVDLGEFIGSSETEDPVLAMTDAGQSTEEVQAPLAMWEAGIQHIELEKGSKGLGFSILDYQDPIDPASTVIIIRSLVPGGIAEKDGRLLPGDRLMFVNDVNLENSSLEEAVEALKGAPSGTVRIGVAKPLPLSPEEGYVSAKEDSFLYPPHSCEEAGLADKPLFRADLALVGTNDADLVDESTFESPYSPENDSIYSTQASILSLHGSSCGDGLNYGSSLPSSPPKDVIENSCDPVLDLHMSLEELYTQNLLQRQDENTPSVDISMGPASGFTINDYTPANAIEQQYECENTIVWTESHLPSEVISSAELPSVLPDSAGKGSEYLLEQSSLACNAECVMLQNVSKESFERTINIAKGNSSLGMTVSANKDGLGMIVRSIIHGGAISRDGRIAIGDCILSINEESTISVTNAQARAMLRRHSLIGPDIKITYVPAEHLEEFKISLGQQSGRVMALDIFSSYTGRDIPELPEREEGEGEESELQNTAYSNWNQPRRVELWREPSKSLGISIVGGRGMGSRLSNGEVMRGIFIKHVLEDSPAGKNGTLKPGDRIVEVDGMDLRDASHEQAVEAIRKAGNPVVFMVQSIINRPRKSPLPSLLHNLYPKYNFSSTNPFADSLQINADKAPSQSESEPEKAPLCSVPPPPPSAFAEMGSDHTQSSASKISQDVDKEDEFGYSWKNIRERYGTLTGELHMIELEKGHSGLGLSLAGNKDRSRMSVFIVGIDPNGAAGKDGRLQIADELLEINGQILYGRSHQNASSIIKCAPSKVKIIFIRNKDAVNQMAVCPGNAVEPLPSNSENLQNKETEPTVTTSDAAVDLSSFKNVQHLELPKDQGGLGIAISEEDTLSGVIIKSLTEHGVAATDGRLKVGDQILAVDDEIVVGYPIEKFISLLKTAKMTVKLTIHAENPDSQAVPSAAGAASGEKKNSSQYKQIINTSNFCF

SEQ ID NO: 819910 - protein, 504 aa, Homo sapiens
MGPFLCPIPQSQSVDEFDGYALVTNFYLYFIFNLFLDTSRSSTPAIFASDPATCPIIPGCETTIEISKGRTGLGLSIVGGSDTLLGAIIIHEVYEEGAACKDGRLWAGDQILEVNGIDLRKATHDEAINVLRQTPQRVRLTLYRDEAPYKEEEVCDTLTIELQKKPGKGLGLSIVGKRNDTGVFVSDIVKGGIADADGRLMQGDQILMVNGEDVRNATQEAVAALLKCSLGTVTLEVGRIKAGPFHSERRPSQSSQVSEGSLSSFTFPLSGSSTSESLESSSKKNALASEIQGLRTVEMKKGPTDSLGISIAGGVGSPLGDVPIFIAMMHPTGVAAQTQKLRVGDRIVTICGTSTEGMTHTQAVNLLKNASGSIEMQVVAGGDVSVVTGHQQEPASSSLSFTGLTSSSIFQDDLGPPQCKSITLERGPDGLGFSIVGGYGSPHGDLPIYVKTVFAKGAASEDGRLKRGDQIIAVNGQSLEGVTHEEAVAILKRTKGTVTLMVLS

SEQ ID NO: 819911 - protein, 2022 aa, Homo sapiens
MLEAIDKNRALHAAERLQTKLRERGDVANEDKLSLLKSVLQSPLFSQILSLQTSVQQLKDQVNIATSATSNIEYAHVPHLSPAVIPTLQNESFLLSPNNGNLEALTGPGIPHINGKPACDEFDQLIKNMAQGRHVEVFELLKPPSGGLGFSVVGLRSENRGELGIFVQEIQEGSVAHRDGRLKETDQILAINGQALDQTITHQQAISILQKAKDTVQLVIARGSLPQLVSPIVSRSPSAASTISAHSNPVHWQHMETIELVNDGSGLGFGIIGGKATGVIVKTILPGGVADQHGRLCSGDHILKIGDTDLAGMSSEQVAQVLRQCGNRVKLMIARGAIEERTAPTALGITLSSSPTSTPELRVDASTQKGEESETFDVELTKNVQGLGITIAGYIGDKKLEPSGIFVKSITKSSAVEHDGRIQIGDQIIAVDGTNLQGFTNQQAVEVLRHTGQTVLLTLMRRGMKQEAELMSREDVTKDADLSPVNASIIKENYEKDEDFLSSTRNTNILPTEEEGYPLLSAEIEEIEDAQKQEAALLTKWQRIMGINYEIVVAHVSKFSENSGLGISLEATVGHHFIRSVLPEGPVGHSGKLFSGDELLEVNGITLLGENHQDVVNILKELPIEVTMVCCRRTVPPTTQSELDSLDLCDIELTEKPHVDLGEFIGSSETEDPVLAMTDAGQSTEEVQAPLAMWEAGIQHIELEKGSKGLGFSILDYQDPIDPASTVIIIRSLVPGGIAEKDGRLLPGDRLMFVNDVNLENSSLEEAVEALKGAPSGTVRIGVAKPLPLSPEEGYVSAKEDSFLYPPHSCEEAGLADKPLFRADLALVGTNDADLVDESTFESPYSPENDSIYSTQASILSLHGSSCGDGLNYGSSLPSSPPKDVIENSCDPVLDLHMSLEELYTQNLLQRQDENTPSVDISMGPASGFTINDYTPANAIEQQYECENTIVWTESHLPSEVISSAELPSVLPDSAGKGSEYLLEQSSLACNAECVMLQNVSKESFERTINIAKGNSSLGMTVSANKDGLGMIVRSIIHGGAISRDGRIAIGDCILSINEESTISVTNAQARAMLRRHSLIGPDIKITYVPAEHLEEFKISLGQQSGRVMALDIFSSYTGRDIPELPEREEGEGEESELQNTAYSNWNQPRRVELWREPSKSLGISIVGGRGMGSRLSNGEVMRGIFIKHVLEDSPAGKNGTLKPGDRIVEVDGMDLRDASHEQAVEAIRKAGNPVVFMVQSIINRPRKSPLPSLLHNLYPKYNFSSTNPFADSLQINADKAPSQSESEPEKAPLCSVPPPPPSAFAEMGSDHTQSSASKISQDVDKEDEFGYSWKNIRERYGTLTGELHMIELEKGHSGLGLSLAGNKDRSRMSVFIVGIDPNGAAGKDGRLQIADELLEINGQILYGRSHQNASSIIKCAPSKVKIIFIRNKDAVNQMAVCPGNAVEPLPSNSENLQNKETEPTVTTSDAAVDLSSFKNVQHLELPKDQGGLGIAISEEDTLSGVIIKSLTEHGVAATDGRLKVGDQILAVDDEIVVGYPIEKFISLLKTAKMTVKLTIHAENPDSQAVPSAAGAASGEKKNSSQSLMVPQSGSPEPESIRNTSRSSTPAIFASDPATCPIIPGCETTIEISKGRTGLGLSIVGGSDTLLTPQRVRLTLYRDEAPYKEEEVCDTLTIELQKKPGKGLGLSIVGKRNDTGVFVSDIVKGGIADADGRLMQGDQILMVNGEDVRNATQEAVAALLKCSLGTVTLEVGRIKAGPFHSERRPSQSSQVSEGSLSSFTFPLSGSSTSESLESSSKKNALASEIQGLRTVEMKKGPTDSLGISIAGGVGSPLGDVPIFIAMMHPTGVAAQTQKLRVGDRIVTICGTSTEGMTHTQAVNLLKNASGSIEMQVVAGGDVSVVTGHQQEPASSSLSFTGLTSSSIFQDDLGPPQCKSITLERGPDGLGFSIVGGYGSPHGDLPIYVKTVFAKGAASEDGRLKRGDQIIAVNGQSLEGVTHEEAVAILKRTKGTVTLMVLS

SEQ ID NO: 819912 - protein, 2053 aa, Homo sapiens; identical to SEQ ID NO: 819902

SEQ ID NO: 819913 - protein, 1849 aa, Homo sapiens
MLEAIDKNRALHAAERLQTKLRERGDVANEDKLSLLKSVLQSPLFSQILSLQTSVQQLKDQVNIATSATSNIEYAHVPHLSPAVIPTLQNESFLLSPNNGNLEALTGPGIPHINGKPACDEFDQLIKNMAQGRHVEVFELLKPPSGGLGFSVVGLRSENRGELGIFVQEIQEGSVAHRDGRLKETDQILAINGQALDQTITHQQAISILQKAKDTVQLVIARGSLPQLVSPIVSRSPSAASTISAHSNPVHWQHMETIELVNDGSGLGFGIIGGKATGVIVKTILPGGVADQHGRLCSGDHILKIGDTDLAGMSSEQVAQVLRQCGNRVKLMIARGAIEERTAPTALGITLSSSPTSTPELRVDASTQKGEESETFDVELTKNVQGLGITIAGYIGDKKLEPSGIFVKSITKSSAVEHDGRIQIGDQIIAVDGTNLQGFTNQQAVEVLRHTGQTVLLTLMRRGMKQEAELMSREDVTKDADLSPVNASIIKENYEKDEDFLSSTRNTNILPTEEEGYPLLSAEIEEIEDAQKQEAALLTKWQRIMGINYEIVVAHVSKFSENSGLGISLEATVGHHFIRSVLPEGPVGHSGKLFSGDELLEVNGITLLGENHQDVVNILKELPIEVTMVCCRRTVPPTTQSELDSLDLCDIELTEKPHVDLGEFIGSSETEDPVLAMTDAGQSTEEVQAPLAMWEAGIQHIELEKGSKGLGFSILDYQDPIDPASTVIIIRSLVPGGIAEKDGRLLPGDRLMFVNDVNLENSSLEEAVEALKGAPSGTVRIGVAKPLPLSPEEGYVSAKEDSFLYPPHSCEEAGLADKPLFRADLALVGTNDADLVDESTFESPYSPENDSIYSTQASILSLHGSSCGDGLNYGSSLPSSPPKDVIENSCDPVLDLHMSLEELYTQNLLQRQDENTPSVDISMGPASGFTINDYTPANAIEQQYECENTIVWTESHLPSEVISSAELPSVLPDSAGKGSEYLLEQSSLACNAECVMLQNVSKESFERTINIAKGNSSLGMTVSANKDGLGMIVRSIIHGGAISRDGRIAIGDCILSINEESTISVTNAQARAMLRRHSLIGPDIKITYVPAEHLEEFKISLGQQSGRVMALDIFSSYTGRDIPELPEREEGEGEESELQNTAYSNWNQPRRVELWREPSKSLGISIVGGRGMGSRLSNGEVMRGIFIKHVLEDSPAGKNGTLKPGDRIVEVDGMDLRDASHEQAVEAIRKAGNPVVFMVQSIINRPRKSPLPSLLHNLYPKYNFSSTNPFADSLQINADKAPSQSESEPEKAPLCSVPPPPPSAFAEMGSDHTQSSASKISQDVDKEDEFGYSWKNIRERYGTLTGELHMIELEKGHSGLGLSLAGNKDRSRMSVFIVGIDPNGAAGKDGRLQIADELLEINGQILYGRSHQNASSIIKCAPSKVKIIFIRNKDAVNQMAVCPGNAVEPLPSNSENLQNKETEPTVTTSDAAVDLSSFKNVQHLELPKDQGGLGIAISEEDTLSGVIIKSLTEHGVAATDGRLKVGDQILAVDDEIVVGYPIEKFISLLKTAKMTVKLTIHAENPDSQAVPSAAGAASGEKKNSPNTSRSSTPAIFASDPATCPIIPGCETTIEISKGRTGLGLSIVGGSDTLLGAIIIHEVYEEGAACKDGRLWAGDQILEVNGIDLRKATHDEAINVLRQTPQRVRLTLYRDEAPYKEEEVCDTLTIELQKKPGKGLGLSIVGKRNDTGVFVSDIVKGGIADADGRLMQGDQILMVNGEDVRNATQEAVAALLKCSLGTVTLEVGRIKAGPFHSERRPSQSSQVSEGSLSSFTFPLSGSSTSESLESSSKKNALASEIQGLSSRDTW

SEQ ID NO: 819914 - protein, 1671 aa, Homo sapiens
MLEAIDKNRALHAAERLQTKLRERGDVANEDKLSLLKSVLQSPLFSQILSLQTSVQQLKDQVNIATSATSNIEYAHVPHLSPAVIPTLQNESFLLSPNNGNLEALTGPGIPHINGKPACDEFDQLIKNMAQGRHVEVFELLKPPSGGLGFSVVGLRSENRGELGIFVQEIQEGSVAHRDGRLKETDQILAINGQALDQTITHQQAISILQKAKDTVQLVIARGSLPQLVSPIVSRSPSAASTISAHSNPVHWQHMETIELVNDGSGLGFGIIGGKATGVIVKTILPGGVADQHGRLCSGDHILKIGDTDLAGMSSEQVAQVLRQCGNRVKLMIARGAIEERTAPTALGITLSSSPTSTPELRVDASTQKGEESETFDVELTKNVQGLGITIAGYIGDKKLEPSGIFVKSITKSSAVEHDGRIQIGDQIIAVDGTNLQGFTNQQAVEVLRHTGQTVLLTLMRRGMKQEAELMSREDVTKDADLSPVNASIIKENYEKDEDFLSSTRNTNILPTEEEGYPLLSAEIEEIEDAQKQEAALLTKWQRIMGINYEIVVAHVSKFSENSGLGISLEATVGHHFIRSVLPEGPVGHSGKLFSGDELLEVNGITLLGENHQDVVNILKELPIEVTMVCCRRTVPPTTQSELDSLDLCDIELTEKPHVDLGEFIGSSETEDPVLAMTDAGQSTEEVQAPLAMWEAGIQHIELEKGSKGLGFSILDYQDPIDPASTVIIIRSLVPGGIAEKDGRLLPGDRLMFVNDVNLENSSLEEAVEALKGAPSGTVRIGVAKPLPLSPEEGYVSAKEDSFLYPPHSCEEAGLADKPLFRADLALVGTNDADLVDESTFESPYSPENDSIYSTQASILSLHGSSCGDGLNYGSSLPSSPPKDVIENSCDPVLDLHMSLEELYTQNLLQRQDENTPSVDISMGPASGFTINDYTPANAIEQQYECENTIVWTESHLPSEVISSAELPSVLPDSAGKGSEYLLEQSSLACNAECVMLQNVSKESFERTINIAKGNSSLGMTVSANKDGLGMIVRSIIHGGAISRDGRIAIGDCILSINEESTISVTNAQARAMLRRHSLIGPDIKITYVPAEHLEEFKISLGQQSGRVMALDIFSSYTGRDIPELPEREEGEGEESELQNTAYSNWNQPRRVELWREPSKSLGISIVGGRGMGSRLSNGEVMRGIFIKHVLEDSPAGKNGTLKPGDRIVEVDGMDLRDASHEQAVEAIRKAGNPVVFMVQSIINRPRKSPLPSLLHNLYPKYNFSSTNPFADSLQINADKAPSQSESEPEKAPLCSVPPPPPSAFAEMGSDHTQSSASKISQDVDKEDEFGYSWKNIRERYGTLTGELHMIELEKGHSGLGLSLAGNKDRSRMSVFIVGIDPNGAAGKDGRLQIADELLEINGQILYGRSHQNASSIIKCAPSKVKIIFIRNKDAVNQMAVCPGNAVEPLPSNSENLQNKETEPTVTTSDAAVDLSSFKNVQHLELPKDQGGLGIAISEEDTLSGVIIKSLTEHGVAATDGRLKVGDQILAVDDEIVVGYPIEKFISLLKTAKMTVKLTIHAENPDSQAVPSAAGAASGEKKNSSQSLMVPQSGSPEPESIRNTSRSSTPAIFASDPATCPIIPGCETTIEISKGRTGLGLSIVGGSDTLLVPLLSMKFNSSGGTSTIPDK

SEQ ID NO: 819915 - protein, 1218 aa, Homo sapiens
MLEAIDKNRALHAAERLQTKLRERGDVANEDKLSLLKSVLQSPLFSQILSLQTSVQQLKDQVNIATSATSNIEYAHVPHLSPAVIPTLQNESFLLSPNNGNLEALTGPGIPHINGKPACDEFDQLIKNMAQGRHVEVFELLKPPSGGLGFSVVGLRSENRGELGIFVQEIQEGSVAHRDGRLKETDQILAINGQALDQTITHQQAISILQKAKDTVQLVIARGSLPQLVSPIVSRSPSAASTISAHSNPVHWQHMETIELVNDGSGLGFGIIGGKATGVIVKTILPGGVADQHGRLCSGDHILKIGDTDLAGMSSEQVAQVLRQCGNRVKLMIARGAIEERTAPTALGITLSSSPTSTPELRVDASTQKGEESETFDVELTKNVQGLGITIAGYIGDKKLEPSGIFVKSITKSSAVEHDGRIQIGDQIIAVDGTNLQGFTNQQAVEVLRHTGQTVLLTLMRRGMKQEAELMSREDVTKDADLSPVNASIIKENYEKDEDFLSSTRNTNILPTEEEGYPLLSAEIEEIEDAQKQEAALLTKWQRIMGINYEIVVAHVSKFSENSGLGISLEATVGHHFIRSVLPEGPVGHSGKLFSGDELLEVNGITLLGENHQDVVNILKELPIEVTMVCCRRTVPPTTQSELDSLDLCDIELTEKPHVDLGEFIGSSETEDPVLAMTDAGQSTEEVQAPLAMWEAGIQHIELEKGSKGLGFSILDYQDPIDPASTVIIIRSLVPGGIAEKDGRLLPGDRLMFVNDVNLENSSLEEAVEALKGAPSGTVRIGVAKPLPLSPEEGYVSAKEDSFLYPPHSCEEAGLADKPLFRADLALVGTNDADLVDESTFESPYSPENDSIYSTQASILSLHGSSCGDGLNYGSSLPSSPPKDVIENSCDPVLDLHMSLEELYTQNLLQRQDENTPSVDISMGPASGFTINDYTPANAIEQQYECENTIVWTESHLPSEVISSAELPSVLPDSAGKGSEYLLEQSSLACNAECVMLQNVSKESFERTINIAKGNSSLGMTVSANKDGLGMIVRSIIHGGAISRDGRIAIGDCILSINEESTISVTNAQARAMLRRHSLIGPDIKITYVPAEHLEEFKISLGQQSGRVMALDIFSSYTGRDIPELPEREEGEGEESELQNTAYSNWNQPRRVELWREPSKSLGISIVGGRGMGSRLSNGEVMRGIFIKHVLEDSPAGKNGTLKPGDRIVEVPSSELLC

SEQ ID NO: 819916 - protein, 1155 aa, Homo sapiens
MLEAIDKNRALHAAERLQTKLRERGDVANEDKLSLLKSVLQSPLFSQILSLQTSVQQLKDQVNIATSATSNIEYAHVPHLSPAVIPTLQNESFLLSPNNGNLEALTGPGIPHINGKPACDEFDQLIKNMAQGRHVEVFELLKPPSGGLGFSVVGLRSENRGELGIFVQEIQEGSVAHRDGRLKETDQILAINGQALDQTITHQQAISILQKAKDTVQLVIARGSLPQLVSPIVSRSPSAASTISAHSNPVHWQHMETIELVNDGSGLGFGIIGGKATGVIVKTILPGGVADQHGRLCSGDHILKIGDTDLAGMSSEQVAQVLRQCGNRVKLMIARGAIEERTAPTALGITLSSSPTSTPELRVDASTQKGEESETFDVELTKNVQGLGITIAGYIGDKKLEPSGIFVKSITKSSAVEHDGRIQIGDQIIAVDGTNLQGFTNQQAVEVLRHTGQTVLLTLMRRGMKQEAELMSREDVTKDADLSPVNASIIKENYEKDEDFLSSTRNTNILPTEEEGYPLLSAEIEEIEDAQKQEAALLTKWQRIMGINYEIVVAHVSKFSENSGLGISLEATVGHHFIRSVLPEGPVGHSGKLFSGDELLEVNGITLLGENHQDVVNILKELPIEVTMVCCRRTVPPTTQSELDSLDLCDIELTEKPHVDLGEFIGSSETEDPVLAMTDAGQSTEEVQAPLAMWEAGIQHIELEKGSKGLGFSILDYQDPIDPASTVIIIRSLVPGGIAEKDGRLLPGDRLMFVNDVNLENSSLEEAVEALKGAPSGTVRIGVAKPLPLSPEEGYVSAKEDSFLYPPHSCEEAGLADKPLFRADLALVGTNDADLVDESTFESPYSPENDSIYSTQASILSLHGSSCGDGLNYGSSLPSSPPKDVIENSCDPVLDLHMSLEELYTQNLLQRQDENTPSVDISMGPASGFTINDYTPANAIEQQYECENTIVWTESHLPSEVISSAELPSVLPDSAGKGSEYLLEQSSLACNAECVMLQNVSKESFERTINIAKGNSSLGMTVSANKDGLGMIVRSIIHGGAISRDGRIAIGDCILSINEESTISVTNAQARAMLRRHSLIGPDIKITYVPAEHLEEFKISLGQQSGRVMALDIFSSYTGRDIPGSPERERRLYVRTQAHFSPGTVPGAVAPGRES

SEQ ID NO: 819917 - protein, 1686 aa, Homo sapiens
MAQISSNSGFKECPSSHPEPTRAKDVDKEEALQMEAEALAKLQKDRQVTDNQRGFELSSSTRKKAQVYNKQDYDLMVFPESDSQKRALDIDVEKLTQAELEKLLLDDSFETKKTPVLPVTPILSPSFSAQLYFRPTIQRGQWPPGLPGPSTYALPSIYPSTYSKQAAFQNGFNPRMPTFPSTEPIYLSLPGQSPYFSYPLTPATPFHPQGSLPIYRPVVSTDMAKLFDKIASTSEFLKNGKARTDLEITDSKVSNLQVSPKSEDISKFDWLDLDPLSKPKVDNVEVLDHEEEKNVSSLLAKDPWDAVLLEERSTANCHLERKVNGKSLSVATVTRSQSLNIRTTQLAKAQGHISQKDPNGTSSLPTGSSLLQEVEVQNEEMAAFCRSITKLKTKFPYTNHRTNPGYLLSPVTAQRNICGENASVKVSIDIEGFQLPVTFTCDVSSTVEIIIMQALCWVHDDLNQVDVGSYVLKVCGQEEVLQNNHCLGSHEHIQNCRKWDTEIRLQLLTFSAMCQNLARTAEDDETPVDLNKHLYQIEKPCKEAMTRHPVEELLDSYHNQVELALQIENQHRAVDQVIKAVRKICSALDGVETLAITESVKKLKRAVNLPRSKTADVTSLFGGEDTSRSSTRGSLNPENPVQVSINQLTAAIYDLLRLHANSGRSPTDCAQSSKSVKEAWTTTEQLQFTIFAAHGISSNWVSNYEKYYLICSLSHNGKDLFKPIQSKKVGTYKNFFYLIKWDELIIFPIQISQLPLESVLHLTLFGILNQSSGSSPDSNKQRKGPEALGKVSLPLCDFKRFLTCGTKLLYLWTSSHTNSVPGTVTKKGYVMERIVLQVDFPSPAFDIIYTTPQVDRSIIQQHNLETLENDIKGKLLDILHKDSSLGLSKEDKAFLWEKRYYCFKHPNCLPKILASAPNWKWVNLAKTYSLLHQWPALYPLIALELLDSKFADQEVRSLAVTWIEAISDDELTDLLPQFVQALKYEIYLNSSLVQFLLSRALGNIQIAHNLYWLLKDALHDVQFSTRYEHVLGALLSVGGKRLREELLKQTKLVQLLGGVAEKVRQASGSARQVVLQRSMERVQSFFQKNKCRLPLKPSLVAKELNIKSCSFFSSNAVPLKVTMVNADPMGEEINVMFKVGEDLRQDMLALQMIKIMDKIWLKEGLDLRMVIFKCLSTGRDRGMVELVPASDTLRKIQVEYGVTGSFKDKPLAEWLRKYNPSEEEYEKASENFIYSCAGCCVATYVLGICDRHNDNIMLRSTGHMFHIDFGKFLGHAQMFGSFKRDRAPFVLTSDMAYVINGGEKPTIRFQLFVDLCCQAYNLIRKQTNLFLNLLSLMIPSGLPELTSIQDLKYVRDALQPQTTDAEATIFFTRLIESSLGSIATKFNFFIHNLAQLRFSGLPSNDEPILSFSPKTYSFRQDGRIKEVSVFTYHKKYNPDKHYIYVVRILREGQIEPSFVFRTFDEFQELHNKLSIIFPLWKLPGFPNRMVLGRTHIKDVAAKRKIELNSYLQSLMNASTDVAECDLVCTFFHPLLRDEKAEGIARSADAGSFSPTPGQIGGAVKLSISYRNGTLFIMVMHIKDLVTEDGADPNPYVKTYLLPDNHKTSKRKTKISRKTRNPTFNEMLVYSGYSKETLRQRELQLSVLSAESLRENFFLGGVTLPLKDFNLSKETVKWYQLTAATYL

SEQ ID NO: 819918 - protein, 1686 aa, Homo sapiens; identical to SEQ ID NO: 819917

SEQ ID NO: 819919 - protein, 1686 aa, Homo sapiens; identical to SEQ ID NO: 819917

SEQ ID NO: 819920 - protein, 1668 aa, Homo sapiens
MAQISSNSGFKECPSSHPEPTRAKDVDKEEALQMEAEALAKLQKDRQVTDNQRGFELSSSTRKKAQVYNKQDYDLMVFPESDSQKRALDIDVEKLTQAELEKLLLDDSFETKKTPVLPVTPILSPSFSAQLYFRPTIQRGQWPPGLPGPSTYALPSIYPSTYSKQAAFQNGFNPRMPTFPSTEPIYLSLPGQSPYFSYPLTPATPFHPQGSLPIYRPVVSTDMAKLFDKIASTSEFLKNGKARTDLEITDSKVSNLQVSPKSEDISKFDWLDLDPLSKPKVDNVEVLDHEEEKNVSSLLAKDPWDAVLLEERSTANCHLERKVNGKSLSVATVTRSQSLNIRTTQLAKAQGHISQKDPNGTSSLPTGSSLLQEVEVQNEEMAAFCRSITKLKTKFPYTNHRTNPGYLLSPVTAQRNICGENASVKVSIDIEGFQLPVTFTCDVSSTVEIIIMQALCWVHDDLNQVDVGSYVLKVCGQEEVLQNNHCLGSHEHIQNCRKWDTEIRLQLLTFSAMCQNLARTAEDDETPVDLNKHLYQIEKPCKEAMTRHPVEELLDSYHNQVELALQIENQHRAVDQVIKAVRKICSALDGVETLAITESVKKLKRAVNLPRSKTADVTSLFGGEDTSRSSTRGSLNPENPVQVSINQLTAAIYDLLRLHANSGRSPTDCAQSSKSVKEAWTTTEQLQFTIFAAHGISSNWVSNYEKYYLICSLSHNGKDLFKPIQSKKVGTYKNFFYLIKWDELIIFPIQISQLPLESVLHLTLFGILNQSSGSSPDSNKQRKGPEALGKVSLPLCDFKRFLTCGTKLLYLWTSSHTNSVPGTVTKKGYVMERIVLQVDFPSPAFDIIYTTPQVDRSIIQQHNLETLENDIKGKLLDILHKDSSLGLSKEDKAFLWEKRYYCFKHPNCLPKILASAPNWKWVNLAKTYSLLHQWPALYPLIALELLDSKFADQEVRSLAVTWIEAISDDELTDLLPQFVQALKYEIYLNSSLVQFLLSRALGNIQIAHNLYWLLKDALHDVQFSTRYEHVLGALLSVGGKRLREELLKQTKLVQLLGGVAEKVRQASGSARQVVLQRSMERVQSFFQKNKCRLPLKPSLVAKELNIKSCSFFSSNAVPLKVTMVNADPMGEEINVMFKVGEDLRQDMLALQMIKIMDKIWLKEGLDLRMVIFKCLSTGRDRGMVELVPASDTLRKIQVEYGVTGSFKDKPLAEWLRKYNPSEEEYEKASENFIYSCAGCCVATYVLGICDRHNDNIMLRSTGHMFHIDFGKFLGHAQMFGSFKRDRAPFVLTSDMAYVINGGEKPTIRFQLFVDLCCQAYNLIRKQTNLFLNLLSLMIPSGLPELTSIQDLKYVRDALQPQTTDAEATIFFTRLIESSLGSIATKFNFFIHNLAQLRFSGLPSNDEPILSFSPKTYSFRQDGRIKEVSVFTYHKKYNPDKHYIYVVRILREGQIEPSFVFRTFDEFQELHNKLSIIFPLWKLPGFPNRMVLGRTHIKDVAAKRKIELNSYLQSLMNASTDVAECDLVCTFFHPLLRDEKAEGIARSADAGSFSPTPGQIGGAVKLSISYRNGTLFIMVMHIKDLVTEDGADPNPYVKTYLLPDNHKTSKRKTKISRKTLRQRELQLSVLSAESLRENFFLGGVTLPLKDFNLSKETVKWYQLTAATYL

SEQ ID NO: 819921 - protein, 1174 aa, Homo sapiens
MCQNLARTAEDDETPVDLNKHLYQIEKPCKEAMTRHPVEELLDSYHNQVELALQIENQHRAVDQVIKAVRKICSALDGVETLAITESVKKLKRAVNLPRSKTADVTSLFGGEDTSRSSTRGSLNPENPVQVSINQLTAAIYDLLRLHANSGRSPTDCAQSSKSVKEAWTTTEQLQFTIFAAHGISSNWVSNYEKYYLICSLSHNGKDLFKPIQSKKVGTYKNFFYLIKWDELIIFPIQISQLPLESVLHLTLFGILNQSSGSSPDSNKQRKGPEALGKVSLPLCDFKRFLTCGTKLLYLWTSSHTNSVPGTVTKKGYVMERIVLQVDFPSPAFDIIYTTPQVDRSIIQQHNLETLENDIKGKLLDILHKDSSLGLSKEDKAFLWEKRYYCFKHPNCLPKILASAPNWKWVNLAKTYSLLHQWPALYPLIALELLDSKFADQEVRSLAVTWIEAISDDELTDLLPQFVQALKYEIYLNSSLVQFLLSRALGNIQIAHNLYWLLKDALHDVQFSTRYEHVLGALLSVGGKRLREELLKQTKLVQLLGGVAEKVRQASGSARQVVLQRSMERVQSFFQKNKCRLPLKPSLVAKELNIKSCSFFSSNAVPLKVTMVNADPMGEEINVMFKVGEDLRQDMLALQMIKIMDKIWLKEGLDLRMVIFKCLSTGRDRGMVELVPASDTLRKIQVEYGVTGSFKDKPLAEWLRKYNPSEEEYEKASENFIYSCAGCCVATYVLGICDRHNDNIMLRSTGHMFHIDFGKFLGHAQMFGSFKRDRAPFVLTSDMAYVINGGEKPTIRFQLFVDLCCQAYNLIRKQTNLFLNLLSLMIPSGLPELTSIQDLKYVRDALQPQTTDAEATIFFTRLIESSLGSIATKFNFFIHNLAQLRFSGLPSNDEPILSFSPKTYSFRQDGRIKEVSVFTYHKKYNPDKHYIYVVRILREGQIEPSFVFRTFDEFQELHNKLSIIFPLWKLPGFPNRMVLGRTHIKDVAAKRKIELNSYLQSLMNASTDVAECDLVCTFFHPLLRDEKAEGIARSADAGSFSPTPGQIGGAVKLSISYRNGTLFIMVMHIKDLVTEDGADPNPYVKTYLLPDNHKTSKRKTKISRKTRNPTFNEMLVYSGYSKETLRQRELQLSVLSAESLRENFFLGGVTLPLKDFNLSKETVKWYQLTAATYL

SEQ ID NO: 819922 - protein, 587 aa, Homo sapiens
MLNMWYLQSCSFFSSNAVPLKVTMVNADPMGEEINVMFKVGEDLRQDMLALQMIKIMDKIWLKEGLDLRMVIFKCLSTGRDRGMVELVPASDTLRKIQVEYGVTGSFKDKPLAEWLRKYNPSEEEYEKASENFIYSCAGCCVATYVLGICDRHNDNIMLRSTGHMFHIDFGKFLGHAQMFGSFKRDRAPFVLTSDMAYVINGGEKPTIRFQLFVDLCCQAYNLIRKQTNLFLNLLSLMIPSGLPELTSIQDLKYVRDALQPQTTDAEATIFFTRLIESSLGSIATKFNFFIHNLAQLRFSGLPSNDEPILSFSPKTYSFRQDGRIKEVSVFTYHKKYNPDKHYIYVVRILREGQIEPSFVFRTFDEFQELHNKLSIIFPLWKLPGFPNRMVLGRTHIKDVAAKRKIELNSYLQSLMNASTDVAECDLVCTFFHPLLRDEKAEGIARSADAGSFSPTPGQIGGAVKLSISYRNGTLFIMVMHIKDLVTEDGADPNPYVKTYLLPDNHKTSKRKTKISRKTRNPTFNEMLVYSGYSKETLRQRELQLSVLSAESLRENFFLGGVTLPLKDFNLSKETVKWYQLTAATYL

SEQ ID NO: 819923 - protein, 1393 aa, Homo sapiens
MAQISSNSGFKECPSSHPEPTRAKDVDKEEALQMEAEALAKLQKDRQVTDNQRGFELSSSTRKKAQVYNKQDYDLMVFPESDSQKRALDIDVEKLTQAELEKLLLDDSFETKKTPVLPVTPILSPSFSAQLYFRPTIQRGQWPPGLPGPSTYALPSIYPSTYSKQAAFQNGFNPRMPTFPSTEPIYLSLPGQSPYFSYPLTPATPFHPQGSLPIYRPVVSTDMAKLFDKIASTSEFLKNGKARTDLEITDSKVSNLQVSPKSEDISKFDWLDLDPLSKPKVDNVEVLDHEEEKNVSSLLAKDPWDAVLLEERSTANCHLERKVNGKSLSVATVTRSQSLNIRTTQLAKAQGHISQKDPNGTSSLPTGSSLLQEVEVQNEEMAAFCRSITKLKTKFPYTNHRTNPGYLLSPVTAQRNICGENASVKVSIDIEGFQLPVTFTCDVSSTVEIIIMQALCWVHDDLNQVDVGSYVLKVCGQEEVLQNNHCLGSHEHIQNCRKWDTEIRLQLLTFSAMCQNLARTAEDDETPVDLNKHLYQIEKPCKEAMTRHPVEELLDSYHNQVELALQIENQHRAVDQVIKAVRKICSALDGVETLAITESVKKLKRAVNLPRSKTADVTSLFGGEDTSRSSTRGSLNPENPVQVSINQLTAAIYDLLRLHANSGRSPTDCAQSSKSVKEAWTTTEQLQFTIFAAHGISSNWVSNYEKYYLICSLSHNGKDLFKPIQSKKVGTYKNFFYLIKWDELIIFPIQISQLPLESVLHLTLFGILNQSSGSSPDSNKQRKGPEALGKVSLPLCDFKRFLTCGTKLLYLWTSSHTNSVPGTVTKKGYVMERIVLQVDFPSPAFDIIYTTPQVDRSIIQQHNLETLENDIKGKLLDILHKDSSLGLSKEDKAFLWEKRYYCFKHPNCLPKILASAPNWKWVNLAKTYSLLHQWPALYPLIALELLDSKFADQEVRSLAVTWIEAISDDELTDLLPQFVQALKYEIYLNSSLVQFLLSRALGNIQIAHNLYWLLKDALHDVQFSTRYEHVLGALLSVGGKRLREELLKQTKLVQLLGGVAEKVRQASGSARQVVLQRSMERVQSFFQKNKCRLPLKPSLVAKELNIKSCSFFSSNAVPLKVTMVNADPMGEEINVMFKVGEDLRQDMLALQMIKIMDKIWLKEGLDLRMVIFKCLSTGRDRGMVELVPASDTLRKIQVEYGVTGSFKDKPLAEWLRKYNPSEEEYEKASENFIYSCAGCCVATYVLGICDRHNDNIMLRSTGHMFHIDFGKFLGHAQMFGSFKRDRAPFVLTSDMAYVINGGEKPTIRFQLFVDLCCQAYNLIRKQTNLFLNLLSLMIPSGLPELTSIQDLKYVRDALQPQTTDAEATIFFTRLIESSLGSIATKFPLKPSGT

SEQ ID NO: 819924 - protein, 483 aa, Homo sapiens
MAQISSNSGFKECPSSHPEPTRAKDVDKEEALQMEAEALAKLQKDRQVTDNQRGFELSSSTRKKAQVYNKQDYDLMVFPESDSQKRALDIDVEKLTQAELEKLLLDDSFETKKTPVLPVTPILSPSFSAQLYFRPTIQRGQWPPGLPGPSTYALPSIYPSTYSKQAAFQNGFNPRMPTFPSTEPIYLSLPGQSPYFSYPLTPATPFHPQGSLPIYRPVVSTDMAKLFDKIASTSEFLKNGKARTDLEITDSKVSNLQVSPKSEDISKFDWLDLDPLSKPKVDNVEVLDHEEEKNVSSLLAKDPWDAVLLEERSTANCHLERKVNGKSLSVATVTRSQSLNIRTTQLAKAQGHISQKDPNGTSSLPTGSSLLQEVEVQNEEMAAFCRSITKLKTKFPYTNHRTNPGYLLSPVTAQRNICGENASVKVSIDIEGFQLPVTFTCDVSSTVEIIIMQALCWVHDDLNQVDVGSYVLKVCGQEEVLQK

SEQ ID NO: 819925 - protein, 556 aa, Homo sapiens
AIKDHAPQSTLSSSATQSCNLSLAMAPSSPRPALPALLVLLGALFPGPGNAQTSVSPSKVILPRGGSVLVTCSTSCDQPKLLGIETPLPKKELLLPGNNRKVYELSNVQEDSQPMCYSNCPDGQSTAKTFLTVYWTPERVELAPLPSWQPVGKNLTLRCQVEGGAPRANLTVVLLRGEKELKREPAVGEPAEVTTTVLVRRDHHGANFSCRTELDLRPQGLELFENTSAPYQLQTFVLPATPPQLVSPRVLEVDTQGTVVCSLDGLFPVSEAQVHLALGDQRLNPTVTYGNDSFSAKASVSVTAEDEGTQRLTCAVILGNQSQETLQTVTIYSFPAPNVILTKPEVSEGTEVTVKCEAHPRAKVTLNGVPAQPLGPRAQLLLKATPEDNGRSFSCSATLEVAGQLIHKNQTRELRVLYGPRLDERDCPGNWTWPENSQQTPMCQAWGNPLPELKCLKDGTFPLPIGESVTVTRDLEGTYLCRARSTQGEVTRKVTVNVLSPRYEIVIITVVAAAVIMGTAGLSTYLYNRQRKIKKYRLQQAQKGTPMKPNTQATPP

SEQ ID NO: 819926 - protein, 136 aa, Homo sapiens
AIKDHAPQSTLSSSATQSCNLSLAMAPSSPRPALPALLVLLGALFPGPGNAQTSVSPSKVILPRGGSVLVTCSTSCDQPKLLGIETPLPKKELLLPGNNRKVYELSNVQEDSQPMCYSNCPDGQSTAKTFLTVYCE

SEQ ID NO: 819927 - protein, 556 aa, Homo sapiens; identical to SEQ ID NO: 819925

SEQ ID NO: 819928 - protein, 556 aa, Homo sapiens; identical to SEQ ID NO: 819925

SEQ ID NO: 819929 - protein, 374 aa, Homo sapiens
AIKDHAPQSTLSSSATQSCNLSLAMAPSSPRPALPALLVLLGALFPGPGNAQTSVSPSKVILPRGGSVLVTCSTSCDQPKLLGIETPLPKKELLLPGNNRKVYELSNVQEDSQPMCYSNCPDGQSTAKTFLTVYWTPERVELAPLPSWQPVGKNLTLRCQVEGGAPRANLTVVLLRGEKELKREPAVGEPAEVTTTVLVRRDHHGANFSCRTELDLRPQGLELFENTSAPYQLQTFVLPATPPQLVSPRVLEVDTQGTVVCSLDGLFPVSEAQVHLALGDQRLNPTVTYGNDSFSAKASVSVTAEDEGTQRLTCAVILGNQSQETLQTVTIYSFPAPNVILTKPEVSEGTEVTVKCEAHPRAKVTLNGVPAHSC

SEQ ID NO: 819930 - protein, 556 aa, Homo sapiens; identical to SEQ ID NO: 819925

SEQ ID NO: 819931 - protein, 504 aa, Homo sapiens
AIKDHAPQSTLSSSATQSCNLSLAMAPSSPRPALPALLVLLGALFPGPGNAQTSVSPSKVILPRGGSVLVTCSTSCDQPKLLGIETPLPKKELLLPGNNRKVYELSNVQEDSQPMCYSNCPDGQSTAKTFLTVYWTPERVELAPLPSWQPVGKNLTLRCQVEGGAPRANLTVVLLRGEKELKREPAVGEPAEVTTTVLVRRDHHGANFSCRTELDLRPQGLELFENTSAPYQLQTFVLPATPPQLVSPRVLEVDTQGTVVCSLDGLFPVSEAQVHLALGDQRLNPTVTYGNDSFSAKASVSVTAEDEGTQRLTCAVILGNQSQETLQTVTIYSFPAPNVILTKPEVSEGTEVTVKCEAHPRAKVTLNGVPAQPLGPRAQLLLKATPEDNGRSFSCSATLEVAGQLIHKNQTRELRVLYGPRLDERDCPGNWTWPENSQQTPMCQAWGNPLPELKCLKDGTFPLPIGESVTVTRDLEGTYLCRARSTQGEVTREPPGMRLSSSLW

SEQ ID NO: 819932 - protein, 442 aa, Homo sapiens
MCYSNCPDGQSTAKTFLTVYWTPERVELAPLPSWQPVGKNLTLRCQVEGGAPRANLTVVLLRGEKELKREPAVGEPAEVTTTVLVRRDHHGANFSCRTELDLRPQGLELFENTSAPYQLQTFVLPATPPQLVSPRVLEVDTQGTVVCSLDGLFPVSEAQVHLALGDQRLNPTVTYGNDSFSAKASVSVTAEDEGTQRLTCAVILGNQSQETLQTVTIYSFPAPNVILTKPEVSEGTEVTVKCEAHPRAKVTLNGVPAQPLGPRAQLLLKATPEDNGRSFSCSATLEVAGQLIHKNQTRELRVLYGPRLDERDCPGNWTWPENSQQTPMCQAWGNPLPELKCLKDGTFPLPIGESVTVTRDLEGTYLCRARSTQGEVTRKVTVNVLSPRYEIVIITVVAAAVIMGTAGLSTYLYNRQRKIKKYRLQQAQKGTPMKPNTQATPP

SEQ ID NO: 819933 - protein, 529 aa, Homo sapiens
MVQDPRQADRLWSARALFPGPGNAQTSVSPSKVILPRGGSVLVTCSTSCDQPKLLGIETPLPKKELLLPGNNRKVYELSNVQEDSQPMCYSNCPDGQSTAKTFLTVYWTPERVELAPLPSWQPVGKNLTLRCQVEGGAPRANLTVVLLRGEKELKREPAVGEPAEVTTTVLVRRDHHGANFSCRTELDLRPQGLELFENTSAPYQLQTFVLPATPPQLVSPRVLEVDTQGTVVCSLDGLFPVSEAQVHLALGDQRLNPTVTYGNDSFSAKASVSVTAEDEGTQRLTCAVILGNQSQETLQTVTIYSFPAPNVILTKPEVSEGTEVTVKCEAHPRAKVTLNGVPAQPLGPRAQLLLKATPEDNGRSFSCSATLEVAGQLIHKNQTRELRVLYGPRLDERDCPGNWTWPENSQQTPMCQAWGNPLPELKCLKDGTFPLPIGESVTVTRDLEGTYLCRARSTQGEVTRKVTVNVLSPRYEIVIITVVAAAVIMGTAGLSTYLYNRQRKIKKYRLQQAQKGTPMKPNTQATPP

SEQ ID NO: 819934 - protein, 503 aa, Homo sapiens
YKGSRAPVDAELLCYSELQPQPRYGSQQPPARAARTPGPARGSVPRTWQCPDICVPLKSHPAPGRLRADGQSTAKTFLTVYWTPERVELAPLPSWQPVGKNLTLRCQVEGGAPRANLTVVLLRGEKELKREPAVGEPAEVTTTVLVRRDHHGANFSCRTELDLRPQGLELFENTSAPYQLQTFVLPATPPQLVSPRVLEVDTQGTVVCSLDGLFPVSEAQVHLALGDQRLNPTVTYGNDSFSAKASVSVTAEDEGTQRLTCAVILGNQSQETLQTVTIYSFPAPNVILTKPEVSEGTEVTVKCEAHPRAKVTLNGVPAQPLGPRAQLLLKATPEDNGRSFSCSATLEVAGQLIHKNQTRELRVLYGPRLDERDCPGNWTWPENSQQTPMCQAWGNPLPELKCLKDGTFPLPIGESVTVTRDLEGTYLCRARSTQGEVTRKVTVNVLSPRYEIVIITVVAAAVIMGTAGLSTYLYNRQRKIKKYRLQQAQKGTPMKPNTQATPP

SEQ ID NO: 819935 - protein, 86 aa, Homo sapiens
TVKCEAHPRAKVTLNGVPAQPLGPRAQLLLKATPEDNGRSFSCSATLEVAGQLIHKNQTRELRVLCEWGCWSMAPIPQGPISLKVP

SEQ ID NO: 819936 - protein, 166 aa, Homo sapiens
MSEPQPRGAERDLYRDTWVRYLGYANEVGEAFRSLVPAAVVWLSYGVASSYVLADAIDKGKKAGEVPSPEAGRSARVTVAVVDTFVWQALASVAIPGFTINRVCAASLYVLGTATRWPLAVRKWTTTALGLLTIPIIIHPIDRSVDFLLDSSLRKLYPTVGKPSSS

SEQ ID NO: 819937 - protein, 217 aa, Homo sapiens
HNGPRYEAGFPDLSFGAGLSAGPGRADPSAGGGDCSGASTGCSGRGRGGRVMSEPQPRGAERDLYRDTWVRYLGYANEVGEAFRSLVPAAVVWLSYGVASSYVLADAIDKGKKAGEVPSPEAGRSARVTVAVVDTFVWQALASVAIPGFTINRVCAASLYVLGTATRWPLAVRKWTTTALGLLTIPIIIHPIDRSVDFLLDSSLRKLYPTVGKPSSS

SEQ ID NO: 819938 - protein, 166 aa, Homo sapiens; identical to SEQ ID NO: 819936

SEQ ID NO: 819939 - protein, 166 aa, Homo sapiens; identical to SEQ ID NO: 819936

SEQ ID NO: 819940 - protein, 232 aa, Homo sapiens
TFVLWYEALVCVTSVSFVAAVFLCGSRLGVRTAVCQGFGLSVRCDATLPGVFVRQRVPLRGVKKSVLHEPQPRGAERDLYRDTWVRYLGYANEVGEAFRSLVPAAVVWLSYGVASSYVLADAIDKGKKAGEVPSPEAGRSARVTVAVVDTFVWQALASVAIPGFTINRVCAASLYVLGTATRWPLAVRKWTTTALGLLTIPIIIHPIDRSVDFLLDSSLRKLYPTVGKPSSS

SEQ ID NO: 819941 - protein, 166 aa, Homo sapiens; identical to SEQ ID NO: 819936

SEQ ID NO: 819942 - protein, 166 aa, Homo sapiens; identical to SEQ ID NO: 819936

SEQ ID NO: 819943 - protein, 143 aa, Homo sapiens
MSEPQPRGAERDLYRDTWVRYLGYANEVGEAFRSLVPAAVVWLSYGVASSYVLADAIDKGKKAGEALASVAIPGFTINRVCAASLYVLGTATRWPLAVRKWTTTALGLLTIPIIIHPIDRSVDFLLDSSLRKLYPTVGKPSSS

SEQ ID NO: 819944 - protein, 147 aa, Homo sapiens
MWQTVPHSWVRTSPLATCPSRSSLVPLVAGFSASAPAGLSVSAPTRVPSPEAGRSARVTVAVVDTFVWQALASVAIPGFTINRVCAASLYVLGTATRWPLAVRKWTTTALGLLTIPIIIHPIDRSVDFLLDSSLRKLYPTVGKPSSS

SEQ ID NO: 819945 - protein, 135 aa, Homo sapiens
MSEPQPRGAERDLYRDTWVRYLGYANEVGEAFRSLVPAAVVWLSYGVASSYVLADAIDKGKKAGEVGGFPPGLQPAQALPNSGEAQLLLIILWYLACASASCFMSTSYSCQGMWTPGSLVSKDPGTWVGLSWTEA

SEQ ID NO: 819946 - protein, 199 aa, Homo sapiens
MSEPQPRGAERDLYRDTWVRYLGYANEVGEAFRSLVPAAVVWLSYGVASSYVLADAIDKGKKAGEVPSPEAGRSARVTVAVVDTFVWQALASVAIPGFTINRVCAASLYVLGTATRWPLAVRKWTTTALGLLTIPSRGKDFPREPLSVTWSESGQGVTARNFPPSQDASGDLYTTSSQLTLPATQCLAGKSVTCHVKHY

SEQ ID NO: 819947 - protein, 77 aa, Homo sapiens
TLGLGSRRDGTREKGVEETPVRARTFQVKRGHISVPHFLTQTSFHCCQQQSPNIAAEEKNCIAFCLLQASSTVTGGT

SEQ ID NO: 819948 - protein, 630 aa, Homo sapiens
GTRRLSAPAAAMAAAPPLSKAEYLKRYLSGADAGVDRGSESGRKRRKKRPKPGGAGGKGMRIVDDDVSWTAISTTKLEKEEEEDDGDLPVVAEFVDERPEEVKQMEAFRSSAKWKLLGGHNEDLPSNRHFRHDTPDSSPRRVRHGTPDPSPRKDRHDTPDPSPRRARHDTPDPSPLRGARHDSDTSPPRRIRHDSSDTSPPRRARHDSPDPSPPRRPQHNSSGASPRRVRHDSPDPSPPRRARHGSSDISSPRRVHNNSPDTSRRTLGSSDTQQLRRARHDSPDLAPNVTYSLPRTKSGKAPERASSKTSPHWKESGASHLSFPKNSKYEYDPDISPPRKKQAKSHFGDKKQLDSKGDCQKATDSDLSSPRHKQSPGHQDSDSDLSPPRNRPRHRSSDSDLSPPRRRQRTKSSDSDLSPPRRSQPPGKKAAHMYSGAKTGLVLTDIQREQQELKEQDQETMAFEAEFQYAETVFRDKSGRKRNLKLERLEQRRKAEKDSERDELYAQWGKGLAQSRQQQQNVEDAMKEMQKPLARYIDDEDLDRMLREQEREGDPMANFIKKNKAKENKNKKVRPRYSGPAPPPNRFNIWPGYRWDGVDRSNGFEQKRFARLASKKAVEELAYKWSVEDM

SEQ ID NO: 819949 - protein, 449 aa, Homo sapiens
MVPQIHLLGRTVMTPRIHLLGGARHDSPDPSPPRRPQHNSSGASPRRVRHDSPDPSPPRRARHGSSDISSPRRVHNNSPDTSRRTLGSSDTQQLRRARHDSPDLAPNVTYSLPRTKSGKAPERASSKTSPHWKESGASHLSFPKNSKYEYDPDISPPRKKQAKSHFGDKKQLDSKGDCQKATDSDLSSPRHKQSPGHQDSDSDLSPPRNRPRHRSSDSDLSPPRRRQRTKSSDSDLSPPRRSQPPGKKAAHMYSGAKTGLVLTDIQREQQELKEQDQETMAFEAEFQYAETVFRDKSGRKRNLKLERLEQRRKAEKDSERDELYAQWGKGLAQSRQQQQNVEDAMKEMQKPLARYIDDEDLDRMLREQEREGDPMANFIKKNKAKENKNKKVRPRYSGPAPPPNRFNIWPGYRWDGVDRSNGFEQKRFARLASKKAVEELAYKWSVEDM

SEQ ID NO: 819950 - protein, 215 aa, Homo sapiens
MNDQGEIYSTLRFLQSPSESQNRLRPDDTQRPGKTDDKEFSVPWHLIAVTLGILCLLLLMIVTVLVTNIFQCIQEKHQRQEILRNCSEKYIMQNDNYLKEQILTNKTLKYDVLKNSFQQKKELDSRLIQKNRCHRENEIVFKVLQNTGKFSEDHGSCCGVNCYYFTMQKKDWKGCKQTCQHCRSSLLKIDDKDELVFYIHFYSLGLCFSMLDLRY

SEQ ID NO: 819951 - protein, 238 aa, Homo sapiens
MLCCMRRTKQVEKNDDDQKIEQDGIKPEDKAHKAATKIQASFRGHITRKKLKGEKKDDVQAAEAEANKKDEAPVADGVEKKGEGTTTAEAAPATGSKPDEPGKAGETPSEEKKGEGDAATEQAAPQAPASSEEKAGSAETESATKASTDNSPSSKAEDAPAKEEPKQADVPAAVTAAAATTPAAEDAAAKATAQPPTETGESSQAEENIEAVDETKPKESARQDEGKEEEPEADQEHA

SEQ ID NO: 819952 - protein, 238 aa, Homo sapiens; identical to SEQ ID NO: 819951

SEQ ID NO: 819953 - protein, 238 aa, Homo sapiens; identical to SEQ ID NO: 819951

SEQ ID NO: 819954 - protein, 238 aa, Homo sapiens; identical to SEQ ID NO: 819951

SEQ ID NO: 819955 - protein, 288 aa, Homo sapiens
DSEDPRATARSGVEKKGEGTTTSEAVERGGIRKREKERREGRKKARDETTMLCCMRRTKQVEKNDDDQKIEQDGIKPEDKAHKAATKIQASFRGHITRKKLKGEKKDDVQAAEAEANKKDEAPVADGVEKKGEGTTTAEAAPATGSKPDEPGKAGETPSEEKKGEGDAATEQAAPQAPASSEEKAGSAETESATKASTDNSPSSKAEDAPAKEEPKQADVPAAVTAAAATTPAAEDAAAKATAQPPTETGESSQAEENIEAVDETKPKESARQDEGKEEEPEADQEHA

SEQ ID NO: 819956 - protein, 303 aa, Homo sapiens
MISWCAAFLSPSEKRSIRVGGTGFSSEMNPVPQMEMQKSPVFCALTLGAVDRSCSYSAILAPPDIRCFTIKYDIAVEKNDDDQKIEQDGIKPEDKAHKAATKIQASFRGHITRKKLKGEKKDDVQAAEAEANKKDEAPVADGVEKKGEGTTTAEAAPATGSKPDEPGKAGETPSEEKKGEGDAATEQAAPQAPASSEEKAGSAETESATKASTDNSPSSKAEDAPAKEEPKQADVPAAVTAAAATTPAAEDAAAKATAQPPTETGESSQAEENIEAVDETKPKESARQDEGKEEEPEADQEHA

SEQ ID NO: 819957 - protein, 274 aa, Homo sapiens
MTKSCSELCHPALHFLPCLGGLRKNLQRAVRPSPYSLGFLTFWISRVEKNDDDQKIEQDGIKPEDKAHKAATKIQASFRGHITRKKLKGEKKDDVQAAEAEANKKDEAPVADGVEKKGEGTTTAEAAPATGSKPDEPGKAGETPSEEKKGEGDAATEQAAPQAPASSEEKAGSAETESATKASTDNSPSSKAEDAPAKEEPKQADVPAAVTAAAATTPAAEDAAAKATAQPPTETGESSQAEENIEAVDETKPKESARQDEGKEEEPEADQEHA

SEQ ID NO: 819958 - protein, 404 aa, Homo sapiens
MVRGLGGRLSHLRQSSDPMLSEFKNLDITKKKLVHEGPLTWRVTKDKAVEVHVLLLDDLLLLLQRQDERLLLKSHSRTLTPTPDGKTMLRPVLRLTSAMTREVATDHKAFYVLFTWDQEAQIYELVAQTVSERKNWCALITETAGSLKVPAPASRPKPRPSPSSTREPLLSSSENGNGGRETSPADARTERILSDLLPFCRPGPEGQLAATALRKVLSLKQLLFPAEEDNGAGPPRDGDGVPGGGPLSPARTQEIQENLLSLEETMKQLESWRRNFAAVTLLCQLGGTLSQRCGLEVPPGGRLPKGRLRGMPVVPPPPPQCRGISPPGRRREQVVPRLGAPGVLSATNEENTEHTWEERHRVREPAPIVVGPPPPPVIGGWFEKLAIVERQAGGRHMFICSHWY

SEQ ID NO: 819959 - protein, 135 aa, Homo sapiens
  misc_feature (6)..(6): Xaa can be any naturally occurring amino acid
GKVETXMDTVVGTQRGRGRKGSSIRNKGAPTRKAFCKKERNGGEDVRDHPHPHSCRSISHPEGLRRGSCGPRLGGAQLGLLAPHEPRPSLPPALCLGDSGLHSGGHHGDPGHLSIACGGHPSTPTPKCLRSVFIP

SEQ ID NO: 819960 - protein, 949 aa, Homo sapiens
PEPGSGSRDPGPGIAEPDLGRPAGHLRADTSPAEPREMEDFARGAASPGPSRPGLVPVSIIGAEDEDFENELETNSEEQNSQFQSLEQVKRRPAHLMALLQHVALQFEPGPLLCCLHADMLGSLGPKEAKKAFLDFYHSFLEKTAVLRVPVPPNVAFELDRTRADLISEDVQRRFVQEVVQSQQVAVGRQLEDFRSKRLMGMTPWEQELAQLEAWVGRDRASYEARERHVAERLLMHLEEMQHTISTDEEKSAAVVNAIGLYMRHLGVRTKSGDKKSGRNFFRKKVMGNRRSDEPAKTKKGLSSILDAARWNRGEPQVPDFRHLKAEVDAEKPGATDRKGGVGMPSRDRNIGAPGQDTPGVSLHPLSLDSPDREPGADAPLELGDSSPQGPMSLESLAPPESTDEGAETESPEPGDEGEPGRSGLELEPEEPPGWRELVPPDTLHSLPKSQVKRQEVISELLVTEAAHVRMLRVLHDLFFQPMAECLFFPLEELQNIFPSLDELIEVHSLFLDRLMKRRQESGYLIEEIGDVLLARFDGAEGSWFQKISSRFCSRQSFALEQLKAKQRKDPRFCAFVQEAESRPRCRRLQLKDMIPTEMQRLTKYPLLLQSIGQNTEEPTEREKVELAAECCREILHHVNQAVRDMEDLLRLKDYQRRLDLSHLRQSSDPMLSEFKNLDITKKKLVHEGPLTWRVTKDKAVEVHVLLLDDLLLLLQRQDERLLLKSHSRTLTPTPDGKTMLRPVLRLTSAMTREVATDHKAFYVLFTWDQEAQIYELVAQTVSERKNWCALITETAGSLKVPAPASRPKPRPSPSSTREPLLSSSENGNGGRETSPADARTERILSDLLPFCRPGPEGQLAATALRKVLSLKQLLFPAEEDNGAGPPRDGDGVPGGGPLSPARTQEIQENLLSLEETMKQLEELEEEFCRLRPLLSQLGGNSVPQPGCT

SEQ ID NO: 819961 - protein, 949 aa, Homo sapiens; identical to SEQ ID NO: 819960

SEQ ID NO: 819962 - protein, 1009 aa, Homo sapiens
PEPGSGSRDPGPGIAEPDLGRPAGHLRADTSPAEPREMEDFARGAASPGPSRPGLVPVSIIGAEDEDFENELETNSEEQNSQFQSLEQVKRRPAHLMALLQHVALQFEPGPLLCCLHADMLGSLGPKEAKKAFLDFYHSFLEKTAVLRVPVPPNVAFELDRTRADLISEDVQRRFVQEVVQSQQVAVGRQLEDFRSKRLMGMTPWEQELAQLEAWVGRDRASYEARERHVAERLLMHLEEMQHTISTDEEKSAAVVNAIGLYMRHLGVRTKSGDKKSGRNFFRKKVMGNRRSDEPAKTKKGLSSILDAARWNRGEPQVPDFRHLKAEVDAEKPGATDRKGGVGMPSRDRNIGAPGQDTPGVSLHPLSLDSPDREPGADAPLELGDSSPQGPMSLESLAPPESTDEGAETESSGSRLSGRLGRSESLRVSDRRRPSRGSLGAKGRGGGRSRSDVDMDPSSATAVLGPARRATPEPGDEGEPGRSGLELEPEEPPGWRELVPPDTLHSLPKSQVKRQEVISELLVTEAAHVRMLRVLHDLFFQPMAECLFFPLEELQNIFPSLDELIEVHSLFLDRLMKRRQESGYLIEEIGDVLLARFDGAEGSWFQKISSRFCSRQSFALEQLKAKQRKDPRFCAFVQEAESRPRCRRLQLKDMIPTEMQRLTKYPLLLQSIGQNTEEPTEREKVELAAECCREILHHVNQAVRDMEDLLRLKDYQRRLDLSHLRQSSDPMLSEFKNLDITKKKLVHEGPLTWRVTKDKAVEVHVLLLDDLLLLLQRQDERLLLKSHSRTLTPTPDGKTMLRPVLRLTSAMTREVATDHKAFYVLFTWDQEAQIYELVAQTVSERKNWCALITETAGSLKVPAPASRPKPRPSPSSTREPLLSSSENGNGGRETSPADARTERILSDLLPFCRPGPEGQLAATALRKVLSLKQLLFPAEEDNGAGPPRDGDGVPGGGPLSPARTQEIQENLLSLEETMKQLEELEEEFCRLRPLLSQLGGNSVPQPGCT

SEQ ID NO: 819963 - protein, 916 aa, Homo sapiens
PEPGSGSRDPGPGIAEPDLGRPAGHLRADTSPAEPREMEDFARGAASPGPSRPGLVPVSIIGAEDEDFENELETNSEEQNSQFQSLEQVKRRPAHLMALLQHVALQFEPGPLVLRVPVPPNVAFELDRTRADLISEDVQRRFVQEVVQSQQVAVGRQLEDFRSKRLMGMTPWEQELAQLEAWVGRDRASYEARERHVAERLLMHLEEMQHTISTDEEKSAAVVNAIGLYMRHLGVRTKSGDKKSGRNFFRKKVMGNRRSDEPAKTKKGLSSILDAARWNRGEPQVPDFRHLKAEVDAEKPGATDRKGGVGMPSRDRNIGAPGQDTPGVSLHPLSLDSPDREPGADAPLELGDSSPQGPMSLESLAPPESTDEGAETESPEPGDEGEPGRSGLELEPEEPPGWRELVPPDTLHSLPKSQVKRQEVISELLVTEAAHVRMLRVLHDLFFQPMAECLFFPLEELQNIFPSLDELIEVHSLFLDRLMKRRQESGYLIEEIGDVLLARFDGAEGSWFQKISSRFCSRQSFALEQLKAKQRKDPRFCAFVQEAESRPRCRRLQLKDMIPTEMQRLTKYPLLLQSIGQNTEEPTEREKVELAAECCREILHHVNQAVRDMEDLLRLKDYQRRLDLSHLRQSSDPMLSEFKNLDITKKKLVHEGPLTWRVTKDKAVEVHVLLLDDLLLLLQRQDERLLLKSHSRTLTPTPDGKTMLRPVLRLTSAMTREVATDHKAFYVLFTWDQEAQIYELVAQTVSERKNWCALITETAGSLKVPAPASRPKPRPSPSSTREPLLSSSENGNGGRETSPADARTERILSDLLPFCRPGPEGQLAATALRKVLSLKQLLFPAEEDNGAGPPRDGDGVPGGGPLSPARTQEIQENLLSLEETMKQLEELEEEFCRLRPLLSQLGGNSVPQPGCT

SEQ ID NO: 819964 - protein, 576 aa, Homo sapiens
SLEIPWSRTLTGVERSKRLKAASWDGPSWGPNKASVHSPEPGDEGEPGRSGLELEPEEPPGWRELVPPDTLHSLPKSQVKRQEVISELLVTEAAHVRMLRVLHDLFFQPMAECLFFPLEELQNIFPSLDELIEVHSLFLDRLMKRRQESGYLIEEIGDVLLARFDGAEGSWFQKISSRFCSRQSFALEQLKAKQRKDPRFCAFVQEAESRPRCRRLQLKDMIPTEMQRLTKYPLLLQSIGQNTEEPTEREKVELAAECCREILHHVNQAVRDMEDLLRLKDYQRRLDLSHLRQSSDPMLSEFKNLDITKKKLVHEGPLTWRVTKDKAVEVHVLLLDDLLLLLQRQDERLLLKSHSRTLTPTPDGKTMLRPVLRLTSAMTREVATDHKAFYVLFTWDQEAQIYELVAQTVSERKNWCALITETAGSLKVPAPASRPKPRPSPSSTREPLLSSSENGNGGRETSPADARTERILSDLLPFCRPGPEGQLAATALRKVLSLKQLLFPAEEDNGAGPPRDGDGVPGGGPLSPARTQEIQENLLSLEETMKQLEELEEEFCRLRPLLSQLGGNSVPQPGCT

SEQ ID NO: 819965 - protein, 816 aa, Homo sapiens
PEPGSGSRDPGPGIAEPDLGRPAGHLRADTSPAEPREMEDFARGAASPGPSRPGLVPVSIIGAEDEDFENELETNSEEQNSQFQSLEQVKRRPAHLMALLQHVALQFEPGPLLCCLHADMLGSLGPKEAKKAFLDFYHSFLEKTAVLRVPVPPNVAFELDRTRADLISEDVQRRFVQEVVQSQQVAVGRQLEDFRSKRLMGMTPWEQELAQLEAWVGRDRASYEARERHVAERLLMHLEEMQHTISTDEEKSAAVVNAIGLYMRHLGVRTKSGDKKSGRNFFRKKVMGNRRSDEPAKTKKGLSSILDAARWNRGEPQVPDFRHLKAEVDAEKPGATDRKGGVGMPSRDRNIGAPGQDTPGVSLHPLSLDSPDREPGADAPLELGDSSPQGPMSLESLAPPESTDEGAETESPEPGDEGEPGRSGLELEPEEPPGWRELVPPDTLHSLPKSQVKRQEVISELLVTEAAHVRMLRVLHDLFFQPMAECLFFPLEELQNIFPSLDELIEVHSLFLDRLMKRRQESGYLIEEIGDVLLARFDGAEGSWFQKISSRFCSRQSFALEQLKAKQRKDPRFCAFVQEAESRPRCRRLQLKDMIPTEMQRLTKYPLLLQSIGQNTEEPTEREKVELAAECCREILHHVNQAVRDMEDLLRLKDYQRRLDLSHLRQSSDPMLSEFKNLDITKKKLVHEGPLTWRVTKDKAVEVHVLLLDDLLLLLQRQDERLLLKSHSRTLTPTPDGKTMLRPVLRLTSAMTREVATDHKAFYVLFTWDQEAQIYELVAQTVSERKNWCALITETAGSLKVPAPASRPKPRPSPSR

SEQ ID NO: 819966 - protein, 1003 aa, Homo sapiens
PEPGSGSRDPGPGIAEPDLGRPAGHLRADTSPAEPREMEDFARGAASPGPSRPGLVPVSIIGAEDEDFENELETNSEEQNSQFQSLEQVKRRPAHLMALLQHVALQFEPGPLLCCLHADMLGSLGPKEAKKAFLDFYHSFLEKTAVLRVPVPPNVAFELDRTRADLISEDVQRRFVQEVVQSQQVAVGRQLEDFRSKRLMGMTPWEQELAQLEAWVGRDRASYEARERHVAERLLMHLEEMQHTISTDEEKSAAVVNAIGLYMRHLGVRTKSGDKKSGRNFFRKKVMGNRRSDEPAKTKKGLSSILDAARWNRGEPQVPDFRHLKAEVDAEKPGATDRKGGVGMPSRDRNIGAPGQDTPGVSLHPLSLDSPDREPGADAPLELGDSSPQGPMSLESLAPPESTDEGAETESPEPGDEGEPGRSGLELEPEEPPGWRELVPPDTLHSLPKSQVKRQEVISELLVTEAAHVRMLRVLHDLFFQPMAECLFFPLEELQNIFPSLDELIEVHSLFLDRLMKRRQESGYLIEEIGDVLLARFDGAEGSWFQKISSRFCSRQSFALEQLKAKQRKDPRFCAFVQEAESRPRCRRLQLKDMIPTEMQRLTKYPLLLQSIGQNTEEPTEREKVELAAECCREILHHVNQAVRDMEDLLRLKDYQRRLDLSHLRQSSDPMLSEFKNLDITKKKLVHEGPLTWRVTKDKAVEVHVLLLDDLLLLLQRQDERLLLKSHSRTLTPTPDGKTMLRPVLRLTSAMTREVATDHKAFYVLFTWDQEAQIYELVAQTVSERKNWCALITETAGSLKVPAPASRPKPRPSPSSTREPLLSSSENGNGGRETSPADARTERILSDLLPFCRPGPEGQLAATALRKGVGGGILPPETPPVSAWGELCPPAWLHLRFPPRKAFCKKERNGGEDVRDHPHPHSCRSISHPEGLRRGSCGPRLGGAQLGLLAPHEPRPSLPPALCLGDSGLHSGGHHGDPGHLSIACGGHPSTPTPKCLRSVFIP

SEQ ID NO: 819967 - protein, 887 aa, Homo sapiens
PEPGSGSRDPGPGIAEPDLGRPAGHLRADTSPAEPREMEDFARGAASPGPSRPGLVPVSIIGAEDEDFENELETNSEEQNSQFQSLEQVKRRPAHLMALLQHVALQFEPGPLLCCLHADMLGSLGPKEAKKAFLDFYHSFLEKTAVLRVPVPPNVAFELDRTRADLISEDVQRRFVQEVVQSQQVAVGRQLEDFRSKRLMGMTPWEQELAQLEAWVGRDRASYEARERHVAERLLMHLEEMQHTISTDEEKSAAVVNAIGLYMRHLGVRTKSGDKKSGRNFFRKKVMGNRRSDEPAKTKKGLSSILDAARWNRGEPQVPDFRHLKAEVDAEKPGATDRKGGVGMPSRDRNIGAPGQDTPGVSLHPLSLDSPDREPGADAPLELGDSSPQGPMSLESLAPPESTDEGAETESPEPGDEGEPGRSGLELEPEEPPGWRELVPPDTLHSLPKSQVKRQEVISELLVTEAAHVRMLRVLHDLFFQPMAECLFFPLEELQNIFPSLDELIEVHSLFLDRLMKRRQESGYLIEEIGDVLLARFDGAEGSWFQKISSRFCSRQSFALEQLKAKQRKDPRFCAFVQEAESRPRCRRLQLKDMIPTEMQRLTKYPLLLQSIGQNTEEPTEREKVELAAECCREILHHVNQAVRDMEDLLRLKDYQRRLDLSHLRQSSDPMLSEFKNLDITKKKLVHEGPLTWRVTKDKAVEVHVLLLDDLLLLLQRQDERLLLKSHSRTLTPTPDGKTMLRPVLRLTSAMTREVATDHKAFYVLFTWDQEAQIYELVAQTVSERKNWCALITETAGSLKVPAPASRPKPRPSPSSTREPLLSSSENGNGGRETSPADARTERILSDLLPFCRPGPEGQLAATALRKGSPALPLQGGHQPKQCLCSN

SEQ ID NO: 819968 - protein, 515 aa, Homo sapiens
KASRGRVEIGRGLPRVPGEAEEVISELLVTEAAHVRMLRVLHDLFFQPMAECLFFPLEELQNIFPSLDELIEVHSLFLDRLMKRRQESGYLIEEIGDVLLARFDGAEGSWFQKISSRFCSRQSFALEQLKAKQRKDPRFCAFVQEAESRPRCRRLQLKDMIPTEMQRLTKYPLLLQSIGQNTEEPTEREKVELAAECCREILHHVNQAVRDMEDLLRLKDYQRRLDLSHLRQSSDPMLSEFKNLDITKKKLVHEGPLTWRVTKDKAVEVHVLLLDDLLLLLQRQDERLLLKSHSRTLTPTPDGKTMLRPVLRLTSAMTREVATDHKAFYVLFTWDQEAQIYELVAQTVSERKNWCALITETAGSLKVPAPASRPKPRPSPSSTREPLLSSSENGNGGRETSPADARTERILSDLLPFCRPGPEGQLAATALRKVLSLKQLLFPAEEDNGAGPPRDGDGVPGGGPLSPARTQEIQENLLSLEETMKQLEELEEEFCRLRPLLSQLGGNSVPQPGCT

SEQ ID NO: 819969 - protein, 279 aa, Homo sapiens
MLSEFKNLDITKKKLVHEGPLTWRVTKDKAVEVHVLLLDDLLLLLQRQDERLLLKSHSRTLTPTPDGKTMLRPVLRLTSAMTREVATDHKAFYVLFTWDQEAQIYELVAQTVSERKNWCALITETAGSLKVPAPASRPKPRPSPSSTREPLLSSSENGNGGRETSPADARTERILSDLLPFCRPGPEGQLAATALRKVLSLKQLLFPAEEDNGAGPPRDGDGVPGGGPLSPARTQEIQENLLSLEETMKQLEELEEEFCRLRPLLSQLGGNSVPQPGCT

SEQ ID NO: 819970 - protein, 550 aa, Homo sapiens
PEPGSGSRDPGPGIAEPDLGRPAGHLRADTSPAEPREMEDFARGAASPGPSRPGLVPVSIIGAEDEDFENELETNSEEQNSQFQSLEQVKRRPAHLMALLQHVALQFEPGPLLCCLHADMLGSLGPKEAKKAFLDFYHSFLEKTAVLRVPVPPNVAFELDRTRADLISEDVQRRFVQEVVQSQQVAVGRQLEDFRSKRLMGMTPWEQELAQLEAWVGRDRASYEARERHVAERLLMHLEEMQHTISTDEEKSAAVVNAIGLYMRHLGVRTKSGDKKSGRNFFRKKVMGNRRSDEPAKTKKGLSSILDAARWNRGEPQVPDFRHLKAEVDAEKPGATDRKGGVGMPSRDRNIGAPGQDTPGVSLHPLSLDSPDREPGADAPLELGDSSPQGPMSLESLAPPESTDEGAETERCPGWGAGAGGVAYWALVGGCRVTAAICACLSQALAPHAPLLLSGSGHSSPFFFPFLISLLLPHCPPFLLSFLFPLLLPLLPFFTNPSPPPFLSTTPSISFISPSSLTSPLLSHLPHPLSPPPSSLTYPTRLKDPQSTNS

SEQ ID NO: 819971 - protein, 480 aa, Homo sapiens
PEPGSGSRDPGPGIAEPDLGRPAGHLRADTSPAEPREMEDFARGAASPGPSRPGLVPVSIIGAEDEDFENELETNSEEQNSQFQSLEQVKRRPAHLMALLQHVALQFEPGPLLCCLHADMLGSLGPKEAKKAFLDFYHSFLEKTAVLRVPVPPNVAFELDRTRADLISEDVQRRFVQEVVQSQQVAVGRQLEDFRSKRLMGMTPWEQELAQLEAWVGRDRASYEARERHVAERLLMHLEEMQHTISTDEEKSAAVVNAIGLYMRHLGVRTKSGDKKSGRNFFRKKVMGNRRSDEPAKTKKGLSSILDAARWNRGEPQVPDFRHLKAEVDAEKPGATDRKGGVGMPSRDRNIGAPGQDTPGVSLHPLSLDSPDREPGADAPLELGDSSPQGPMSLESLAPPESTDEGAETERCPGWGAGAGGVAYWALVGGCRVTAAICACLSQALAPHAPLLLSGSGHSSPFFFPFLISLPQDPPLPQCP

SEQ ID NO: 819972 - protein, 453 aa, Homo sapiens
PEPGSGSRDPGPGIAEPDLGRPAGHLRADTSPAEPREMEDFARGAASPGPSRPGLVPVSIIGAEDEDFENELETNSEEQNSQFQSLEQVKRRPAHLMALLQHVALQFEPGPLLCCLHADMLGSLGPKEAKKAFLDFYHSFLEKTAVLRVPVPPNVAFELDRTRADLISEDVQRRFVQEVVQSQQVAVGRQLEDFRSKRLMGMTPWEQELAQLEAWVGRDRASYEARERHVAERLLMHLEEMQHTISTDEEKSAAVVNAIGLYMRHLGVRTKSGDKKSGRNFFRKKVMGNRRSDEPAKTKKGLSSILDAARWNRGEPQVPDFRHLKAEVDAEKPGATDRKGGVGMPSRDRNIGAPGQDTPGVSLHPLSLDSPDREPGADAPLELGDSSPQGPMSLESLAPPESTDEGAETERCPGWGAGAGGVAYWALVGGCRVTAAICACLSQALAPHAPLLL

SEQ ID NO: 819973 - protein, 131 aa, Homo sapiens
PEPGSGSRDPGPGIAEPDLGRPAGHLRADTSPAEPREMEDFARGAASPGPSRPGLVPVSIIGAEDEDFENELETNSEEQNSQFQSLEQVKRRPAHLMALLQHVALQFEPGPLVRAGLGGHREGWGWDRHSF

SEQ ID NO: 819974 - protein, 152 aa, Homo sapiens
CPGHPCPGPGLSLSLSLSWSLPVSVPVLVSPQFLSLPWPLPTSVPALVSPRLCPCPGFSSSLFLSWSLLVSVPGICLTLSLASGSRLSGRLGRSESLRVSDRRRPSRGSLGAKGRGGGRSRSDVDMDPSSATAVLGPARRATYVNPLPSPIH

SEQ ID NO: 819975 - protein, 82 aa, Homo sapiens
MPSRDRNIGAPGQDTPGVSLHPLSLDSPDREPGESFLGQGSMRPGDPGWGCCLPPWHPQIEAIPQQHLPFALSIHFSLLLVT

SEQ ID NO: 819976 - protein, 853 aa, Homo sapiens
MALLQHVALQFEPGPLLCCLHADMLGSLGPKEAKKAFLDFYHSFLEKTAVLRVPVPPNVAFELDRTRADLISEDVQRRFVQEVVQSQQVAVGRQLEDFRSKRLMGMTPWEQELAQLEAWVGRDRASYEARERHVAERLLMHLEEMQHTISTDEEKSAAVVNAIGLYMRHLGVRTKSGDKKSGRNFFRKKVMGNRRSDEPAKTKKGLSSILDAARWNRGEPQVPDFRHLKAEVDAEKPGATDRKGGVGMPSRDRNIGAPGQDTPGVSLHPLSLDSPDREPGADAPLELGDSSPQGPMSLESLAPPESTDEGAETESPEPGDEGEPGRSGLELEPEEPPGWRELVPPDTLHSLPKSQVKRQEVISELLVTEAAHVRMLRVLHDLFFQPMAECLFFPLEELQNIFPSLDELIEVHSLFLDRLMKRRQESGYLIEEIGDVLLARFDGAEGSWFQKISSRFCSRQSFALEQLKAKQRKDPRFCAFVQEAESRPRCRRLQLKDMIPTEMQRLTKYPLLLQSIGQNTEEPTEREKVELAAECCREILHHVNQAVRDMEDLLRLKDYQRRLDLSHLRQSSDPMLSEFKNLDITKKKLVHEGPLTWRVTKDKAVEVHVLLLDDLLLLLQRQDERLLLKSHSRTLTPTPDGKTMLRPVLRLTSAMTREVATDHKAFYVLFTWDQEAQIYELVAQTVSERKNWCALITETAGSLKVPAPASRPKPRPSPSSTREPLLSSSENGNGGRETSPADARTERILSDLLPFCRPGPEGQLAATALRKVLSLKQLLFPAEEDNGAGPPRDGDGVPGGGPLSPARTQEIQENLLSLEETMKQLEELEEEFCRLRPLLSQLGGNSVPQPGCT

SEQ ID NO: 819977 - protein, 121 aa, Homo sapiens
SPCLSLHLSPSPLFSYIPQAFCKKERNGGEDVRDHPHPHSCRSISHPEGLRRGSCGPRLGGAQLGLLAPHEPRPSLPPALCLGDSGLHSGGHHGDPGHLSIACGGHPSTPTPKCLRSVFIP

SEQ ID NO: 819978 - protein, 70 aa, Homo sapiens
GEFVVLLGEFVVLLGEFVVLLGEFVVLLRRIRGAADPGLPQHPRLDQGSWQSSRPASQHTKSSSSPHSLS

SEQ ID NO: 819979 - protein, 945 aa, Homo sapiens
GVGRVRSPSAEASVPVAAMASLSTWSSPAEPREMEDFARGAASPGPSRPGLVPVSIIGAEDEDFENELETNSEEQNSQFQSLEQVKRRPAHLMALLQHVALQFEPGPLLCCLHADMLGSLGPKEAKKAFLDFYHSFLEKTAVLRVPVPPNVAFELDRTRADLISEDVQRRFVQEVVQSQQVAVGRQLEDFRSKRLMGMTPWEQELAQLEAWVGRDRASYEARERHVAERLLMHLEEMQHTISTDEEKSAAVVNAIGLYMRHLGVRTKSGDKKSGRNFFRKKVMGNRRSDEPAKTKKGLSSILDAARWNRGEPQVPDFRHLKAEVDAEKPGATDRKGGVGMPSRDRNIGAPGQDTPGVSLHPLSLDSPDREPGADAPLELGDSSPQGPMSLESLAPPESTDEGAETESPEPGDEGEPGRSGLELEPEEPPGWRELVPPDTLHSLPKSQVKRQEVISELLVTEAAHVRMLRVLHDLFFQPMAECLFFPLEELQNIFPSLDELIEVHSLFLDRLMKRRQESGYLIEEIGDVLLARFDGAEGSWFQKISSRFCSRQSFALEQLKAKQRKDPRFCAFVQEAESRPRCRRLQLKDMIPTEMQRLTKYPLLLQSIGQNTEEPTEREKVELAAECCREILHHVNQAVRDMEDLLRLKDYQRRLDLSHLRQSSDPMLSEFKNLDITKKKLVHEGPLTWRVTKDKAVEVHVLLLDDLLLLLQRQDERLLLKSHSRTLTPTPDGKTMLRPVLRLTSAMTREVATDHKAFYVLFTWDQEAQIYELVAQTVSERKNWCALITETAGSLKVPAPASRPKPRPSPSSTREPLLSSSENGNGGRETSPADARTERILSDLLPFCRPGPEGQLAATALRKVLSLKQLLFPAEEDNGAGPPRDGDGVPGGGPLSPARTQEIQENLLSLEETMKQLEELEEEFCRLRPLLSQLGGNSVPQPGCT

SEQ ID NO: 819980 - protein, 916 aa, Homo sapiens; identical to SEQ ID NO: 819963

SEQ ID NO: 819981 - protein, 949 aa, Homo sapiens; identical to SEQ ID NO: 819960

SEQ ID NO: 819982 - protein, 949 aa, Homo sapiens; identical to SEQ ID NO: 819960

SEQ ID NO: 819983 - protein, 769 aa, Homo sapiens
PEPGSGSRDPGPGIAEPDLGRPAGHLRADTSPAEPREMEDFARGAASPGPSRPGLVPVSIIGAEDEDFENELETNSEEQNSQFQSLEQVKRRPAHLMALLQHVALQFEPGPLLCCLHADMLGSLGPKEAKKAFLDFYHSFLEKTAVLRVPVPPNVAFELDRTRADLISEDVQRRFVQEVVQSQQVAVGRQLEDFRSKRLMGMTPWEQELAQLEAWVGRDRASYEARERHVAERLLMHLEEMQHTISTDEEKSAAVVNAIGLYMRHLGVRTKSGDKKSGRNFFRKKVMGNRRSDEPAKTKKGLSSILDAARWNRGEPQVPDFRHLKAEVDAEKPGATDRKGGVGMPSRDRNIGAPGQDTPGVSLHPLSLDSPDREPGADAPLELGDSSPQGPMSLESLAPPESTDEGAETESPEPGDEGEPGRSGLELEPEEPPGWRELVPPDTLHSLPKSQVKRQEVISELLVTEAAHVRMLRVLHDLFFQPMAECLFFPLEELQNIFPSLDELIEVHSLFLDRLMKRRQESGYLIEEIGDVLLARFDGAEGSWFQKISSRFCSRQSFALEQLKAKQRKDPRFCAFVQEAESRPRCRRLQLKDMIPTEMQRLTKYPLLLQSIGQNTEEPTEREKVELAAECCREILHHVNQAVRDMEDLLRLKDYQRRLDLSHLRQSSDPMLSEFKNLDITKKKLVHEGPLTWRVTKDKAVEVHVLLLDDLLLLLQRQDERLLLKSHSRTLTPTPDGKTMLRPVLRLTSAMTREVATAGVLSSLRLPDP

SEQ ID NO: 819984 - protein, 297 aa, Homo sapiens
MVRGLGGRLSHLRQSSDPMLSEFKNLDITKKKLVHEGPLTWRVTKDKAVEVHVLLLDDLLLLLQRQDERLLLKSHSRTLTPTPDGKTMLRPVLRLTSAMTREVATDHKAFYVLFTWDQEAQIYELVAQTVSERKNWCALITETAGSLKVPAPASRPKPRPSPSSTREPLLSSSENGNGGRETSPADARTERILSDLLPFCRPGPEGQLAATALRKVLSLKQLLFPAEEDNGAGPPRDGDGVPGGGPLSPARTQEIQENLLSLEETMKQLEELEEEFCRLRPLLSQLGGNSVPQPGCT

SEQ ID NO: 819985 - protein, 262 aa, Homo sapiens
MHVCAYMCVCTQVCDCACIYSVCMHACVRVHVCACMVCVYAYVCMRVTACACMCVCVRMCRPHHCPVCLLSPGLCVFHCLGLSVSLSPGLDLCLCLRTSCLPTSSSLSPCPCGPPGPGVWGHPALPPLSTREPLLSSSENGNGGRETSPADARTERILSDLLPFCRPGPEGQLAATALRKVLSLKQLLFPAEEDNGAGPPRDGDGVPGGGPLSPARTQEIQENLLSLEETMKQLEELEEEFCRLRPLLSQLGGNSVPQPGCT

SEQ ID NO: 819986 - protein, 245 aa, Homo sapiens
IEDRDVFRKRLNIESSKGWWLQKRDVGTQEQHVHACVCVCACADPTTAPSVSCLQASVSSIVWASLSPCLPASTSVSVSGPPCLPTSSSLSPCPCGPPGPGVWGHPALPPLSTREPLLSSSENGNGGRETSPADARTERILSDLLPFCRPGPEGQLAATALRKVLSLKQLLFPAEEDNGAGPPRDGDGVPGGGPLSPARTQEIQENLLSLEETMKQLEELEEEFCRLRPLLSQLGGNSVPQPGCT

SEQ ID NO: 819987 - protein, 131 aa, Homo sapiens; identical to SEQ ID NO: 819973

SEQ ID NO: 819988 - protein, 278 aa, Homo sapiens
MVSNPVHGLPFLPGTSFKDSTKTAFHRSQTLSYRNGYAIVRRPTVGIGGDRLQFNQLSQAELDELASKAPVLTYGQPKQAPPADFIPAHVAFDKKVLKFDAYFQEDVPMSTEEQYRIRQVNIYYYLEDDSMSVIEPVVENSGILQGKLIKRQRLAKNDRGDHYHWKDLNRGINITIYGKTFRVVDCDQFTQVFLESQGIELNPPEKMALDPYTELRKQPLRKYVTPSDFDQLKQFLTFDKQVSDIGTTIGLLISKCDLHLLAKGLGSCIGNYFETLQL

SEQ ID NO: 819989 - protein, 640 aa, Homo sapiens
MVSNPVHGLPFLPGTSFKDSTKTAFHRSQTLSYRNGYAIVRRPTVGIGGDRLQFNQLSQAELDELASKAPVLTYGQPKQAPPADFIPAHVAFDKKVLKFDAYFQEDVPMSTEEQYRIRQVNIYYYLEDDSMSVIEPVVENSGILQGKLIKRQRLAKNDRGDHYHWKDLNRGINITIYGKTFRVVDCDQFTQVFLESQGIELNPPEKMALDPYTELRKQPLRKYVTPSDFDQLKQFLTFDKQVLRFYAIWDDTDSMYGECRTYIIHYYLMDDTVEIREVHERNDGRDPFPLLMNRQRVPKVLVENAKNFPQCVLEISDQEVLEWYTAKDFIVGKSLTILGRTFFIYDCDPFTRRYYKEKFGITDLPRIDVSKREPPPVKQELPPYNGFGLVEDSAQNCFALIPKAPKKDVIKMLVNDNKVLRYLAVLESPIPEDKDRRFVFSYFLATDMISIFEPPVRNSGIIGGKYLGRTKVVKPYSTVDNPVYYGPSDFFIGAVIEVFGHRFIILDTDEYVLKYMESNAAQYSPEALASIQNHVRKREAPAPEAESKQTEKDPGVQELEALIDTIQKQLKDHSCKDNIREAFQIYDKEASGYVDRDMFFKICESLNVPVDDSLVKELIRMCSHGEGKINYYNFVRAFSN

SEQ ID NO: 819990 - protein, 640 aa, Homo sapiens; identical to SEQ ID NO: 819989

SEQ ID NO: 819991 - protein, 170 aa, Homo sapiens [sequence omitted]

SEQ ID NO: 819992 - protein, 278 aa, Homo sapiens; identical to SEQ ID NO: 819988

SEQ ID NO: 819993 - protein, 640 aa, Homo sapiens; identical to SEQ ID NO: 819989

SEQ ID NO: 819994 - protein, 640 aa, Homo sapiens; identical to SEQ ID NO: 819989

SEQ ID NO: 819995 - protein, 278 aa, Homo sapiens; identical to SEQ ID NO: 819988

SEQ ID NO: 819996 - protein, 278 aa, Homo sapiens; identical to SEQ ID NO: 819988

SEQ ID NO: 819997 - protein, 278 aa, Homo sapiens; identical to SEQ ID NO: 819988

SEQ ID NO: 819998 - protein, 106 aa, Homo sapiens
KPLQTQRNYGPPVRPRMGPERTGAAPLPLLLVLALSQGKRGFRSASAAGGTRAASWGSLEGLGGTRERAPCVPSDSTWTRAPSHQDLLGKRYFFVPFLLSQALRPH

SEQ ID NO: 819999 - protein, 1197 aa, Homo sapiens
KPLQTQRNYGPPVRPRMGPERTGAAPLPLLLVLALSQGILNCCLAYNVGLPEAKIFSGPSSEQFGYAVQQFINPKGNWLLVGSPWSGFPENRMGDVYKCPVDLSTATCEKLNLQTSTSIPNVTEMKTNMSLGLILTRNMGTGGFLTCGPLWAQQCGNQYYTTGVCSDISPDFQLSASFSPATQPCPSLIDVVVVCDESNSIYPWDAVKNFLEKFVQGLDIGPTKTQVGLIQYANNPRVVFNLNTYKTKEEMIVATSQTSQYGGDLTNTFGAIQYARKYAYSAASGGRRSATKVMVVVTDGESHDGSMLKAVIDQCNHDNILRFGIAVLGYLNRNALDTKNLIKEIKAIASIPTERYFFNVSDEAALLEKAGTLGEQIFSIEGTVQGGDNFQMEMSQVGFSADYSSQNDILMLGAVGAFGWSGTIVQKTSHGHLIFPKQAFDQILQDRNHSSYLGYSVAAISTGESTHFVAGAPRANYTGQIVLYSVNENGNITVIQAHRGDQIGSYFGSVLCSVDVDKDTITDVLLVGAPMYMSDLKKEEGRVYLFTIKEGILGQHQFLEGPEGIENTRFGSAIAALSDINMDGFNDVIVGSPLENQNSGAVYIYNGHQGTIRTKYSQKILGSDGAFRSHLQYFGRSLDGYGDLNGDSITDVSIGAFGQVVQLWSQSIADVAIEASFTPEKITLVNKNAQIILKLCFSAKFRPTKQNNQVAIVYNITLDADGFSSRVTSRGLFKENNERCLQKNMVVNQAQSCPEHIIYIQEPSDVVNSLDLRVDISLENPGTSPALEAYSETAKVFSIPFHKDCGEDGLCISDLVLDVRQIPAAQEQPFIVSNQNKRLTFSVTLKNKRESAYNTGIVVDFSENLFFASFSLPVDGTEVTCQVAASQKSVACDVGYPALKREQQVTFTINFDFNLQNLQNQASLSFQALSESQEENKADNLVNLKIPLLYDAEIHLTRSTNINFYEISSDGNVPSIVHSFEDVGPKFIFSLKVTTGSVPVSMATVIIHIPQYTKEKNPLMYLTGVQTDKAGDISCNADINPLKIGQTSSSVSFKSENFRHTKELNCRTASCSNVTCWLKDVHMKGEYFVNVTTRIWNGTFASSTFQTVQLTAAAEINTYNPEIYVIEDNTVTIPLMIMKPDEKAEVPTGVIIGSIIAGILLLLALVAILWKLGFFKRKYEKMTKNPDEIDETTELSS

SEQ ID NO: 820000 - protein, 1197 aa, Homo sapiens; identical to SEQ ID NO: 819999

SEQ ID NO: 820001 - protein, 1197 aa, Homo sapiens; identical to SEQ ID NO: 819999

SEQ ID NO: 820002 - protein, 1197 aa, Homo sapiens; identical to SEQ ID NO: 819999

SEQ ID NO: 820003 - protein, 1197 aa, Homo sapiens; identical to SEQ ID NO: 819999

SEQ ID NO: 820004 - protein, 665 aa, Homo sapiens
KPLQTQRNYGPPVRPRMGPERTGAAPLPLLLVLALSQGILNCCLAYNVGLPEAKIFSGPSSEQFGYAVQQFINPKGNWLLVGSPWSGFPENRMGDVYKCPVDLSTATCEKLNLQTSTSIPNVTEMKTNMSLGLILTRNMGTGGFLTCGPLWAQQCGNQYYTTGVCSDISPDFQLSASFSPATQPCPSLIDVVVVCDESNSIYPWDAVKNFLEKFVQGLDIGPTKTQVGLIQYANNPRVVFNLNTYKTKEEMIVATSQTSQYGGDLTNTFGAIQYARKYAYSAASGGRRSATKVMVVVTDGESHDGSMLKAVIDQCNHDNILRFGIAVLGYLNRNALDTKNLIKEIKAIASIPTERYFFNVSDEAALLEKAGTLGEQIFSIEGTVQGGDNFQMEMSQVGFSADYSSQNDILMLGAVGAFGWSGTIVQKTSHGHLIFPKQAFDQILQDRNHSSYLGYSVAAISTGESTHFVAGAPRANYTGQIVLYSVNENGNITVIQAHRGDQIGSYFGSVLCSVDVDKDTITDVLLVGAPMYMSDLKKEEGRVYLFTIKEGILGQHQFLEGPEGIENTRFGSAIAALSDINMDGFNDVIVGSPLENQNSGAVYIYNGHQGTIRTKYSQKILGSDGAFRSHLQYFGRSLDGYGDLNGDSITDVSIGAFGQVVQLWS

SEQ ID NO: 820005 - protein, 120 aa, Homo sapiens
MGPRPAHCVTWKNTASWSSPPPLSPWSSCKSARMSQAEFEKAAEEVRHLKTKPSDEEMLFIYGHYKQATVGDINTERPGMLDFTGKAKWDAWNELKGTSKEDAMKAYINKVEELKKKYGI

SEQ ID NO: 820006 - protein, 87 aa, Homo sapiens
MSQAEFEKAAEEVRHLKTKPSDEEMLFIYGHYKQATVGDINTERPGMLDFTGKAKWDAWNELKGTSKEDAMKAYINKVEELKKKYGI

SEQ ID NO: 820007 - protein, 87 aa, Homo sapiens; identical to SEQ ID NO: 820006

SEQ ID NO: 820008 - protein, 87 aa, Homo sapiens; identical to SEQ ID NO: 820006

SEQ ID NO: 820009 - protein, 87 aa, Homo sapiens; identical to SEQ ID NO: 820006

SEQ ID NO: 820010 - protein, 87 aa, Homo sapiens; identical to SEQ ID NO: 820006

SEQ ID NO: 820011 - protein, 189 aa, Homo sapiens
MSQAEFEKAAEEVRHLKTKPSDEEMLFIYGHYKQATVGDINTERPGMLDFTGKAKWDAWNELKGTSKEDAMKAYINKVEELKKKKKKKKKKNLGAALGLWKRFFSPFRWARARGPKCGAQWAPSWANKRVVHTEGRHRGAHDTQRGGDFFPNFKKTGRVGTPRSGFRDQNPQEGGAQRANHGASIQPRG

SEQ ID NO: 820012 - protein, 87 aa, Homo sapiens; identical to SEQ ID NO: 820006

SEQ ID NO: 820013 - protein, 87 aa, Homo sapiens; identical to SEQ ID NO: 820006

SEQ ID NO: 820014 - protein, 87 aa, Homo sapiens; identical to SEQ ID NO: 820006

SEQ ID NO: 820015 - protein, 104 aa, Homo sapiens
MWGDLWLLPPASANPGTGTEAEFEKAAEEVRHLKTKPSDEEMLFIYGHYKQATVGDINTERPGMLDFTGKAKWDAWNELKGTSKEDAMKAYINKVEELKKKYGI

SEQ ID NO: 820016 - protein, 104 aa, Homo sapiens; identical to SEQ ID NO: 820015

SEQ ID NO: 820017 - protein, 169 aa, Homo sapiens
GGDQRAPALTPRHSCPVPFQLFPAYCAPSVLRPGLRCSPGHSLVPGPVVARQLAALLLPQRGPPLGAKAWPALFTAVFPDLMPAFAEFEKAAEEVRHLKTKPSDEEMLFIYGHYKQATVGDINTERPGMLDFTGKAKWDAWNELKGTSKEDAMKAYINKVEELKKKYGI

SEQ ID NO: 820018 - protein, 124 aa, Homo sapiens
MGEGVARIGGGEETQSPSRSTGQDVAAEWGSEESVAESLEAEFEKAAEEVRHLKTKPSDEEMLFIYGHYKQATVGDINTERPGMLDFTGKAKWDAWNELKGTSKEDAMKAYINKVEELKKKYGI

SEQ ID NO: 820019 - protein, 117 aa, Homo sapiens
HSWMISMCLDLLIGQYFFLVVPGDLERSDRMSQAEFEKAAEEVRHLKTKPSDEEMLFIYGHYKQATVGDINTERPGMLDFTGKAKWDAWNELKGTSKEDAMKAYINKVEELKKKYGI

SEQ ID NO: 820020 - protein, 87 aa, Homo sapiens; identical to SEQ ID NO: 820006

SEQ ID NO: 820021 - protein, 87 aa, Homo sapiens; identical to SEQ ID NO: 820006

SEQ ID NO: 820022 - protein, 87 aa, Homo sapiens; identical to SEQ ID NO: 820006

SEQ ID NO: 820023 - protein, 69 aa, Homo sapiens
TNERRGFCVITYTDEEPVKKLLSTERPGMLDFTGKAKWDAWNELKGTSKEDAMKAYINKVEELKKKYGI

SEQ ID NO: 820024 - protein, 104 aa, Homo sapiens; identical to SEQ ID NO: 820015

SEQ ID NO: 820025 - protein, 142 aa, Homo sapiens
MIIKREYDSYSAYTSLCGINALFKLASWSSPPPLSPWSSCKSARMSQAEFEKAAEEVRHLKTKPSDEEMLFIYGHYKQATVGDINTERPGMLDFTGKAKWDAWNELKGTSKEDAMKAYINKVEELKNALFFSNTVDGGNSGK

SEQ ID NO: 820026 - protein, 77 aa, Homo sapiens
ESKQCPESKQCSESKQCPESKQCRETGQARGSEDKPHTHSRGRKQTPHEGSHLLLLGSIYFQHLFDAVFNPLPIALL

SEQ ID NO: 820027 - protein, 77 aa, Homo sapiens; identical to SEQ ID NO: 820026

SEQ ID NO: 820028 - protein, 77 aa, Homo sapiens; identical to SEQ ID NO: 820026

SEQ ID NO: 820029 - protein, 77 aa, Homo sapiens; identical to SEQ ID NO: 820026

SEQ ID NO: 820030 - protein, 899 aa, Homo sapiens
SVYLERLKILRQRCGLDNTKQDDRPPLTSLLSKPAVPTVASSTDMLHSKLSQLRESREQHQHSDLDSNQTHSSGGSRGAWRGREGGTCWGNELGKTERALCRAGGRRGGQRPQPGGRGRMEQVEILRKFIQRVQAMKSPDHNGEDNFARDFMRLRRLSTKYRTEKIYPTATGEKEENVKKNRYKDILPFDHSRVKLTLKTPSQDSDYINANFIKGVYGPKAYVATQGPLANTVIDFWRMIWEYNVVIIVMACREFEMGRKKCERYWPLYGEDPITFAPFKISCEDEQARTDYFIRTLLLEFQNESRRLYQFHYVNWPDHDVPSSFDSILDMISLMRKYQEHEDVPICIHCSAGCGRTGAICAIDYTWNLLKAGKIPEEFNVFNLIQEMRTQRHSAVQTKEQYELVHRAIAQLFEKQLQLYEIHGAQKIADGVNEINTENMISSIEPEKQDSPPPKPPRTRSCLVEGDAKEEILQPPEPHPVPPILTPSPPSAFPTVTTVWQDNDRYHPKPVLHMVSSEQHSADLNRNYSKSTELPGKNESTIEQIDKKLERNLSFEIKKVPLQEGPKSFDGNTLLNRGHAIKIKSASPCIADKISKPQELSSDLNVGDTSQNSCVDCSVTQSNKVSVTPPEESQNSDTPPRPDRLPLDEKGHVTWSFHGPENAIPIPDLSEGNSSDINYQTRKTVSLTPSPTTQVETPDLVDHDNTSPLFRTPLSFTNPLHSDDSDSDERNSDGAVTQNKTNISTASATVSAATSTESISTRKVLPMSIARHNIAGTTHSGAEKDVDVSEDSPPPLPERTPESFVLASEHNTPVRSEWSELQSQERSEQKKSEGLITSENEKCDHPAGGIHYEMCIECPPTFSDKREQISENPTEATDIGFGNRCGKPKGPRDPPSEWT

SEQ ID NO: 820031 - protein, 873 aa, Homo sapiens
RGERRLRLRLRLLAGGGGEEEPGRGGRASGELAVFLRRSRRLGRWGGGGSRGAWRGREGGTCWGNELGKTERALCRAGGRRGGQRPQPGGRGRMEQVEILRKFIQRVQAMKSPDHNGEDNFARDFMRLRRLSTKYRTEKIYPTATGEKEENVKKNRYKDILPFDHSRVKLTLKTPSQDSDYINANFIKGVYGPKAYVATQGPLANTVIDFWRMIWEYNVVIIVMACREFEMGRKKCERYWPLYGEDPITFAPFKISCEDEQARTDYFIRTLLLEFQNESRRLYQFHYVNWPDHDVPSSFDSILDMISLMRKYQEHEDVPICIHCSAGCGRTGAICAIDYTWNLLKAGKIPEEFNVFNLIQEMRTQRHSAVQTKEQYELVHRAIAQLFEKQLQLYEIHGAQKIADGVNEINTENMISSIEPEKQDSPPPKPPRTRSCLVEGDAKEEILQPPEPHPVPPILTPSPPSAFPTVTTVWQDNDRYHPKPVLHMVSSEQHSADLNRNYSKSTELPGKNESTIEQIDKKLERNLSFEIKKVPLQEGPKSFDGNTLLNRGHAIKIKSASPCIADKISKPQELSSDLNVGDTSQNSCVDCSVTQSNKVSVTPPEESQNSDTPPRPDRLPLDEKGHVTWSFHGPENAIPIPDLSEGNSSDINYQTRKTVSLTPSPTTQVETPDLVDHDNTSPLFRTPLSFTNPLHSDDSDSDERNSDGAVTQNKTNISTASATVSAATSTESISTRKVLPMSIARHNIAGTTHSGAEKDVDVSEDSPPPLPERTPESFVLASEHNTPVRSEWSELQSQERSEQKKSEGLITSENEKCDHPAGGIHYEMCIECPPTFSDKREQISENPTEATDIGFGNRCGKPKGPRDPPSEWT

SEQ ID NO: 820032 - protein, 761 aa, Homo sapiens
GVQIVADRENGGIERLRRLSTKYRTEKIYPTATGEKEENVKKNRYKDILPFDHSRVKLTLKTPSQDSDYINANFIKGVYGPKAYVATQGPLANTVIDFWRMIWEYNVVIIVMACREFEMGRKKCERYWPLYGEDPITFAPFKISCEDEQARTDYFIRTLLLEFQNESRRLYQFHYVNWPDHDVPSSFDSILDMISLMRKYQEHEDVPICIHCSAGCGRTGAICAIDYTWNLLKAGKIPEEFNVFNLIQEMRTQRHSAVQTKEQYELVHRAIAQLFEKQLQLYEIHGAQKIADGVNEINTENMISSIEPEKQDSPPPKPPRTRSCLVEGDAKEEILQPPEPHPVPPILTPSPPSAFPTVTTVWQDNDRYHPKPVLHMVSSEQHSADLNRNYSKSTELPGKNESTIEQIDKKLERNLSFEIKKVPLQEGPKSFDGNTLLNRGHAIKIKSASPCIADKISKPQELSSDLNVGDTSQNSCVDCSVTQSNKVSVTPPEESQNSDTPPRPDRLPLDEKGHVTWSFHGPENAIPIPDLSEGNSSDINYQTRKTVSLTPSPTTQVETPDLVDHDNTSPLFRTPLSFTNPLHSDDSDSDERNSDGAVTQNKTNISTASATVSAATSTESISTRKVLPMSIARHNIAGTTHSGAEKDVDVSEDSPPPLPERTPESFVLASEHNTPVRSEWSELQSQERSEQKKSEGLITSENEKCDHPAGGIHYEMCIECPPTFSDKREQISENPTEATDIGFGNRCGKPKGPRDPPSEWT

SEQ ID NO: 820033 - protein, 697 aa, Homo sapiens
MLKRTDTRTYCHGVYGPKAYVATQGPLANTVIDFWRMIWEYNVVIIVMACREFEMGRKKCERYWPLYGEDPITFAPFKISCEDEQARTDYFIRTLLLEFQNESRRLYQFHYVNWPDHDVPSSFDSILDMISLMRKYQEHEDVPICIHCSAGCGRTGAICAIDYTWNLLKAGKIPEEFNVFNLIQEMRTQRHSAVQTKEQYELVHRAIAQLFEKQLQLYEIHGAQKIADGVNEINTENMISSIEPEKQDSPPPKPPRTRSCLVEGDAKEEILQPPEPHPVPPILTPSPPSAFPTVTTVWQDNDRYHPKPVLHMVSSEQHSADLNRNYSKSTELPGKNESTIEQIDKKLERNLSFEIKKVPLQEGPKSFDGNTLLNRGHAIKIKSASPCIADKISKPQELSSDLNVGDTSQNSCVDCSVTQSNKVSVTPPEESQNSDTPPRPDRLPLDEKGHVTWSFHGPENAIPIPDLSEGNSSDINYQTRKTVSLTPSPTTQVETPDLVDHDNTSPLFRTPLSFTNPLHSDDSDSDERNSDGAVTQNKTNISTASATVSAATSTESISTRKVLPMSIARHNIAGTTHSGAEKDVDVSEDSPPPLPERTPESFVLASEHNTPVRSEWSELQSQERSEQKKSEGLITSENEKCDHPAGGIHYEMCIECPPTFSDKREQISENPTEATDIGFGNRCGKPKGPRDPPSEWT

SEQ ID NO: 820034 - protein, 472 aa, Homo sapiens
SVYLERLKILRQRCGLDNTKQDDRPPLTSLLSKPAVPTVASSTDMLHSKLSQLRESREQHQHSDLDSNQTHSSGGSRGAWRGREGGTCWGNELGKTERALCRAGGRRGGQRPQPGGRGRMEQVEILRKFIQRVQAMKSPDHNGEDNFARDFMRLRRLSTKYRTEKIYPTATGEKEENVKKNRYKDILPFDHSRVKLTLKTPSQDSDYINANFIKGVYGPKAYVATQGPLANTVIDFWRMIWEYNVVIIVMACREFEMGRKKCERYWPLYGEDPITFAPFKISCEDEQARTDYFIRTLLLEFQNESRRLYQFHYVNWPDHDVPSSFDSILDMISLMRKYQEHEDVPICIHCSAGCGRTGAICAIDYTWNLLKAGKIPEEFNVFNLIQEMRTQRHSAVQTKEQYELVHRAIAQLFEKQLQLYEIHGAQKIADGVSLKNKILLLQNHQGPAVALLKGMLKKKYCSHRNLIQCHPS

SEQ ID NO: 820035 - protein, 665 aa, Homo sapiens
MLKRTDTRTYCHIIVMACREFEMGRKKCERYWPLYGEDPITFAPFKISCEDEQARTDYFIRTLLLEFQNESRRLYQFHYVNWPDHDVPSSFDSILDMISLMRKYQEHEDVPICIHCSAGCGRTGAICAIDYTWNLLKAGKIPEEFNVFNLIQEMRTQRHSAVQTKEQYELVHRAIAQLFEKQLQLYEIHGAQKIADGVNEINTENMISSIEPEKQDSPPPKPPRTRSCLVEGDAKEEILQPPEPHPVPPILTPSPPSAFPTVTTVWQDNDRYHPKPVLHMVSSEQHSADLNRNYSKSTELPGKNESTIEQIDKKLERNLSFEIKKVPLQEGPKSFDGNTLLNRGHAIKIKSASPCIADKISKPQELSSDLNVGDTSQNSCVDCSVTQSNKVSVTPPEESQNSDTPPRPDRLPLDEKGHVTWSFHGPENAIPIPDLSEGNSSDINYQTRKTVSLTPSPTTQVETPDLVDHDNTSPLFRTPLSFTNPLHSDDSDSDERNSDGAVTQNKTNISTASATVSAATSTESISTRKVLPMSIARHNIAGTTHSGAEKDVDVSEDSPPPLPERTPESFVLASEHNTPVRSEWSELQSQERSEQKKSEGLITSENEKCDHPAGGIHYEMCIECPPTFSDKREQISENPTEATDIGFGNRCGKPKGPRDPPSEWT

SEQ ID NO: 820036 - protein, 650 aa, Homo sapiens
MACREFEMGRKKCERYWPLYGEDPITFAPFKISCEDEQARTDYFIRTLLLEFQNESRRLYQFHYVNWPDHDVPSSFDSILDMISLMRKYQEHEDVPICIHCSAGCGRTGAICAIDYTWNLLKAGKIPEEFNVFNLIQEMRTQRHSAVQTKEQYELVHRAIAQLFEKQLQLYEIHGAQKIADGVNEINTENMISSIEPEKQDSPPPKPPRTRSCLVEGDAKEEILQPPEPHPVPPILTPSPPSAFPTVTTVWQDNDRYHPKPVLHMVSSEQHSADLNRNYSKSTELPGKNESTIEQIDKKLERNLSFEIKKVPLQEGPKSFDGNTLLNRGHAIKIKSASPCIADKISKPQELSSDLNVGDTSQNSCVDCSVTQSNKVSVTPPEESQNSDTPPRPDRLPLDEKGHVTWSFHGPENAIPIPDLSEGNSSDINYQTRKTVSLTPSPTTQVETPDLVDHDNTSPLFRTPLSFTNPLHSDDSDSDERNSDGAVTQNKTNISTASATVSAATSTESISTRKVLPMSIARHNIAGTTHSGAEKDVDVSEDSPPPLPERTPESFVLASEHNTPVRSEWSELQSQERSEQKKSEGLITSENEKCDHPAGGIHYEMCIECPPTFSDKREQISENPTEATDIGFGNRCGKPKGPRDPPSEWT

SEQ ID NO: 820037 - protein, 917 aa, Homo sapiens
  misc_feature (758)..(758): Xaa can be any naturally occurring amino acid
SVYLERLKILRQRCGLDNTKQDDRPPLTSLLSKPAVPTVASSTDMLHSKLSQLRESREQHQHSDLDSNQTHSSGGSRGAWRGREGGTCWGNELGKTERALCRAGGRRGGQRPQPGGRGRMEQVEILRKFIQRVQAMKSPDHNGEDNFARDFMRLRRLSTKYRTEKIYPTATGEKEENVKKNRYKDILPFDHSRVKLTLKTPSQDSDYINANFIKGVYGPKAYVATQGPLANTVIDFWRMIWEYNVVIIVMACREFEMGRKKCERYWPLYGEDPITFAPFKISCEDEQARTDYFIRTLLLEFQNESRRLYQFHYVNWPDHDVPSSFDSILDMISLMRKYQEHEDVPICIHCSAGCGRTGAICAIDYTWNLLKAGKIPEEFNVFNLIQEMRTQRHSAVQTKEQYELVHRAIAQLFEKQLQLYEIHGAQKIADGVNEINTENMISSIEPEKQDSPPPKPPRTRSCLVEGDAKEEILQPPEPHPVPPILTPSPPSAFPTVTTVWQDNDRYHPKPVLHMVSSEQHSADLNRNYSKSTELPGKNESTIEQIDKKLERNLSFEIKKVPLQEGPKSFDGNTLLNRGHAIKIKSASPCIADKISKPQELSSDLNVGDTSQNSCVDCSVTQSNKVSVTPPEESQNSDTPPRPDRLPLDEKGHVTWSFHGPENAIPIPDLSEGNSSDINYQTRKTVSLTPSPTTQVETPDLVDHDNTSPLFRTPLSFTNPLHSDDSDSDERNSDGAVTQELYTQYYTNDARWPHVFVGXPTSYLNEAILGNVTRKRDLLILIRVCLESKLLVMELTALQRAEKDVDVSEDSPPPLPERTPESFVLASEHNTPVRSEWSELQSQERSEQKKSEGLITSENEKCDHPAGGIHYEMCIECPPTFSDKREQISENPTEATDIGFGNRCGKPKGPRDPPSEWT

SEQ ID NO: 820038 - protein, 899 aa, Homo sapiens; identical to SEQ ID NO: 820030

SEQ ID NO: 820039 - protein, 899 aa, Homo sapiens; identical to SEQ ID NO: 820030

SEQ ID NO: 820040 - protein, 899 aa, Homo sapiens; identical to SEQ ID NO: 820030

SEQ ID NO: 820041 - protein, 856 aa, Homo sapiens
SVYLERLKILRQRCGLDNTKQDDRPPLTSLLSKPAVPTVASSTDMLHSKLSQLRESREQHQHSDLDSNQTHSSGGSRGAWRGREGGTCWGNELGKTERALCRAGGRRGGQRPQPGGRGRMEQVEILRKFIQRVQAMKSPDHNGEDNFARDFMRLRRLSTKYRTEKIYPTATGEKEENVKKNRYKDILPFDHSRVKLTLKTPSQDSDYINANFIKGVYGPKAYVATQGPLANTVIDFWRMIWEYNVVIIVMACREFEMGRKKCERYWPLYGEDPITFAPFKISCEDEQARTDYFIRTLLLEFQNESRRLYQFHYVNWPDHDVPSSFDSILDMISLMRKYQEHEDVPICIHCSAGCGRTGAICAIDYTWNLLKAGKIPEEFNVFNLIQEMRTQRHSAVQTKEQYELVHRAIAQLFEKQLQLYEIHGAQKIADGVNEINTENMISSIEPEKQDSPPPKPPRTRSCLVEGDAKEEILQPPEPHPVPPILTPSPPSAFPTVTTVWQDNDRYHPKPVLHMVSSEQHSADLNRNYSKSTELPGKNESTIEQIDKKLERNLSFEIKKVPLQEGPKSFDGNTLLNRGHAIKIKSASPCIADKISKPQELSSDLNVGDTSQNSCVDCSVTQSNKVSVTPPEESQNSDTPPRPDRLPLDEKGHVTWSFHGPENAIPIPDLSEGNSSDINYQTRKTVSLTPSPTTQVETPDLVDHDNTSPLFRTPLSFTNPLHSDDSDSDERNSDGAVTQNKTNISTASATVSAATSTESISTRKVLPMSIARHNIAGTTHSGAEKDVDVSEDSPPPLPERTPESFVLASEHNTPVRSEWSELQSQERSEQKKSEGLITSENEKCDQQQEYPRRSRDA

SEQ ID NO: 820042 - protein, 792 aa, Homo sapiens
SVYLERLKILRQRCGLDNTKQDDRPPLTSLLSKPAVPTVASSTDMLHSKLSQLRESREQHQHSDLDSNQTHSSGGSRGAWRGREGGTCWGNELGKTERALCRAGGRRGGQRPQPGGRGRMEQVEILRKFIQRVQAMKSPDHNGEDNFARDFMRLRRLSTKYRTEKIYPTATGEKEENVKKNRYKDILPFDHSRVKLTLKTPSQDSDYINANFIKGVYGPKAYVATQGPLANTVIDFWRMIWEYNVVIIVMACREFEMGRKKCERYWPLYGEDPITFAPFKISCEDEQARTDYFIRTLLLEFQNESRRLYQFHYVNWPDHDVPSSFDSILDMISLMRKYQEHEDVPICIHCSAGCGRTGAICAIDYTWNLLKAGKIPEEFNVFNLIQEMRTQRHSAVQTKEQYELVHRAIAQLFEKQLQLYEIHGAQKIADGVNEINTENMISSIEPEKQDSPPPKPPRTRSCLVEGDAKEEILQPPEPHPVPPILTPSPPSAFPTVTTVWQDNDRYHPKPVLHMVSSEQHSADLNRNYSKSTELPGKNESTIEQIDKKLERNLSFEIKKVPLQEGPKSFDGNTLLNRGHAIKIKSASPCIADKISKPQELSSDLNVGDTSQNSCVDCSVTQSNKVSVTPPEESQNSDTPPRPDRLPLDEKGHVTWSFHGPENAIPIPDLSEGNSSDINYQTRKTVSLTPSPTTQVETPDLVDHDNTSPLFRTPLSFTNPLHSDDSDSDERNSDGAVTQNKTNISTASATVSAATSTESISTRKVLPMSIARHNIAGTTHSGAEKGNNIVSNT

SEQ ID NO: 820043 - protein, 675 aa, Homo sapiens
SVYLERLKILRQRCGLDNTKQDDRPPLTSLLSKPAVPTVASSTDMLHSKLSQLRESREQHQHSDLDSNQTHSSGGSRGAWRGREGGTCWGNELGKTERALCRAGGRRGGQRPQPGGRGRMEQVEILRKFIQRVQAMKSPDHNGEDNFARDFMRLRRLSTKYRTEKIYPTATGEKEENVKKNRYKDILPFDHSRVKLTLKTPSQDSDYINANFIKGVYGPKAYVATQGPLANTVIDFWRMIWEYNVVIIVMACREFEMGRKKCERYWPLYGEDPITFAPFKISCEDEQARTDYFIRTLLLEFQNESRRLYQFHYVNWPDHDVPSSFDSILDMISLMRKYQEHEDVPICIHCSAGCGRTGAICAIDYTWNLLKAGKIPEEFNVFNLIQEMRTQRHSAVQTKEQYELVHRAIAQLFEKQLQLYEIHGAQKIADGVNEINTENMISSIEPEKQDSPPPKPPRTRSCLVEGDAKEEILQPPEPHPVPPILTPSPPSAFPTVTTVWQDNDRYHPKPVLHMVSSEQHSADLNRNYSKSTELPGKNESTIEQIDKKLERNLSFEIKKVPLQEGPKSFDGNTLLNRGHAIKIKSASPCIADKISKPQELSSDLNVGDTSQNSCVDCSVTQSNKVSVTPPEESQNSDTPPRPDRLPLDEKGHVTWSFHGPENAITIKPLVYRQMK

SEQ ID NO: 820044 - protein, 363 aa, Homo sapiens
SVYLERLKILRQRCGLDNTKQDDRPPLTSLLSKPAVPTVASSTDMLHSKLSQLRESREQHQHSDLDSNQTHSSGGSRGAWRGREGGTCWGNELGKTERALCRAGGRRGGQRPQPGGRGRMEQVEILRKFIQRVQAMKSPDHNGEDNFARDFMRLRRLSTKYRTEKIYPTATGEKEENVKKNRYKDILPFDHSRVKLTLKTPSQDSDYINANFIKGVYGPKAYVATQGPLANTVIDFWRMIWEYNVVIIVMACREFEMGRKKCERYWPLYGEDPITFAPFKISCEDEQARTDYFIRTLLLEFQNESRRLYQFHYVNWPDHDVPSSFDSILDMISLMRKYQEHEDVPICIHCRYKRISQVYKYII

SEQ ID NO: 820045 - protein, 380 aa, Homo sapiens
SVYLERLKILRQRCGLDNTKQDDRPPLTSLLSKPAVPTVASSTDMLHSKLSQLRESREQHQHSDLDSNQTHSSGGSRGAWRGREGGTCWGNELGKTERALCRAGGRRGGQRPQPGGRGRMEQVEILRKFIQRVQAMKSPDHNGEDNFARDFMRLRRLSTKYRTEKIYPTATGEKEENVKKNRYKDILPFDHSRVKLTLKTPSQDSDYINANFIKGVYGPKAYVATQGPLANTVIDFWRMIWEYNVVIIVMACREFEMGREDEQARTDYFIRTLLLEFQNESRRLYQFHYVNWPDHDVPSSFDSILDMISLMRKYQEHEDVPICIHCSAGCGRTGAICAIDYTWNLLKAGKIPEDLLSLIQYRNGNTRVLEDEQGHMIVIE

SEQ ID NO: 820046 - protein, 235 aa, Homo sapiens
SVYLERLKILRQRCGLDNTKQDDRPPLTSLLSKPAVPTVASSTDMLHSKLSQLRESREQHQHSDLDSNQTHSSGGSRGAWRGREGGTCWGNELGKTERALCRAGGRRGGQRPQPGGRGRMEQVEILRKFIQRVQAMKSPDHNGEDNFARDFMRLRRLSTKYRTEKIYPTATGEKEENVKKNRYKDILPFDHSRVKLTLKTPSQDSDYINANFIKVCTNFKWCFSAILMSFYILVL

SEQ ID NO: 820047 - protein, 116 aa, Homo sapiens
MLLGRLTSQLLRAVPWAGGRPPWPVSGVLGSRVCGPLYSTSPAGPGRAASLPRKGAQLELEEMLVPRKMSVSPLESWLTARCFLPRLDTGTAGTCGSTAILPVSAQPDRGRGRAGG

SEQ ID NO: 820048 - protein, 92 aa, Homo sapiens
MVRLKIRKLSSTLGGHGYRAGVVPAVLLYQVFYTSTNEKPAVWWGFQRRGNSFFPGERAAVTHRRDIPELPARGPVLVLAKVPVTAATDTSC

SEQ ID NO: 820049 - protein, 116 aa, Homo sapiens; identical to SEQ ID NO: 820047

SEQ ID NO: 820050 - protein, 116 aa, Homo sapiens; identical to SEQ ID NO: 820047

SEQ ID NO: 820051 - protein, 611 aa, Homo sapiens
GSRRHKMAAAAAAAGAAGSAAPAAAAGAPGSGGAPSGSQGVLIGDRLYSGVLITLENCLLPDDKLRFTPSMSSGLDTDTETDLRVVGCELIQAAGILLRLPQVAMATGQVLFQRFFYTKSFVKHSMEVRLPPALHSQRSMLRVKRFVTLPGYKGSEYLPPSLSSVPEEFCFLTFFFPWVHLPFGLNSPQAFGGRQDAVAGDKHGRVAMLPLQHVSMACVHLASKIEEAPRRIRDVINVFHRLRQLRDKKKPVPLLLDQDYVNLKNQIIKAERRVLKELGFCVHVKHPHKIIVMYLQVLECERNQHLVQTSWNYMNDSLRTDVFVRFQPESIACACIYLAARTLEIPLPNRPHWFLLFGATEEEIQEICLKILQLYARKKVDLTHLEGEVEKRKHAIEEAKAQARGLLPGGTQVLDGTSGFSPAPKLVESPKEGKGSKPSPLSVKNTKRRLEGAKKAKADSPVNGLPKGRESRSRSRSREQSYSRSPSRSASPKRRKSDSGSTSGGSKSQSRSRSRSDSPPRQAPRSAPYKGSEIRGSRKSKDCKYPQKPHKSRSRSSSRSRSRSRERADNPGKYKKKSHYYRDQRRERSRSYERTGRRYERDHPGHSRHRR

SEQ ID NO: 820052 - protein, 611 aa, Homo sapiens; identical to SEQ ID NO: 820051

SEQ ID NO: 820053 - protein, 454 aa, Homo sapiens
GSRRHKMAAAAAAAGAAGSAAPAAAAGAPGSGGAPSGSQGVLIGDRLYSGVLITLENCLLPDDKLRFTPSMSSGLDTDTETDLRVVGCELIQAAGILLRLPQVAMATGQVLFQRFFYTKSFVKHSMEVRLPPALHSQRSMLRVKRFVTLPGYKGSEYLPPSLSSVPEEFCFLTFFFPWVHLPFGLNSPQAFGGRQDAVAGDKHGRVAMLPLQHVSMACVHLASKIEEAPRRIRDVINVFHRLRQLRDKKKPVPLLLDQDYVNLKNQIIKAERRVLKELGFCVHVKHPHKIIVMYLQVLECERNQHLVQTSWNYMNDSLRTDVFVRFQPESIACACIYLAARTLEIPLPNRPHWFLLFGATEEEIQEICLKILQLYARKKVDLTHLEGEVEKRKHAIEEAKAQARGLLPGGTQVLDGTSGFSPAPKLAWSAVALSGITASSAYQILVILVPQPPK

SEQ ID NO: 820054 - protein, 611 aa, Homo sapiens; identical to SEQ ID NO: 820051

SEQ ID NO: 820055 - protein, 611 aa, Homo sapiens; identical to SEQ ID NO: 820051

SEQ ID NO: 820056 - protein, 611 aa, Homo sapiens; identical to SEQ ID NO: 820051

SEQ ID NO: 820057 - protein, 611 aa, Homo sapiens; identical to SEQ ID NO: 820051

SEQ ID NO: 820058 - protein, 611 aa, Homo sapiens; identical to SEQ ID NO: 820051

SEQ ID NO: 820059 - protein, 611 aa, Homo sapiens; identical to SEQ ID NO: 820051

SEQ ID NO: 820060 - protein, 611 aa, Homo sapiens; identical to SEQ ID NO: 820051

SEQ ID NO: 820061 - protein, 611 aa, Homo sapiens; identical to SEQ ID NO: 820051

SEQ ID NO: 820062 - protein, 611 aa, Homo sapiens; identical to SEQ ID NO: 820051

SEQ ID NO: 820063 - protein, 611 aa, Homo sapiens; identical to SEQ ID NO: 820051

SEQ ID NO: 820064 - protein, 611 aa, Homo sapiens; identical to SEQ ID NO: 820051

SEQ ID NO: 820065 - protein, 738 aa, Homo sapiens
GSRRHKMAAAAAAAGAAGSAAPAAAAGAPGSGGAPSGSQGVLIGDRLYSGVLITLENCLLPDDKLRFTPSMSSGLDTDTETDLRVVGCELIQAAGILLRLPQVAMATGQVLFQRFFYTKSFVKHSMEVRLPPALHSQRSMLRVKRFVTLPGYKGSEYLPPSLSSVPEEFCFLTFFFPWVHLPFGLNSPQAFGGRQDAVAGDKHGRVAMLPLQHVSMACVHLASKIEEAPRRIRDVINVFHRLRQLRDKKKPVPLLLDQDYVNLKNQIIKAERRVLKELGFCVHVKHPHKIIVMYLQVLECERNQHLVQTSWNYMNDSLRTDVFVRFQPESIACACIYLAARTLEIPLPNRPHWFLLFGATEEEIQEICLKILQLYARKKVDLTHLEGEVEKRKHAIEEAKAQARGLLPGGTQVLDGTSGFSPAPKLVESPKEGKGSKPSPLSVKNTKRRLEGAKKAKADSPVNGLPKGRESRSRSRSREQSYSRSPSRSASPKRRKSDSGSTSGGSKSQSRSRSRSDSPPRQAPRSAPYKGSEIRGSRKSKDCKYPQKPHKSRSRSSSRSRSRSRERADNPGKYKKKSHYYRDQRRERSRSYERTGRRYERDHPGHSRHRSSPGTCGRRPQTMLLGRLTSQLLRAVPWAGGRPPWPVSGVLGSRVCGPLYSTSPAGPGRAASLPRKGAQLELEEMLVPRKMSVSPLESWLTARCFLPRLDTGTAGTCGSTAILPVSAQPDRGRGRAGG

SEQ ID NO: 820066 - protein, 738 aa, Homo sapiens; identical to SEQ ID NO: 820065

SEQ ID NO: 820067 - protein, 611 aa, Homo sapiens; identical to SEQ ID NO: 820051

SEQ ID NO: 820068 - protein, 611 aa, Homo sapiens; identical to SEQ ID NO: 820051

SEQ ID NO: 820069 - protein, 611 aa, Homo sapiens; identical to SEQ ID NO: 820051

SEQ ID NO: 820070 - protein, 611 aa, Homo sapiens; identical to SEQ ID NO: 820051

SEQ ID NO: 820071 - protein, 611 aa, Homo sapiens; identical to SEQ ID NO: 820051

SEQ ID NO: 820072 - protein, 611 aa, Homo sapiens; identical to SEQ ID NO: 820051

SEQ ID NO: 820073 - protein, 611 aa, Homo sapiens; identical to SEQ ID NO: 820051

SEQ ID NO: 820074 - protein, 611 aa, Homo sapiens; identical to SEQ ID NO: 820051

SEQ ID NO: 820075 - protein, 611 aa, Homo sapiens; identical to SEQ ID NO: 820051

SEQ ID NO: 820076 - protein, 611 aa, Homo sapiens; identical to SEQ ID NO: 820051

SEQ ID NO: 820077 - protein, 611 aa, Homo sapiens; identical to SEQ ID NO: 820051

SEQ ID NO: 820078 - protein, 611 aa, Homo sapiens; identical to SEQ ID NO: 820051

SEQ ID NO: 820079 - protein, 611 aa, Homo sapiens; identical to SEQ ID NO: 820051

SEQ ID NO: 820080 - protein, 152 aa, Homo sapiens
GSRRHKMAAAAAAAGAAGSAAPAAAAGAPGSGGAPSGSQGVLIGDRLYSGVLITLENCLLPDDKLRFTPSMSSGLDTDTETDLRVVGCELIQAAGILLRLPQVAMATGQVLFQRFFYTKSFVKHSMEVRLPPALHSQRSMLRVKRFVTLPGY

SEQ ID NO: 820081 - protein, 152 aa, Homo sapiens; identical to SEQ ID NO: 820080

SEQ ID NO: 820082 - protein, 152 aa, Homo sapiens; identical to SEQ ID NO: 820080

SEQ ID NO: 820083 - protein, 162 aa, Homo sapiens
AAARLGPSLECWAAGSAGPFTAHRRPAQVGRPLSLARGPSWSWRRCWSPGRCPSAPWRAGSRPAASCPDWIPGPQGLVAPPQSYQCPPSQIGEGAEQGDEGVADAPSNSVQKRAEDPPAEDEPPQVPEAGEEDAVPAEEGPGGTPETQAGEWPPAWPWEGKV

SEQ ID NO: 820084 - protein, 105 aa, Homo sapiens
MLGKRFFGIFSCNVCVCVWPETPGSERTPSGFCRLISHTWRVKWKKESTLSKRQRPKPGACCLGAHRCWMVPRGSLLPPSWVSLLECRNPLPTKAKTGDSPPPPF

SEQ ID NO: 820085 - protein, 161 aa, Homo sapiens
MGCCYSSENEDSDQDREERKLLLDPSSPPTKALNGAEPNYHSLPSARTDEQALLSSILAKTASNIIDVSAADSQGMEQHEYMDRARQYSTRLAVLSSSLTHWKKLPPLPSLTSQPHQVLASEPIPFSDLQQVSRIAAYAYSALSQIRVDAKEELVVQFGIP

SEQ ID NO: 820086 - protein, 67 aa, Homo sapiens
ATYITKASDQSQVGVEFEASTRMQDTSVSFGYQLDLPKANLLFKGSVDSNWMGWGPKGQSLVCLHSH

SEQ ID NO: 820087 - protein, 121 aa, Homo sapiens
MGCCYSSENEDSDQDREERKLLLDPSSPPTKALNGAEPNYHSLPSARTDEQALLSSILAKTASNIIDVSAADSQGMEQHEYMDRARQYRHKGITLKRSCDLRVRSVGLGTSTATDLPLSQP

SEQ ID NO: 820088 - protein, 161 aa, Homo sapiens; identical to SEQ ID NO: 820085

SEQ ID NO: 820089 - protein, 161 aa, Homo sapiens; identical to SEQ ID NO: 820085

SEQ ID NO: 820090 - protein, 176 aa, Homo sapiens
WAGELRPAAGKTEELREAWRGALRSLALKDREERKLLLDPSSPPTKALNGAEPNYHSLPSARTDEQALLSSILAKTASNIIDVSAADSQGMEQHEYMDRARQYSTRLAVLSSSLTHWKKLPPLPSLTSQPHQVLASEPIPFSDLQQVSRIAAYAYSALSQIRVDAKEELVVQFGIP

SEQ ID NO: 820091 - protein, 173 aa, Homo sapiens
  misc_feature (8)..(8): Xaa can be any naturally occurring amino acid
MEQHEYMXTVPGQYSTRLAVLSQQPVPIGRSCPPLPSLTSQPHQVLASEPNYHSLPSARTDEQALLSSILAKTASNIIDVSAADSQGMEQHEYMDRARQYSTRLAVLSSSLTHWKKLPPLPSLTSQPHQVLASEPIPFSDLQQVSRIAAYAYSALSQIRVDAKEELVVQFGIP

SEQ ID NO: 820092 - protein, 111 aa, Homo sapiens
TRGSTHASAKTASNIIDVSAADSQGMEQHEYMDRARQYSTRLAVLSSSLTHWKKLPPLPSLTSQPHQVLASEPIPFSDLQQVSRIAAYAYSALSQIRVDAKEELVVQFGIP

SEQ ID NO: 820093 - protein, 142 aa, Homo sapiens
MGCCYSSENEDSDQDREERKLLLDPSSPPTKALNGAEPNYHSLPSARTDEQALLSSILAKTASNIIDVSAADSQGMEQHEYMDRARQYSTRLAVLSSSLTHWKKLPPLPSLTSQPHQVLASEPIPFSDLQQVQLFQSTPCSQ

SEQ ID NO: 820094 - protein, 185 aa, Homo sapiens
  misc_feature (185)..(185): Xaa can be any naturally occurring amino acid
MGCCYSSENEDSDQDREERKLLLDPSSPPTKALNGAEPNYHSLPSARTDEQALLSSILAKTASNIIDVSAADSQGMEQHEYMDRARQYSTRLAVLSSSLTHWKKLPPLPSLTSQPHQVLASEPNYHSLPSARTDEQALLFFLLAKTASNIIDVSAADFTGHGSSMSTWDRARELQHPFGCAEEQX

SEQ ID NO: 820095 - protein, 998 aa, Homo sapiens
MVFQTRYPSWIILCYIWLLRFAHTGEAQAAKEVLLLDSKAQQTELEWISSPPNGWEEISGLDENYTPIRTYQVCQVMEPNQNNWLRTNWISKGNAQRIFVELKFTLRDCNSLPGVLGTCKETFNLYYYETDYDTGRNIRENLYVKIDTIAADESFTQGDLGERKMKLNTEVREIGPLSKKGFYLAFQDVGACIALVSVKVYYKKCWSIIENLAIFPDTVTGSEFSSLVEVRGTCVSSAEEEAENAPRMHCSAEGEWLVPIGKCICKAGYQQKGDTCEPCGRGFYKSSSQDLQCSRCPTHSFSDKEGSSRCECEDGYYRAPSDPPYVACTRPPSAPQNLIFNINQTTVSLEWSPPADNGGRNDVTYRILCKRCSWEQGECVPCGSNIGYMPQQTGLEDNYVTVMDLLAHANYTFEVEAVNGVSDLSRSQRLFAAVSITTGQAAPSQVSGVMKERVLQRSVELSWQEPEHPNGVITEYEIKYYEKDQRERTYSTVKTKSTSASINNLKPGTVYVFQIRAFTAAGYGNYSPRLDVATLEEATGKMFEATAVSSEQNPVIIIAVVAVAGTIILVFMVFGFIIGRRHCGYSKADQEGDEELYFHFKFPGTKTYIDPETYEDPNRAVHQFAKELDASCIKIERVIGAGEFGEVCSGRLKLPGKRDVAVAIKTLKVGYTEKQRRDFLCEASIMGQFDHPNVVHLEGVVTRGKPVMIVIEFMENGALDAFLRKHDGQFTVIQLVGMLRGIAAGMRYLADMGYVHRDLAARNILVNSNLVCKVSDFGLSRVIEDDPEAVYTTTGGKIPVRWTAPEAIQYRKFTSASDVWSYGIVMWEVMSYGERPYWDMSNQDVIKAIEEGYRLPAPMDCPAGLHQLMLDCWQKERAERPKFEQIVGILDKMIRNPNSLKTPLGTCSRPISPLLDQNTPDFTTFCSVGEWLQAIKMERYKDNFTAAGYNSLESVARMTIEDVMSLGITLVGHQKKIMSSIQTMRAQMLHLHGTGIQV

SEQ ID NO: 820096 - protein, 998 aa, Homo sapiens; identical to SEQ ID NO: 820095

SEQ ID NO: 820097 - protein, 100 aa, Homo sapiens
LNHVPKCSLYTPITNVPPEVTVLTNSPVELREPNVLICFIDKFTPPVVNVTWLRNGKPVTTGVSETVFLPREGLPCLLPFPVSIFLYFLSFYYHHAMPLE

SEQ ID NO: 820098 - protein, 155 aa, Homo sapiens
TFSFLLFLSVLPHSRALLTPNRAPKKKMAISGVPVLGFFIIAVLMSAQESWAIKEEHVIIQAEFYLNPDQSGEFMFDFDGDEIFHVDMAKKETVWRLEEFGRFASFEAQGALANIAVDKANLEIMTKRSNYTPITNERYLGSPTGPVELVHGTWL

SEQ ID NO: 820099 - protein, 223 aa, Homo sapiens
TFSFLLFLSVLPHSRALLTPNRAPKKKMAISGVPVLGFFIIAVLMSAQESWAIKEEHVIIQAEFYLNPDQSGEFMFDFDGDEIFHVDMAKKETVWRLEEFGRFASFEAQGALANIAVDKANLEIMTKRSNYTPITNVPPEVTVLTNSPVELREPNVLICFIDKFTPPVVNVTWLRNGKPVTTGVSETVFLPREDHLFRKFHYLPFLPSTEDVYDCRVEHWGFG

SEQ ID NO: 820100 - protein, 223 aa, Homo sapiens; identical to SEQ ID NO: 820099

SEQ ID NO: 820101 - protein, 223 aa, Homo sapiens; identical to SEQ ID NO: 820099

SEQ ID NO: 820102 - protein, 223 aa, Homo sapiens; identical to SEQ ID NO: 820099

SEQ ID NO: 820103 - protein, 223 aa, Homo sapiens; identical to SEQ ID NO: 820099

SEQ ID NO: 820104 - protein, 223 aa, Homo sapiens; identical to SEQ ID NO: 820099

SEQ ID NO: 820105 - protein, 223 aa, Homo sapiens; identical to SEQ ID NO: 820099

SEQ ID NO: 820106 - protein, 200 aa, Homo sapiens
CSVPAFTPWLPVLGFFIIAVLMSAQESWAIKEEHVIIQAEFYLNPDQSGEFMFDFDGDEIFHVDMAKKETVWRLEEFGRFASFEAQGALANIAVDKANLEIMTKRSNYTPITNVPPEVTVLTNSPVELREPNVLICFIDKFTPPVVNVTWLRNGKPVTTGVSETVFLPREDHLFRKFHYLPFLPSTEDVYDCRVEHWGFG

SEQ ID NO: 820107 - protein, 223 aa, Homo sapiens; identical to SEQ ID NO: 820099

SEQ ID NO: 820108 - protein, 115 aa, Homo sapiens
WITHFNLIDTEEVEEDMTKRSNYTPITNVPPEVTVLTNSPVELREPNVLICFIDKFTPPVVNVTWLRNGKPVTTGVSETVFLPREDHLFRKFHYLPFLPSTEDVYDCRVEHWGFG

SEQ ID NO: 820109 - protein, 83 aa, Homo sapiens
DQARYRPPVELREPNVLICFIDKFTPPVVNVTWLRNGKPVTTGVSETVFLPREDHLFRKFHYLPFLPSTEDVYDCRVEHWGFG

SEQ ID NO: 820110 - protein, 223 aa, Homo sapiens; identical to SEQ ID NO: 820099

SEQ ID NO: 820111 - protein, 223 aa, Homo sapiens; identical to SEQ ID NO: 820099

SEQ ID NO: 820112 - protein, 223 aa, Homo sapiens; identical to SEQ ID NO: 820099

SEQ ID NO: 820113 - protein, 216 aa, Homo sapiens
TFSFLLFLSVLPHSRALLTPNRAPKKKMAISGVPVLGFFIIAVLMSAQESWAIKEEHVIIQAEFYLNPDQSGEFMFDFDGDEIFHVDMAKKETVWRLEEFGRFASFEAQGALANIAVDKANLEIMTKRSNYTPITNVPPEVTVLTNSPVELREPNVLICFIDKFTPPVVNVTWLRNGTTFSASSTISPSCPQLRTFTTAGWSTGALDEPLLKHWEV

SEQ ID NO: 820114 - protein, 223 aa, Homo sapiens; identical to SEQ ID NO: 820099

SEQ ID NO: 820115 - protein, 159 aa, Homo sapiens
CSVPAFTPWLPVLGFFIIAVLMSAQESWAIKEEHVIIQAEFYLNPDQSGEFMFDFDGDEIFHVDMAKKETVWRLEEFGRFASFEAQGALANIAVDKANLEIMTKRSNYTPITNVHPTSGQCHVASKWKTCHHRSVRDSLPAQGRPPFPQVPLSPLPALN

SEQ ID NO: 820116 - protein, 223 aa, Homo sapiens; identical to SEQ ID NO: 820099

SEQ ID NO: 820117 - protein, 223 aa, Homo sapiens; identical to SEQ ID NO: 820099

SEQ ID NO: 820118 - protein, 223 aa, Homo sapiens; identical to SEQ ID NO: 820099

SEQ ID NO: 820119 - protein, 223 aa, Homo sapiens; identical to SEQ ID NO: 820099

SEQ ID NO: 820120 - protein, 223 aa, Homo sapiens; identical to SEQ ID NO: 820099

SEQ ID NO: 820121 - protein, 224 aa, Homo sapiens
TFSFLLFLSVLPHSRALLTPNRAPKKKMAISGVPVLGFFIIAVLMSAQESWAIKEEHVIIQAEFYLNPDQSGEFMFDFDGDEIFHVDMAKKETVWRLEEFGRFASFEAQGALANIAVDKANLEIMTKRSNYTPITNVPPEVTVLTNSPVELREPNVLICFIDKFTPPVVNVTWLRNGKPVTTGVSETVFLPREDHLFRKFHYLPFLPSTEDVYDCLDKRRPSSI

SEQ ID NO: 820122 - protein, 115 aa, Homo sapiens; identical to SEQ ID NO: 820108

SEQ ID NO: 820123 - protein, 88 aa, Homo sapiens
MRRPRSTTGRKDRPTRPASTDTTRRPHNQDRTKAASVNSEREHTEEKDENGTRGQRRKSTLTQKRTPRAHTRTNHTYTTHNATQPTHP

SEQ ID NO: 820124 - protein, 1460 aa, Homo sapiens [sequence omitted]

SEQ ID NO: 820125 - protein, 1584 aa, Homo sapiens
MSLTSWFLVSSGGTRHRLPREMIFVGRDDCELMLQSRSVDKQHAVINYDASTDEHLVKDLGSLNGTFVNDVRIPEQTYITLKLEDKLRFGYDTNLFTVVQGEMRVPEEALKHEKFTIQLQLSQKSSESELSKSASAKSIDSKVADAATEVQHKTTEALKSEEKAMDISAMPRGTPLYGQPSWWGDDEVDEKRAFKTNGKPEEKNHEAGTSGCSIDAKQVEEQSAAANEEVLFPFCREPSYFEIPTKEFQQPSQITESTIHEIPTKDTPSSHITGAGHASFTIEFDDSTPGKVTIRDHVTKFTSDQRHKSKKSSPGTQDLLGIQTGMMAPENKVADWLAQNNPPQMLWERTEEDSKSIKSDVPVYLKRLKGNKHDDGTQSDSENAGAHRRCSKRATLEEHLRRHHSEHKKLQKVQATEKHQDQAVTSSAHHRGGHGVPHGKLLKQKSEEPSVSIPFLQTALLRSSGSLGHRPSQEMDKMLKNQATSATSEKDNDDDQSDKGTYTIELENPNSEEVEARKMIDKVFGVDDNQDYNRPVINEKHKDLIKDWALSSAAAVMEERKPLTTSGFHHSEEGTSSSGSKRWVSQWASLAANHTRHDQEERIMEFSAPLPLENETEISESGMTVRSTGSATSLASQGERRRRTLPQLPNEEKSLESHRAKVVTQRSEIGEKQDTELQEKETPTQVYQKDKQDADRPLSKMNRAVNGETLKTGGDNKTLLHLGSSAPGKEKSETDKETSLVKQTLAKLQQQEQREEAQWTPTKLSSKNVSGQTDKCREETFKQESQPPEKNSGHSTSKGDRVAQSESKRRKAEEILKSQTPKGGDKKESSKSLVRQGSFTIEKPSPNIPIELIPHINKQTSSTPSSLALTSASRIRERSESLDPDSSMDTTLILKDTEAVMAFLEAKLREDNKTDEGPDTPSYNRDNSISPESDVDTASTISLVTGETERKSTQKRKSFTSLYKDRCSTGSPSKDVTKSSSSGAREKMEKKTKSRSTDVGSRADGRKFVQSSGRIRQPSVDLTDDDQTSSVPHSAISDIMSSDQETYSCKPHGRTPLTSADEHVHSKLEGSKVTKSKTSPVVSGSSSKSTTLPRPRPTRTSLLRRARLGEASDSELADADKASVASEVSTTSSTSKPPTGRRNISRIDLLAQPRRTRLGSLSARSDSEATISRSSASSRTAEAIIRSGARLVPSDKFSPRIRANSISRLSDSKVKSMTSAHGSASVNSRWRRFPTDYASTSEDEFGSNRNSPKHTRLRTSPALKTTRLQSAGSAMPTSSSFKHRIKEQEDYIRDWTAHREEIARISQDLALIAREINDVAGEIDSVTSSGTAPSTTVSTAATTPGSAIDTREELVDRVFDESLNFRKIPPLVHSKTPEGNNGRSGDPRPQAAEPPDHLTITRRRTWSRDEVMGDNLLLSSVFQFSKKIRQSIDKTAGKIRILFKDKDRNWDDIESKLRAESEVPIVKTSSMEISSILQELKRVEKQLQAINAMIDPDGTLEALNNMGFPSAMLPSPPKQKSSPVNNHHSPGQTPTLGQPEARALHPAAVSAAAEFENAESEADFSIHFNRFNPDGEEEDVTVQE

SEQ ID NO: 820126 - protein, 1486 aa, Homo sapiens [sequence omitted]

SEQ ID NO: 820127 - protein, 1622 aa, Homo sapiens
MSLTSWFLVSSGGTRHRLPREMIFVGRDDCELMLQSRSVDKQHAVINYDASTDEHLVKDLGSLNGTFVNDVRIPEQTYITLKLEDKLRFGYDTNLFTVVQGEMRVPEEALKHEKFTIQLQLSQKSSESELSKSASAKSIDSKVADAATEVQHKTTEALKSEEKAMDISAMPRGTPLYGQPSWWGDDEVDEKRAFKTNGKPEEKNHEAGTSGCSIDAKQVEEQSAAANEEVLFPFCREPSYFEIPTKEFQQPSQITESTIHEIPTKDTPSSHITGAGHASFTIEFDDSTPGKVTIRDHVTKFTSDQRHKSKKSSPGTQDLLGIQTGMMAPENKVADWLAQNNPPQMLWERTEEDSKSIKSDVPVYLKRLKGNKHDDGTQSDSENAGAHRRCSKRATLEEHLRRHHSEHKKLQKVQATEKHQDQAVTSSAHHRGGHGVPHGKLLKQKSEEPSVSIPFLQTALLRSSGSLGHRPSQEMDKMLKNQATSATSEKDNDDDQSDKGTYTIELENPNSEEVEARKMIDKVTASSFYKLLYQTEPPQKQRLSYRFCNPLQWLAKSLWRVFGVDDNQDYNRPVINEKHKDLIKDWALSSAAAVMEERKPLTTSGFHHSEEGTSSSGSKRWVSQWASLAANHTRHDQEERIMEFSAPLPLENETEISESGMTVRSTGSATSLASQGERRRRTLPQLPNEEKSLESHRAKVVTQRSEIGEKQDTELQEKETPTQVYQKDKQDADRPLSKMNRAVNGETLKTGGDNKTLLHLGSSAPGKEKSETDKETSLVKQTLAKLQQQEQREEAQWTPTKLSSKNVSGQTDKCREETFKQESQPPEKNSGHSTSKGDRVAQSESKRRKAEEILKSQTPKGGDKKESSKSLVRQGSFTIEKPSPNIPIELIPHINKQTSSTPSSLALTSASRIRERSESLDPDSSMDTTLILKDTEAVMAFLEAKLREDNKTDEGPDTPSYNRDNSISPESDVDTASTISLVTGETERKSTQKRKSFTSLYKDRCSTGSPSKDVTKSSSSGAREKMEKKTKSRSTDVGSRADGRKFVQSSGRIRQPSVDLTDDDQTSSVPHSAISDIMSSDQETYSCKPHGRTPLTSADEHVHSKLEGSKVTKSKTSPVVSGSSSKSTTLPRPRPTRTSLLRRARLGEASDSELADADKASVASEVSTTSSTSKPPTGRRNISRIDLLAQPRRTRLGSLSARSDSEATISRSSASSRTAEAIIRSGARLVPSDKFSPRIRANSISRLSDSKVKSMTSAHGSASVNSRWRRFPTDYASTSEDEFGSNRNSPKHTRLRTSPALKTTRLQSAGSAMPTSSSFKHRIKEQEDYIRDWTAHREEIARISQDLALIAREINDVAGEIDSVTSSGTAPSTTVSTAATTPGSAIDTREELVDRVFDESLNFRKIPPLVHSKTPEGNNGRSGDPRPQAAEPPDHLTITRRRTWSRDEVMGDNLLLSSVFQFSKKIRQSIDKTAGKIRILFKDKDRNWDDIESKLRAESEVPIVKTSSMEISSILQELKRVEKQLQAINAMIDPDGTLEALNNMGFPSAMLPSPPKQKSSPVNNHHSPGQTPTLGQPEARALHPAAVSAAAEFENAESEADFSIHFNRFNPDGEEEDVTVQE

SEQ ID NO: 820128 - protein, 1622 aa, Homo sapiens; identical to SEQ ID NO: 820127

SEQ ID NO: 820129 - protein, 1622 aa, Homo sapiens; identical to SEQ ID NO: 820127

SEQ ID NO: 820130 - protein, 1181 aa, Homo sapiens
TKLEKAKSPTADAKVVSLSLQTSSAHHRGGHGVPHGKLLKQKSEEPSVSIPFLQTALLRSSGSLGHRPSQEMDKMLKNQATSATSEKDNDDDQSDKGTYTIELENPNSEEVEARKMIDKVFGVDDNQDYNRPVINEKHKDLIKDWALSSAAAVMEERKPLTTSGFHHSEEGTSSSGSKRWVSQWASLAANHTRHDQEERIMEFSAPLPLENETEISESGMTVRSTGSATSLASQGERRRRTLPQLPNEEKSLESHRAKVVTQRSEIGEKQDTELQEKETPTQVYQKDKQDADRPLSKMNRAVNGETLKTGGDNKTLLHLGSSAPGKEKSETDKETSLVKQTLAKLQQQEQREEAQWTPTKLSSKNVSGQTDKCREETFKQESQPPEKNSGHSTSKGDRVAQSESKRRKAEEILKSQTPKGGDKKESSKSLVRQGSFTIEKPSPNIPIELIPHINKQTSSTPSSLALTSASRIRERSESLDPDSSMDTTLILKDTEAVMAFLEAKLREDNKTDEGPDTPSYNRDNSISPESDVDTASTISLVTGETERKSTQKRKSFTSLYKDRCSTGSPSKDVTKSSSSGAREKMEKKTKSRSTDVGSRADGRKFVQSSGRIRQPSVDLTDDDQTSSVPHSAISDIMSSDQETYSCKPHGRTPLTSADEHVHSKLEGSKVTKSKTSPVVSGSSSKSTTLPRPRPTRTSLLRRARLGEASDSELADADKASVASEVSTTSSTSKPPTGRRNISRIDLLAQPRRTRLGSLSARSDSEATISRSSASSRTAEAIIRSGARLVPSDKFSPRIRANSISRLSDSKVKSMTSAHGSASVNSRWRRFPTDYASTSEDEFGSNRNSPKHTRLRTSPALKTTRLQSAGSAMPTSSSFKHRIKEQEDYIRDWTAHREEIARISQDLALIAREINDVAGEIDSVTSSGTAPSTTVSTAATTPGSAIDTREELVDRVFDESLNFRKIPPLVHSKTPEGNNGRSGDPRPQAAEPPDHLTITRRRTWSRDEVMGDNLLLSSVFQFSKKIRQSIDKTAGKIRILFKDKDRNWDDIESKLRAESEVPIVKTSSMEISSILQELKRVEKQLQAINAMIDPDGTLEALNNMGFPSAMLPSPPKQKSSPVNNHHSPGQTPTLGQPEARALHPAAVSAAAEFENAESEADFSIHFNRFNPDGEEEDVTVQE

SEQ ID NO: 820131 - protein, 1632 aa, Homo sapiens
MSLTSWFLVSSGGTRHRLPREMIFVGRDDCELMLQSRSVDKQHAVINYDASTDEHLVKDLGSLNGTFVNDVRIPEQTYITLKLEDKLRFGYDTNLFTVVQGEMRVPEEALKHEKFTIQLQLSQKSSESELSKSASAKSIDSKVADAATEVQHKTTEALKSEEKAMDISAMPRGTPLYGQPSWWGDDEVDEKRAFKTNGKPEEKNHEAGTSGCSIDAKQVEEQSAAANEEVLFPFCREPSYFEIPTKEFQQPSQITESTIHEIPTKDTPSSHITGAGHASFTIEFDDSTPGKVTIRDHVTKFTSDQRHKSKKSSPGTQDLLGIQTGMMAPENKVADWLAQNNPPQMLWERTEEDSKSIKSDVPVYLKRLKGNKHDDGTQSDSENAGAHRRCSKRATLEEHLRRHHSEHKKLQKVQATEKHQDQAVTSSAHHRGGHGVPHGKLLKQKSEEPSVSIPFLQTALLRSSGSLGHRPSQEMDKMLKNQATSATSEKDNDDDQSDKGTYTIELENPNSEEVEARKMIDKVTASSFYKLLYQTEPPQKQRLSYRFCNPLQWLAKSLWRVFGVDDNQDYNRPVINEKHKDLIKDWALSSAAAVMEERKPLTTSGFHHSEEGTSSSGSKRWVSQWASLAANHTRHDQEERIMEFSAPLPLENETEISESGMTVRSTGSATSLASQGERRRRTLPQLPNEEKSLESHRAKVVTQRSEIGEKQDTELQEKETPTQVYQKDKQDADRPLSKMNRAVNGETLKTGGDNKTLLHLGSSAPGKEKSETDKETSLVKQTLAKLQQQEQREEAQWTPTKLSSKNVSGQTDKCREETFKQESQPPEKNSGHSTSKGDRVAQSESKRRKAEEILKSQTPKGGDKKESSKSLVRQGSFTIEKPSPNIPIELIPHINKQTSSTPSSLALTSASRIRERSESLDPDSSMDTTLILKDTEAVMAFLEAKLREDNKTDEGPDTPSYNRDNSISPESDVDTASTISLVTGETERKSTQKRKSFTSLYKDRCSTGSPSKDVTKSSSSGAREKMEKKTKSRSTDVGSRADGRKFVQSSGRIRQPSVDLTDDDQTSSVPHSAISDIMSSDQETYSCKPHGRTPLTSADEHVHSKLEGSKVTKSKTSPVVSGSSSKSTTLPRPRPTRTSLLRRARLGEASDSELADADKASVASEVSTTSSTSKPPTGRRNISRIDLLAQPRRTRLGSLSARSDSEATISRSSASSRTAEAIIRSGARLVPSDKFSPRIRANSISRLSDSKVKSMTSAHGSASVNSRWRRFPTDYASTSEDEFGSNRNSPKHTRLRTSPALKTTRLQSAGSAMPTSSSFKHRIKEQEDYIRDWTAHREEIARISQDLALIAREINDVAGEIDSVTSSGTAPSTTVSTAATTPGSAIDTREEVGDLHGEMHKLVDRVFDESLNFRKIPPLVHSKTPEGNNGRSGDPRPQAAEPPDHLTITRRRTWSRDEVMGDNLLLSSVFQFSKKIRQSIDKTAGKIRILFKDKDRNWDDIESKLRAESEVPIVKTSSMEISSILQELKRVEKQLQAINAMIDPDGTLEALNNMGFPSAMLPSPPKQKSSPVNNHHSPGQTPTLGQPEARALHPAAVSAAAEFENAESEADFSIHFNRFNPDGEEEDVTVQE

SEQ ID NO: 820132 - protein, 1538 aa, Homo sapiens
MSLTSWFLVSSGGTRHRLPREMIFVGRDDCELMLQSRSVDKQHAVINYDASTDEHLVKDLGSLNGTFVNDVRIPEQTYITLKLEDKLRFGYDTNLFTVVQGEMRVPEEALKHEKFTIQLQLSQKSSESELSKSASAKSIDSKVADAATEVQHKTTEALKSEEKAMDISAMPRGTPLYGQPSWWGDDEVDEKRAFKTNGKPEEKNHEAGTSGCSIDAKQVEEQSAAANEEVLFPFCREPSYFEIPTKEFQQPSQITESTIHEIPTKDTPSSHITGAGHASFTIEFDDSTPGKVTIRDHVTKFTSDQRHKSKKSSPGTQDLLGIQTGMMAPENKVADWLAQNNPPQMLWERTEEDSKSIKSDVPVYLKRLKGNKHDDGTQSDSENAGAHRRCSKRATLEEHLRRHHSEHKKLQKVQATEKHQDQAVTSSAHHRGGHGVPHGKLLKQKSEEPSVSIPFLQTALLRSSGSLGHRPSQEMDKMLKNQATSATSEKDNDDDQSDKGTYTIELENPNSEEVEARKMIDKVTASSFYKLLYQTEPPQKQRLSYRFCNPLQWLAKSLWRVFGVDDNQDYNRPVINEKHKDLIKDWALSSAAAVMEERKPLTTSGFHHSEEGTSSSGSKRWVSQWASLAANHTRHDQEERIMEFSAPLPLENETEISESGMTVRSTGSATSLASQGERRRRTLPQLPNEEKSLESHRAKVVTQRSEIGEKQDTELQEKETPTQVYQKDKQDADRPLSKMNRAVNGETLKTGGDNKTLLHLGSSAPGKEKSETDKETSLVKQTLAKLQQQEQREEAQWTPTKLSSKNVSGQTDKCREETFKQESQPPEKNSGHSTSKGDRVAQSESKRRKAEEILKSQTPKGGDKKESSKSLVRQGSFTIEKPSPNIPIELIPHINKQTSSTPSSLALTSASRIRERSESLDPDSSMDTTLILKDTEAVMAFLEAKLREDNKTDEGPDTPSYNRDNSISPESDVDTASTISLVTGETERKSTQKRKSFTSLYKDRCSTGSPSKDVTKSSSSGAREKMEKKTKSRSTDVGSRADGRKFVQSSGRIRQPSVDLTDDDQTSSVPHSAISDIMSSDQETYSCKPHGRTPLTSADEHVHSKLEGSKVTKSKTSPVVSGSSSKSTTLPRPRPTRTSLLRRARLGEASDSELADADKASVASEVSTTSSTSKPPTGRRNISRIDLLAQPRRTRLGSLSARSDSEATISRSSASSRTAEAIIRSGARLVPSDKFSPRIRANSISRLSDSKVKSMTSAHGSASVNSRWRRFPTDYASTSEDEFGSNRNSPKHTRLRTSPALKTTRLQSAGSAMPTSSSFKHRIKEQEDYIRDWTAHREEIARISQDLALIAREINDVAGEIDSVTSSGTAPSTTVSTAATTPGSAIDTREEVGDLHGEMHKLVDRVFDESLNFRKIPPLVHSKTPEGNNGRSGDPRPQAAEPPDHLTITRRRTWSRDEVMGDNLLLSSVFQFSKKIRQSIDKTAGKIRILFKDKDRNWDDIESKLRAESEVPIVKTSSMEISSILQELKRVEKQLQEC

SEQ ID NO: 820133 - protein, 1581 aa, Homo sapiens
MSLTSWFLVSSGGTRHRLPREMIFVGRDDCELMLQSRSVDKQHAVINYDASTDEHLVKDLGSLNGTFVNDVRIPEQTYITLKLEDKLRFGYDTNLFTVVQGEMRVPEEALKHEKFTIQLQLSQKSSESELSKSASAKSIDSKVADAATEVQHKTTEALKSEEKAMDISAMPRGTPLYGQPSWWGDDEVDEKRAFKTNGKPEEKNHEAGTSGCSIDAKQVEEQSAAANEEVLFPFCREPSYFEIPTKEFQQPSQITESTIHEIPTKDTPSSHITGAGHASFTIEFDDSTPGKVTIRDHVTKFTSDQRHKSKKSSPGTQDLLGIQTGMMAPENKVADWLAQNNPPQMLWERTEEDSKSIKSDVPVYLKRLKGNKHDDGTQSDSENAGAHRRCSKRATLEEHLRRHHSEHKKLQKVQATEKHQDQAVTSSAHHRGGHGVPHGKLLKQKSEEPSVSIPFLQTALLRSSGSLGHRPSQEMDKMLKNQATSATSEKDNDDDQSDKGTYTIELENPNSEEVEARKMIDKVTASSFYKLLYQTEPPQKQRLSYRFCNPLQWLAKSLWRVFGVDDNQDYNRPVINEKHKDLIKDWALSSAAAVMEERKPLTTSGFHHSEEGTSSSGSKRWVSQWASLAANHTRHDQEERIMEFSAPLPLENETEISESGMTVRSTGSATSLASQGERRRRTLPQLPNEEKSLESHRAKVVTQRSEIGEKQDTELQEKETPTQVYQKDKQDADRPLSKMNRAVNGETLKTGGDNKTLLHLGSSAPGKEKSETDKETSLVKQTLAKLQQQEQREEAQWTPTKLSSKNVSGQTDKCREETFKQESQPPEKNSGHSTSKGDRVAQSESKRRKAEEILKSQTPKGGDKKESSKSLVRQGSFTIEKPSPNIPIELIPHINKQTSSTPSSLALTSASRIRERSESLDPDSSMDTTLILKDTEAVMAFLEAKLREDNKTDEGPDTPSYNRDNSISPESDVDTASTISLVTGETERKSTQKRKSFTSLYKDRCSTGSPSKDVTKSSSSGAREKMEKKTKSRSTDVGSRADGRKFVQSSGRIRQPSVDLTDDDQTSSVPHSAISDIMSSDQETYSCKPHGRTPLTSADEHVHSKLEGSKVTKSKTSPVVSGSSSKSTTLPRPRPTRTSLLRRARLGEASDSELADADKASVASEVSTTSSTSKPPTGRRNISRIDLLAQPRRTRLGSLSARSDSEATISRSSASSRTAEAIIRSGARLVPSDKFSPRIRANSISRLSDSKVKSMTSAHGSASVNSRWRRFPTDYASTSEDEFGSNRNSPKHTRLRTSPALKTTRLQSAGSAMPTSSSFKHRIKEQEDYIRDWTAHREEIARISQDLALIAREINDVAGEIDSVTSSGTAPSTTVSTAATTPGSAIDTREEVGDLHGEMHKLVDRVFDESLNFRKIPPLVHSKTPEGNNGRSGDPRPQAAEPPDHLTITRRRTWSRDEVMGDNLLLSSVFQFSKKIRQSIDKTAGKIRILFKDKDRNWDDIESKLRAESEVPIVKTSSMEISSILQELKRVEKQLQAINAMIDPDGTLEALNNMGFPSAMLPSPPKQKSSPVNNHHSPAML

SEQ ID NO: 820134 - protein, 1614 aa, Homo sapiens
MSLTSWFLVSSGGTRHRLPREMIFVGRDDCELMLQSRSVDKQHAVINYDASTDEHLVKDLGSLNGTFVNDVRIPEQTYITLKLEDKLRFGYDTNLFTVVQGEMRVPEEALKHEKFTIQLQLSQKSSESELSKSASAKSIDSKVADAATEVQHKTTEALKSEEKAMDISAMPRGTPLYGQPSWWGDDEVDEKRAFKTNGKPEEKNHEAGTSGCSIDAKQVEEQSAAANEEVLFPFCREPSYFEIPTKEFQQPSQITESTIHEIPTKDTPSSHITGAGHASFTIEFDDSTPGKVTIRDHVTKFTSDQRHKSKKSSPGTQDLLGIQTGMMAPENKVADWLAQNNPPQMLWERTEEDSKSIKSDVPVYLKRLKGNKHDDGTQSDSENAGAHRRCSKRATLEEHLRRHHSEHKKLQKVQATEKHQDQAVTSSAHHRGGHGVPHGKLLKQKSEEPSVSIPFLQTALLRSSGSLGHRPSQEMDKMLKNQATSATSEKDNDDDQSDKGTYTIELENPNSEEVEARKMIDKVTASSFYKLLYQTEPPQKQRLSYRFCNPLQWLAKSLWRVFGVDDNQDYNRPVINEKHKDLIKDWALSSAAAVMEERKPLTTSGFHHSEEGTSSSGSKRWVSQWASLAANHTRHDQEERIMEFSAPLPLENETEISESGMTVRSTGSATSLASQGERRRRTLPQLPNEEKSLESHRAKVVTQRSEIGEKQDTELQEKETPTQVYQKDKQDADRPLSKMNRAVNGETLKTGGDNKTLLHLGSSAPGKEKSETDKETSLVKQTLAKLQQQEQREEAQWTPTKLSSKNVSGQTDKCREETFKQESQPPEKNSGHSTSKGDRVAQSESKRRKAEEILKSQTPKGGDKKESSKSLVRQGSFTIEKPSPNIPIELIPHINKQTSSTPSSLALTSASRIRERSESLDPDSSMDTTLILKDTEAVMAFLEAKLREDNKTDEGPDTPSYNRDNSISPESDVDTASTISLVTGETERKSTQKRKSFTSLYKDRCSTGSPSKDVTKSSSSGAREKMEKKTKSRSTDVGSRADGRKFVQSSGRIRQPSVDLTDDDQTSSVPHSAISDIMSSDQETYSCKPHGRTPLTSADEHVHSKLEGSKVTKSKTSPVVSGSSSKSTTLPRPRPTRTSLLRRARLGEASDSELADADKASVASEVSTTSSTSKPPTGRRNISRIDLLAQPRRTRLGSLSARSDSEATISRSSASSRTAEAIIRSGARLVPSDKFSPRIRANSISRLSDSKVKSMTSAHGSASVNSRWRRFPTDYASTSEDEFGSNRNSPKHTRLRTSPALKTTRLQSAGSAMPTSSSFKHRIKEQEDYIRDWTAHREEIARISQDLALIAREINDVAGEIDSVTSSGTAPSTTVSTAATTPGSAIDTREEVGDLHGEMHKLVDRVFDESLNFRKIPPLVHSKTPEGNNGRSGDPRPQAAEPPDHLTITRRRTWSRDEVMGDNLLLSSVFQFSKKIRQSIDKTAGKIRILFKDKDRNWDDIESKLRAESEVPIVKTSSMEISSILQELKRVEKQLQAINAMIDPDGTLEALNNMGFPSAMLPSPPKQKSSPVNNHHSPDSTPMGKRKMLQYKNDFLLIVEKSLPVEWLGILEAA

SEQ ID NO: 820135 - protein, 310 aa, Homo sapiens [sequence omitted]

SEQ ID NO: 820136 - protein, 1665 aa, Homo sapiens
MSLTSWFLVSSGGTRHRLPREMIFVGRDDCELMLQSRSVDKQHAVINYDASTDEHLVKDLGSLNGTFVNDVRIPEQTYITLKLEDKLRFGYDTNLFTVVQGEMRVPEEALKHEKFTIQLQLSQKSSESELSKSASAKSIDSKVADAATEVQHKTTEALKSEEKAMDISAMPRGTPLYGQPSWWGDDEVDEKRAFKTNGKPEEKNHEAGTSGCSIDAKQVEEQSAAANEEVLFPFCREPSYFEIPTKEFQQPSQITESTIHEIPTKDTPSSHITGAGHASFTIEFDDSTPGKVTIRDHVTKFTSDQRHKSKKSSPGTQDLLGIQTGMMAPENKVADWLAQNNPPQMLWERTEEDSKSIKSDVPVYLKRLKGNKHDDGTQSDSENAGAHRRCSKRATLEEHLRRHHSEHKKLQKVQATEKHQDQAVTSSAHHRGGHGVPHGKLLKQKSEEPSVSIPFLQTALLRSSGSLGHRPSQEMDKMLKNQATSATSEKDNDDDQSDKGTYTIELENPNSEEVEARKMIDKVTASSFYKLLYQTEPPQKQRLSYRFCNPLQWLAKSLWRVFGVDDNQDYNRPVINEKHKDLIKDWALSSAAAVMEERKPLTTSGFHHSEEGTSSSGSKRWVSQWASLAANHTRHDQEERIMEFSAPLPLENETEISESGMTVRSTGSATSLASQGERRRRTLPQLPNEEKSLESHRAKVVTQRSEIGEKQDTELQEKETPTQVYQKDKQDADRPLSKMNRAVNGETLKTGGDNKTLLHLGSSAPGKEKSETDKETSLVKQTLAKLQQQEQREEAQWTPTKLSSKNVSGQTDKCREETFKQESQPPEKNSGHSTSKGDRVAQSESKRRKAEEILKSQTPKGGDKKESSKSLVRQGSFTIEKPSPNIPIELIPHINKQTSSTPSSLALTSASRIRERSESLDPDSSMDTTLILKDTEAVMAFLEAKLREDNKTDEGPDTPSYNRDNSISPESDVDTASTISLVTGETERKSTQKRKSFTSLYKDRCSTGSPSKDVTKSSSSGAREKMEKKTKSRSTDVGSRADGRKFVQSSGRIRQPSVDLTDDDQTSSVPHSAISDIMSSDQETYSCKPHGRTPLTSADEHVHSKLEGSKVTKSKTSPVVSGSSSKSTTLPRPRPTRTSLLRRARLGEASDSELADADKASVASEVSTTSSTSKPPTGRRNISRIDLLAQPRRTRLGSLSARSDSEATISRSSASSRTAEAIIRSGARLVPSDKFSPRIRANSISRLSDSKVKSMTSAHGSASVNSRWRRFPTDYASTSEDEFGSNRNSPKHTRLRTSPALKTTRLQSAGSAMPTSSSFKHRIKEQEDYIRDWTAHREEIARISQDLALIAREINDVAGEIDSVTSSGTAPSTTVSTAATTPGSAIDTREEVGDLHGEMHKLVDRVFDESLNFRKIPPLVHSKTPEGNNGRSGDPRPQAAEPPDHLTITRRRTWSRDEVMGDNLLLSSVFQFSKKIRQSIDKTAGKIRILFKDKDRNWDDIESKLRAESEVPIVKTSSMEISSILQELKRVEKQLQAINAMIDPDGTLEALNNMGFPSAMLPSPPKQKSSPVNNHHSPGQTPTLGQPEARALHPAAVSAAAEFENAESEADFSIHFNRFNPDGEEEEKKKKKKNKKKKKQKKKKKNTERKKNRTKTTTTRTNDRK

SEQ ID NO: 820137 - protein, 1492 aa, Homo sapiens
MSLTSWFLVSSGGTRHRLPREMIFVGRDDCELMLQSRSVDKQHAVINYDASTDEHLVKDLGSLNGTFVNDVRIPEQTYITLKLEDKLRFGYDTNLFTVVQGEMRVPEEALKHEKFTIQLQLSQKSSESELSKSASAKSIDSKVADAATEVQHKTTEALKSEEKAMDISAMPRGTPLYGQPSWWGDDEVDEKRAFKTNGKPEEKNHEAGTSGCSIDAKQVEEQSAAANEEVLFPFCREPSYFEIPTKEFQQPSQITESTIHEIPTKDTPSSHITGAGHASFTIEFDDSTPGKVTIRDHVTKFTSDQRHKSKKSSPGTQDLLGIQTGMMAPENKVADWLAQNNPPQMLWERTEEDSKSIKSDVPVYLKRLKGNKHDDGTQSDSENAGAHRRCSKRATLEEHLRRHHSEHKKLQKVQATEKHQDQAVTSSAHHRGGHGVPHGKLLKQKSEEPSVSIPFLQTALLRSSGSLGHRPSQEMDKMLKNQATSATSEKDNDDDQSDKGTYTIELENPNSEEVEARKMIDKVTASSFYKLLYQTEPPQKQRLSYRFCNPLQWLAKSLWRVFGVDDNQDYNRPVINEKHKDLIKDWALSSAAAVMEERKPLTTSGFHHSEEGTSSSGSKRWVSQWASLAANHTRHDQEERIMEFSAPLPLENETEISESGMTVRSTGSATSLASQGERRRRTLPQLPNEEKSLESHRAKVVTQRSEIGEKQDTELQEKETPTQVYQKDKQDADRPLSKMNRAVNGETLKTGGDNKTLLHLGSSAPGKEKSETDKETSLVKQTLAKLQQQEQREEAQWTPTKLSSKNVSGQTDKCREETFKQESQPPEKNSGHSTSKGDRVAQSESKRRKAEEILKSQTPKGGDKKESSKSLVRQGSFTIEKPSPNIPIELIPHINKQTSSTPSSLALTSASRIRERSESLDPDSSMDTTLILKDTEAVMAFLEAKLREDNKTDEGPDTPSYNRDNSISPESDVDTASTISLVTGETERKSTQKRKSFTSLYKDRCSTGSPSKDVTKSSSSGAREKMEKKTKSRSTDVGSRADGRKFVQSSGRIRQPSVDLTDDDQTSSVPHSAISDIMSSDQETYSCKPHGRTPLTSADEHVHSKLEGSKVTKSKTSPVVSGSSSKSTTLPRPRPTRTSLLRRARLGEASDSELADADKASVASEVSTTSSTSKPPTGRRNISRIDLLAQPRRTRLGSLSARSDSEATISRSSASSRTAEAIIRSGARLVPSDKFSPRIRANSISRLSDSKVKSMTSAHGSASVNSRWRRFPTDYASTSEDEFGSNRNSPKHTRLRTSPALKTTRLQSAGSAMPTSSSFKHRIKEQEDYIRDWTAHREEIARISQDLALIAREINDVAGEIDSVTSSGTAPSTTVSTAATTPGSAIDTREEVGDLHGEMHKLVDRVFDESLNFRKIPPLVHSKTPEGNNGRSGDPRPQAAEPPDHLTITRRRTWSRDEVMGDNLLLSSVFQFSKKIRQSIDKTAGKIRYMYI

SEQ ID NO: 820138 - protein, 1186 aa, Homo sapiens
MSLTSWFLVSSGGTRHRLPREMIFVGRDDCELMLQSRSVDKQHAVINYDASTDEHLVKDLGSLNGTFVNDVRIPEQTYITLKLEDKLRFGYDTNLFTVVQGEMRVPEEALKHEKFTIQLQLSQKSSESELSKSASAKSIDSKVADAATEVQHKTTEALKSEEKAMDISAMPRGTPLYGQPSWWGDDEVDEKRAFKTNGKPEEKNHEAGTSGCSIDAKQVEEQSAAANEEVLFPFCREPSYFEIPTKEFQQPSQITESTIHEIPTKDTPSSHITGAGHASFTIEFDDSTPGKVTIRDHVTKFTSDQRHKSKKSSPGTQDLLGIQTGMMAPENKVADWLAQNNPPQMLWERTEEDSKSIKSDVPVYLKRLKGNKHDDGTQSDSENAGAHRRCSKRATLEEHLRRHHSEHKKLQKVQATEKHQDQAVTSSAHHRGGHGVPHGKLLKQKSEEPSVSIPFLQTALLRSSGSLGHRPSQEMDKMLKNQATSATSEKDNDDDQSDKGTYTIELENPNSEEVEARKMIDKVTASSFYKLLYQTEPPQKQRLSYRFCNPLQWLAKSLWRVFGVDDNQDYNRPVINEKHKDLIKDWALSSAAAVMEERKPLTTSGFHHSEEGTSSSGSKRWVSQWASLAANHTRHDQEERIMEFSAPLPLENETEISESGMTVRSTGSATSLASQGERRRRTLPQLPNEEKSLESHRAKVVTQRSEIGEKQDTELQEKETPTQVYQKDKQDADRPLSKMNRAVNGETLKTGGDNKTLLHLGSSAPGKEKSETDKETSLVKQTLAKLQQQEQREEAQWTPTKLSSKNVSGQTDKCREETFKQESQPPEKNSGHSTSKGDRVAQSESKRRKAEEILKSQTPKGGDKKESSKSLVRQGSFTIEKPSPNIPIELIPHINKQTSSTPSSLALTSASRIRERSESLDPDSSMDTTLILKDTEAVMAFLEAKLREDNKTDEGPDTPSYNRDNSISPESDVDTASTISLVTGETERKSTQKRKSFTSLYKDRCSTGSPSKDVTKSSSSGAREKMEKKTKSRSTDVGSRADGRKFVQSSGRIRQPSVDLTDDDQTSSVPHSAISDIMSSDQETYSCKPHGRTPLTSADEHVHSKLEGSKVTKSKTSPVVSGSSSKSTTLPRPRPTRTSLLRRARLGEASDSELADADKASVASEVSTTSSTSGGKNHEAGHQGAA

SEQ ID NO: 820139 - protein, 535 aa, Homo sapiens
MSLTSWFLVSSGGTRHRLPREMIFVGRDDCELMLQSRSVDKQHAVINYDASTDEHLVKDLGSLNGTFVNDVRIPEQTYITLKLEDKLRFGYDTNLFTVVQGEMRVPEEALKHEKFTIQLQLSQKSSESELSKSASAKSIDSKVADAATEVQHKTTEALKSEEKAMDISAMPRGTPLYGQPSWWGDDEVDEKRAFKTNGKPEEKNHEAGTSGCSIDAKQVEEQSAAANEEVLFPFCREPSYFEIPTKEFQQPSQITESTIHEIPTKDTPSSHITGAGHASFTIEFDDSTPGKVTIRDHVTKFTSDQRHKSKKSSPGTQDLLGIQTGMMAPENKVADWLAQNNPPQMLWERTEEDSKSIKSDVPVYLKRLKGNKHDDGTQSDSENAGAHRRCSKRATLEEHLRRHHSEHKKLQKVQATEKHQDQAVTSSAHHRGGHGVPHGKLLKQKSEEPSVSIPFLQTALLRSSGSLGHRPSQEMDKMLKNQATSATSEKDNDDDQSDKGTYTIELENPNSEEVEARKMIDKVTASSFYKLLYQT

SEQ ID NO: 820140 - protein, 644 aa, Homo sapiens
MSLTSWFLVSSGGTRHRLPREMIFVGRDDCELMLQSRSVDKQHAVINYDASTDEHLVKDLGSLNGTFVNDVRIPEQTYITLKLEDKLRFGYDTNLFTVVQGEMRVPEEALKHEKFTIQLQLSQKSSESELSKSASAKSIDSKVADAATEVQHKTTEALKSEEKAMDISAMPRGTPLYGQPSWWGDDEVDEKRAFKTNGKPEEKNHEAGTSGCSIDAKQVEEQSAAANEEVLFPFCREPSYFEIPTKEFQQPSQITESTIHEIPTKDTPSSHITGAGHASFTIEFDDSTPGKVTIRDHVTKFTSDQRHKSKKSSPGTQDLLGIQTGMMAPENKVADWLAQNNPPQMLWERTEEDSKSIKSDVPVYLKRLKGNKHDDGTQSDSENAGAHRRCSKRATLEEHLRRHHSEHKKLQKVQATEKHQDQAVTSSAHHRGGHGVPHGKLLKQKSEEPSVSIPFLQTALLRSSGSLGHRPSQEMDKMLKNQATSATSEKDNDDDQSDKGTYTIELENPNSEEVEARKMIDKVFGVDDNQDYNRPVINEKHKDLIKDWALSSAAAVMEERKPLTTSGFHHSEEGTSSSGSKRWVSQWASLAANHTRHDQEERIMEFSAPLPLENGILFLSFILYPFFLLFLHFSLFLLLFSAFL

SEQ ID NO: 820141 - protein, 498 aa, Homo sapiens
RPPAPARLIPHIPASPLPTTPLPRPPLRLPRARRSGPAGAPPRARTRLSRPVGSGPEPRATSTIASNSWNASSSPGEAREDGPEGLDKGLDNDAEGVWSPDIEQSFQEALAIYPPCGRRKIILSDEGKMYGRNELIARYIKLRTGKTRTRKQVSSHIQVLARKKVREYQVGIKAMNLDQVSKDKALQSMASMSSAQIVSASVLQNKFSPPSPLPQAVFSTSSRFWSSPPLLGQQPGPSQDIKPFAQPAYPIQPPLPPTLSSYEPLAPLPSAAASVPVWQDRTIASSRLRLLEYSAFMEVQRDPDTYSKHLFVHIGQTNPAFSDPPLEAVDVRQIYDKFPEKKGGLKELYEKGPPNAFFLVKFWADLNSTIQEGPGAFYGVSSQYSSADSMTISVSTKVCSFGKQVVEKVETEYARLENGRFVYRIHRSPMCEYMINFIHKLKHLPEKYMMNSVLENFTILQVVTSRDSQETLLVIAFVFEVSTSEHGAQHHVYKLVKD

SEQ ID NO: 820142 - protein, 459 aa, Homo sapiens
RPPAPARLIPHIPASPLPTTPLPRPPLRLPRARRSGPAGAPPRARTRLSRPVGSGPEPRATSTIASNSWNASSSPGEAREDGPEGLDKGLDNDAEGVWSPDIEQSFQEALAIYPPCGRRKIILSDEGKMYGRNELIARYIKLRTGKTRTRKQVSSHIQVLARKKVREYQVGIKAMNLDQVSKDKALQSMASMSSAQIVSASVLQNKFSPPSPLPQAVFSTSSRFWSSPPLLGQQPGPSQDIKPFAQPAYPIQPPLPPTLSSYEPLAPLPSAAASVPVWQDRTIASSRLRLLEYSAFMEVQRDPDTYSKHLFVHIGQTNPAFSDPPLEAVDVRQIYDKFPEKKGGLKELYEKGPPNAFFLVKFWADLNSTIQEGPGAFYGVSSQYSSADSMTISVSTKVCSFGKQVVEKVETEYARLENGRFVYRIHRSPMCEYMINFIHKLKLFQTGHEEGSTAATRPH

SEQ ID NO: 820143 - protein, 214 aa, Homo sapiens
MCLGRRLGVYSLHGGAARPDTYSKHLFVHIGQTNPAFSDPPLEAVDVRQIYDKFPEKKGGLKELYEKGPPNAFFLVKFWADLNSTIQEGPGAFYGVSSQYSSADSMTISVSTKVCSFGKQVVEKVETEYARLENGRFVYRIHRSPMCEYMINFIHKLKHLPEKYMMNSVLENFTILQVVTSRDSQETLLVIAFVFEVSTSEHGAQHHVYKLVKD

SEQ ID NO: 820144 - protein, 164 aa, Homo sapiens
PLQTLQWVDGSRWNFAYWAAHQPWSRGGHCVALLYRVGVLQNKFSPPSPLPQAVFSTSSRFWSSPPLLGQQPGPSQDIKPFAQPAYPIQPPLPPTLSSKFPTRGALPWHLHLHSGELGSNCVCLLWEGGGCDIYRRLDRPGIAPLPCTMLLPDLWHKTIAKPGV

SEQ ID NO: 820145 - protein, 337 aa, Homo sapiens
MSSNLSSFSPSQAMNLDQVSKDKALQSMASMSSAQIVSASVLQNKFSPPSPLPQAVFSTSSRFWSSPPLLGQQPGPSQDIKPFAQPAYPIQPPLPPTLSSYEPLAPLPSAAASVPVWQDRTIASSRLRLLEYSAFMEVQRDPDTYSKHLFVHIGQTNPAFSDPPLEAVDVRQIYDKFPEKKGGLKELYEKGPPNAFFLVKFWADLNSTIQEGPGAFYGVSSQYSSADSMTISVSTKVCSFGKQVVEKVETEYARLENGRFVYRIHRSPMCEYMINFIHKLKHLPEKYMMNSVLENFTILQVVTSRDSQETLLVIAFVFEVSTSEHGAQHHVYKLVKD

SEQ ID NO: 820146 - protein, 324 aa, Homo sapiens
MNLDQVSKDKALQSMASMSSAQIVSASVLQNKFSPPSPLPQAVFSTSSRFWSSPPLLGQQPGPSQDIKPFAQPAYPIQPPLPPTLSSYEPLAPLPSAAASVPVWQDRTIASSRLRLLEYSAFMEVQRDPDTYSKHLFVHIGQTNPAFSDPPLEAVDVRQIYDKFPEKKGGLKELYEKGPPNAFFLVKFWADLNSTIQEGPGAFYGVSSQYSSADSMTISVSTKVCSFGKQVVEKVETEYARLENGRFVYRIHRSPMCEYMINFIHKLKHLPEKYMMNSVLENFTILQVVTSRDSQETLLVIAFVFEVSTSEHGAQHHVYKLVKD

SEQ ID NO: 820147 - protein, 289 aa, Homo sapiens
MDAEGPLGLVSSLQFWSSPPLLGQQPGPSQDIKPFAQPAYPIQPPLPPTLSSYEPLAPLPSAAASVPVWQDRTIASSRLRLLEYSAFMEVQRDPDTYSKHLFVHIGQTNPAFSDPPLEAVDVRQIYDKFPEKKGGLKELYEKGPPNAFFLVKFWADLNSTIQEGPGAFYGVSSQYSSADSMTISVSTKVCSFGKQVVEKVETEYARLENGRFVYRIHRSPMCEYMINFIHKLKHLPEKYMMNSVLENFTILQVVTSRDSQETLLVIAFVFEVSTSEHGAQHHVYKLVKD

SEQ ID NO: 820148 - protein, 525 aa, Homo sapiens
RPPAPARLIPHIPASPLPTTPLPRPPLRLPRARRSGPAGAPPRARTRLSRPVGSGPEPRATSTIASNSWNASSSPGEAREDGPEGLDKGLDNDAEGVWSPDIEQSFQEALAIYPPCGRRKIILSDEGKMYGRNELIARYIKLRTGKTRTRKQVSSHIQVLARKKVREYQVGIKAMNLDQVSKDKALQSMASMSSAQIVSASVLQNKFSPPSPLPQAVFSTSSRFWSSPPLLGQQPGPSQDIKPFAQPAYPIQPPLPPTLSSYEPLAPLPSAAASVPVWQDRTIASSRLRLLEYSAFMEVQRDPDTYSKHLFVHIGQTNPAFSDPPLEAVDVRQIYDKFPEKKGGLKELYEKGPPNAFFLVKFWATIYRATILGRSPGEPFIIVGHSIFDVTRHHDVELATDLIHASSRPKVVASRLAKAGLVMMIRLRDLSTALGVVGNGLHWMLRVVTARPRSYCVDDTVSHRFIPGRHLPEKYMMNSVLENFTILQVVTSRDSQETLLVIAFVFEVSTSEHGAQHHVYKLVKD

SEQ ID NO: 820149 - protein, 214 aa, Homo sapiens; identical to SEQ ID NO: 820143

SEQ ID NO: 820150 - protein, 498 aa, Homo sapiens; identical to SEQ ID NO: 820141

SEQ ID NO: 820151 - protein, 498 aa, Homo sapiens
RPPAPARLIPHIPASPLPTTPLPRPPLRLPRARRSGPAGAPPRARTRLSRPVGSGPEPRATSTIASNSWNASSSPGEAREDGPEGLDKGLDNDAEGVWSPDIEQSFQEALAIYPPCGRRKIILSDEGKMYGRNELIARYIKLRTGKTRTRKQVSSHIQVLARKKVREYQVGIKAMNLDQVSKDKALQSMASMSSAQIVSASVLQNKFSPPSPLPQAVFSTSSRFWSSPPLLGQQPGPSQDIKPFAQPAYPIQPPLPPTLSSYEPLAPLPSAAASVPVWQDRTIASSRLRLLEYSAFMEVQRDPDTYSKHLFVHIGQTNPAFSDPPLEAVDVRQIYDKFPEKKGGLKELYEKGPPNAFFLVKFWADLNSTIQEGPGAFYGVSSQYSSADSMTISVSTKVCSFGKQVVEKVETEYARLENGRFVYRIHRSPMCEYMINFIHKLKHLPEKYMMNSVLENFTILQVVTSRDSQETLLVIAFVFEVSTSEHGAQHHVYKLVKE

SEQ ID NO: 820152 - protein, 447 aa, Homo sapiens
RPPAPARLIPHIPASPLPTTPLPRPPLRLPRARRSGPAGAPPRARTRLSRPVGSGPEPRATSTIASNSWNASSSPGEAREDGPEGLDKGLDNDAEGVWSPDIEQSFQEALAIYPPCGRRKIILSDEGKMYGRNELIARYIKLRTGKTRTRKQVSSHIQVLARKKVREYQVGIKAMNLDQVSKDKALQSMASMSSAQIVSASVLQNKFSPPSPLPQAVFSTSSRFWSSPPLLGQQPGPSQDIKPFAQPAYPIQPPLPPTLSSYEPLAPLPSAAASVPVWQDRTIASSRLRLLEYSAFMEVQRDPDTYSKHLFVHIGQTNPAFSDPPLEAVDVRQIYDKFPEKKGGLKELYEKGPPNAFFLVKFWADLNSTIQEGPGAFYGVSSQYSSADSMTISVSTKVCSFGKQVVEKVETEYARLENGRFVYRIHRSPMCEYMINFIHKLKPARAS

SEQ ID NO: 820153 - protein, 130 aa, Homo sapiens
MSSNLSSFSPSQAMNLDQVSKDKALQSMASMSSAQIVSASVLQNKFSPPSPLPQAVFSTSSRFWSSPPLLGQQPGPSQDIKPFAQPAYPIQPPLPPTLSSYEPLAPLPSAAASVPVWQDRTIARPPPNPT

SEQ ID NO: 820154 - protein, 167 aa, Homo sapiens
MSSNLSSFSPSQAMNLDQVSKDKALQSMASMSSAQIVSASVLQNKFSPPSPLPQAVFSTSSRFWSSPPLLGQQPGPSQDIKPFAQPAYPIQPPLPPTLSSKFPTRGALPWHLHLHSGELGSNCVCLLWEGGGCDIYRRLGQARNSPFTLYNVASRSLAQNHSQARRG

SEQ ID NO: 820155 - protein, 321 aa, Homo sapiens
RPPAPARLIPHIPASPLPTTPLPRPPLRLPRARRSGPAGAPPRARTRLSRPVGSGPEPRATSTIASNSWNASSSPGEAREDGPEGLDKGLDNDAEGVWSPDIEQSFQEALAIYPPCGRRKIILSDEGKMYGRNELIARYIKLRTGKTRTRKQVSSHIQVLARKKVREYQVGIKAMNLDQVSKDKALQSMASMSSAQIVSASVLQNKFSPPSPLPQAVFSTSSRFWSSPPLLGQQPGPSQDIKPFAQKDDEYLDKVERNIKKSLQEHLPDVVVYNAGTDILEGDRLGGLSISPAGIVKRDELVFQDGPCHRVPILMVHSGGI

SEQ ID NO: 820156 - protein, 80 aa, Homo sapiens
LVPVPVCLSPRLSRPVGSGPEPRATSTIASNSWNASSSPGEAREDGPEGLDKGLDNDAEGVWSPDIEQSFQEALAIYPPC

SEQ ID NO: 820157 - protein, 712 aa, Homo sapiens
MAGGPGPGEPAAPGAQHFLYEVPPWVMCRFYKVMDALEPADWCQFAALIVRDQTELRLCERSGQRTASVLWPWINRNARVADLVHILTHLQLLRARDIITAWHPPAPLPSPGTTAPRPSSIPAPAEAEAWSPRKLPSSASTFLSPAFPGSQTHSGPELGLVPSPASLWPPPPSPAPSSTKPGPESSVSLLQGARPSPFCWPLCEISRGTHNFSEELKIGEGGFGCVYRAVMRNTVYAVKRLKENADLEWTAVKQSFLTEVEQLSRFRHPNIVDFAGYCAQNGFYCLVYGFLPNGSLEDRLHCQTQACPPLSWPQRLDILLGTARAIQFLHQDSPSLIHGDIKSSNVLLDERLTPKLGDFGLARFSRFAGSSPSQSSMVARTQTVRGTLAYLPEEYIKTGRLAVDTDTFSFGVVVLETLAGQRAVKTHGARTKYLKDLVEEEAEEAGVALRSTQSTLQAGLAADAWAAPIAMQIYKKHLDPRPGPCPPELGLGLGQLACCCLHRRAKRRPPMTQVYERLEKLQAVVAGVPGHLEAASCIPPSPQENSYVSSTGRAHSGAAPWQPLAAPSGASAQAAEQLQRGPNQPVESDESLGGLSAALRSWHLTPSCPLDPAPLREAGCPQGDTAGESSWGSGPGSRPTAVEGLALGSSASSSSEPPQIIINPARQKMVQKLALYEDGALDSLQLLSSSSLPGLGLEQDRQGPEESDEFQS

SEQ ID NO: 820158 - protein, 712 aa, Homo sapiens; identical to SEQ ID NO: 820157

SEQ ID NO: 820159 - protein, 686 aa, Homo sapiens [sequence omitted]

SEQ ID NO: 820160 - protein, 482 aa, Homo sapiens
MRNTVYAVKRLKENADLEWTAVKQSFLTEVEQLSRFRHPNIVDFAGYCAQNGFYCLVYGFLPNGSLEDRLHCQTQACPPLSWPQRLDILLGTARAIQFLHQDSPSLIHGDIKSSNVLLDERLTPKLGDFGLARFSRFAGSSPSQSSMVARTQTVRGTLAYLPEEYIKTGRLAVDTDTFSFGVVVLETLAGQRAVKTHGARTKYLKDLVEEEAEEAGVALRSTQSTLQAGLAADAWAAPIAMQIYKKHLDPRPGPCPPELGLGLGQLACCCLHRRAKRRPPMTQVYERLEKLQAVVAGVPGHLEAASCIPPSPQENSYVSSTGRAHSGAAPWQPLAAPSGASAQAAEQLQRGPNQPVESDESLGGLSAALRSWHLTPSCPLDPAPLREAGCPQGDTAGESSWGSGPGSRPTAVEGLALGSSASSSSEPPQIIINPARQKMVQKLALYEDGALDSLQLLSSSSLPGLGLEQDRQGPEESDEFQS

SEQ ID NO: 820161 - protein, 682 aa, Homo sapiens [sequence omitted]

SEQ ID NO: 820162 - protein, 699 aa, Homo sapiens [sequence omitted]

SEQ ID NO: 820163 - protein, 633 aa, Homo sapiens
MAGGPGPGEPAAPGAQHFLYEVPPWVMCRFYKVMDALEPADWCQFAALIVRDQTELRLCERSGQRTASVLWPWINRNARVADLVHILTHLQLLRARDIITAWHPPAPLPSPGTTAPRPSSIPAPAEAEAWSPRKLPSSASTFLSPAFPGSQTHSGPELGLVPSPASLWPPPPSPAPSSTKPGPESSVSLLQGARPSPFCWPLCEISRGTHNFSEELKIGEGGFGCVYRAVMRNTVYAVKRLKENADLEWTAVKQSFLTEVEQLSRFRHPNIVDFAGYCAQNGFYCLVYGFLPNGSLEDRLHCQTQACPPLSWPQRLDILLGTARAIQFLHQDSPSLIHGDIKSSNVLLDERLTPKLGDFGLARFSRFAGSSPSQSSMVARTQTVRGTLAYLPEEYIKTGRLAVDTDTFSFGVVVLETLAGQRAVKTHGARTKYLVYERLEKLQAVVAGVPGHLEAASCIPPSPQENSYVSSTGRAHSGAAPWQPLAAPSGASAQAAEQLQRGPNQPVESDESLGGLSAALRSWHLTPSCPLDPAPLREAGCPQGDTAGESSWGSGPGSRPTAVEGLALGSSASSSSEPPQIIINPARQKMVQKLALYEDGALDSLQLLSSSSLPGLGLEQDRQGPEESDEFQS

SEQ ID NO: 820164 - protein, 699 aa, Homo sapiens
MAGGPGPGEPAAPGAQHFLYEVPPWVMCRFYKVMDALEPADWCQFAALIVRDQTELRLCERSGQRTASVLWPWINRNARVADLVHILTHLQLLRARDIITAWHPPAPLPSPGTTAPRPSSIPAPAEAEAWSPRKLPSSASTFLSPAFPGSQTHSGPELGLVPSPASLWPPPPSPAPSSTKPGPESSVSLLQGARPSPFCWPLCEISRGTHNFSEELKIGEGGFGCVYRAVMRNTVYAVKRLKENADLEWTAVKQSFLTEVEQLSRFRHPNIVDFAGYCAQNGFYCLVYGFTQACPPLSWPQRLDILLGTARAIQFLHQDSPSLIHGDIKSSNVLLDERLTPKLGDFGLARFSRFAGSSPSQSSMVARTQTVRGTLAYLPEEYIKTGRLAVDTDTFSFGVVVLETLAGQRAVKTHGARTKYLKDLVEEEAEEAGVALRSTQSTLQAGLAADAWAAPIAMQIYKKHLDPRPGPCPPELGLGLGQLACCCLHRRAKRRPPMTQVYERLEKLQAVVAGVPGHLEAASCIPPSPQENSYVSSTGRAHSGAAPWQPLAAPSGASAQAAEQLQRGPNQPVESDESLGGLSAALRSWHLTPSCPLDPAPLREAGCPQGDTAGESSWGSGPGSRPTAVEGLALGSSASSSSEPPQIIINPARQKMVQKLALYEDGALDSLQLLSSSSLPGLGLEQDRQGPEESDEFQS

SEQ ID NO: 820165 - protein, 824 aa, Homo sapiens
MAGGPGPGEPAAPGAQHFLYEVPPWVMCRFYKVMDALEPADWCQFAALIVRDQTELRLCERSGQRTASVLWPWINRNARVADLVHILTHLQLLRARDIITAWHPPAPLPSPGTTAPRPSSIPAPAEAEAWSPRKLPSSASTFLSPAFPGSQTHSGPELGLVPSPASLWPPPPSPAPSSTKPGPESSVSLLQGARPSPFCWPLCEISRGTHNFSEELKIGEGGFGCVYRAVMRNTVYAVKRLKENADLEWTAVKQSFLTEVEQLSRFRHPNIVDFAGYCAQNGFYCLVYGFLPNGSLEDRLHCQTQACPPLSWPQRLDILLGTARAIQFLHQDSPSLIHGDIKSSNVLLDERLTPKLGDFGLARFSRFAGSSPSQSSMVARTQTVRGTLAYLPEEYIKTGRLAVDTDTFSFGVVSPDPSAGSEEEKPQAGRGGGCRVHCGPGAICQDPRRLQLQGPPPSEALLLTLHLTVCLNLSSSGLSELPELQSHNIWLCLCPHPCQAQSMSTPEASSLPGHCHALPLPSLQVVLETLAGQRAVKTHGARTKYLKDLVEEEAEEAGVALRSTQSTLQAGLAADAWAAPIAMQIYKKHLDPRPGPCPPELGLGLGQLACCCLHRRAKRRPPMTQVYERLEKLQAVVAGVPGHLEAASCIPPSPQENSYVSSTGRAHSGAAPWQPLAAPSGASAQAAEQLQRGPNQPVESDESLGGLSAALRSWHLTPSCPLDPAPLREAGCPQGDTAGESSWGSGPGSRPTAVEGLALGSSASSSSEPPQIIINPARQKMVQKLALYEDGALDSLQLLSSSSLPGLGLEQDRQGPEESDEFQS

SEQ ID NO: 820166 - protein, 242 aa, Homo sapiens
MQIYKKHLDPRPGPCPPELGLGLGQLACCCLHRRAKRRPPMTQVYERLEKLQAVVAGVPGHLEAASCIPPSPQENSYVSSTGRAHSGAAPWQPLAAPSGASAQAAEQLQRGPNQPVESDESLGGLSAALRSWHLTPSCPLDPAPLREAGCPQGDTAGESSWGSGPGSRPTAVEGLALGSSASSSSEPPQIIINPARQKMVQKLALYEDGALDSLQLLSSSSLPGLGLEQDRQGPEESDEFQS

SEQ ID NO: 820167 - protein, 662 aa, Homo sapiens
MAGGPGPGEPAAPGAQHFLYEVPPWVMCRFYKVMDALEPADWCQFAALIVRDQTELRLCERSGQRTASVLWPWINRNARVADLVHILTHLQLLRARDIITAWHPPAPLPSPGTTAPRPSSIPAPAEAEAWSPRKLPSSASTFLSPAFPGSQTHSGPELGLVPSPASLWPPPPSPAPSSTKPGPESSVSLLQGARPSPFCWPLCEISRGTHNFSEELKIGEGGFGCVYRAVMRNTVYAVKRLKENADLEWTAVKQSFLTEVEQLSRFRHPNIVDFAGYCAQNGFYCLVYGFLPNGSLEDRLHCQTQACPPLSWPQRLDILLGTARAIQFLHQDSPSLIHGDIKSSNVLLDERLTPKLGDFGLARFSRFAGSSPSQSSMVARTQTVRGTLAYLPEEYIKTGRLAVDTDTFSFGVVVLETLAGQRAVKTHGARTKYLKDLVEEEAEEAGVALRSTQSTLQAGLAADAWAAPIAMQIYKKHLDPRPGPCPPELGLGLGQLACCCLHRRAKRRPPMTQVYERLEKLQAVVAGVPGHLEAASCIPPSPQENSYVSSTGRAHSGAAPWQPLAAPSGASAQAAEQLQRGPNQPVESDESLGGLSAALRSWHLTPSCPLDPAPLREAGCPQGDTAGESSWGSGPGSRPTAVEGLGLEQDRQGPEESDEFQS

SEQ ID NO: 820168 - protein, 271 aa, Homo sapiens
MVVLETLAGQRAVKTHGARTKYLKDLVEEEAEEAGVALRSTQSTLQAGLAADAWAAPIAMQIYKKHLDPRPGPCPPELGLGLGQLACCCLHRRAKRRPPMTQENSYVSSTGRAHSGAAPWQPLAAPSGASAQAAEQLQRGPNQPVESDESLGGLSAALRSWHLTPSCPLDPAPLREAGCPQGDTAGESSWGSGPGSRPTAVEGLALGSSASSSSEPPQIIINPARQKMVQKLALYEDGALDSLQLLSSSSLPGLGLEQDRQGPEESDEFQS

SEQ ID NO: 820169 - protein, 217 aa, Homo sapiens
  misc_feature (4)..(4): Xaa can be any naturally occurring amino acid
  misc_feature (7)..(7): Xaa can be any naturally occurring amino acid
MVYXRIXDMSTTPRSYDQVYERLEKLQAVVAGVPGHLEAASCIPPSPQENSYVSSTGRAHSGAAPWQPLAAPSGASAQAAEQLQRGPNQPVESDESLGGLSAALRSWHLTPSCPLDPAPLREAGCPQGDTAGESSWGSGPGSRPTAVEGLALGSSASSSSEPPQIIINPARQKMVQKLALYEDGALDSLQLLSSSSLPGLGLEQDRQGPEESDEFQS

SEQ ID NO: 820170 - protein, 712 aa, Homo sapiens; identical to SEQ ID NO: 820157

SEQ ID NO: 820171 - protein, 667 aa, Homo sapiens
MAGGPGPGEPAAPGAQHFLYEVPPWVMCRFYKVMDALEPADWCQFAALIVRDQTELRLCERSGQRTASVLWPWINRNARVADLVHILTHLQLLRARDIITAWHPPAPLPSPGTTAPRPSSIPAPAEAEAWSPRKLPSSASTFLSPAFPGSQTHSGPELGLVPSPASLWPPPPSPAPSSTKPGPESSVSLLQGARPSPFCWPLCEISRGTHNFSEELKIGEGGFGCVYRAVMRNTVYAVKRLKENADLEWTAVKQSFLTEVEQLSRFRHPNIVDFAGYCAQNGFYCLVYGFLPNGSLEDRLHCQTQACPPLSWPQRLDILLGTARAIQFLHQDSPSLIHGDIKSSNVLLDERLTPKLGDFGLARFSRFAGSSPSQSSMVARTQTVRGTLAYLPEEYIKTGRLAVDTDTFSFGVVVLETLAGQRAVKTHGARTKYLKDLVEEEAEEAGVALRSTQSTLQAGLAADAWAAPIAMQIYKKHLDPRPGPCPPELGLGLGQLACCCLHRRAKRRPPMTQVYERLEKLQAVVAGVPGHLEAASCIPPSPQENSYVSSTGRAHSGAAPWQPLAAPSGASAQAAEQLQRGPNQPVESDESLGGLSAALRSWHLTPSCPLDPAPCTMGPTRPRALLPAYNLEKCGRVRWLTPVIPALWEAKAGGSLEPSRSRPARAT

SEQ ID NO: 820172 - protein, 712 aa, Homo sapiens; identical to SEQ ID NO: 820157

SEQ ID NO: 820173 - protein, 712 aa, Homo sapiens; identical to SEQ ID NO: 820157

SEQ ID NO: 820174 - protein, 182 aa, Homo sapiens
MAGGPGPGEPAAPGAQHFLYEVPPWVMCRFYKVMDALEPADWCQFAALIVRDQTELRLCERSGQRTASVLWPWINRNARVADLVHILTHLQLLRARDIITAWHPPAPLPSPGTTAPRPSSIPAPAEAEAWSPRKLPSSASTFLSPAFPGSQTHSGPELGLVPSPASLWPPPPSPAPSSTKPG

SEQ ID NO: 820175 - protein, 712 aa, Homo sapiens; identical to SEQ ID NO: 820157

SEQ ID NO: 820176 - protein, 440 aa, Homo sapiens
MAGGPGPGEPAAPGAQHFLYEVPPWVMCRFYKVMDALEPADWCQFAALIVRDQTELRLCERSGQRTASVLWPWINRNARVADLVHILTHLQLLRARDIITAWHPPAPLPSPGTTAPRPSSIPAPAEAEAWSPRKLPSSASTFLSPAFPGSQTHSGPELGLVPSPASLWPPPPSPAPSSTKPGPESSVSLLQGARPSPFCWPLCEISRGTHNFSEELKIGEGGFGCVYRAVMRNTVYAVKRLKENADLEWTAVKQSFLTEVEQLSRFRHPNIVDFAGYCAQNGFYCLVYGFLPNGSLEDRLHCQTQACPPLSWPQRLDILLGTARAIQFLHQDSPSLIHGDIKSSNVLLDERLTPKLGDFGLARFSRFAGSSPSQSSMVARTQTVRGTLAYLPEEYIKTGRLAVDTDTFSFGVVVLETLAGQRAVKTHGARTKYLLARPKT

SEQ ID NO: 820177 - protein, 415 aa, Homo sapiens [sequence omitted]

SEQ ID NO: 820178 - protein, 326 aa, Homo sapiens
MAGGPGPGEPAAPGAQHFLYEVPPWVMCRFYKVMDALEPADWCQFAALIVRDQTELRLCERSGQRTASVLWPWINRNARVADLVHILTHLQLLRARDIITAWHPPAPLPSPGTTAPRPSSIPAPAEAEAWSPRKLPSSASTFLSPAFPGSQTHSGPELGLVPSPASLWPPPPSPAPSSTKPGPESSVSLLQGARPSPFCWPLCEISRGTHNFSEELKIGEGGFGCVYRAVMRNTVYAVKRLKENADLEWTAVKQSFLTEVEQLSRFRHPNIVDFAGYCAQNGFYCLVYGFLPNGSLEDRLHCQTQACPPLSWPQRLDILLGKSGFM

SEQ ID NO: 820179 - protein, 345 aa, Homo sapiens
MAGGPGPGEPAAPGAQHFLYEVPPWVMCRFYKVMDALEPADWCQFAALIVRDQTELRLCERSGQRTASVLWPWINRNARVADLVHILTHLQLLRARDIITAWHPPAPLPSPGTTAPRPSSIPAPAEAEAWSPRKLPSSASTFLSPAFPGSQTHSGPELGLVPSPASLWPPPPSPAPSSTKPGPESSVSLLQGARPSPFCWPLCEISRGTHNFSEELKIGEGGFGCVYRAVMRNTVYAVKRLKENADLEWTAVKQSFLTEVEQLSRFRHPNIVDFAGYCAQNGFYCLVYGFLPNGSLEDRLHCQTQACPPLSWPQRLDILLGSTGFTVILCSAVSHTTCPREAGHW

SEQ ID NO: 820180 - protein, 203 aa, Homo sapiens
MAGGPGPGEPAAPGAQHFLYEVPPWVMCRFYKVMDALEPADWCQFAALIVRDQTELRLCERSGQRTASVLWPWINRNARVADLVHILTHLQLLRARDIITACERGTPGTPRLGGRRAPRGSPTRASTFLSFLGSRLALGSSASSSSEPPQIIINPARQKMVQKLALYEDGALDSLQLLSSSSLPGLGLEQDRQGPEESDEFQS

SEQ ID NO: 820181 - protein, 136 aa, Homo sapiens
EGWLGSRNGHPATSPVPLCHPRPRPAHLSPGLSDWTSFWVQPGQFSFYIRTAPASSMETSRGEEGPLRTAGAGPAARGAPRPINVGIRHGLGPQHPGIAQVWERAKEGPTDEQRPPGSWSAQGSASAFCGQGTGLA

SEQ ID NO: 820182 - protein, 41 aa, Homo sapiens
MNFRADVFTWADPPNPEVKVLMVRSSHGARVLSTLPAVGVG

SEQ ID NO: 820183 - protein, 127 aa, Homo sapiens
MKHYGLPWKRTEEAAAGNECFKTTVLSCLGNTFAFLRFSLATMVTLHTAFLNSRAGWSRTPDLMWSSCLGLPRCWDYRHEPLHLARFFIFVKSVLYFNIFKIRLLFRSISICSQGSGSRLSFTHIRW

SEQ ID NO: 820184 - protein, 117 aa, Homo sapiens
MLSRRQLKSESKSKTVLIGVELLLSHPRSLPLSYPDLCSFKERNVHSAPVNPTAGVLCTALHSLKRAWATERDSISKKKKKKIGDYVYRFTTLKPSSSLRTDASNEGKDCMFLMKLP

SEQ ID NO: 820185 - protein, 148 aa, Homo sapiens
MTGWSCLVTGAGGFLGQRIIRLLVKEKELKEIRVLDKAFGPELREEFSKLQNKTKLTVLEGDILDEPFLKRACQDVSVIIHTACIIDVFGVTHRESIMNVNVKGMVGWGGDAARWGIKDHKEGQEGKRSPSTEHLLCSGPSAFADHYE

SEQ ID NO: 820186 - protein, 113 aa, Homo sapiens
YVTSPLSENFSARYRNHSNDLTSAHTELQNKIKLTVLEGDILDEPFLKRACQDVSVVIHTACIIDVFGVTHRQSIMNVNVKAPVGGLCPSYCASLHLHQYPPVSRAQLLQGNH

SEQ ID NO: 820187 - protein, 373 aa, Homo sapiens [sequence omitted]

SEQ ID NO: 820188 - protein, 373 aa, Homo sapiens [sequence omitted]

SEQ ID NO: 820189 - protein, 373 aa, Homo sapiens [sequence omitted]

SEQ ID NO: 820190 - protein, 186 aa, Homo sapiens
MYIYGEGSRFLSASINEALNNNGILSSVGKFSTVNPVYVGNVAWAHILALRALQDPKKAPSIRGQFYYISDDTPHQSYDNLNYTLSKEFGLRLDSRWSFPLSLMYWIGFLLEIVSFLLRPIYTYRPPFNRHIVTLSNSVFTFSYKKAQRDLAYKPLYSWEEAKQKTVEWVGSLVDRHKENLKSKTQ

SEQ ID NO: 820191 - protein, 346 aa, Homo sapiens
RSKTKRGEVCKARTELSEEFLKLQNKTKLTVLEGDILDEPFLKRACQDVSVIIHTACIIDVFGVTHRESIMNVNVKGTQLLLEACVQASVPVFIYTSSIEVAGPNSYKEIIQNGHEEEPLENTWPAPYPHSKKLAEKAVLAANGWNLKNGGTLYTCALRPMYIYGEGSRFLSASINEALNNNGILSSVGKFSTVNPVYVGNVAWAHILALRALQDPKKAPSIRGQFYYISDDTPHQSYDNLNYTLSKEFGLRLDSRWSFPLSLMYWIGFLLEIVSFLLRPIYTYRPPFNRHIVTLSNSVFTFSYKKAQRDLAYKPLYSWEEAKQKTVEWVGSLVDRHKENLKSKTQ

SEQ ID NO: 820192 - protein, 118 aa, Homo sapiens [sequence omitted]

SEQ ID NO: 820193 - protein, 292 aa, Homo sapiens
  misc_feature (235)..(236): Xaa can be any naturally occurring amino acid
  misc_feature (270)..(270): Xaa can be any naturally occurring amino acid
  misc_feature (287)..(287): Xaa can be any naturally occurring amino acid
MTGWSCLVTGAGGFLGQRIIRLLVKEKELKEIRVLDKAFGPELREEFSKLQNKTKLTVLEGDILDEPFLKRACQDVSVIIHTACIIDVFGVTHRESIMNVNVKGTQLLLEACVQASVPVFIYTSSIEVAGPNSYKEIIQNGHEEEPLENTWPAPYPHSKKLAEKAVLAANGWNLKNGGTLYTCALRPMYIYGEGSRFLSASINEALNNNGILSSVGVSLLSVCACAGTLLRLQTXXPAREVSFSMHAHKYVLYTGRVARCSVSFFLCLLXCVYGFICIHIDASRTSXCHTFT

SEQ ID NO: 820194 - protein, 118 aa, Homo sapiens [sequence omitted]

SEQ ID NO: 820195 - protein, 128 aa, Homo sapiens
TIELGPVLHEMCMWVLLGDVIKLHPPGLIQKVTRAQAQVLLPPFHTMANLLYSSCHQNLRSHWPNKKVSVLIIYQRKDHVVCCYQISVADSEQFRDSFNLRVVLTTRAPFLLLNEKGFPFFLIFHSFT

SEQ ID NO: 820196 - protein, 175 aa, Homo sapiens
MTGWSCLVTGAGGFLGQRIIRLLVKEKELKEIRVLDKAFGPELREEFSKLQNKTKLTVLEGDILDEPFLKRACQDVSVIIHTACIIDVFGVTHRESIMNVNVKGTQLLLEACVQASVPVFIYTSSIEVAGPNSYKEIIQNGHEEEPLENTWPAHPYWPAFTPVSDTVCPHIRTGP

SEQ ID NO: 820197 - protein, 154 aa, Homo sapiens
  misc_feature (6)..(6): Xaa can be any naturally occurring amino acid
  misc_feature (25)..(25): Xaa can be any naturally occurring amino acid
  misc_feature (27)..(27): Xaa can be any naturally occurring amino acid
  misc_feature (29)..(30): Xaa can be any naturally occurring amino acid
  misc_feature (34)..(35): Xaa can be any naturally occurring amino acid
  misc_feature (38)..(39): Xaa can be any naturally occurring amino acid
  misc_feature (45)..(45): Xaa can be any naturally occurring amino acid
  misc_feature (51)..(53): Xaa can be any naturally occurring amino acid
  misc_feature (55)..(55): Xaa can be any naturally occurring amino acid
  misc_feature (61)..(61): Xaa can be any naturally occurring amino acid
  misc_feature (63)..(65): Xaa can be any naturally occurring amino acid
  misc_feature (67)..(67): Xaa can be any naturally occurring amino acid
  misc_feature (70)..(71): Xaa can be any naturally occurring amino acid
  misc_feature (74)..(74): Xaa can be any naturally occurring amino acid
  misc_feature (76)..(79): Xaa can be any naturally occurring amino acid
  misc_feature (81)..(81): Xaa can be any naturally occurring amino acid
VTAHQXNNKNRHARPERRQTKNHNXNXNXXAGNXXTQXXRPRWIXSEVNRXXXAXEETNAXPXXXTXAAXXGRXAXXXXRXHQNLRSHWPNKKVSVLIIYQRKDHVVCCYQISVADSEQFRDSFNLRVVLTTRAPFLLLNEKGFPFFLIFHSFT

SEQ ID NO: 820198 - protein, 429 aa, Homo sapiens
MQLRNPELHLGCALALRFLALVSWDIPGARALDNGLARTPTMGWLHWERFMCNLDCQEEPDSCISEKLFMEMAELMVSEGWKDAGYEYLCIDDCWMAPQRDSEGRLQADPQRFPHGIRQLANYVHSKGLKLGIYADVGNKTCAGFPGSFGYYDIDAQTFADWGVDLLKFDGCYCDSLENLADGYKHMSLALNRTGRSIVYSCEWPLYMWPFQKPNYTEIRQYCNHWRNFADIDDSWKSIKSILDWTSFNQERIVDVAGPGGWNDPDMLVIGNFGLSWNQQVTQMALWAIMAAPLFMSNDLRHISPQAKALLQDKDVIAINQDPLGKQGYQLRQGDNFEVWERPLSGLAWAVAMINRQEIGGPRSYTIAVASLGKGVACNPACFITQLLPVKRKLGFYEWTSRLRSHINPTGTVLLQLENTMQMSLKDLL

SEQ ID NO: 820199 - protein, 211 aa, Homo sapiens
MQLRNPELHLGCALALRFLALVSWDIPGARALDNGLARTPTMGWLHWERFMCNLDCQEEPDSCISEKLFMEMAELMVSEGWKDAGYEYLCIDDCWMAPQRDSEGRLQADPQRFPHGIRQLANYVHSKGLKLGIYADVGNKTCAGFPGSFGYYDIDAQTFADWGVDLLKFDGCYCDSLENLADGNVSFQRFSHKGKNFEAMVAEPKNQSSEF

SEQ ID NO: 820200 - protein, 270 aa, Homo sapiens
MQLRNPELHLGCALALRFLALVSWDIPGARALDNGLARTPTMGWLHWERFMCNLDCQEEPDSCISEKLFMEMAELMVSEGWKDAGYEYLCIDDCWMAPQRDSEGRLQADPQRFPHGIRQLANYVHSKGLKLGIYADVGNKTCAGFPGSFGYYDIDAQTFADWGVDLLKFDGCYCDSLENLADGYKHMSLALNRTGRSIVYSCEWPLYMWPFQKPNYTEIRQYCNHWRNFADIDDSWKSIKSILDWTSFNQERIVDVAGPGGWNDPDMVKT

SEQ ID NO: 820201 - protein, 222 aa, Homo sapiens
MQLRNPELHLGCALALRFLALVSWDIPGARALDNGLARTPTMGWLHWERFMCNLDCQEEPDSCISEKLFMEMAELMVSEGWKDAGYEYLCIDDCWMAPQRDSEGRLQADPQRFPHGIRQLANYVHSKGLKLGIYADVGNKTCAGFPGSFGYYDIDAQTFADWGVDLLKFDGCYCDSLENLADGESRLSIGHRERSIFIPAFPQYTHHLCTTSSEQSQQSGRL

SEQ ID NO: 820202 - protein, 211 aa, Homo sapiens; identical to SEQ ID NO: 820199

SEQ ID NO: 820203 - protein, 163 aa, Homo sapiens
MQLRNPELHLGCALALRFLALVSWDIPGARALDNGLARTPTMGWLHWERFMCNLDCQEEPDSCISEKLFMEMAELMVSEGWKDAGYEYLCIDDCWMAPQRDSEGRLQADPQRFPHGIRQLANYVHSKGLKLGIYADVGNKTCAGFPGSFGYYDIDAQTFADWL

SEQ ID NO: 820204 - protein, 213 aa, Homo sapiens
MFKTYKERDLDFDWHKEKADQLVERWQNVHVQIDNRLRDLEGIGKSLKYYRDTYHPLDDWIQQVETTQRKIQENQPENSKTLATQLNQQKMLVSEIEMKQSKMDECQKYAEQYSATVKDYELQTMTYRAMVDSQQKSPVKRRRMQSSADLIIQEFMDLRTRYTALVTLMTQYIKFAGDSLKRLEEEEKSLEEEKKEHVEKAKELQKWVSNISK

SEQ ID NO: 820205 - protein, 2975 aa, Homo sapiens
MAGYLSPAAYLYVEEQEYLQAYEDVLERYKDERDKVQKKTFTKWINQHLMKVRKHVNDLYEDLRDGHNLISLLEVLSGDTLPREKGRMRFHRLQNVQIALDYLKRRQVKLVNIRNDDITDGNPKLTLGLIWTIILHFQISDIHVTGESEDMSAKERLLLWTQQATEGYAGIRCENFTTCWRDGKLFNAIIHKYRPDLIDMNTVAVQSNLANLEHAFYVAEKIGVIRLLDPEDVDVSSPDEKSVITYVSSLYDAFPKVPEGGEGIGANDVEVKWIEYQNMVNYLIQWIRHHVTTMSERTFPNNPVELKALYNQYLQFKETEIPPKETEKSKIKRLYKLLEIWIEFGRIKLLQGYHPNDIEKEWGKLIIAMLEREKALRPEVERLEMLQQIANRVQRDSVICEDKLILAGNALQSDSKRLESGVQFQNEAEIAGYILECENLLRQHVIDVQILIDGKYYQADQLVQRVAKLRDEIMALRNECSSVYSKGRILTTEQTKLMISGITQSLNSGFAQTLHPSLTSGLTQSLTPSLTSSSMTSGLSSGMTSRLTPSVTPAYTPGFPSGLVPNFSSGVEPNSLQTLKLMQIRKPLLKSSLLDQNLTEEEINMKFVQDLLNWVDEMQVQLDRTEWGSDLPSVESHLENHKNVHRAIEEFESSLKEAKISEIQMTAPLKLTYAEKLHRLESQYAKLLNTSRNQERHLDTLHNFVSRATNELIWLNEKEEEEVAYDWSERNTNIARKKDYHAELMRELDQKEENIKSVQEIAEQLLLENHPARLTIEAYRAAMQTQWSWILQLCQCVEQHIKENTAYFEFFNDAKEATDYLRNLKDAIQRKYSCDRSSSIHKLEDLVQESMEEKEELLQYKSTIANLMGKAKTIIQLKPRNSDCPLKTSIPIKAICDYRQIEITIYKDDECVLANNSHRAKWKVISPTGNEAMVPSVCFTVPPPNKEAVDLANRIEQQYQNVLTLWHESHINMKSVVSWHYLINEIDRIRASNVASIKTMLPGEHQQVLSNLQSRFEDFLEDSQESQVFSGSDITQLEKEVNVCKQYYQELLKSAEREEQEESVYNLYISEVRNIRLRLENCEDRLIRQIRTPLERDDLHESVFRITEQEKLKKELERLKDDLGTITNKCEEFFSQAAASSSVPTLRSELNVVLQNMNQVYSMSSTYIDKLKTVNLVLKNTQAAEALVKLYETKLCEEEAVIADKNNIENLISTLKQWRSEVDEKRQVFHALEDELQKAKAISDEMFKTYKERDLDFDWHKEKADQLVERWQNVHVQIDNRLRDLEGIGKSLKYYRDTYHPLDDWIQQVETTQRKIQENQPENSKTLATQLNQQKMLVSEIEMKQSKMDECQKYAEQYSATVKDYELQTMTYRAMVDSQQKSPVKRRRMQSSADLIIQEFMDLRTRYTALVTLMTQYIKFAGDSLKRLEEEEIKRCKETSEHGAYSDLLQRQKATVLENSKLTGKISELERMVAELKKQKSRVEEELPKVREAAENELRKQQRNVEDISLQKIRAESEAKQYRRELETIVREKEAAERELERVRQLTIEAEAKRAAVEENLLNFRNQLEENTFTRRTLEDHLKRKDLSLNDLEQQKNKLMEELRRKRDNEEELLKLIKQMEKDLAFQKQVAEKQLKEKQKIELEARRKITEIQYTCRENALPVCPITQATSCRAVTGLQQEHDKQKAEELKQQVDELTAANRKAEQDMRELTYELNALQLEKTSSEEKARLLKDKLDETNNTLRCLKLELERKDQAEKGYSQQLRELGRQLNQTTGKAEEAMQEASDLKKIKRNYQLELESLNHEKGKLQREVDRITRAHAVAEKNIQHLNSQIHSFRDEKELERLQICQRKSDHLKEQFEKSHEQLLQNIKAEKENNDKIQRLNEELEKSNECAEMLKQKVEELTRQNNETKLMMQRIQAESENIVLEKQTIQQRCEALKIQADGFKDQLRSTNEHLHKQTKTEQDFQRKIKCLEEDLAKSQNLVSEFKQKCDQQNIIIQNTKKEVRNLNAELNASKEEKRRGEQKVQLQQAQVQELNNRLKKVQDELHLKTIEEQMTHRKMVLFQEESGKFKQSAEEFRKKMEKLMESKVITENDISGIRLDFVSLQQENSRAQENAKLCETNIKELERQLQQYREQMQQGQHMEANHYQKCQKLEDELIAQKREVENLKQKMDQQIKEHEHQLVLLQCEIQKKSTAKDCTFKPDFEMTVKECQHSGELSSRNTGHLHPTPRSPLLRWTQEPQPLEEKWQHRVVEQIPKEVQFQPPGAPLEKEKSQQCYSEYFSQTSTELQITFDETNPITRLSEIEKIRDQALNNSRPPVRYQDNACEMELVKVLTPLEIAKNKQYDMHTEVTTLKQEKNPVPSAEEWMLEGCRASGGLKKGDFLKKGLEPETFQNFDGDHACSVRDDEFKFQGLRHTVTARQLVEAKLLDMRTIEQLRLGLKTVEEVQKTLNKFLTKATSIAGLYLESTKEKISFASAAERIIIDKMVALAFLEAQAATGFIIDPISGQTYSVEDAVLKGVVDPEFRIRLLEAEKAAVGYSYSSKTLSVFQAMENRMLDRQKGKHILEAQIASGGVIDPVRGIRVPPEIALQQGLLNNAILQFLHEPSSNTRVFPNPNNKQALYYSELLRMCVFDVESQCFLFPFGERNISNLNVKKTHRISVVDTKTGSELTVYEAFQRNLIEKSIYLELSGQQYQWKEAMFFESYGHSSHMLTDTKTGLHFNINEAIEQGTIDKALVKKYQEGLITLTELADSLLSRLVPKKDLHSPVAGYWLTASGERISVLKASRRNLVDRITALRCLEAQVSTGGIIDPLTGKKYRVAEALHRGLVDEGFAQQLRQCELVITGIGHPITNKMMSVVEAVNANIINKEMGIRCLEFQYLTGGLIEPQVHSRLSIEEALQVGIIDVLIATKLKDQKSYVRNIICPQTKRKLTYKEALEKADFDFHTGLKLLEVSEPLMTGISSLYYSS

SEQ ID NO: 820206 - protein, 3091 aa, Homo sapiens
MGNVCGCVRAEKEEQYVDPAKTPLNPEKYSPGRKYFRRKPIKKTGGDKESVGANNENEGKKKSSSQPSKEQPAPLSRGLVQQESVTLNSALGDGIQQKKTEVVADSVKQKLLPSAVSSWSDCVNTSPAKDSETEVKVSELDERISEKDSTPYCAKRKKHLDDVNTSEITFQEKTDVFSFRKAASLSSIPSGIERSLEKSGFPEDPPKSYSSIQEKQNTERFCPHATQHFQFKKKRCHSLYTSMSSVSKDTDGNEISDIHVTGESEDMSAKERLLLWTQQATEGYAGIRCENFTTCWRDGKLFNAIIHKYRPDLIDMNTVAVQSNLANLEHAFYVAEKIGVIRLLDPEDVDVSSPDEKSVITYVSSLYDAFPKVPEGGEGIGANDVEVKWIEYQNMVNYLIQWIRHHVTTMSERTFPNNPVELKALYNQYLQFKETEIPPKETEKSKIKRLYKLLEIWIEFGRIKLLQGYHPNDIEKEWGKLIIAMLEREKALRPEVERLEMLQQIANRVQRDSVICEDKLILAGNALQSDSKRLESGVQFQNEAEIAGYILECENLLRQHVIDVQILIDGKYYQADQLVQRVAKLRDEIMALRNECSSVYSKGRILTTEQTKLMISGITQSLNSGFAQTLHPSLTSGLTQSLTPSLTSSSMTSGLSSGMTSRLTPSVTPAYTPGFPSGLVPNFSSGVEPNSLQTLKLMQIRKPLLKSSLLDQNLTEEEINMKFVQDLLNWVDEMQVQLDRTEWGSDLPSVESHLENHKNVHRAIEEFESSLKEAKISEIQMTAPLKLTYAEKLHRLESQYAKLLNTSRNQERHLDTLHNFVSRATNELIWLNEKEEEEVAYDWSERNTNIARKKDYHAELMRELDQKEENIKSVQEIAEQLLLENHPARLTIEAYRAAMQTQWSWILQLCQCVEQHIKENTAYFEFFNDAKEATDYLRNLKDAIQRKYSCDRSSSIHKLEDLVQESMEEKEELLQYKSTIANLMGKAKTIIQLKPRNSDCPLKTSIPIKAICDYRQIEITIYKDDECVLANNSHRAKWKVISPTGNEAMVPSVCFTVPPPNKEAVDLANRIEQQYQNVLTLWHESHINMKSVVSWHYLINEIDRIRASNVASIKTMLPGEHQQVLSNLQSRFEDFLEDSQESQVFSGSDITQLEKEVNVCKQYYQELLKSAEREEQEESVYNLYISEVRNIRLRLENCEDRLIRQIRTPLERDDLHESVFRITEQEKLKKELERLKDDLGTITNKCEEFFSQAAASSSVPTLRSELNVVLQNMNQVYSMSSTYIDKLKTVNLVLKNTQAAEALVKLYETKLCEEEAVIADKNNIENLISTLKQWRSEVDEKRQVFHALEDELQKAKAISDEMFKTYKERDLDFDWHKEKADQLVERWQNVHVQIDNRLRDLEGIGKSLKYYRDTYHPLDDWIQQVETTQRKIQENQPENSKTLATQLNQQKMLVSEIEMKQSKMDECQKYAEQYSATVKDYELQTMTYRAMVDSQQKSPVKRRRMQSSADLIIQEFMDLRTRYTALVTLMTQYIKFAGDSLKRLEEEEIKRCKETSEHGAYSDLLQRQKATVLENSKLTGKISELERMVAELKKQKSRVEEELPKVREAAENELRKQQRNVEDISLQKIRAESEAKQYRRELETIVREKEAAERELERVRQLTIEAEAKRAAVEENLLNFRNQLEENTFTRRTLEDHLKRKDLSLNDLEQQKNKLMEELRRKRDNEEELLKLIKQMEKDLAFQKQVAEKQLKEKQKIELEARRKITEIQYTCRENALPVCPITQATSCRAVTGLQQEHDKQKAEELKQQVDELTAANRKAEQDMRELTYELNALQLEKTSSEEKARLLKDKLDETNNTLRCLKLELERKDQAEKGYSQQLRELGRQLNQTTGKAEEAMQEASDLKKIKRNYQLELESLNHEKGKLQREVDRITRAHAVAEKNIQHLNSQIHSFRDEKELERLQICQRKSDHLKEQFEKSHEQLLQNIKAEKENNDKIQRLNEELEKSNECAEMLKQKVEELTRQNNETKLMMQRIQAESENIVLEKQTIQQRCEALKIQADGFKDQLRSTNEHLHKQTKTEQDFQRKIKCLEEDLAKSQNLVSEFKQKCDQQNIIIQNTKKEVRNLNAELNASKEEKRRGEQKVQLQQAQVQELNNRLKKVQDELHLKTIEEQMTHRKMVLFQEESGKFKQSAEEFRKKMEKLMESKVITENDISGIRLDFVSLQQENSRAQENAKLCETNIKELERQLQQYREQMQQGQHMEANHYQKCQKLEDELIAQKREVENLKQKMDQQIKEHEHQLVLLQCEIQKKSTAKDCTFKPDFEMTVKECQHSGELSSRNTGHLHPTPRSPLLRWTQEPQPLEEKWQHRVVEQIPKEVQFQPPGAPLEKEKSQQCYSEYFSQTSTELQITFDETNPITRLSEIEKIRDQALNNSRPPVRYQDNACEMELVKVLTPLEIAKNKQYDMHTEVTTLKQEKNPVPSAEEWMLEGCRASGGLKKGDFLKKGLEPETFQNFDGDHACSVRDDEFKFQGLRHTVTARQLVEAKLLDMRTIEQLRLGLKTVEEVQKTLNKFLTKATSIAGLYLESTKEKISFASAAERIIIDKMVALAFLEAQAATGFIIDPISGQTYSVEDAVLKGVVDPEFRIRLLEAEKAAVGYSYSSKTLSVFQAMENRMLDRQKGKHILEAQIASGGVIDPVRGIRVPPEIALQQGLLNNAILQFLHEPSSNTRVFPNPNNKQALYYSELLRMCVFDVESQCFLFPFGERNISNLNVKKTHRISVVDTKTGSELTVYEAFQRNLIEKSIYLELSGQQYQWKEAMFFESYGHSSHMLTDTKTGLHFNINEAIEQGTIDKALVKKYQEGLITLTELADSLLSRLVPKKDLHSPVAGYWLTASGERISVLKASRRNLVDRITALRCLEAQVSTGGIIDPLTGKKYRVAEALHRGLVDEGFAQQLRQCELVITGIGHPITNKMMSVVEAVNANIINKEMGIRCLEFQYLTGGLIEPQVHSRLSIEEALQVGIIDVLIATKLKDQKSYVRNIICPQTKRKLTYKEALEKADFDFHTGLKLLEVSEPLMTGISSLYYSS

SEQ ID NO: 820207 - protein, 2221 aa, Homo sapiens
SHWTIYYNIYRIKKITPGRLTIEAYRAAMQTQWSWILQLCQCVEQHIKENTAYFEFFNDAKEATDYLRNLKDAIQRKYSCDRSSSIHKLEDLVQESMEEKEELLQYKSTIANLMGKAKTIIQLKPRNSDCPLKTSIPIKAICDYRQIEITIYKDDECVLANNSHRAKWKVISPTGNEAMVPSVCFTVPPPNKEAVDLANRIEQQYQNVLTLWHESHINMKSVVSWHYLINEIDRIRASNVASIKTMLPGEHQQVLSNLQSRFEDFLEDSQESQVFSGSDITQLEKEVNVCKQYYQELLKSAEREEQEESVYNLYISEVRNIRLRLENCEDRLIRQIRTPLERDDLHESVFRITEQEKLKKELERLKDDLGTITNKCEEFFSQAAASSSVPTLRSELNVVLQNMNQVYSMSSTYIDKLKTVNLVLKNTQAAEALVKLYETKLCEEEAVIADKNNIENLISTLKQWRSEVDEKRQVFHALEDELQKAKAISDEMFKTYKERDLDFDWHKEKADQLVERWQNVHVQIDNRLRDLEGIGKSLKYYRDTYHPLDDWIQQVETTQRKIQENQPENSKTLATQLNQQKMLVSEIEMKQSKMDECQKYAEQYSATVKDYELQTMTYRAMVDSQQKSPVKRRRMQSSADLIIQEFMDLRTRYTALVTLMTQYIKFAGDSLKRLEEEEIKRCKETSEHGAYSDLLQRQKATVLENSKLTGKISELERMVAELKKQKSRVEEELPKVREAAENELRKQQRNVEDISLQKIRAESEAKQYRRELETIVREKEAAERELERVRQLTIEAEAKRAAVEENLLNFRNQLEENTFTRRTLEDHLKRKDLSLNDLEQQKNKLMEELRRKRDNEEELLKLIKQMEKDLAFQKQVAEKQLKEKQKIELEARRKITEIQYTCRENALPVCPITQATSCRAVTGLQQEHDKQKAEELKQQVDELTAANRKAEQDMRELTYELNALQLEKTSSEEKARLLKDKLDETNNTLRCLKLELERKDQAEKGYSQQLRELGRQLNQTTGKAEEAMQEASDLKKIKRNYQLELESLNHEKGKLQREVDRITRAHAVAEKNIQHLNSQIHSFRDEKELERLQICQRKSDHLKEQFEKSHEQLLQNIKAEKENNDKIQRLNEELEKSNECAEMLKQKVEELTRQNNETKLMMQRIQAESENIVLEKQTIQQRCEALKIQADGFKDQLRSTNEHLHKQTKTEQDFQRKIKCLEEDLAKSQNLVSEFKQKCDQQNIIIQNTKKEVRNLNAELNASKEEKRRGEQKVQLQQAQVQELNNRLKKVQDELHLKTIEEQMTHRKMVLFQEESGKFKQSAEEFRKKMEKLMESKVITENDISGIRLDFVSLQQENSRAQENAKLCETNIKELERQLQQYREQMQQGQHMEANHYQKCQKLEDELIAQKREVENLKQKMDQQIKEHEHQLVLLQCEIQKKSTAKDCTFKPDFEMTVKECQHSGELSSRNTGHLHPTPRSPLLRWTQEPQPLEEKWQHRVVEQIPKEVQFQPPGAPLEKEKSQQCYSEYFSQTSTELQITFDETNPITRLSEIEKIRDQALNNSRPPVRYQDNACEMELVKVLTPLEIAKNKQYDMHTEVTTLKQEKNPVPSAEEWMLEGCRASGGLKKGDFLKKGLEPETFQNFDGDHACSVRDDEFKFQGLRHTVTARQLVEAKLLDMRTIEQLRLGLKTVEEVQKTLNKFLTKATSIAGLYLESTKEKISFASAAERIIIDKMVALAFLEAQAATGFIIDPISGQTYSVEDAVLKGVVDPEFRIRLLEAEKAAVGYSYSSKTLSVFQAMENRMLDRQKGKHILEAQIASGGVIDPVRGIRVPPEIALQQGLLNNAILQFLHEPSSNTRVFPNPNNKQALYYSELLRMCVFDVESQCFLFPFGERNISNLNVKKTHRISVVDTKTGSELTVYEAFQRNLIEKSIYLELSGQQYQWKEAMFFESYGHSSHMLTDTKTGLHFNINEAIEQGTIDKALVKKYQEGLITLTELADSLLSRLVPKKDLHSPVAGYWLTASGERISVLKASRRNLVDRITALRCLEAQVSTGGIIDPLTGKKYRVAEALHRGLVDEGFAQQLRQCELVITGIGHPITNKMMSVVEAVNANIINKEMGIRCLEFQYLTGGLIEPQVHSRLSIEEALQVGIIDVLIATKLKDQKSYVRNIICPQTKRKLTYKEALEKADFDFHTGLKLLEVSEPLMTGISSLYYSS

SEQ ID NO: 820208 - protein, 2347 aa, Homo sapiens
MAGYLSPAAYLYVEEQEYLQAYEDVLERYKDERDKVQKKTFTKWINQHLMKVRKHVNDLYEDLRDGHNLISLLEVLSGDTLPREKGRMRFHRLQNVQIALDYLKRRQVKLVNIRNDDITDGNPKLTLGLIWTIILHFQISDIHVTGESEDMSAKERLLLWTQQATEGYAGIRCENFTTCWRDGKLFNAIIHKYRPDLIDMNTVAVQSNLANLEHAFYVAEKIGVIRLLDPEDVDVSSPDEKSVITYVSSLYDAFPKVPEGGEGIGANDVEVKWIEYQNMVNYLIQWIRHHVTTMSERTFPNNPVELKALYNQYLQFKETEIPPKETEKSKIKRLYKLLEIWIEFGRIKLLQGYHPNDIEKEWGKLIIAMLEREKALRPEVERLEMLQQIANRVQRDSVICEDKLILAGNALQSDSKRLESGVQFQNEAEIAGYILECENLLRQHVIDVQILIDGKYYQADQLVQRVAKLRDEIMALRNECSSVYSKGRILTTEQTKLMISGITQSLNSGFAQTLHPSLTSGLTQSLTPSLTSSSMTSGLSSGMTSRLTPSVTPAYTPGFPSGLVPNFSSGVEPNSLQTLKLMQIRKPLLKSSLLDQNLTEEEINMKFVQDLLNWVDEMQVQLDRTEWGSDLPSVESHLENHKNVHRAIEEFESSLKEAKISEIQMTAPLKLTYAEKLHRLESQYAKLLNTSRNQERHLDTLHNFVSRATNELIWLNEKEEEEVAYDWSERNTNIARKKDYHAELMRELDQKEENIKSVQEIAEQLLLENHPARLTIEAYRAAMQTQWSWILQLCQCVEQHIKENTAYFEFFNDAKEATDYLRNLKDAIQRKYSCDRSSSIHKLEDLVQESMEEKEELLQYKSTIANLMGKAKTIIQLKPRNSDCPLKTSIPIKAICDYRQIEITIYKDDECVLANNSHRAKWKVISPTGNEAMVPSVCFTVPPPNKEAVDLANRIEQQYQNVLTLWHESHINMKSVVSWHYLINEIDRIRASNVASIKTMLPGEHQQVLSNLQSRFEDFLEDSQESQVFSGSDITQLEKEVNVCKQYYQELLKSAEREEQEESVYNLYISEVRNIRLRLENCEDRLIRQIRTPLERDDLHESVFRITEQEKLKKELERLKDDLGTITNKCEEFFSQAAASSSVPTLRSELNVVLQNMNQVYSMSSTYIDKLKTVNLVLKNTQAAEALVKLYETKLCEEEAVIADKNNIENLISTLKQWRSEVDEKRQVFHALEDELQKAKAISDEMFKTYKERDLDFDWHKEKADQLVERWQNVHVQIDNRLRDLEGIGKSLKYYRDTYHPLDDWIQQVETTQRKIQENQPENSKTLATQLNQQKMLVSEIEMKQSKMDECQKYAEQYSATVKDYELQTMTYRAMVDSQQKSPVKRRRMQSSADLIIQEFMDLRTRYTALVTLMTQYIKFAGDSLKRLEEEEIKRCKETSEHGAYSDLLQRQKATVLENSKLTGKISELERMVAELKKQKSRVEEELPKVREAAENELRKQQRNVEDISLQKIRAESEAKQYRRELETIVREKEAAERELERVRQLTIEAEAKRAAVEENLLNFRNQLEENTFTRRTLEDHLKRKDLSLNDLEQQKNKLMEELRRKRDNEEELLKLIKQMEKDLAFQKQVAEKQLKEKQKIELEARRKITEIQYTCRENALPVCPITQATSCRAVTGLQQEHDKQKAEELKQQVDELTAANRKAEQDMRELTYELNALQLEKTSSEEKARLLKDKLDETNNTLRCLKLELERKDQAEKGYSQQLRELGRQLNQTTGKAEEAMQEASDLKKIKRNYQLELESLNHEKGKLQREVDRITRAHAVAEKNIQHLNSQIHSFRDEKELERLQICQRKSDHLKEQFEKSHEQLLQNIKAEKENNDKIQRLNEELEKSNECAEMLKQKVEELTRQNNETKLMMQRIQAESENIVLEKQTIQQRCEALKIQADGFKDQLRSTNEHLHKQTKTEQDFQRKIKCLEEDLAKSQNLVSEFKQKCDQQNIIIQNTKKEVRNLNAELNASKEEKRRGEQKVQLQQAQVQELNNRLKKVQDELHLKTIEEQMTHRKMVLFQEESGKFKQSAEEFRKKMEKLMESKVITENDISGIRLDFVSLQQENSRAQENAKLCETNIKELERQLQQYREQMQQGQHMEANHYQKCQKLEDELIAQKREVENLKQKMDQQIKEHEHQLVLLQCEIQKKSTAKDCTFKPDFEMTVKECQHSGELSSRNTGHLHPTPRSPLLRWTQEPQPLEEKWQHRVVEQIPKEVQFQPPGAPLEKEKSQQCYSEYFSQTSTELQITFDETNPITRLSEIEKIRDQALNNSRPPVRYQDNACEMELVKVLTPLEVYSVF

SEQ ID NO: 820209 - protein, 789 aa, Homo sapiens
MAGYLSPAAYLYVEEQEYLQAYEDVLERYKDERDKVQKKTFTKWINQHLMKVRKHVNDLYEDLRDGHNLISLLEVLSGDTLPREKGRMRFHRLQNVQIALDYLKRRQVKLVNIRNDDITDGNPKLTLGLIWTIILHFQISDIHVTGESEDMSAKERLLLWTQQATEGYAGIRCENFTTCWRDGKLFNAIIHKYRPDLIDMNTVAVQSNLANLEHAFYVAEKIGVIRLLDPEDVDVSSPDEKSVITYVSSLYDAFPKVPEGGEGIGANDVEVKWIEYQNMVNYLIQWIRHHVTTMSERTFPNNPVELKALYNQYLQFKETEIPPKETEKSKIKRLYKLLEIWIEFGRIKLLQGYHPNDIEKEWGKLIIAMLEREKALRPEVERLEMLQQIANRVQRDSVICEDKLILAGNALQSDSKRLESGVQFQNEAEIAGYILECENLLRQHVIDVQILIDGKYYQADQLVQRVAKLRDEIMALRNECSSVYSKGRILTTEQTKLMISGITQSLNSGFAQTLHPSLTSGLTQSLTPSLTSSSMTSGLSSGMTSRLTPSVTPAYTPGFPSGLVPNFSSGVEPNSLQTLKLMQIRKPLLKSSLLDQNLTEEEINMKFVQDLLNWVDEMQVQLDRTEWGSDLPSVESHLENHKNVHRAIEEFESSLKEAKISEIQMTAPLKLTYAEKLHRLESQYAKLLNTSRNQERHLDTLHNFVSRATNELIWLNEKEEEEVAYDWSERNTNIARKKDYHAELMRELDQKEENIKSVQEIAEQLLLENHPARLTIEVKLESVMVLVEY

SEQ ID NO: 820210 - protein, 373 aa, Homo sapiens
WCSRGSRKAHCNTRVFPNPNNKQALYYSELLRMCVFDVESQCFLFPFGERNISNLNVKKTHRISVVDTKTGSELTVYEAFQRNLIEKSIYLELSGQQYQWKEAMFFESYGHSSHMLTDTKTGLHFNINEAIEQGTIDKALVKKYQEGLITLTELADSLLSRLVPKKDLHSPVAGYWLTASGERISVLKASRRNLVDRITALRCLEAQVSTGGIIDPLTGKKYRVAEALHRGLVDEGFAQQLRQCELVITGIGHPITNKMMSVVEAVNANIINKEMGIRCLEFQYLTGGLIEPQVHSRLSIEEALQVGIIDVLIATKLKDQKSYVRNIICPQTKRKLTYKEALEKADFDFHTGLKLLEVSEPLMTGISSLYYSS

SEQ ID NO: 820211 - protein, 2649 aa, Homo sapiens
MHSSSYSYRSSDSVFSNTTSTRTSLDSNENLLLVHCGPTLINSCISFGSESFDGHRLEMLQQIANRVQRDSVICEDKLILAGNALQSDSKRLESGVQFQNEAEIAGYILECENLLRQHVIDVQILIDGKYYQADQLVQRVAKLRDEIMALRNECSSVYSKGRILTTEQTKLMISGITQSLNSGFAQTLHPSLTSGLTQSLTPSLTSSSMTSGLSSGMTSRLTPSVTPAYTPGFPSGLVPNFSSGVEPNSLQTLKLMQIRKPLLKSSLLDQNLTEEEINMKFVQDLLNWVDEMQVQLDRTEWGSDLPSVESHLENHKNVHRAIEEFESSLKEAKISEIQMTAPLKLTYAEKLHRLESQYAKLLNTSRNQERHLDTLHNFVSRATNELIWLNEKEEEEVAYDWSERNTNIARKKDYHAELMRELDQKEENIKSVQEIAEQLLLENHPARLTIEAYRAAMQTQWSWILQLCQCVEQHIKENTAYFEFFNDAKEATDYLRNLKDAIQRKYSCDRSSSIHKLEDLVQESMEEKEELLQYKSTIANLMGKAKTIIQLKPRNSDCPLKTSIPIKAICDYRQIEITIYKDDECVLANNSHRAKWKVISPTGNEAMVPSVCFTVPPPNKEAVDLANRIEQQYQNVLTLWHESHINMKSVVSWHYLINEIDRIRASNVASIKTMLPGEHQQVLSNLQSRFEDFLEDSQESQVFSGSDITQLEKEVNVCKQYYQELLKSAEREEQEESVYNLYISEVRNIRLRLENCEDRLIRQIRTPLERDDLHESVFRITEQEKLKKELERLKDDLGTITNKCEEFFSQAAASSSVPTLRSELNVVLQNMNQVYSMSSTYIDKLKTVNLVLKNTQAAEALVKLYETKLCEEEAVIADKNNIENLISTLKQWRSEVDEKRQVFHALEDELQKAKAISDEMFKTYKERDLDFDWHKEKADQLVERWQNVHVQIDNRLRDLEGIGKSLKYYRDTYHPLDDWIQQVETTQRKIQENQPENSKTLATQLNQQKMLVSEIEMKQSKMDECQKYAEQYSATVKDYELQTMTYRAMVDSQQKSPVKRRRMQSSADLIIQEFMDLRTRYTALVTLMTQYIKFAGDSLKRLEEEEIKRCKETSEHGAYSDLLQRQKATVLENSKLTGKISELERMVAELKKQKSRVEEELPKVREAAENELRKQQRNVEDISLQKIRAESEAKQYRRELETIVREKEAAERELERVRQLTIEAEAKRAAVEENLLNFRNQLEENTFTRRTLEDHLKRKDLSLNDLEQQKNKLMEELRRKRDNEEELLKLIKQMEKDLAFQKQVAEKQLKEKQKIELEARRKITEIQYTCRENALPVCPITQATSCRAVTGLQQEHDKQKAEELKQQVDELTAANRKAEQDMRELTYELNALQLEKTSSEEKARLLKDKLDETNNTLRCLKLELERKDQAEKGYSQQLRELGRQLNQTTGKAEEAMQEASDLKKIKRNYQLELESLNHEKGKLQREVDRITRAHAVAEKNIQHLNSQIHSFRDEKELERLQICQRKSDHLKEQFEKSHEQLLQNIKAEKENNDKIQRLNEELEKSNECAEMLKQKVEELTRQNNETKLMMQRIQAESENIVLEKQTIQQRCEALKIQADGFKDQLRSTNEHLHKQTKTEQDFQRKIKCLEEDLAKSQNLVSEFKQKCDQQNIIIQNTKKEVRNLNAELNASKEEKRRGEQKVQLQQAQVQELNNRLKKVQDELHLKTIEEQMTHRKMVLFQEESGKFKQSAEEFRKKMEKLMESKVITENDISGIRLDFVSLQQENSRAQENAKLCETNIKELERQLQQYREQMQQGQHMEANHYQKCQKLEDELIAQKREVENLKQKMDQQIKEHEHQLVLLQCEIQKKSTAKDCTFKPDFEMTVKECQHSGELSSRNTGHLHPTPRSPLLRWTQEPQPLEEKWQHRVVEQIPKEVQFQPPGAPLEKEKSQQCYSEYFSQTSTELQITFDETNPITRLSEIEKIRDQALNNSRPPVRYQDNACEMELVKVLTPLEIAKNKQYDMHTEVTTLKQEKNPVPSAEEWMLEGCRASGGLKKGDFLKKGLEPETFQNFDGDHACSVRDDEFKFQGLRHTVTARQLVEAKLLDMRTIEQLRLGLKTVEEVQKTLNKFLTKATSIAGLYLESTKEKISFASAAERIIIDKMVALAFLEAQAATGFIIDPISGQTYSVEDAVLKGVVDPEFRIRLLEAEKAAVGYSYSSKTLSVFQAMENRMLDRQKGKHILEAQIASGGVIDPVRGIRVPPEIALQQGLLNNAILQFLHEPSSNTRVFPNPNNKQALYYSELLRMCVFDVESQCFLFPFGERNISNLNVKKTHRISVVDTKTGSELTVYEAFQRNLIEKSIYLELSGQQYQWKEAMFFESYGHSSHMLTDTKTGLHFNINEAIEQGTIDKALVKKYQEGLITLTELADSLLSRLVPKKDLHSPVAGYWLTASGERISVLKASRRNLVDRITALRCLEAQVSTGGIIDPLTGKKYRVAEALHRGLVDEGFAQQLRQCELVITGIGHPITNKMMSVVEAVNANIINKEMGIRCLEFQYLTGGLIEPQVHSRLSIEEALQVGIIDVLIATKLKDQKSYVRNIICPQTKRKLTYKEALEKADFDFHTGLKLLEVSEPLMTGISSLYYSS

SEQ ID NO: 820212 - protein, 265 aa, Homo sapiens [sequence omitted]

SEQ ID NO: 820213 - protein, 3153 aa, Homo sapiens
MIAAAFLVLLRPYSIQCALFLLLLLLGTIATIVFFCCWHRKLQKGRHPMKSVFSGRSRSRDAVLRSHHFRSEGFRASPRHLRRRVAAAAAARLEEVKPVVEVHHQSEQETSVRKRRIKKSSRVQPEFYHSVQGASIRRPSSGNASYRCSMSSSADFSDEDDFSQKSGSASPAPGDTLPWNLPKHERSKRKIQGGSVLDPAERAVLRIADERDKVQKKTFTKWINQHLMKVRKHVNDLYEDLRDGHNLISLLEVLSGDTLPREKGRMRFHRLQNVQIALDYLKRRQVKLVNIRNDDITDGNPKLTLGLIWTIILHFQISDIHVTGESEDMSAKERLLLWTQQATEGYAGIRCENFTTCWRDGKLFNAIIHKYRPDLIDMNTVAVQSNLANLEHAFYVAEKIGVIRLLDPEDVDVSSPDEKSVITYVSSLYDAFPKVPEGGEGIGANDVEVKWIEYQNMVNYLIQWIRHHVTTMSERTFPNNPVELKALYNQYLQFKETEIPPKETEKSKIKRLYKLLEIWIEFGRIKLLQGYHPNDIEKEWGKLIIAMLEREKALRPEVERLEMLQQIANRVQRDSVICEDKLILAGNALQSDSKRLESGVQFQNEAEIAGYILECENLLRQHVIDVQILIDGKYYQADQLVQRVAKLRDEIMALRNECSSVYSKGRILTTEQTKLMISGITQSLNSGFAQTLHPSLTSGLTQSLTPSLTSSSMTSGLSSGMTSRLTPSVTPAYTPGFPSGLVPNFSSGVEPNSLQTLKLMQIRKPLLKSSLLDQNLTEEEINMKFVQDLLNWVDEMQVQLDRTEWGSDLPSVESHLENHKNVHRAIEEFESSLKEAKISEIQMTAPLKLTYAEKLHRLESQYAKLLNTSRNQERHLDTLHNFVSRATNELIWLNEKEEEEVAYDWSERNTNIARKKDYHAELMRELDQKEENIKSVQEIAEQLLLENHPARLTIEAYRAAMQTQWSWILQLCQCVEQHIKENTAYFEFFNDAKEATDYLRNLKDAIQRKYSCDRSSSIHKLEDLVQESMEEKEELLQYKSTIANLMGKAKTIIQLKPRNSDCPLKTSIPIKAICDYRQIEITIYKDDECVLANNSHRAKWKVISPTGNEAMVPSVCFTVPPPNKEAVDLANRIEQQYQNVLTLWHESHINMKSVVSWHYLINEIDRIRASNVASIKTMLPGEHQQVLSNLQSRFEDFLEDSQESQVFSGSDITQLEKEVNVCKQYYQELLKSAEREEQEESVYNLYISEVRNIRLRLENCEDRLIRQIRTPLERDDLHESVFRITEQEKLKKELERLKDDLGTITNKCEEFFSQAAASSSVPTLRSELNVVLQNMNQVYSMSSTYIDKLKTVNLVLKNTQAAEALVKLYETKLCEEEAVIADKNNIENLISTLKQWRSEVDEKRQVFHALEDELQKAKAISDEMFKTYKERDLDFDWHKEKADQLVERWQNVHVQIDNRLRDLEGIGKSLKYYRDTYHPLDDWIQQVETTQRKIQENQPENSKTLATQLNQQKMLVSEIEMKQSKMDECQKYAEQYSATVKDYELQTMTYRAMVDSQQKSPVKRRRMQSSADLIIQEFMDLRTRYTALVTLMTQYIKFAGDSLKRLEEEEIKRCKETSEHGAYSDLLQRQKATVLENSKLTGKISELERMVAELKKQKSRVEEELPKVREAAENELRKQQRNVEDISLQKIRAESEAKQYRRELETIVREKEAAERELERVRQLTIEAEAKRAAVEENLLNFRNQLEENTFTRRTLEDHLKRKDLSLNDLEQQKNKLMEELRRKRDNEEELLKLIKQMEKDLAFQKQVAEKQLKEKQKIELEARRKITEIQYTCRENALPVCPITQATSCRAVTGLQQEHDKQKAEELKQQVDELTAANRKAEQDMRELTYELNALQLEKTSSEEKARLLKDKLDETNNTLRCLKLELERKDQAEKGYSQQLRELGRQLNQTTGKAEEAMQEASDLKKIKRNYQLELESLNHEKGKLQREVDRITRAHAVAEKNIQHLNSQIHSFRDEKELERLQICQRKSDHLKEQFEKSHEQLLQNIKAEKENNDKIQRLNEELEKSNECAEMLKQKVEELTRQNNETKLMMQRIQAESENIVLEKQTIQQRCEALKIQADGFKDQLRSTNEHLHKQTKTEQDFQRKIKCLEEDLAKSQNLVSEFKQKCDQQNIIIQNTKKEVRNLNAELNASKEEKRRGEQKVQLQQAQVQELNNRLKKVQDELHLKTIEEQMTHRKMVLFQEESGKFKQSAEEFRKKMEKLMESKVITENDISGIRLDFVSLQQENSRAQENAKLCETNIKELERQLQQYREQMQQGQHMEANHYQKCQKLEDELIAQKREVENLKQKMDQQIKEHEHQLVLLQCEIQKKSTAKDCTFKPDFEMTVKECQHSGELSSRNTGHLHPTPRSPLLRWTQEPQPLEEKWQHRVVEQIPKEVQFQPPGAPLEKEKSQQCYSEYFSQTSTELQITFDETNPITRLSEIEKIRDQALNNSRPPVRYQDNACEMELVKVLTPLEIAKNKQYDMHTEVTTLKQEKNPVPSAEEWMLEGCRASGGLKKGDFLKKGLEPETFQNFDGDHACSVRDDEFKFQGLRHTVTARQLVEAKLLDMRTIEQLRLGLKTVEEVQKTLNKFLTKATSIAGLYLESTKEKISFASAAERIIIDKMVALAFLEAQAATGFIIDPISGQTYSVEDAVLKGVVDPEFRIRLLEAEKAAVGYSYSSKTLSVFQAMENRMLDRQKGKHILEAQIASGGVIDPVRGIRVPPEIALQQGLLNNAILQFLHEPSSNTRVFPNPNNKQALYYSELLRMCVFDVESQCFLFPFGERNISNLNVKKTHRISVVDTKTGSELTVYEAFQRNLIEKSIYLELSGQQYQWKEAMFFESYGHSSHMLTDTKTGLHFNINEAIEQGTIDKALVKKYQEGLITLTELADSLLSRLVPKKDLHSPVAGYWLTASGERISVLKASRRNLVDRITALRCLEAQVSTGGIIDPLTGKKYRVAEALHRGLVDEGFAQQLRQCELVITGIGHPITNKMMSVVEAVNANIINKEMGIRCLEFQYLTGGLIEPQVHSRLSIEEALQVGIIDVLIATKLKDQKSYVRNIICPQTKRKLTYKEALEKADFDFHTGLKLLEVSEPLMTGISSLYYSS

SEQ ID NO: 820214 - protein, 2825 aa, Homo sapiens
MSAKERLLLWTQQATEGYAGIRCENFTTCWRDGKLFNAIIHKYRPDLIDMNTVAVQSNLANLEHAFYVAEKIGVIRLLDPEDVDVSSPDEKSVITYVSSLYDAFPKVPEGGEGIGANDVEVKWIEYQNMVNYLIQWIRHHVTTMSERTFPNNPVELKALYNQYLQFKETEIPPKETEKSKIKRLYKLLEIWIEFGRIKLLQGYHPNDIEKEWGKLIIAMLEREKALRPEVERLEMLQQIANRVQRDSVICEDKLILAGNALQSDSKRLESGVQFQNEAEIAGYILECENLLRQHVIDVQILIDGKYYQADQLVQRVAKLRDEIMALRNECSSVYSKGRILTTEQTKLMISGITQSLNSGFAQTLHPSLTSGLTQSLTPSLTSSSMTSGLSSGMTSRLTPSVTPAYTPGFPSGLVPNFSSGVEPNSLQTLKLMQIRKPLLKSSLLDQNLTEEEINMKFVQDLLNWVDEMQVQLDRTEWGSDLPSVESHLENHKNVHRAIEEFESSLKEAKISEIQMTAPLKLTYAEKLHRLESQYAKLLNTSRNQERHLDTLHNFVSRATNELIWLNEKEEEEVAYDWSERNTNIARKKDYHAELMRELDQKEENIKSVQEIAEQLLLENHPARLTIEAYRAAMQTQWSWILQLCQCVEQHIKENTAYFEFFNDAKEATDYLRNLKDAIQRKYSCDRSSSIHKLEDLVQESMEEKEELLQYKSTIANLMGKAKTIIQLKPRNSDCPLKTSIPIKAICDYRQIEITIYKDDECVLANNSHRAKWKVISPTGNEAMVPSVCFTVPPPNKEAVDLANRIEQQYQNVLTLWHESHINMKSVVSWHYLINEIDRIRASNVASIKTMLPGEHQQVLSNLQSRFEDFLEDSQESQVFSGSDITQLEKEVNVCKQYYQELLKSAEREEQEESVYNLYISEVRNIRLRLENCEDRLIRQIRTPLERDDLHESVFRITEQEKLKKELERLKDDLGTITNKCEEFFSQAAASSSVPTLRSELNVVLQNMNQVYSMSSTYIDKLKTVNLVLKNTQAAEALVKLYETKLCEEEAVIADKNNIENLISTLKQWRSEVDEKRQVFHALEDELQKAKAISDEMFKTYKERDLDFDWHKEKADQLVERWQNVHVQIDNRLRDLEGIGKSLKYYRDTYHPLDDWIQQVETTQRKIQENQPENSKTLATQLNQQKMLVSEIEMKQSKMDECQKYAEQYSATVKDYELQTMTYRAMVDSQQKSPVKRRRMQSSADLIIQEFMDLRTRYTALVTLMTQYIKFAGDSLKRLEEEEIKRCKETSEHGAYSDLLQRQKATVLENSKLTGKISELERMVAELKKQKSRVEEELPKVREAAENELRKQQRNVEDISLQKIRAESEAKQYRRELETIVREKEAAERELERVRQLTIEAEAKRAAVEENLLNFRNQLEENTFTRRTLEDHLKRKDLSLNDLEQQKNKLMEELRRKRDNEEELLKLIKQMEKDLAFQKQVAEKQLKEKQKIELEARRKITEIQYTCRENALPVCPITQATSCRAVTGLQQEHDKQKAEELKQQVDELTAANRKAEQDMRELTYELNALQLEKTSSEEKARLLKDKLDETNNTLRCLKLELERKDQAEKGYSQQLRELGRQLNQTTGKAEEAMQEASDLKKIKRNYQLELESLNHEKGKLQREVDRITRAHAVAEKNIQHLNSQIHSFRDEKELERLQICQRKSDHLKEQFEKSHEQLLQNIKAEKENNDKIQRLNEELEKSNECAEMLKQKVEELTRQNNETKLMMQRIQAESENIVLEKQTIQQRCEALKIQADGFKDQLRSTNEHLHKQTKTEQDFQRKIKCLEEDLAKSQNLVSEFKQKCDQQNIIIQNTKKEVRNLNAELNASKEEKRRGEQKVQLQQAQVQELNNRLKKVQDELHLKTIEEQMTHRKMVLFQEESGKFKQSAEEFRKKMEKLMESKVITENDISGIRLDFVSLQQENSRAQENAKLCETNIKELERQLQQYREQMQQGQHMEANHYQKCQKLEDELIAQKREVENLKQKMDQQIKEHEHQLVLLQCEIQKKSTAKDCTFKPDFEMTVKECQHSGELSSRNTGHLHPTPRSPLLRWTQEPQPLEEKWQHRVVEQIPKEVQFQPPGAPLEKEKSQQCYSEYFSQTSTELQITFDETNPITRLSEIEKIRDQALNNSRPPVRYQDNACEMELVKVLTPLEIAKNKQYDMHTEVTTLKQEKNPVPSAEEWMLEGCRASGGLKKGDFLKKGLEPETFQNFDGDHACSVRDDEFKFQGLRHTVTARQLVEAKLLDMRTIEQLRLGLKTVEEVQKTLNKFLTKATSIAGLYLESTKEKISFASAAERIIIDKMVALAFLEAQAATGFIIDPISGQTYSVEDAVLKGVVDPEFRIRLLEAEKAAVGYSYSSKTLSVFQAMENRMLDRQKGKHILEAQIASGGVIDPVRGIRVPPEIALQQGLLNNAILQFLHEPSSNTRVFPNPNNKQALYYSELLRMCVFDVESQCFLFPFGERNISNLNVKKTHRISVVDTKTGSELTVYEAFQRNLIEKSIYLELSGQQYQWKEAMFFESYGHSSHMLTDTKTGLHFNINEAIEQGTIDKALVKKYQEGLITLTELADSLLSRLVPKKDLHSPVAGYWLTASGERISVLKASRRNLVDRITALRCLEAQVSTGGIIDPLTGKKYRVAEALHRGLVDEGFAQQLRQCELVITGIGHPITNKMMSVVEAVNANIINKEMGIRCLEFQYLTGGLIEPQVHSRLSIEEALQVGIIDVLIATKLKDQKSYVRNIICPQTKRKLTYKEALEKADFDFHTGLKLLEVSEPLMTGISSLYYSS

SEQ ID NO: 820215 - protein, 2711 aa, Homo sapiens
MAGYLSPAAYLYVEEQEYLQAYEDVLERYKDERDKVQKKTFTKWINQHLMKVRKHVNDLYEDLRDGHNLISLLEVLSGDTLPREKGRMRFHRLQNVQIALDYLKRRQVKLVNIRNDDITDGNPKLTLGLIWTIILHFQISDIHVTGESEDMSAKERLLLWTQQATEGYAGIRCENFTTCWRDGKLFNAIIHKYRPDLIDMNTVAVQSNLANLEHAFYVAEKIGVIRLLDPEDVDVSSPDEKSVITYVSSLYDAFPKVPEGGEGIGANDVEVKWIEYQNMVNYLIQWIRHHVTTMSERTFPNNPVELKALYNQYLQFKETEIPPKETEKSKIKRLYKLLEIWIEFGRIKLLQGYHPNDIEKEWGKLIIAMLEREKALRPEVERLEMLQQIANRVQRDSVICEDKLILAGNALQSDSKRLESGVQFQNEAEIAGYILECENLLRQHVIDVQILIDGKYYQADQLVQRVAKLRDEIMALRNECSSVYSKGRILTTEQTKLMISGITQSLNSGFAQTLHPSLTSGLTQSLTPSLTSSSMTSGLSSGMTSRLTPSVTPAYTPGFPSGLVPNFSSGVEPNSLQTLKLMQIRKPLLKSSLLDQNLTEEEINMKFVQDLLNWVDEMQVQLDRTEWGSDLPSVESHLENHKNVHRAIEEFESSLKEAKISEIQMTAPLKLTYAEKLHRLESQYAKLLNTSRNQERHLDTLHNFVSRATNELIWLNEKEEEEVAYDWSERNTNIARKKDYHAELMRELDQKEENIKSVQEIAEQLLLENHPARLTIEAYRAAMQTQWSWILQLCQCVEQHIKENTAYFEFFNDAKEATDYLRNLKDAIQRKYSCDRSSSIHKLEDLVQESMEEKEELLQYKSTIANLMGKAKTIIQLKPRNSDCPLKTSIPIKAICDYRQIEITIYKDDECVLANNSHRAKWKVISPTGNEAMVPSVCFTVPPPNKEAVDLANRIEQQYQNVLTLWHESHINMKSVVSWHYLINEIDRIRASNVASIKTMLPGEHQQVLSNLQSRFEDFLEDSQESQVFSGSDITQLEKEVNVCKQYYQELLKSAEREEQEESVYNLYISEVRNIRLRLENCEDRLIRQIRTPLERDDLHESVFRITEQEKLKKELERLKDDLGTITNKCEEFFSQAAASSSVPTLRSELNVVLQNMNQVYSMSSTYIDKLKTVNLVLKNTQAAEALVKLYETKLCEEEAVIADKNNIENLISTLKQWRSEVDEKRQVFHALEDELQKAKAISDEMFKTYKERDLDFDWHKEKADQLVERWQNVHVQIDNRLRDLEGIGKSLKYYRDTYHPLDDWIQQVETTQRKIQENQPENSKTLATQLNQQKMLVSEIEMKQSKMDECQKYAEQYSATVKDYELQTMTYRAMVDSQQKSPVKRRRMQSSADLIIQEFMDLRTRYTALVTLMTQYIKFAGDSLKRLEEEEIKRCKETSEHGAYSDLLQRQKATVLENSKLTGKISELERMVAELKKQKSRVEEELPKVREAAENELRKQQRNVEDISLQKIRAESEAKQYRRELETIVREKEAAERELERVRQLTIEAEAKRAAVEENLLNFRNQLEENTFTRRTLEDHLKRKDLSLNDLEQQKNKLMEELRRKRDNEEELLKLIKQMEKDLAFQKQVAEKQLKEKQKIELEARRKITEIQYTCRENALPVCPITQATSCRAVTGLQQEHDKQKAEELKQQVDELTAANRKAEQDMRELTYELNALQLEKTSSEEKARLLKDKLDETNNTLRCLKLELERKDQAEKGYSQQLRELGRQLNQTTGKAEEAMQEASDLKKIKRNYQLELESLNHEKGKLQREVDRITRAHAVAEKNIQHLNSQIHSFRDEKELERLQICQRKSDHLKEQFEKSHEQLLQNIKAEKENNDKIQRLNEELEKSNECAEMLKQKVEELTRQNNETKLMMQRIQAESENIVLEKQTIQQRCEALKIQADGFKDQLRSTNEHLHKQTKTEQDFQRKIKCLEEDLAKSQNLVSEFKQKCDQQNIIIQNTKKEVRNLNAELNASKEEKRRGEQKVQLQQAQVQELNNRLKKVQDELHLKTIEEQMTHRKMVLFQEESGKFKQSAEEFRKKMEKLMESKVITENDISGIRLDFVSLQQENSRAQENAKLCETNIKELERQLQQYREQMQQGQHMEANHYQKCQKLEDELIAQKREVENLKQKMDQQIKEHEHQLVLLQCEIQKKSTAKDCTFKPDFEMTVKECQHSGELSSRNTGHLHPTPRSPLLRWTQEPQPLEEKWQHRVVEQIPKEVQFQPPGAPLEKEKSQQCYSEYFSQTSTELQITFDETNPITRLSEIEKIRDQALNNSRPPVRYQDNACEMELVKVLTPLEIAKNKQYDMHTEVTTLKQEKNPVPSAEEWMLEGCRASGGLKKGDFLKKGLEPETFQNFDGDHACSVRDDEFKFQGLRHTVTARQLVEAKLLDMRTIEQLRLGLKTVEEVQKTLNKFLTKATSIAGLYLESTKEKISFASAAERIIIDKMVALAFLEAQAATGFIIDPISGQTYSVEDAVLKGVVDPEFRIRLLEAEKAAVGYSYSSKTLSVFQAMENRMLDRQKGKHILEAQIASGGVIDPVRGIRVPPEIALQQGLLNNAILQFLHEPSSNTRVFPNPNNKQALYYSELLRMCVFDVESQCFLFPFGERNISNLNVKKTHRISVVDTKTGSELTVYEAFQRNLIEKSIYLELSGPFWDTGFSLFRSKK

SEQ ID NO: 820216 - protein, 1458 aa, Homo sapiens
MAGYLSPAAYLYVEEQEYLQAYEDVLERYKDERDKVQKKTFTKWINQHLMKVRKHVNDLYEDLRDGHNLISLLEVLSGDTLPREKGRMRFHRLQNVQIALDYLKRRQVKLVNIRNDDITDGNPKLTLGLIWTIILHFQISDIHVTGESEDMSAKERLLLWTQQATEGYAGIRCENFTTCWRDGKLFNAIIHKYRPDLIDMNTVAVQSNLANLEHAFYVAEKIGVIRLLDPEDVDVSSPDEKSVITYVSSLYDAFPKVPEGGEGIGANDVEVKWIEYQNMVNYLIQWIRHHVTTMSERTFPNNPVELKALYNQYLQFKETEIPPKETEKSKIKRLYKLLEIWIEFGRIKLLQGYHPNDIEKEWGKLIIAMLEREKALRPEVERLEMLQQIANRVQRDSVICEDKLILAGNALQSDSKRLESGVQFQNEAEIAGYILECENLLRQHVIDVQILIDGKYYQADQLVQRVAKLRDEIMALRNECSSVYSKGRILTTEQTKLMISGITQSLNSGFAQTLHPSLTSGLTQSLTPSLTSSSMTSGLSSGMTSRLTPSVTPAYTPGFPSGLVPNFSSGVEPNSLQTLKLMQIRKPLLKSSLLDQNLTEEEINMKFVQDLLNWVDEMQVQLDRTEWGSDLPSVESHLENHKNVHRAIEEFESSLKEAKISEIQMTAPLKLTYAEKLHRLESQYAKLLNTSRNQERHLDTLHNFVSRATNELIWLNEKEEEEVAYDWSERNTNIARKKDYHAELMRELDQKEENIKSVQEIAEQLLLENHPARLTIEAYRAAMQTQWSWILQLCQCVEQHIKENTAYFEFFNDAKEATDYLRNLKDAIQRKYSCDRSSSIHKLEDLVQESMEEKEELLQYKSTIANLMGKAKTIIQLKPRNSDCPLKTSIPIKAICDYRQIEITIYKDDECVLANNSHRAKWKVISPTGNEAMVPSVCFTVPPPNKEAVDLANRIEQQYQNVLTLWHESHINMKSVVSWHYLINEIDRIRASNVASIKTMLPGEHQQVLSNLQSRFEDFLEDSQESQVFSGSDITQLEKEVNVCKQYYQELLKSAEREEQEESVYNLYISEVRNIRLRLENCEDRLIRQIRTPLERDDLHESVFRITEQEKLKKELERLKDDLGTITNKCEEFFSQAAASSSVPTLRSELNVVLQNMNQVYSMSSTYIDKLKTVNLVLKNTQAAEALVKLYETKLCEEEAVIADKNNIENLISTLKQWRSEVDEKRQVFHALEDELQKAKAISDEMFKTYKERDLDFDWHKEKADQLVERWQNVHVQIDNRLRDLEGIGKSLKYYRDTYHPLDDWIQQVETTQRKIQENQPENSKTLATQLNQQKMLVSEIEMKQSKMDECQKYAEQYSATVKDYELQTMTYRAMVDSQQKSPVKRRRMQSSADLIIQEFMDLRTRYTALVTLMTQYIKFAGDSLKRLEEEEKSLEEEKKEHVEKAKELQKWVSNISK

SEQ ID NO: 820217 - protein, 331 aa, Homo sapiens
MGNVCGCVRAEKEEQYVDPAKTPLNPEKYSPGRKYFRRKPIKKTGGDKESVGANNENEGKKKSSSQPSKEQPAPLSRGLVQQESVTLNSALGDGIQQKKTEVVADSVKQKLLPSAVSSWSDCVNTSPAKDSETEVKVSELDERISEKDSTPYCAKRKKHLDDVNTSEITFQEKTDVFSFRKAASLSSIPSGIERSLEKSGFPEDPPKSYSSIQEKQNTERFCPHATQHFQFKKKRCHSLYTSMSSVSKDTDGNEISDIHVTGESEDMSAKERLLLWTQQATEGYAGIRCENFTTCWRDGKLFNAIIHKYRYGICVFFPYTTVRHISFISEF

SEQ ID NO: 820218 - protein, 521 aa, Homo sapiens
AQKFYPSSLSTMYRALRLLARSRPLVRAPAAALASAPGLGGAAVPSFWPPNAARMASQNSFRIEYDTFGELKVPNDKYYGAQTVRSTMNFKIGGVTERMPTPVIKAFGILKRAAAEVNQDYGLDPKIANAIMKAADEVAEGKLNDHFPLVVWQTGSGTQTNMNVNEVISNRAIEMLGGELGSKIPVHPNDHVNKSQSSNDTFPTAMHIAAAIEVHEVLLPGLQKLHDALDAKSKEFAQIIKIGRTHTQDAVPLTLGQEFSGYVQQVKYAMTRIKAAMPRIYELAAGGTAVGTGLNTRIGFAEKVAAKVAALTGLPFVTAPNKFEALAAHDALVELSGAMNTTACSLMKIANDIRFLGSGPRSGLGELILPENEPGSSIMPGKVNPTQCEAMTMVAAQVMGNHVAVTVGGSNGHFELNVFKPMMIKNVLHSARLLGDASVSFTENCVVGIQANTERINKLMNESLMLVTALNPHIGYDKAAKIAKTAHKNGSTLKETAIELGYLTAEQFDEWVKPKDMLGPK

SEQ ID NO: 820219 - protein, 133 aa, Homo sapiens
ASVSFTENCVVGIQANTERINKLMNESANVFKPMMIKNVLHSARLLGDASVSFTENCVVGIQANTERINKLMNESLMLVTALNPHIGYDKAAKIAKTAHKNGSTLKETAIELGYLTAEQFDEWVKPKDMLGPK

SEQ ID NO: 820220 - protein, 521 aa, Homo sapiens; identical to SEQ ID NO: 820218

SEQ ID NO: 820221 - protein, 501 aa, Homo sapiens
AQKFYPSSLSTMYRALRLLARSRPLVRAPAAALASAPGLGGAAVPSFWPPNAARMASQNSFRIEYDTFGELKVPNDKYYGAQTVRSTMNFKIGGVTERMPTPVIKAFGILKRAAAEVNQDYGLDPKIANAIMKAADEVAEGKLNDHFPLVVWQTGSGTQTNMNVNEVISNRAIEMLGGELGSKIPVHPNDHVNKSQSSNDTFPTAMHIAAAIEVHEVLLPGLQKLHDALDAKSKEFAQIIKIGRTHTQDAVPLTLGQEFSGYVQQVKYAMTRIKAAMPRIYELAAGGTAVGTGLNTRIGFAEKVAAKVAALTGLPFVTAPNKFEALAAHDALVELSGAMNTTACSLMKIANDIRFLGSGPRSGLGELILPENEPGSSIMPGKVNPTQCEAMTMVAAQVMGNHVAVTVGGSNGHFELNVFKPMMIKNVLHSARLLGDASVSFTENCVVGIQANTERINKLMNESLMLVTVTISIGYEQAQRCKTHKMVTKGRSNGTKRTCHG

SEQ ID NO: 820222 - protein, 434 aa, Homo sapiens
MNFKIGGVTERMPTPVIKAFGILKRAAAEVNQDYGLDPKIANAIMKAADEVAEGKLNDHFPLVVWQTGSGTQTNMNVNEVISNRAIEMLGGELGSKIPVHPNDHVNKSQSSNDTFPTAMHIAAAIEVHEVLLPGLQKLHDALDAKSKEFAQIIKIGRTHTQDAVPLTLGQEFSGYVQQVKYAMTRIKAAMPRIYELAAGGTAVGTGLNTRIGFAEKVAAKVAALTGLPFVTAPNKFEALAAHDALVELSGAMNTTACSLMKIANDIRFLGSGPRSGLGELILPENEPGSSIMPGKVNPTQCEAMTMVAAQVMGNHVAVTVGGSNGHFELNVFKPMMIKNVLHSARLLGDASVSFTENCVVGIQANTERINKLMNESLMLVTALNPHIGYDKAAKIAKTAHKNGSTLKETAIELGYLTAEQFDEWVKPKDMLGPK

SEQ ID NO: 820223 - protein, 442 aa, Homo sapiens
GPLSCYFTGPWSTINMNNSMTTPVIKAFGILKRAAAEVNQDYGLDPKIANAIMKAADEVAEGKLNDHFPLVVWQTGSGTQTNMNVNEVISNRAIEMLGGELGSKIPVHPNDHVNKSQSSNDTFPTAMHIAAAIEVHEVLLPGLQKLHDALDAKSKEFAQIIKIGRTHTQDAVPLTLGQEFSGYVQQVKYAMTRIKAAMPRIYELAAGGTAVGTGLNTRIGFAEKVAAKVAALTGLPFVTAPNKFEALAAHDALVELSGAMNTTACSLMKIANDIRFLGSGPRSGLGELILPENEPGSSIMPGKVNPTQCEAMTMVAAQVMGNHVAVTVGGSNGHFELNVFKPMMIKNVLHSARLLGDASVSFTENCVVGIQANTERINKLMNESLMLVTALNPHIGYDKAAKIAKTAHKNGSTLKETAIELGYLTAEQFDEWVKPKDMLGPK

SEQ ID NO: 820224 - protein, 423 aa, Homo sapiens [sequence omitted]

SEQ ID NO: 820225 - protein, 316 aa, Homo sapiens [sequence omitted]

SEQ ID NO: 820226 - protein, 199 aa, Homo sapiens
AQKFYPSSLSTMYRALRLLARSRPLVRAPAAALASAPGLGGAAVPSFWPPNAARMASQNSFRIEYDTFGELKVPNDKYYGAQTVRSTMNFKIGGVTERMPTPVIKAFGILKRAAAEVNQDYGLDPKIANAIMKAADEVAEGKLNDHFPLVVWQTGSGTQTNMNVNEVISNRAIEMLGGELGSKIPVHPNDHVNKSQVSM

SEQ ID NO: 820227 - protein, 521 aa, Homo sapiens; identical to SEQ ID NO: 820218

SEQ ID NO: 820228 - protein, 521 aa, Homo sapiens; identical to SEQ ID NO: 820218

SEQ ID NO: 820229 - protein, 529 aa, Homo sapiens
  misc_feature (19)..(19): Xaa can be any naturally occurring amino acid
SLNGSAAPPLGARARKLYXTTGRVRLLARSRPLVRAPAAALASAPGLGGAAVPSFWPPNAARMASQNSFRIEYDTFGELKVPNDKYYGAQTVRSTMNFKIGGVTERMPTPVIKAFGILKRAAAEVNQDYGLDPKIANAIMKAADEVAEGKLNDHFPLVVWQTGSGTQTNMNVNEVISNRAIEMLGGELGSKIPVHPNDHVNKSQSSNDTFPTAMHIAAAIEVHEVLLPGLQKLHDALDAKSKEFAQIIKIGRTHTQDAVPLTLGQEFSGYVQQVKYAMTRIKAAMPRIYELAAGGTAVGTGLNTRIGFAEKVAAKVAALTGLPFVTAPNKFEALAAHDALVELSGAMNTTACSLMKIANDIRFLGSGPRSGLGELILPENEPGSSIMPGKVNPTQCEAMTMVAAQVMGNHVAVTVGGSNGHFELNVFKPMMIKNVLHSARLLGDASVSFTENCVVGIQANTERINKLMNESLMLVTALNPHIGYDKAAKIAKTAHKNGSTLKETAIELGYLTAEQFDEWVKPKDMLGPK

SEQ ID NO: 820230 - protein, 434 aa, Homo sapiens; identical to SEQ ID NO: 820222

SEQ ID NO: 820231 - protein, 503 aa, Homo sapiens
AQKFYPSSLSTMYRALRLLARSRPLVRAPAAALASAPGLGGAAVPSFWPPNAARMASQNSFRIEYDTFGELKVPNDKYYGAQTVRSTMNFKIGGVTERMPTPVIKAFGILKRAAAEVNQDYGLDPKIANAIMKAADEVAEGKLNDHFPLVVWQTGSGTQTNMNVNEVISNRAIEMLGGELGSKIPVHPNDHVNKSQSSNDTFPTAMHIAAAIEVHEVLLPGLQKLHDALDDAVPLTLGQEFSGYVQQVKYAMTRIKAAMPRIYELAAGGTAVGTGLNTRIGFAEKVAAKVAALTGLPFVTAPNKFEALAAHDALVELSGAMNTTACSLMKIANDIRFLGSGPRSGLGELILPENEPGSSIMPGKVNPTQCEAMTMVAAQVMGNHVAVTVGGSNGHFELNVFKPMMIKNVLHSARLLGDASVSFTENCVVGIQANTERINKLMNESLMLVTALNPHIGYDKAAKIAKTAHKNGSTLKETAIELGYLTAEQFDEWVKPKDMLGPK

SEQ ID NO: 820232 - protein, 329 aa, Homo sapiens
MLGTGRTDKTLSDWHIAAAIEVHEVLLPGLQKLHDALDAKSKEFAQIIKIGRTHTQDAVPLTLGQEFSGYVQQVKYAMTRIKAAMPRIYELAAGGTAVGTGLNTRIGFAEKVAAKVAALTGLPFVTAPNKFEALAAHDALVELSGAMNTTACSLMKIANDIRFLGSGPRSGLGELILPENEPGSSIMPGKVNPTQCEAMTMVAAQVMGNHVAVTVGGSNGHFELNVFKPMMIKNVLHSARLLGDASVSFTENCVVGIQANTERINKLMNESLMLVTALNPHIGYDKAAKIAKTAHKNGSTLKETAIELGYLTAEQFDEWVKPKDMLGPK

SEQ ID NO: 820233 - protein, 636 aa, Homo sapiens
RARAPAAPMGVQGFQDYIEKHCPSAVVPVELQKLARGSLVGGGRQRPPQTPLRLLVDADNCLHRLYGGFYTDWVSGGQWNHMLGYLAALAKACFGGNIELFVFFNGALEKARLHEWVKRQGNERQTAQQIVSHVQNKGTPPPKVWFLPPVCMAHCIRLALIRFHVKVAQSIEDHHQEVIGFCRENGFHGLVAYDSDYALCNIPYYFSAHALKLSRNGKSLTTSQYLMHEVAKQLDLNPNRFPIFAALLGNHILPDEDLASFHWSLLGPEHPLASLKVRAHQLVLPPCDVVIKAVADYVRNIQDTSDLDAIAKDVFQHSQSRTDDKVIRFKRAIGYYSATSKPMSFHPPHYLAARPGPFGMPGMVPPHVPPQMLNIPQTSLQAKPVAPQVPSPGGAPGQGPYPYSLSEPAPLTLDTSGKNLTEQNSYSNIPHEGKHTPLYERSSPINPAQSGSPNHVDSAYFPGSSTSSSSDNDEGSGGATNHISGNKIGWEKTGSHSEPQARGDPGDQTKAEGSSTASSGSQLAEGKGSQMGTVQPIPCLLSMPTRNHMDITTPPLPPVAPEVLRVAEHRHKKGLMYPYIFHVLTKVLSKGPWSGFCYLMSGHSYGCFVLLSFFEPFFCLTNLLETKFTFPFLNIE

SEQ ID NO: 820234 - protein, 121 aa, Homo sapiens
FWSSVAVVRVVALVFVGFSSGMAVVCARFHVGVVCRLSWPSGLVGWLSWCVSFVGYASSFLPAILPFSNLACSFPATGSSWKQAGYRVIEGVSPEPLGAANISAAAAALANVVSPVTARRV

SEQ ID NO: 820235 - protein, 1126 aa, Homo sapiens
RARAPAAPMGVQGFQDYIEKHCPSAVVPVELQKLARGSLVGGGRQRPPQTPLRLLVDADNCLHRLYGGFYTDWVSGGQWNHMLGYLAALAKACFGGNIELFVFFNGALEKARLHEWVKRQGNERQTAQQIVSHVQNKGTPPPKVWFLPPVCMAHCIRLALIRFHVKVAQSIEDHHQEVIGFCRENGFHGLVAYDSDYALCNIPYYFSAHALKLSRNGKSLTTSQYLMHEVAKQLDLNPNRFPIFAALLGNHILPDEDLASFHWSLLGPEHPLASLKVRAHQLVLPPCDVVIKAVADYVRNIQDTSDLDAIAKDVFQHSQSRTDDKVIRFKRAIGYYSATSKPMSFHPPHYLAARPGPFGMPGMVPPHVPPQMLNIPQTSLQAKPVAPQVPSPGGAPGQGPYPYSLSEPAPLTLDTSGKNLTEQNSYSNIPHEGKHTPLYERSSPINPAQSGSPNHVDSAYFPGSSTSSSSDNDEGSGGATNHISGNKIGWEKTGSHSEPQARGDPGDQTKAEGSSTASSGSQLAEGKGSQMGTVQPIPCLLSMPTRNHMDITTPPLPPVAPEVLRVAEHRHKKGLMYPYIFHVLTKGEIKIAVSIEDEANKDLPPAALLYRPVRQYVYGVLFSLAESRKKTERLAFRKNRLPPEFSPVIIKEWAAYKGKSPQTPELVEALAFREWTCPNLKRLWLGKAVEDKNRRMRAFLACMRSDTPAMLNPANVPTHLMVLCCVLRYMVQWPGARILRRQELDAFLAQALSPKLYEPDQLQELKIENLDPRGIQLSALFMSGVDMALFANDACGQPIPWEHCCPWMYFDGKLFQSKLLKASREKTPLIDLCDGQADQAAKVEKMRQSVLEGLSFSRQSHTLPFPPPPALPFYPASAYPRHFGPVPPSQGRGRGFAGVCGFGGPYGETVATGPYRAFRVAAASGHCGAFSGSDSSRTSKSQGGVQPIPSQGGKLEIAGTVVGHWAGSRRGRGGRGPFPLQVVSVGGPARGRPRGVISTPVIRTFGRGGRYYGRGYKNQAAIQGRPPYAASAEEVAKELKSKSGESKSSAMSSDGSLAENGVMAEEKPAPQMNGSTGDARAPSHSESALNNDSKTCNTNPHLNALSTDSACRREAALEAAVLNKEE

SEQ ID NO: 820236 - protein, 1140 aa, Homo sapiens
MVNRAFSLTRWVSGWFLVLSMPLQNLTLVFQIGLKNDLSVGGFVVFFETLLLTEQLLEIFFTGSMGASLAKPCACRLHVLGSSCPATACRLHPAPLQRFLAALAKACFGGNIELFVFFNGALEKARLHEWVKRQGNERQTAQQIVSHVQNKGTPPPKVWFLPPVCMAHCIRLALIRFHVKVAQSIEDHHQEVIGFCRENGFHGLVAYDSDYALCNIPYYFSAHALKLSRNGKSLTTSQYLMHEVAKQLDLNPNRFPIFAALLGNHILPDEDLASFHWSLLGPEHPLASLKVRAHQLVLPPCDVVIKAVADYVRNIQDTSDLDAIAKDVFQHSQSRTDDKVIRFKRAIGYYSATSKPMSFHPPHYLAARPGPFGMPGMVPPHVPPQMLNIPQTSLQAKPVAPQVPSPGGAPGQGPYPYSLSEPAPLTLDTSGKNLTEQNSYSNIPHEGKHTPLYERSSPINPAQSGSPNHVDSAYFPGSSTSSSSDNDEGSGGATNHISGNKIGWEKTGSHSEPQARGDPGDQTKAEGSSTASSGSQLAEGKGSQMGTVQPIPCLLSMPTRNHMDITTPPLPPVAPEVLRVAEHRHKKGLMYPYIFHVLTKGEIKIAVSIEDEANKDLPPAALLYRPVRQYVYGVLFSLAESRKKTERLAFRKNRLPPEFSPVIIKEWAAYKGKSPQTPELVEALAFREWTCPNLKRLWLGKAVEDKNRRMRAFLACMRSDTPAMLNPANVPTHLMVLCCVLRYMVQWPGARILRRQELDAFLAQALSPKLYEPDQLQELKIENLDPRGIQLSALFMSGVDMALFANDACGQPIPWEHCCPWMYFDGKLFQSKLLKASREKTPLIDLCDGQADQAAKVEKMRQSVLEGLSFSRQSHTLPFPPPPALPFYPASAYPRHFGPVPPSQGRGRGFAGVCGFGGPYGETVATGPYRAFRVAAASGHCGAFSGSDSSRTSKSQGGVQPIPSQGGKLEIAGTVVGHWAGSRRGRGGRGPFPLQVVSVGGPARGRPRGVISTPVIRTFGRGGRYYGRGYKNQAAIQGRPPYAASAEEVAKELKSKSGESKSSAMSSDGSLAENGVMAEEKPAPQMNGSTGDARAPSHSESALNNDSKTCNTNPHLNALSTDSACRREAALEAAVLNKEE

SEQ ID NO: 820237 - protein, 650 aa, Homo sapiens
MVNRAFSLTRWVSGWFLVLSMPLQNLTLVFQIGLKNDLSVGGFVVFFETLLLTEQLLEIFFTGSMGASLAKPCACRLHVLGSSCPATACRLHPAPLQRFLAALAKACFGGNIELFVFFNGALEKARLHEWVKRQGNERQTAQQIVSHVQNKGTPPPKVWFLPPVCMAHCIRLALIRFHVKVAQSIEDHHQEVIGFCRENGFHGLVAYDSDYALCNIPYYFSAHALKLSRNGKSLTTSQYLMHEVAKQLDLNPNRFPIFAALLGNHILPDEDLASFHWSLLGPEHPLASLKVRAHQLVLPPCDVVIKAVADYVRNIQDTSDLDAIAKDVFQHSQSRTDDKVIRFKRAIGYYSATSKPMSFHPPHYLAARPGPFGMPGMVPPHVPPQMLNIPQTSLQAKPVAPQVPSPGGAPGQGPYPYSLSEPAPLTLDTSGKNLTEQNSYSNIPHEGKHTPLYERSSPINPAQSGSPNHVDSAYFPGSSTSSSSDNDEGSGGATNHISGNKIGWEKTGSHSEPQARGDPGDQTKAEGSSTASSGSQLAEGKGSQMGTVQPIPCLLSMPTRNHMDITTPPLPPVAPEVLRVAEHRHKKGLMYPYIFHVLTKVLSKGPWSGFCYLMSGHSYGCFVLLSFFEPFFCLTNLLETKFTFPFLNIE

SEQ ID NO: 820238 - protein, 1147 aa, Homo sapiens
MVNRAFSLTRWVSGWFLVLSMPLQNLTLVFQIGLKNDLSVGGFVVFFETLLLTEQLLEIFFTGSMGASLAKPCACRLHVLGSSCPATACRLHPAPLQRFLAALAKACFGGNIELFVFFNGALEKARLHEWVKRQGNERQTAQQIVSHVQNKGTPPPKVWFLPPVCMAHCIRLALIRFHVKVAQSIEDHHQEVIGFCRENGFHGLVAYDSDYALCNIPYYFSAHALKLSRNGKSLTTSQYLMHEVAKQLDLNPNRFPIFAALLGNHILPDEDLASFHWSLLGPEHPLASLKVRAHQLVLPPCDVVIKAVADYVRNIQDTSDLDAIAKDVFQHSQSRTDDKVIRFKRAIGYYSATSKPMSFHPPHYLAARPGPFGMPGMVPPHVPPQMLNIPQTSLQAKPVAPQVPSPGGAPGQGPYPYSLSEPAPLTLDTSGKNLTEQNSYSNIPHEGKHTPLYERSSPINPAQSGSPNHVDSAYFPGSSTSSSSDNDEGSGGATNHISGNKIGWEKTGSHSEPQARGDPGDQTKAEGSSTASSGSQLAEGKGSQMGTVQPIPCLLSMPTRNHMDITTPPLPPVAPEVLRVAEHRHKKGLMYPYIFHVLTKVQHKLKRGEIKIAVSIEDEANKDLPPAALLYRPVRQYVYGVLFSLAESRKKTERLAFRKNRLPPEFSPVIIKEWAAYKGKSPQTPELVEALAFREWTCPNLKRLWLGKAVEDKNRRMRAFLACMRSDTPAMLNPANVPTHLMVLCCVLRYMVQWPGARILRRQELDAFLAQALSPKLYEPDQLQELKIENLDPRGIQLSALFMSGVDMALFANDACGQPIPWEHCCPWMYFDGKLFQSKLLKASREKTPLIDLCDGQADQAAKVEKMRQSVLEGLSFSRQSHTLPFPPPPALPFYPASAYPRHFGPVPPSQGRGRGFAGVCGFGGPYGETVATGPYRAFRVAAASGHCGAFSGSDSSRTSKSQGGVQPIPSQGGKLEIAGTVVGHWAGSRRGRGGRGPFPLQVVSVGGPARGRPRGVISTPVIRTFGRGGRYYGRGYKNQAAIQGRPPYAASAEEVAKELKSKSGESKSSAMSSDGSLAENGVMAEEKPAPQMNGSTGDARAPSHSESALNNDSKTCNTNPHLNALSTDSACRREAALEAAVLNKEE

SEQ ID NO: 820239 - protein, 1076 aa, Homo sapiens
MGASLAKPCACRLHVLGSSCPATACRLHPAPLQRFLAALAKACFGGNIELFVFFNGALEKARLHEWVKRQGNERQTAQQIVSHVQNKGTPPPKVWFLPPVCMAHCIRLALIRFHVKVAQSIEDHHQEVIGFCRENGFHGLVAYDSDYALCNIPYYFSAHALKLSRNGKSLTTSQYLMHEVAKQLDLNPNRFPIFAALLGNHILPDEDLASFHWSLLGPEHPLASLKVRAHQLVLPPCDVVIKAVADYVRNIQDTSDLDAIAKDVFQHSQSRTDDKVIRFKRAIGYYSATSKPMSFHPPHYLAARPGPFGMPGMVPPHVPPQMLNIPQTSLQAKPVAPQVPSPGGAPGQGPYPYSLSEPAPLTLDTSGKNLTEQNSYSNIPHEGKHTPLYERSSPINPAQSGSPNHVDSAYFPGSSTSSSSDNDEGSGGATNHISGNKIGWEKTGSHSEPQARGDPGDQTKAEGSSTASSGSQLAEGKGSQMGTVQPIPCLLSMPTRNHMDITTPPLPPVAPEVLRVAEHRHKKGLMYPYIFHVLTKGEIKIAVSIEDEANKDLPPAALLYRPVRQYVYGVLFSLAESRKKTERLAFRKNRLPPEFSPVIIKEWAAYKGKSPQTPELVEALAFREWTCPNLKRLWLGKAVEDKNRRMRAFLACMRSDTPAMLNPANVPTHLMVLCCVLRYMVQWPGARILRRQELDAFLAQALSPKLYEPDQLQELKIENLDPRGIQLSALFMSGVDMALFANDACGQPIPWEHCCPWMYFDGKLFQSKLLKASREKTPLIDLCDGQADQAAKVEKMRQSVLEGLSFSRQSHTLPFPPPPALPFYPASAYPRHFGPVPPSQGRGRGFAGVCGFGGPYGETVATGPYRAFRVAAASGHCGAFSGSDSSRTSKSQGGVQPIPSQGGKLEIAGTVVGHWAGSRRGRGGRGPFPLQVVSVGGPARGRPRGVISTPVIRTFGRGGRYYGRGYKNQAAIQGRPPYAASAEEVAKELKSKSGESKSSAMSSDGSLAENGVMAEEKPAPQMNGSTGDARAPSHSESALNNDSKTCNTNPHLNALSTDSACRREAALEAAVLNKEE

SEQ ID NO: 820240 - protein, 1094 aa, Homo sapiens
MVNRAFSLTRWVSGWFLVLSMPLQNLTLVFQIGLKNDLSVGGFVVFFETLLLTEQLLEIFFTGSMGASLAKPCACRLHVLGSSCPATACRLHPAPLQRFLAALAKACFGGNIELFVFFNGALEKARLHEWVKRQGNERQTAQQIVSHVQNKGTPPPKVWFLPPVCMAHCIRLALIRFHVKVAQSIEDHHQEVIGFCRENGFHGLVAYDSDYALCNIPYYFSAHALKLSRNGKSLTTSQYLMHEVAKQLDLNPNRFPIFAALLGNHILPDEDLASFHWSLLGPEHPLASLKVRAHQLVLPPCDVVIKAVADYVRNIQDTSDLDAIAKDVFQHSQSRTDDKVIRFKRAIGYYSATSKPMSFHPPHYLAARPGPFGMPGMVPPHVPPQMLNIPQTSLQAKPVAPQVPSPGGAPGQGPYPYSLSEPAPLTLDTSGKNLTEQNSYSNIPHEGKHTPLYERSSPINPAQSGSPNHVDSAYFPGSSTSSSSDNDEGSGGATNHISGNKIGWEKTGSHSEPQARGDPGDQTKAEGSSTASSGSQLAEGKGSQMGTVQPIPCLLSMPTRNHMDITTPPLPPVAPEVLRVAEHRHKKGLMYPYIFHVLTKGEIKIAVSIEDEANKDLPPAALLYRPVRQYVYGVLFSLAESRKKTERLAFRKNRLPPEFSPVIIKEWAAYKGKSPQTPELVEALAFREWTCPNLKRLWLGKAVEDKNRRMRAFLACMRSDTPAMLNPANVPTHLMVLCCVLRYMVQWPGARILRRQELDAFLAQALSPKLYEPDQLQELKIENLDPRGIQLSALFMSGVDMALFANDACGQPIPWEHCCPWMYFDGKLFQSKLLKASREKTPLIDLCDGQADQAAKVEKMRQSVLEGLSFSRQSHTLPFPPPPALPFYPASAYPRHFGPVPPSQGRGRGFAGVQPIPSQGGKLEIAGTVVGHWAGSRRGRGGRGPFPLQVVSVGGPARGRPRGVISTPVIRTFGRGGRYYGRGYKNQAAIQGRPPYAASAEEVAKELKSKSGESKSSAMSSDGSLAENGVMAEEKPAPQMNGSTGDARAPSHSESALNNDSKTCNTNPHLNALSTDSACRREAALEAAVLNKEE

SEQ ID NO: 820241 - protein, 1140 aa, Homo sapiens; identical to SEQ ID NO: 820236

SEQ ID NO: 820242 - protein, 1126 aa, Homo sapiens; identical to SEQ ID NO: 820235

SEQ ID NO: 820243 - protein, 895 aa, Homo sapiens
SRVSPAEAFTGYLSMPLRNHILPDEDLASFHWSLLGPEHPLASLKVRAHQLVLPPCDVVIKAVADYVRNIQDTSDLDAIAKDVFQHSQSRTDDKVIRFKRAIGYYSATSKPMSFHPPHYLAARPGPFGMPGMVPPHVPPQMLNIPQTSLQAKPVAPQVPSPGGAPGQGPYPYSLSEPAPLTLDTSGKNLTEQNSYSNIPHEGKHTPLYERSSPINPAQSGSPNHVDSAYFPGSSTSSSSDNDEGSGGATNHISGNKIGWEKTGSHSEPQARGDPGDQTKAEGSSTASSGSQLAEGKGSQMGTVQPIPCLLSMPTRNHMDITTPPLPPVAPEVLRVAEHRHKKGLMYPYIFHVLTKGEIKIAVSIEDEANKDLPPAALLYRPVRQYVYGVLFSLAESRKKTERLAFRKNRLPPEFSPVIIKEWAAYKGKSPQTPELVEALAFREWTCPNLKRLWLGKAVEDKNRRMRAFLACMRSDTPAMLNPANVPTHLMVLCCVLRYMVQWPGARILRRQELDAFLAQALSPKLYEPDQLQELKIENLDPRGIQLSALFMSGVDMALFANDACGQPIPWEHCCPWMYFDGKLFQSKLLKASREKTPLIDLCDGQADQAAKVEKMRQSVLEGLSFSRQSHTLPFPPPPALPFYPASAYPRHFGPVPPSQGRGRGFAGVCGFGGPYGETVATGPYRAFRVAAASGHCGAFSGSDSSRTSKSQGGVQPIPSQGGKLEIAGTVVGHWAGSRRGRGGRGPFPLQVVSVGGPARGRPRGVISTPVIRTFGRGGRYYGRGYKNQAAIQGRPPYAASAEEVAKELKSKSGESKSSAMSSDGSLAENGVMAEEKPAPQMNGSTGDARAPSHSESALNNDSKTCNTNPHLNALSTDSACRREAALEAAVLNKEE

SEQ ID NO: 820244 - protein, 1140 aa, Homo sapiens; identical to SEQ ID NO: 820236

SEQ ID NO: 820245 - protein, 767 aa, Homo sapiens [sequence omitted]

SEQ ID NO: 820246 - protein, 562 aa, Homo sapiens
LGAYEKLVYKEAVRSEFRDIAKGEIKIAVSIEDEANKDLPPAALLYRPVRQYVYGVLFSLAESRKKTERLAFRKNRLPPEFSPVIIKEWAAYKGKSPQTPELVEALAFREWTCPNLKRLWLGKAVEDKNRRMRAFLACMRSDTPAMLNPANVPTHLMVLCCVLRYMVQWPGARILRRQELDAFLAQALSPKLYEPDQLQELKIENLDPRGIQLSALFMSGVDMALFANDACGQPIPWEHCCPWMYFDGKLFQSKLLKASREKTPLIDLCDGQADQAAKVEKMRQSVLEGLSFSRQSHTLPFPPPPALPFYPASAYPRHFGPVPPSQGRGRGFAGVCGFGGPYGETVATGPYRAFRVAAASGHCGAFSGSDSSRTSKSQGGVQPIPSQGGKLEIAGTVVGHWAGSRRGRGGRGPFPLQVVSVGGPARGRPRGVISTPVIRTFGRGGRYYGRGYKNQAAIQGRPPYAASAEEVAKELKSKSGESKSSAMSSDGSLAENGVMAEEKPAPQMNGSTGDARAPSHSESALNNDSKTCNTNPHLNALSTDSACRREAALEAAVLNKEE

SEQ ID NO: 820247 - protein, 340 aa, Homo sapiens [sequence omitted]
